United States Patent Application Publication US 2011/0183924 A1 - sequence listing, part 233

SEQ ID NO: 624742 - DNA, 456 bp, Homo sapiens
ctatttaaaggagggcagatgaatggaaagcaaagtagcaattgctttgcctctggctactgccagtcagtattcagaacttctgaaagacaatagcctttcatcctatagctttgaattaagggaaataatcaattcatctccctgtttaccatgttaataaaaaaagaaaggatccagaaggcaagttatcccccaaaagttatacagtttccccccaagtaattttcagtttacctccattatttttcagtgccagattatggatttctacattcctaatcagactctatttttgagcaacattgtctacatgtcttataaacctgcacactgtttcatatgtgtgtgaagttcagagagagatttcatcttctctttaggttttgctgcttagttaaagtcatgtgagacaactttgattgcgtttttattagttctgtttcacatttggcg

SEQ ID NO: 624743 - DNA, 967 bp, Homo sapiens
agatatactgtaaagaaactatgccatatatgagggccgtaaataatgtccataaacatgaggtgtgcaataaccagaatctgaacgttatatacatttttatcaattagaatggaacatattttcaaaggatttataactattcaatagttaaaatggacacactagatctatatatcaacataggaagctcttgaaaattaattcttagtaaaattggcaatttccattacatataaaatttgaaaatacaaaataataccatgaataatttgggagcatattgatatatagcaaatagcaaatgtattgaatatcgatgggaacgaatcagaataatcgttactctaggaaggattctgattgcctctgggatggtgtgcaaaaatgttttaatatctttagatttcttaatatttctcaagcaaatataacaaaatcttcccatcttttgtagtcccaaaattaggtatatgtacctttgttgaattattatctgatctttcttaaatttatattaacaaataaaaaatataaactaaaaaataatttagcactaaactaaaaaaaatttagacaacggtactaaactgatttatgaatgtctttattattccatcactaggaaacagcaggcttgctatttatgttctggttactctgatgggtcctgagaatggcagtatttctgcaattttcacccttttttccctttacctagtggaaatcttcgtttggcagtatcttacttggtctccctcaaggcttacagattctgcacaactggttgggcaccatgtctattattgcaccgcggaaggtaataaactgtaataacataatatataatacccagattgctcttgaccaaaacgaaacaataagcgtacgattcaaaaaaactgtagatacagtacatacgagtacgtactaaatatgctgccactcttcagaaaaaccacacaca

SEQ ID NO: 624744 - DNA, 243 bp, Homo sapiens
tcagagagatgctgaaactgtatggcagcatagaacagaggtgtgacaatcagaggaaagtatatgcatattattctaagaggtctgcctggtctgggaaaacaacattgtctcgaatctgcttggtcgaatcgatggttgtccactgatactatttaccatcaagatgtacaggttatgttatcaacttggtgatgcccatatggaaccagaacagtggttcgttttgggctaagtgtccca

SEQ ID NO: 624745 - DNA, 195 bp, Homo sapiens
gcgtacgggacatgactatacttattgcttctatgatgtggactatgaacaagaacgctaaaggttccaactacgtggagaaacaggataatgatggtggcacagaaattcctggatgctggtgcacagaactcaagcttagactgtagctagccggcaaaatcctttagaccagtgaacttctctagattcttc

SEQ ID NO: 624746 - DNA, 931 bp, Homo sapiens
tcagcaccggtagaccagtgggggcccaaggcgtcgttggcgcccactcggcgcaaaaagatgagtcgggcgagacgccggtgtcctgtcggcgggagccctagccgtagcactgcccccacctcccgttttgatagtcccgcaactccgggatgaagctgctgccgcgatcgaccgacagtgtaaggctggtgggagacgcagatggccccctgggggtatgccaccctaagggggcgaccacgcacggggctccgcctacgcggaggaaaaacggcctggtgtacgacccctgaggcggccctcacttcccacgaatccgcctgccgtgtcatgtggaacgggccgcaaagccaccttggcgccccaacaaaagtggtgggctatcagacattgtgcgctgacgcggagtaataatgtctgaagctcccggtcccagacgcctatcttatacataccacggcgctcactccaataaagcttgtttcaatattaaagataccctcttgttcttcagggactctcgcattagtgtcatcgccccaaggtgcaccacctgtatttagcacgcgcaccttgtaggtgggccaaaagggtgcttgctcgccgctcgtaaaatttgtacaaatgacgctgcgttgttgggggaatcaattcgcctccgggccataagttgttgcgaaacccccgggcgcaagcacaaacaagcgcgtcaccccgtctcttgtgtcaatacccccttgattggggagcacaaatgtttagcgcgagccctcggtggtgctcggagacagcataggcacattatgacttggcttctgcagacatgtgtcatggctatgcccccaaggccccctggtaggggagaaccccttttcgagacccacgcccccctggtggttgtacccggcccacttttaacccccccgcg

SEQ ID NO: 624747 - DNA, 151 bp, Homo sapiens
  misc_feature (44)..(44): n is a, c, g, or t
aagcagtggtatcaacccagagtgcccattacggccggggctantggtgtgaatgagtaggcaagatggaacagaaaactaacgcagtatggagcataagggagaagaaggagaagaaaacggagaaagaaggcacacgagaacacgcaac

SEQ ID NO: 624748 - DNA, 758 bp, Homo sapiens
  misc_feature (6)..(6): n is a, c, g, or t
  misc_feature (61)..(61): n is a, c, g, or t
  misc_feature (156)..(156): n is a, c, g, or t
  misc_feature (183)..(183): n is a, c, g, or t
  misc_feature (199)..(199): n is a, c, g, or t
  misc_feature (201)..(201): n is a, c, g, or t
  misc_feature (205)..(205): n is a, c, g, or t
  misc_feature (211)..(211): n is a, c, g, or t
  misc_feature (219)..(219): n is a, c, g, or t
  misc_feature (236)..(236): n is a, c, g, or t
  misc_feature (248)..(248): n is a, c, g, or t
  misc_feature (251)..(252): n is a, c, g, or t
  misc_feature (261)..(261): n is a, c, g, or t
  misc_feature (297)..(297): n is a, c, g, or t
  misc_feature (484)..(484): n is a, c, g, or t
  misc_feature (490)..(490): n is a, c, g, or t
  misc_feature (496)..(499): n is a, c, g, or t
  misc_feature (527)..(527): n is a, c, g, or t
  misc_feature (661)..(665): n is a, c, g, or t
  misc_feature (739)..(739): n is a, c, g, or t
aatatncattaattaatgttgccctaagttttatcagttaaaatttttttttaattttttnggaagaggctttaacatgagaaatacaatatatcccagtccattatctacatattcttcattttggccatgaggtcttccaagctttcaccagantcttccactgttaactcagtgacagantcttcttgcttttttngnattntgtatnccactgtnattccttcaggtatttntttttttttttntgnnatttttttnagttcctcttctgaaacctcagataccagctcaatnccccattcattatcttcatggattatctcttcctcttcttgtataacctcttgtttaggcagtgctgctacctttttcttatattcctcctgctgcttcctgcaatttctgtcatcacactgaggatttggcttcatggacatagtaggaaaaaaatcctgcattgcattgtatccttgtgttaaanctttcngttccnnnntttttcagaaacttttacacgttttgtnctaagatcccagcaaccacacccatagtggtaggaagactggctgcacaaacaccttctcgtttcagagtcttttcatcaatatttgcagcaactacaagtggtggagcacacgcaaaacaagcagattctccnnnnnttataagctgtatatgccctgaaactgcattttcactgaccccagattccatccatgtttgtccagttcattanagctgtattattgtcatcg

SEQ ID NO: 624749 - DNA, 351 bp, Homo sapiens
aggagctgctctagatgatcccgttggtccgatcactgtactatatgcctgtttttcaatctacctgagcaattgtggcatttttttaatctactttttttttttaagaggtgagggtcttgctatattgctcaggctgacatcaaactcctggactcaagcactctttctgcctcagcctcctcagtagctgggtattatggtatgtgtacatatttacttttagagacagggtctcgttctgttgtccaggctggactacagtggtataatcatggctcactgcagcctccaacacctgggctcaagcaatcctcccacctcagcctcctgagtagctagggactacag

SEQ ID NO: 624750 - DNA, 831 bp, Homo sapiens
gacttgtgagcggccatcttggttctgccctgacagattctcctatcggggtcacagggacgctaagattgctacctggactttcgttgaccatgctgtcccgggtggtactttccgccgccgccacagcggccccctctctgaagaatgcagccttcctaggtccaggggtattgcaggcaacaaggacctttcatacagggcagccacaccttgtccctgtaccacctcttcctgaatacggaggaaaagttcgttatggactgatccctgaggaattcttccagtttctttatcctaaaactggtgtaacaggaccctatgtactcggaactgggcttatcttgtacgctttatccaaagaaatatatgtgattagcgcagagaccttcactgccctatcagtactaggtgtactggtctatggaattcaaacaatatggtccctttgttgcagactttgctgataaactcaatgagcaaaaacttgcccaactagaagaggcgaagcaggcttccatccaacacatccagaatgcaattgatacggagaagtcacaacaggcactggttcagaagcgccattaccttttgatgtgcagaggaattacattgctatgggttgggaagttacttaccggggaacgactgtattggagtatatagggaaggtaaagaatcgcctgggactatcatatttctgtgcagaacattgatgcgttcgaaaggaccagaacgcatgataattgggtggagaagcccgtggtgcaaaggttcccacacggcaagaaagggaaccattgccaagggcttggcaactaaagcgttgga

SEQ ID NO: 624751 - DNA, 548 bp, Homo sapiens
  misc_feature (548)..(548): n is a, c, g, or t
ttgcgaggcttctctaccttagatgactgcttctgagccccttctcgcaagtctcggagaggtcatccatgtcctcccaccccaaactttccggaggcgagccgtagcccagggagcacccaggaaaattccctggtatctgcctcatcacccaaagccagaggtgggcagagtacggccgggtgagcccgggtgaagatggcctctcagacccgtgcagagatgacttctgatgagtgccagccagcagaggcccctcgtgggggacatcggaagcaaccacagagacccacacccgatcgggggagaaggacaggagctgggacaggccaagagctatctccctgggctgagagaagaccggggaaaaagggagtactgggagccaggaaggaagaagagggatgtccagtgctggtaaaggagaagtggggcctgaagaagttagtcctcagtcaggagcagaagaccatgtggtgggatgggattgactccatccctgagagtgtgcacctcaaaggtggggagcgaatttccaagaagtgtgn

SEQ ID NO: 624752 - DNA, 237 bp, Homo sapiens
gtatttagccggtttttgtttttttttcaaggcgggcccaagccccccgactatgcagggccccaagttatgctatgctatagattatgtgccctatcatatgattagcggcttttgttttacttttgtaagccggcttataaaaccccccctctgtttttgttttgggctcagctttttggatgcaaatcccctgagccgggggggccctaaaataaacaatcctcctgttttcca

SEQ ID NO: 624753 - DNA, 816 bp, Homo sapiens
cgccgtatgttgtgtttgttttttattgttgtcaagggagctgattgctacttgatttgttgatcatgctgtcctgtttgttttatcttttctggtcgtcgtcatagtgtttctcttcttcttatataatgctttctttctctatgtgtccaggggtattgcaggcaacaaggacctttcatacagggcagccacaccttgtccctgtaccacctcttcctgaatacggaggaaaagttcgttatggactgatccctgaggaattcttccagtttctttatcctaaaactggtgtaacaggaccctatgtactcggaactgggcttatcttgtacgctttatccaaagaaatatatgtgattagcgcagagaccttcactgccctatcagtactaggtgtactggtctatggaattcaaacaatatggtccctttgttgcagactttgctgataaactcaatgagcaaaaacttgcccaactagaagaggcgaagcaggcttccatccaacacatccagaatgcaattgatacggagaagtcacaacaggcactggttcagaagcgccattaccttttgatgtgcagaggaattacattgctatgggttgggaagttacttaccggggaacgactgtattggagtatatagggaaggtaaagaatcgcctgggactatcatatttctgtgcagaacattgatgcgttcgaaaggaccagaacgcatgataattgggtggagaagcccgtggtgcaaaggttcccacacggcaagaaagggaaccattgccaagggcttggcaactaaagcgttgga

SEQ ID NO: 624754 - DNA, 209 bp, Homo sapiens
ttcttcgtaagtacatcttaaagctgtcaagatggttagcagaccttggaagaaaaactaaccatcagcattacctcgttgcgaaatgccaccattatcaatcataaagaggtattgatcattctaaagaacgcttgtaccgcttgttggaagcagatgttaatattaaactagtgaagcaactaagagaaatgtaagctcattgacta

SEQ ID NO: 624755 - DNA, 406 bp, Homo sapiens
  misc_feature (38)..(38): n is a, c, g, or t
  misc_feature (130)..(130): n is a, c, g, or t
ataattatgggtaaccaggagttcacaaatgtgaatancatgaataaattaaatgcttggatgaggaacagaatatatacattagtttcaaaattcctctctaaaaatacttattaaaaagtggccaggnctggtggcttacacctgtaatcctagcactgtgggaggctgaggcagacagatcacttgaggtcaggagttggagaccagcctggccaacatagtgaaaccccatctctactaaaaatacaaaaattagccgggcatggtgatggatgcctgtaatcccagctacccaggaggctgaggcaggagaatcgcttgaacctgggaggcggaggttgcagtgagctgagatcacgccaatgcactccagtttggcaacagagtgagactccatcgcaaa

SEQ ID NO: 624756 - DNA, 317 bp, Homo sapiens
  misc_feature (315)..(315): n is a, c, g, or t
cttaaaatctcaagttcgctttgtggcccctctcttggggtagaaattccttcactggaatagacatgattttacatttgaggctatgaatttcatttctgaccctcatcccaattactccatcttactcatttccaggcaattattcccatggacataaatctgacctttggtgacagtcacccaggataacgcactatacactcattggtgcagtgggctggcagtgccaggatgaggagtaacatggagtgagttaaagaaagcctgccagacaccacatgccaccaactgctgtgaatggtgttcacacanct

SEQ ID NO: 624757 - DNA, 804 bp, Homo sapiens
  misc_feature (744)..(744): n is a, c, g, or t
gtgtttaacaaggagggatgttcaggacaaaccagaaagtccaagcatgtcatgaacatggtgtaagtcatgataagatttatatatatatatacacacacacacacacaccccaaaagcttttatataatcaagttgtcatattattattaagttgtggttgcttagggaagaaagagctaatttttaaaaaatcaaggttattacatccatgtatcttcctgtgtatgcttttaaagtccttgtaacattgagttacagggctttaactcctgtgtctgaaaaatcacaaacactgatgacaatcaaagcctcatcttaaggccccgtagaagatgccaatcaaaataaagtgcattcctgaggcactaggcaagaaattaaagctattcaactcctcaaggcccaggactattgcggaagaggtgggcgcgtaagattgtaagggccgattttgaaagatccagtaagttcagtttctctatgaactaatcattcaagtcaaaggcacagtgatgcaaaatcagtatatggacccctgtgtctgattagcaaggttttcttgaagcattaaccaaatccttcataaaggttataaaaggcttatggaagttatattttataactcaagattaaatcttatagtggtttacaaaattgtgaaaatcaagtgtgattggttcaggctgttaaatagggcttcttgtttagaaagttaagtcacctctctcaaagagtgaaggnttgcgcttttttggaaatccttgaatttatcactgtggattaaataaatgactttacgag

SEQ ID NO: 624758 - DNA, 333 bp, Homo sapiens
  misc_feature (284)..(284): n is a, c, g, or t
  misc_feature (331)..(331): n is a, c, g, or t
tcatcaggagagagaactggagttattctcagagcagtgagaagcactggaaagtagtttttttgtttttctgtttttgagacagagtctagctctgtcacccaggcagactggagtggtgcaatcttgggtcaatggaaacttttgcttcccaggttcaagcgattctcctgccttagcttcctgagtagctgggactacaggcacgtgccaccatgcccagctgatttttgtacttttagtagaaacggggtttcactaatgttggctggtcttgaactccntgacatcaagtgatccgcccaccttcggcctcccagaagtactgggnat

SEQ ID NO: 624759 - DNA, 122 bp, Homo sapiens
tagaggatccccgtaacccctatcggtacacttcctacgtgcacaacatatgacgcactctcccctgtaagcctctacacaacatcatttatgtcaccaatgaccatgagactaagccagga

SEQ ID NO: 624760 - DNA, 309 bp, Homo sapiens
gtatgaaatgtgtatgatagttctagggcagtgagatgagtagtaaatgtataatgagcctagggtgagtgagtgtcaattagtgcgatgagtaggggaagggagcctactaggatgtagcacataggacgtatgtgcctgcgtacaggcatactggcaggttgcctcatcgggtgatgatagccaaggtggggatcagtgtggttccgaacaacatctcaaatatgcatcagttctgtggctgtgaatgttatcattcaggcgatttgtagggagcattaatatacagaggtcagcgtttttttctgt

SEQ ID NO: 624761 - DNA, 289 bp, Homo sapiens
  misc_feature (49)..(49): n is a, c, g, or t
ggggttggggtgggctggtctgggctggcacacttggagagaagctttncctatggaggtgacatggcacggaccatgtgtgtgtgcttgggggtgtaaatttgtgtagatggttgtgtttggagggcccaagctgttcacatacaccgggtggaaggatgctgtgtgcacgtaggtggtgtttacactgggttgggttcattagaaactgtgttgcacgtgagcacacaaaaaaaattctgaaggtgtttgagacccttttcagtgtctggacctgaacaggaagtgc

SEQ ID NO: 624762 - DNA, 490 bp, Homo sapiens
  misc_feature (16)..(16): n is a, c, g, or t
  misc_feature (75)..(75): n is a, c, g, or t
  misc_feature (77)..(77): n is a, c, g, or t
  misc_feature (80)..(80): n is a, c, g, or t
  misc_feature (84)..(84): n is a, c, g, or t
  misc_feature (87)..(87): n is a, c, g, or t
  misc_feature (107)..(107): n is a, c, g, or t
  misc_feature (131)..(131): n is a, c, g, or t
  misc_feature (140)..(140): n is a, c, g, or t
  misc_feature (160)..(160): n is a, c, g, or t
  misc_feature (214)..(214): n is a, c, g, or t
  misc_feature (224)..(224): n is a, c, g, or t
  misc_feature (236)..(236): n is a, c, g, or t
  misc_feature (239)..(239): n is a, c, g, or t
  misc_feature (248)..(248): n is a, c, g, or t
  misc_feature (264)..(265): n is a, c, g, or t
  misc_feature (277)..(277): n is a, c, g, or t
  misc_feature (331)..(336): n is a, c, g, or t
  misc_feature (347)..(347): n is a, c, g, or t
  misc_feature (354)..(354): n is a, c, g, or t
  misc_feature (389)..(389): n is a, c, g, or t
  misc_feature (405)..(405): n is a, c, g, or t
  misc_feature (436)..(436): n is a, c, g, or t
  misc_feature (438)..(447): n is a, c, g, or t
  misc_feature (449)..(451): n is a, c, g, or t
  misc_feature (455)..(455): n is a, c, g, or t
  misc_feature (463)..(464): n is a, c, g, or t
  misc_feature (466)..(466): n is a, c, g, or t
  misc_feature (470)..(473): n is a, c, g, or t
  misc_feature (485)..(486): n is a, c, g, or t
  misc_feature (488)..(489): n is a, c, g, or t
aggtgagttggttaancgcactgcagtccgcggggcgctacgttgctttcacacatacctgctgctgtggcccananctngaangancctttagtcataggacggcnaaggggagaatactgtgtgaagtntggaattanagtgggtcttggtgtcacangtgagggtgccggtgaagacaggctggccccagctttgcaccatctaggctganggcctttggnccactcctaggngtnaggcctggntccattagctcctggnnctctggtctggnccactccctccttaaccaagcaggtccaaggtcaagaatggcacaagatcagcnnnnnnggggctttttntcctctncaacctggtcccctggtcagctacagtggcaaaangcaacttggtaaattnctgctttctccagtcttaagggcactggctntnnnnnnnnnntnnnttgntttggggnntntgcnnnngttttttttttnntnnt

SEQ ID NO: 624763 - DNA, 206 bp, Homo sapiens
  misc_feature (105)..(105): n is a, c, g, or t
ccctacatcttccttacaactgcaactaagcttttacccaatcagtagagcaaagctgcttttgaaaaggttactcttgggccgggcgcggtggctcacacctgntaatcccagcactttgggaggccgaggcgggtggatcacgaggtcaggagatcgagaccaacctggctaacatggtgaaaccccgcctctactaaaaatac

SEQ ID NO: 624764 - DNA, 686 bp, Homo sapiens
ggtttctcgccaccggcggcgggatgggccgcaactcaccggagcaccgccgtcggtgccctccccgtccccctccgcggcggcatggcccccaggatatggcctcgctgccgatccccgacgagctgctcgctgaaatcttcgttcgcctgcccaccccaaccgacctcgtccgcgcctccgccgcctgcgtctccttccgccgcgtcgtcgccgaccgctccttcctcaggcagttccgcaagctccacgccccgcccctcctcggcttcctcggtccgcataccggcttcgaccccgcggagcggcctcacccctccgcatctgcggccaccgccgtcgccctcgccgccgacttctccttctcgttccttccggcccccgaccccgctcaccgctgggttgtctgggacgtccgcgacggccgggtcctcctccgcggaatgcccctggaaaattctcatggagtcgttttcacagagacggtggtgtgcgaccctttgcaccggaggtacctcatgcttccctcaatccctgacgaccttgcagctagcgtggaggggctacgcccacgttcatgcgagattttccttgttcccgaaggcggcgatgagtcaacaactgctgaagagacgtcattcagagtgatctgggtggggcactatgaagataagctcatcaccgta

SEQ ID NO: 624765 - DNA, 332 bp, Homo sapiens
gtgctttcgtaattttatatctgctgctttatgcttctgtttattttcattctttccaatgtccacattctagtaaatttgaatattttaatccaagtttatatactatttaatattgcttgtatagtttagtatttttaagactcaaaaaggtttacagaaagaagaaaaagatcaacatgttattagtcatttaaagatcattttgaaatctttgacctttatattttaatgaataaaatattagtagttattagtataaaataatttatgtcttttggacttagcatccagtatttcttttttaataaagaaaataattattctcttgc

SEQ ID NO: 624766 - DNA, 446 bp, Homo sapiens
  misc_feature (4)..(4): n is a, c, g, or t
  misc_feature (64)..(64): n is a, c, g, or t
  misc_feature (129)..(129): n is a, c, g, or t
  misc_feature (149)..(149): n is a, c, g, or t
  misc_feature (171)..(171): n is a, c, g, or t
  misc_feature (179)..(179): n is a, c, g, or t
  misc_feature (193)..(193): n is a, c, g, or t
  misc_feature (200)..(200): n is a, c, g, or t
  misc_feature (212)..(212): n is a, c, g, or t
  misc_feature (217)..(219): n is a, c, g, or t
  misc_feature (224)..(224): n is a, c, g, or t
  misc_feature (229)..(229): n is a, c, g, or t
  misc_feature (237)..(239): n is a, c, g, or t
  misc_feature (246)..(247): n is a, c, g, or t
  misc_feature (250)..(250): n is a, c, g, or t
  misc_feature (262)..(262): n is a, c, g, or t
  misc_feature (265)..(265): n is a, c, g, or t
  misc_feature (268)..(268): n is a, c, g, or t
  misc_feature (273)..(273): n is a, c, g, or t
  misc_feature (275)..(275): n is a, c, g, or t
  misc_feature (278)..(278): n is a, c, g, or t
  misc_feature (283)..(283): n is a, c, g, or t
  misc_feature (287)..(288): n is a, c, g, or t
  misc_feature (290)..(290): n is a, c, g, or t
  misc_feature (299)..(299): n is a, c, g, or t
  misc_feature (303)..(303): n is a, c, g, or t
  misc_feature (322)..(322): n is a, c, g, or t
  misc_feature (326)..(326): n is a, c, g, or t
  misc_feature (328)..(328): n is a, c, g, or t
  misc_feature (331)..(332): n is a, c, g, or t
  misc_feature (335)..(335): n is a, c, g, or t
  misc_feature (337)..(341): n is a, c, g, or t
  misc_feature (346)..(346): n is a, c, g, or t
  misc_feature (348)..(348): n is a, c, g, or t
  misc_feature (356)..(356): n is a, c, g, or t
  misc_feature (358)..(358): n is a, c, g, or t
  misc_feature (366)..(366): n is a, c, g, or t
  misc_feature (371)..(371): n is a, c, g, or t
  misc_feature (373)..(373): n is a, c, g, or t
  misc_feature (383)..(383): n is a, c, g, or t
  misc_feature (414)..(414): n is a, c, g, or t
tttntagtatgtcactgatcacttctactagtatagacaaataaatttataaacattattttgnatgtaactaattagcataattttatttaagagttagactgtgttgtcaatactgacatttttggnaatatatagtatagtttaanaataaagcttctgaaccaaaanaaaaaaantgaaccctattccnaccttanaagcaagcaggngaccnnnggcgngccancccattcnnncccgggnngcncgtccctgcggnggnggngtccngnccngtccncccnncntcgcgggcntccnctgccggtcggctgggtcngtgngnggnnggntnnnnnggggngntgtggggngntttggggnggggntngcgggggggnggggggggggggcggtcgggggggtggtggngcgtgtgggcgggggggttgggggtgtggggg

SEQ ID NO: 624767 - DNA, 289 bp, Homo sapiens
cgtcgacgtaaaatgaaggtgtgtgtgtgagagtgtctgtgtgttatgtgtggatgtgttgtgctgtgctttctgtgctgtgctgtgccgtctgtgctgtgctgtgctgtctgtgctgtgctgtgctgtctgtgctgtctgtgctttgctgtctgtgttgtgctgtgctgtctgtgctgtgctgtgctgtctgtgctgtctgtgctgacgagcgttctccggcgtgtgagcgggtaagtgtgtggcaatgtgtacccactgtcgcgcgggctcgagttgaggtcgacgc

SEQ ID NO: 624768 - DNA, 569 bp, Homo sapiens
  misc_feature (281)..(281): n is a, c, g, or t
tcgcgaaacgtattatccgatacaggttttgttttattttttcctgagatggagtttcgctcttgttgccagtgtgagtgcaatgacacgatctgggctcacctgaacctctgcctcccagattcaaacgactctcctgcctcagcctcctgagtagctgggattacaggcatgcgcaaccatgcctggctggtttttggtatttaagtggagatgggttttcgcagttttgtgcagggtggtctcgatctcctgacctcgggtgatccgcccacctcggnctcccaaggtgctgggattgcaggcgtgagccaccgtgcctggcctctattctattttttaaacaattccaaagtcctgcataggttcaaggggagggaaatgggttaccatctcttaagggaacacagcatggttctgcagaagcttatgggtctggaaatatggcggtggctgttactgggaaatatagcgggttaataatagtctctttctctgaatgcagtggttgggacctagaatatgagctttgttatcttttacagatatggctaaattgtctctgaaat

SEQ ID NO: 624769 - DNA, 546 bp, Homo sapiens
caccgggggagcgccccatatgcatgcaacaaatgtggaaaggccttcacccagagctcacacttatttgggcgccagagaacccccaatagggcaaagcgaaagaagaaacagcctccctcatagctctcaagccagttgaagaaaccttgccttttcagcttgaccctgcaatataacatgcacaggcctgcttgtgaatcagggctgaatgtgaaagggaagtattgagtgaggccattccccaaaccaaagggcaactgaggaggctgccccgcccataatgaataaataaaaaaatgagtggggggtttttaccctcctttggaaaaaaaatttccccttcccctgaaattgtttgttcccccccttagtcccttaaaagtgggattaataaaatctgaaaatgttatataatacctttaaaaagcccggtaattaataatttgccctgatattacatccccagtccccccgtatttatgtgtatgaattaaggattaaaaaataatgtggataaataaactattgatctatgtctgtgta

SEQ ID NO: 624770 - DNA, 275 bp, Homo sapiens
tattgggtcgcggtcgaggcgttcgacgagagcggagtctcgcggcgcacgcggccggtacggatccgctaatatgctcctccctggaagagaggggagtcattgggctagcccagccagcccccggtgaacccggccagcttcagccctttgcggatcggcgcgcagccctgcatgcgcttccagacgaagtcgttccgataattcgccgcctggagcaggatcgagccctggtcgatgccgatatggtcggtgtcgtaccagcccttggccgg

SEQ ID NO: 624771 - DNA, 161 bp, Homo sapiens
  misc_feature (3)..(3): n is a, c, g, or t
  misc_feature (34)..(34): n is a, c, g, or t
cgngatcccccacagaaagggcatacagtcttantttaatgcaattacgaatagattgcaccataataaaacatttatcagtttttttatgccaaaaccattccttttgaattagaacagcacaaaatattctaataattgctgctggaaagcattttgct

SEQ ID NO: 624772 - DNA, 385 bp, Homo sapiens
tacgtcgcggaatattttcactatgacaaccccagtcaaatgaacccaccttcaatcaggggtgtaaactgactaagaggtgtttgtgacacaacgtcctttctcctaaggactaagatactaaggtttaaaaacagtaaaggggctgggcgcggtgtctcacgcctataatcccagcactttgggaggtcgaggcgggcggatcacctgaggtccagagtttgagaccagcctgaccaacaaggtgaaacgccatctctattaaaaatacaaaattagctgggcgtggtggcgcatgcctgcaatcccagatactcgggaggctgaggcaggagaatcgctagaacccgtgaggcatagggtgcagagagctgagattgcacca

SEQ ID NO: 624773 - DNA, 201 bp, Homo sapiens
cattcgagctcggcacccatcttccctctctcacggttcataaataaaataactataaagataaaaagctacatacttccctcacaattggcccacaaggaaattccctgtgggccccaaagatctttaccctaaaacagttctgttgaatttctccctagcaattgtacatttatagcttatctttttttttggcggggg

SEQ ID NO: 624774 - DNA, 700 bp, Homo sapiens
  misc_feature (5)..(5): n is a, c, g, or t
  misc_feature (24)..(24): n is a, c, g, or t
  misc_feature (69)..(69): n is a, c, g, or t
  misc_feature (114)..(114): n is a, c, g, or t
  misc_feature (592)..(592): n is a, c, g, or t
  misc_feature (596)..(596): n is a, c, g, or t
tcccnactttggccctactaaccngaggctgaaaagaaatggctcactgaagcattttagattttgaanctttccagatttggggatggctaaacccagtacgtgatgtgacanaatatttcagaatcaaaaaatgtcagaaatccaaaacactttttgtcctaagtcttatgcataagaaatactcaatctgtgtgaactataggcatcaagctctacagcagatctctagaacctccccaccttgcataactgaaactgcacacccatgaacaacttctgattctccccactcccagctcctgggcaaccagcagtctcttctcatattcactctggaatccacttacatgaggtccctagagtagtcgaacccatggaatcattgagtagaatgtccaatgaaagaaaatatttgcaaaacttctctccaaatttgtctcatatccatcaaacacatatggtccatgaggaccagatttccagcagttcattcccaccctttccaccagtcagtgctgcatttgcaaatgtccacatgtatttctggaagatccacatggtcctcacctgccctctgcagaaggagagnaaancttaaagaacccacgacagggaacatgcttctgctccaagccaccagctcttgcctgtcaccttcactcgtttctagatcattccctgcactctgctctatctt

SEQ ID NO: 624775 - DNA, 1060 bp, Homo sapiens
gcggcggcgagcgtggatggagaacgtacctgcccgagctgatggcggagagtgactccctgtgacccctccttcatcagtcactggccctgcggcctggtgataccaagaaataggaatagtttcaaagaaggagaagggacaggatgaagaaatacgtacatcgatgtggtgattaataagaacatgaagctgggacgatgagaaagctgttgactttcccggtaaaacagttgccctaagatgtcaacttgtggtggtggatataccttttggagtccaacgtggccatatactctgaaagcctgatttacatagaagaaaccattgtactaggaaatgtccatactctgtgtggcagatggttccatgaggagacaaggcccaagggaagacagcagttgcaggagaataagtggatgaagcgaatgtgacttaccatctcaaatgactgatctccaatgtacgtcatttgaagtgtttgccccaccatgctgaagcttaatgccaggactcgcgacgaatgcgtcttgggagaggaaacttcataagagagtaccatcaatcgcctagattataattgactgagatctaggtgcaagctgcagctccacggagtttaacatatcctgaatgcgtggtccaggaaaatatgcatatgttccatgtgcttcgagtgaaaggccaccgttgcgtacatgaggtgtaccagccccagtcaatataccatggaagggagaggaagtgacatgcccggccagtggagttgtagtctctaggaaactcccactcccagaggtagtctgtccaccgagggccagtgagtcggggaaccaggacttctcactccagagcagatggtcccccaacttggtcggggctccacgggcccgaacagaacttgggaaactgccttgtgatggatgcgcgcttttgaccaggttttctttataaggttgcccacccaggggggttcttaatcgacgaccaggggctatttcacggcaagggatccaacgcctcgagagggctacaccactgtgtggtgtaacaccattgt

SEQ ID NO: 624776 - DNA, 844 bp, Homo sapiens
gtgaatcccccggcctgaaggatttcgcgccgaagaagcggggggacaaaaatctttttgatttatcatgggatcactaacactggtagcagtaaaattacttttttgttgaccgctgtgttatacataccttcattatgataggatgttttgtcgaacttctttccacgcctctgggggtcatagattagtctttttaagatgcttgatacagcttagagatatcatatatagggagaagactcacgtgtttttataaaatgagagcacctttagaaaattaattatattagttcacaataccaccttgagcatatctctttttttattattgcagacacaaatttgtagaatgtactatattatggtttatttatcagatgggtctacttgttattgctacacatattttattattttttccataggggacatttttctcaatcataacacagatattaattcattaattttgataggtgtgtttatttcttagagtttcacctagttgcacctttcttgtatttagatagctcttttgaggctgatattattctttatgatctgcttatttagcctttagtatagattatatagaaccactatctctctatatggatgaagtgtctaacaatatcatttattattatttgtcaacaaagctagagctactcaacccatatagcaataaatgtggatggtggttatatttttttccgaatattatttatctatctctaccactttattactttgattggacacctctgtgataatttttgtgtgggtcatcgttcaatataacatttattttctccccgcatagttatcttagcttcttttg

SEQ ID NO: 624777 - DNA, 247 bp, Homo sapiens
cattttattttggaaataaaagtatatgttgcaggtaagtctttaggtggtttatcaccagccggcgggactattacaagcagattaattctaaattatactcctactaattctctgcatatagttactaaacaatacgcagaaaatgttttacgtactaaggttactaaagctactaactatataagtggcactttaccacaggagagactcccagcttttggcggagacgtcacttctagcacag

SEQ ID NO: 624778 - DNA, 839 bp, Homo sapiens
taagcaaggaagcgacgggagcttctgaaggaacgtctgaagagagtatcacatgagcgcccctgctgccaccagaggacgcgttcggaagggaagcagcagggaatggaaaatactgaggactcaggctagcacaactaagccgacacaggaacctcagtcctacctacactggaaggagcgcatctcacggtgggaagagtatctgccgtgacagaacgcggggtctgcatgtttgtggatccagcggagagtggcgagactttcttctccgtgtccctctcacctaatgtcaacttgtcattgaagtgtaaagaattgaaaccttgctgacgacaagaacttgagccactatggatgtttactcctcgcacttaagtaggtttgagtcgtgtcccgcatttccgctcccactttactcaccttagtggtgaaaggagaggtagtagcatcttttctacaacgttaaaattgcagaagtagcttatcatgtaaaaaacaacaacaacaacaataacaataaatcgctaagtgtaaatcagttattcgtacccccgtaccaaggatatcagcctgtttttctcccgtttttcgttcctgggaataatcgtgggcttcattcccaaatttctgacagcctctttcctcttctcatgcattgagcttccctgttacgcacgcatgcgtgtgcaggactggctgtgtgcgttggactcggcatccacgtggaagcatgatgttcccattagttactgttggagaaactcaaaccttcaagccctaggtgtagccattttgtcaagtcatcaactgtatttacgtactggcataacagcgaa

SEQ ID NO: 624779 - DNA, 396 bp, Homo sapiens
  misc_feature (44)..(44): n is a, c, g, or t
  misc_feature (48)..(48): n is a, c, g, or t
  misc_feature (98)..(98): n is a, c, g, or t
gtgactctagaggaccctacgtaatatgtaacgatagataagcnctgnaataaaaataatgttttatttccttaagtctttttgttcttttatatatnatttatttaatttttgagatagcatctcactctgctgcccaggctggagtgcagcggtgccatctaggctcactgcaacctctgcctccccggtccaatcaattctcctgcctcagtctcccgagtagccaagactacaggcatgagccaccttgcccggctaatctttgcatttttagtagtaggggtttctccatgctggtcaggctggtcccaaactcctgacctcaggtgatccgcctgtctcggcctcccaaagtgctgggattacaggcgtgagctgccgtgcctggccttg

SEQ ID NO: 624780 - DNA, 203 bp, Homo sapiens
actggcctctgtatctcatggaggaattttaattctgaccagtaatcatctctcctgtcagaggaactacaagaaacaagcaatttggtctgacattgtgcttaatggaatagtggaggatattaccatatccagctggctggatcacgtagctgatactttcaggaagttgcgctgtgagccaggagggcagataaggggca

SEQ ID NO: 624781 - DNA, 1014 bp, Homo sapiens
  misc_feature (251)..(251): n is a, c, g, or t
tcattaatccattgatggatcaatgggttaatgggattcatcatagtgaggggaacgtgtgtctttaatattaggaggatgagactacctcgggccttaactatgtcgtccgatttcctcatcatgtgatgtcctgttgactacactatgtagaacatctactagcatgtttcccgagcgagtcatgataggtccttgagtccaggtatggtcaccatctgtacctttggtacttacgtcagagcctccgntagatctaaagacccatgatgaggaccacgatagagtcgcgggcacgaccatgctattcttcggattcctatctttcatttcgctatccaatgtcttggatctccctacaagacgagttggacttccattaaaatacacgtcaatatcgtccaagatagcgcgttggacctagtccctatgcttggcaaagtcgactgaacggcataaccttcgaacgattattcgggaaggtagtctagcccgatttggaacctagagagagggtctactagtgatttttcgcaagacacatccgttaatttggacagcacacactgatgggcaggacgggctagctttttgaattattgggcaagttgtcagttaatttggcacttgacttggtacaaccccagattggaagctcattaccccaagctccccaaggcaacaaccacgataagaagacactctaattccgaacaaattaacttaaacagaaggtggttaccacggttcttaaggacacccatttctggcaaaccccagactttccagagcacccaggagggccctccgttagggcaaggggtcccttcggggctttctcaagactggggctttccttgcgaagaacatctccataatgcttgaattgcctcttccaattgatgctggtccaaattttcaaaaactgccaattaggaacaccatgcagtcatcactctggtaacttctacccaggttgattgcttcccaaggcacccagaaccataagtgaac

SEQ ID NO: 624782 - DNA, 533 bp, Homo sapiens
gatcccctgcctgctgtcgctactgcctcagctgttaccttcgtctactgatgcaagttctgcaggacctcctgatcatattgattcctgagttactggggttcaaaggtttcgagatactctaaaaataccctacaagctgtaattaaaaaatgaaccagggagaacggatttgaaacacattgttatagatgggagcaatgttgcaattacccatggtctgaaaaagttcttttcttgtcgtggaattgcaattgcagttgaatatttttggaagcttggcaacagaaacatcactgtatttgtccctcagtggagaacaaggcgagatcctaatgtcacagaacagcacttcttaacccagctccaggagctcggaatattatctttaactcctgcccggatggtctttggagaaagaattgcttctcatgatgacaggttgctactacacttagcggacaaaactggtggcataattgtgacaaatgataatttcagagaatttgtgaatgagtcagtctcttggagag

SEQ ID NO: 624783 - DNA, 316 bp, Homo sapiens
agtgaaactctacctccaaaaaaaagaaaagaaaaataactgaggaagacagttttcacagtgggtcaggtgagccctagaattattgaatatcgtcctttaacctatagctatgactctaggttaaagctcctcctcagcttgctccagtcaagagtatctatgtatttgagccatttcctgaaaccagactctagtgtttctgatcaggaccagctcagtctttaagtttctgaagtttgtttgctattttataattatattcgtgaatactgtgcattgaagaaataataaatctattgttgctttaaaaaaa

SEQ ID NO: 624784 - DNA, 259 bp, Homo sapiens
cccgccacctcatacggacggcactagagactaaagtcagtgtcagaatgtaatggtagctggacaaagaacagcaaggacctaaaaaaaaaaaaaaatcaaaacagtatccgggggatagaacgatcaccgcagcaatgagaccagtggagacggagcagaaggcctgcaaggaaagaggcaagaggcaaacaattaatatttcctgggaaaatcagcactgaaatggtccatgaatttcttggcgtacttggggtct

SEQ ID NO: 624785 - DNA, 128 bp, Homo sapiens
  misc_feature (46)..(46): n is a, c, g, or t
ggtcgacggggtgatctaaaacactcatttacagccgggtcttttnctaaattggactttgggttaatcgtgtgaccgcggtggctggcacggaaattggaccaacgcctggggggtagtagtatagc

SEQ ID NO: 624786 - DNA, 106 bp, Homo sapiens
gacatatggaactccaaggaactgttccacttgcttccatgaggtacccacctgtatggcctgggacctgcccagaagcctggccatgggtggaacatgggcacag

SEQ ID NO: 624787 - DNA, 262 bp, Homo sapiens
ggccccgccctccccgcgtttgcgccaggcctggggtccccgggagagcaagactttccctcgggcatagggacgtggggtgcaagccccaacctcagtggcagcagcttgggccctggtccagtcccactcgggggtgggggtggcggcggcccaacccgtcactcgggggggaatgcggaggggcgctccttcccttttatttaattgccgtgtaccaaattttgtttttatatagaataaacttttttttgaccgcgga

SEQ ID NO: 624788 - DNA, 509 bp, Homo sapiens
tagcagttacgtgcgttgttgtttacaccaaataagtaaattagctgggcacggtgatggatgtttgtaacccagctattcagaaggctgaggcgggaggactgcttgaacccaggaggtggaggttgcagtgagccaagatcgtgccactgcattccagcctgggccacagattgagactcagtctcaaaaaaacaaacaaacaaaaaacgtagctgaagcatcatctcctctgagaattcttcccaggcttccccagactgagttaggtgtccctctctattagtatcctgataggaaacaagtaacactcttaattaggtcaaagagtgtaatgaagcaggtatttacaatggtatgggaagggttacgggaatccagcaaggaatagtgcagcacctagggactagcaatgataggaagttgcaccatatttggcccagcaagggcaaagggagagagtagtagtgggagtccagagagacactggttgttgcttctcatttata

SEQ ID NO: 624789 - DNA, 662 bp, Homo sapiens
  misc_feature (193)..(193): n is a, c, g, or t
ggccgcctagcacttccgatggacaggaaatgtctgaccccaagtgcatttgtgctattcctgatcacagagattggaaggagctcaaactggtgctgacccatggtgggtgtaggttggtttctcttgttgccttggtttttgagcctttttctgttttccaactttgggcttcccgtctccagtgtaaaanaaagcagtaacccacaaggcagaaaccatattattttatgctcctcttgtcttggagagcgggcaacactttatggtgcagtaatctttttggctgtcccttgtctggaattaatgttcaccctcacgcagcagtctgccacttgggtggctggcattttgggttgggcagtctgggtttgtgcctggccaagccagctgaggggaagttcgctgccacgtttggttgtggacacattctgtgtaaggtgcttaccccttgctcagtagaggcatcccctgcaaatatggcgaggtggctttctttgcccttttgggttcctattgagcataaacttagcagtgaggaggcaggaccttgatggtccatatcccccgaggagcttagctgactttttacccagttggtgctgaagatggacaaattgataaccccctggaatctctggttagaccccagttgtgtcata

SEQ ID NO: 624790 - DNA, 484 bp, Homo sapiens
atcctgggtgacgccagtatctcctcagacactggcaggcgccctgaaaagagtaggatgtgaccctgcagtagctcgaggagtcgttcctccagaataaggccttccttactggtcctcacatctcattagctgacctcgtagccatcacggagctgctgcatcccgtgggtgcgtggctgccaaggtcttcgagaggccgaccaagctggccacatggcggcagcgcgtgcaggtggccagttgggtggaggacctcttccaggaaggcccaatgaggtcatactgccggccaaggacttcccacctgcagaatcccaccataaagcaaaagctgatgccctgggtgctggccatgatccggttgagctgggaaacctcacccttgcaccgtcctcagcagtccacaagcattttcatttctactggcccatggacgccagtgcccagcaaagcaggaatggcttgcctaagacttgcccaa

SEQ ID NO: 624791 - DNA, 838 bp, Homo sapiens
aagcagggtatcaacgcagagtggcattacggccggctgcccctcatttacataaatattatactagcatttaccatctcacttctaggaatactagtatatcgctcacacctcatatgctccctactatgcctagaaggaataatactatcgcgtgttcattatagctagctctcataagccctcatgcagccacgtccctcttagccaatattgtgcctatggccatactagtcttgtgccgcctgcgaagcacgcggtgggcctagccctagtagtctcaatctccaagcacatatggcctagactacgtagcataagctagagcctatcgtccaatgctaagaactaagtcgtcccagacagattatatgtactaccgagtggaccaatgactttccaaaagaacatcgataatgtggaagtcaagagaagcacccaaagcctaatgtatatagcatcatccctctactatttgttaacacgtatctaacaagcgtaaaaattaacaatgacagtttgagcataaaaaagccaaccgattctcccgaaaatcaatcggccgtttaccagctactcgctagcctattcgtcccccttgtaaatactacttaagtcttacacacgacatagagggacggcgaacaaacaactttttgggagcaggccctaaaaaaggttgagaacacatggtgggggggcgacgccaacgaggagcaccaggcagagctggccaagagagaccggccgcaagcgggcggtcacccgaaaaagccgggggccgcgtttacacaaccatggtcggggctgggttcaagcggcacggtcaatcccgggg

SEQ ID NO: 624792 - DNA, 315 bp, Homo sapiens
  misc_feature (70)..(70): n is a, c, g, or t
cccccccaaggggccgggtgttgggttccccccctcggggggggggggttccttttttcggccccccccnccaggggaaacccccgggggtgggtttttttttcccgggttttttttccaaaaaaaaggggttcccccccccccccggtttttggaaagggaaagggggggttttttttttttggggggggggaattcccccccttggggggggcccccttttttttttcccccccccccctcccgggggtttggggggttttccccttttggggaaagggcccaaaaaaaacccccggggggggggttttttta

SEQ ID NO: 624793 - DNA, 1043 bp, Homo sapiens
ggtctccggtccgggcctccaagatgacaaagaaaagaaggaacaaatggtcgtgccacaaagggccgtgggcacgtgcagtcctatacgctgcatgtaactgtgcccgatgacgtgcccaatggacaaggccgttaagaaacttctgtcattcgaaacatagtggaggccgcaagagagtcaaggggactatttctgaagcgagcgtctttcgaatgcctatggtgcgatcccaagactgtatgtgaaagactacattacttgtggtgagtctgtgcacattcacagcacaaaggtagctcagcgaatcggaatctcgatgaaaggcccgcaattggaaccgaaacatctcccaccccggatttttatgagcctgcggtctgcatcggacccaaacggtcccacacaaccaaaaacgcgccggtgtaaatcgcagcgagagatcccataacaaggaacgtgacagaccaggggcgtaatgtcctcctgaacgaacacaaacgtaccccctgcacggatgttgaaacccaccatcaagcatccacagcacaacggccacgagaagaaacacgagttagggacaaccaccgacccacagcaacactgcaagtacaaacacccaacagcgaagtgtgaacgagaggagcacacacagtgctaacggacacacccagtacgaacaggtcgaagtacacagcgaaacaactccctgaccgcagcacacaggatgatagtcagcactcaccaacacataaaaaaacgcagcggcgacaaacaacggataacgtgccaagaagcacaccaagaatggagagcactgcaacaagcaatcaaggatactaatacacggcgagaccaaggaacacacgaaatgaaaataaccccacagccgggcgacaacaacacagaccggcactaacagatcacaacaacgcaggcagacacacacagagaccgagatgccataacgaccaacacactcctacaaccacacaaacacacaagcgacggcacgaaggcaacaccacgtaccgagctaccaa

SEQ ID NO: 624794 - DNA, 928 bp, Homo sapiens
  misc_feature (928)..(928): n is a, c, g, or t
gatacaagcagatacagaatagagtcacaaacacacgatgagcaaataatgcacatatggtgtcaaatcgaaccttctcatggattcgtggcgtgggccaactaatggtgtttacattatataattcctgctgtggcgagtaaagcacacgtttttgtttctcctaaaaggtttccccctgtgtatcctattatggatacgggttggtcaatacatgatccgtttaaattttctctccttttttcaggatatagcagtatatgctattactgaaatgaattgccttggctgaaatgtaactcatttgaatgcttgaatgatgagcattttagtactgttacacagggcttatgagtcaatcaactgtgatgaagacttgaggacaacatattgcttagagttggccctattgaatctgtgcctaaagtgatttttgcagtaaactggtatccgtgtggggtccaccatacttaataccagcaggtaaatccaggaacttgttttcatatctatgagttctagacaactcttttggaagtgacccagcaaactttgatgtcatgccataaagaattccgattgaaatgcagcgagaggttgacagagcattccagtgagcacgacattacaaacttaatttattgggacctatttttgttggcagaccttctaccagttgcttccaaatgccttgtttaaactgatccacggagatcgcggaaactgcttgagtatgacaccatggcttcttggactgctgtacaacattaccggttgtacacgaacactccaattggtggactcaatgtaccacggctgttcagtccgctgaaggacactgcccgaatgtgtggggacgtttacaaagttccttaaccacacacagaattgtggcccgcgaatatcattcgcgcgccaaattactctn

SEQ ID NO: 624795 - DNA, 209 bp, Homo sapiens
agccaggactggtctgctgacctcgtgatggtgtaagccagatgatctcctgacctcgttgatctgcccaccttgtgcctcccaaagtgctgggattacgggtgtgagccaccaggcccggccctaaatgatgccaattttaattttaaatcctgaataatcttatattccttctttcttttttggagactgaatcgtgcttggtcgcc

SEQ ID NO: 624796 - DNA, 448 bp, Homo sapiens
cctctcgctatgaagaaaatatactcagtgatgtgctagagattgtctgggagactactttagattccatgccaagggaaggctctctggcagggggtctacaaaggtaagccacccttccccatcccatcctggtctgacaaggaggggttgagaaaaacaagcagaacttctctgtgtaatatgcaaaaagcatttttcaatgcttgtggggatgggaaataatcttagggagattcttttcctgtgaactgatttctttttcttagaatgaatcactatagttcaaaattccagaaaaattataatcttacgagatcttataagaacccatctccagctcttcttaaattttgaattttccttcagacattgtttctgttgtgtaatgcttctatcttatttccttttttgccttctcctctgatatcccattagaaatagagtc

SEQ ID NO: 624797 - DNA, 293 bp, Homo sapiens
tacaggatttatctactacgaaaaggcaacatgtatttcctctccccattatacaggccctgtggggctcctgaggttcagtagctagggatgtatccctactattccttcaagtgcctgttgcatattgaaaggaaggagaaataccacagcagattcctttgatcgaggtttaagttggagatggagcttcccttatgagccatatacaactacagacttctaaaaactgtgccctcagccactatcgaatgccagccatcttctggttctaaaacggggagtggtctaga

SEQ ID NO: 624798 - DNA, 121 bp, Homo sapiens
tctctagcaggatccccttcatttaggcaatttcactatgttcattaaaagtattctagcgatttagtccagcattatgtataaaccatcatcacagcttgctataaatcaatagcgaggt

SEQ ID NO: 624799 - DNA, 241 bp, Homo sapiens
agtgaacggtgtgagaccatcagataggcaaagaccccgtacgtttactgatgaaagtgttctctcgttctcataagagagagagaggtgcatatagaaaatatgcaataaattgaagcgagtgtacaaagtattgtagaaggaatattgtactcagtctttatgattagattaagtggccgtcggtaaaaaagattagtggagagagaaggttaatggttgatattgctagggagccact

SEQ ID NO: 624800 - DNA, 246 bp, Homo sapiens
aatagaacaccctgaaagggcccgagtgtcaacagtccctttggagcagctcatccatctctcaagtgggggtcctccggcagccagcttcctctgtggtcgccaggtgggtccagagtgggcccagctcctttagaagtcaggcaggccatgcagagggaagaaagaggcgaagctctcaagctcctcccggagagcctgcacggcctgcctggtacttatcccctgccagtctctccttgaact

SEQ ID NO: 624801 - DNA, 250 bp, Homo sapiens
aacagatctgactcacatgcagttcctcagcgcaacaagcgaaacgatacccattaggtctgactgcctgcggggtcgggctgactatagccctattcgtcttcttgacataacacctataaattgatgtgcaacgtccgatatgatatcactgaattcttttcccagcacggcaatattattatttttcacatctctttcctgcaggcattcctgggggatagatactatagaatagccgctctgagag

SEQ ID NO: 624802 - DNA, 1533 bp, Homo sapiens
agcggctgctcccggctccctcgggcttaggccatggtgagctatcggcggatgcctggggacggtaggacgagcgaggcgtcgagccggacggatgtctgaaatgtcgggtgacggagagcaccattggaccgtgtctcctggttgagtattctcaagaaactgaagaattagtgcgactcagatactggaagaatctgctcctagtgtagtccggtgcggtctattgtgagactagggactgtctatacccagtacagctcctagtctatcgagtgatcaaggcagcttcagtcaaggacatacactgacaggttcacatgatgcgaggctggccgtgacacaactacttgatccacacgcctgaaccatctcgctacacacggaacaccttctgatatgtagcactaactgtgtgcaagcacgtacatgcacgaaccggacgcgggtgtccgatgagacctcgacatatgatagcattgcacagacactggctgcacccatggtggacaacgtgtaagcttggctcactgctcaaaggccaagctgggttcaggaagccaccagagtgtgtactagcaattctgctaagatacaagaggcactatcggaggttccagcacaacacaacctaggctctaattcaataagacacctaccacgtgggcacaatcacgcctgggccgttatgacaacgacaaccaggataccgtcagtaccactgaaatgctggtactacctaattccagccagtccttctactaccgaacactattctgtctatagatctaaagcctttgctccaagtgctcttttgagcggtgccacattgggcccttactggggttatcgaaataacgtgctcccacctcggatattgtgtcaccatatctacgtttttgaccttatggccctccccataggaatttacggtcgttgatcgaacacgttgacttcatacgtaacagggtccaccgcatccgtggcgaccctctaattctaggaaacgtggctggcgaggcaatttactggtcgatggttggctccacatgggtatacgacgatggtaattaacagttggtgaagaggcgcgaacctcataagttatgggtatacacttagggtggttacggagtaccggagtccatacatagagtcgcttggatgctgaacacacgagtttcaccgagttttacactaaacaccccgtagtcgaacgaggccctaccctcgcagagcattcacgctcatgtcagatagtgccccacgttcacctgcatcacgatgggcctagcaggaacatcacctagcgaacactcggggcacggctcccgacgcgacatgggcaaccgcgccgcgaacccaagggccagcagggcacagcaccggacacaaagatattcgcgtcacaacgcagaggacccacgcataccaacacacaacgaaccaacaccgccaacacacacacgaaacacacgacgacagacacaaccaacacaacaatcagcagacaagcgaaacagcacccaacaa

SEQ ID NO: 624803 - DNA, 786 bp, Homo sapiens
ggtactattatacatggtcgaaaccactaacgcgtgttcttcgacatagccgacgacggcgacccccgttgggccgcgtctccttctgatggctgtattagcaagacgaaggtcgccagagaccacggccgaaacattttcggtgctcctgagcactgcgaggagaaatggagttctgcgctatagtttatggcttcctgctattgctctgtcaagttaatctccagggctctatagtgtggtcaccggtgtgggtgcacgtatcatgcgtccagtaatggccacatgagtgggcttgagttccaatgcctaattgggggcacgcacaattgtggacacgcactcgacgcatagcatatcgacttcactcatcagggcatttgccgcgaggttcactcgcgcctgtacatgtggtgcgcagttgagcaaaaaagtggtcctagggaagctcgcgaagacaaacgagagaccatggttagcccacgagttcttttgaacaattccctgccaaccgttgtcaccaaaacgttagcaattggagagttggcctatggcgaacctcggagccaaacgacccaattgggtgggggtgctcgcatagggtccacaagagcccatgggaggagcccgcacaaagggccaagtgacaggcttacttgagcctagcagaacgcgaccaccatacacgaggcagagacccgcctggtgacatgagagggatgccgcaaaccagtaccccttggcagcccaacaaagaaagaccacccggccggacaggaacaaggc

SEQ ID NO: 624804 - DNA, 197 bp, Homo sapiens
gtacatactttgtctgatgacagacaggctttattagtcaaattagccagcagtttttcagtttatatcccttatagtcctctgtcttcaagaaaagtagaacggactaaaggtcttttaaaaacacacctcaccaagctcagccaccaacttaaaaagaactggacaatacttttaccactttcccttctcagaag

SEQ ID NO: 624805 - DNA, 582 bp, Homo sapiens
cttgcggcacacacttttcaaagaagacatacaggcaccaataagcatattcctcaaaaagtacaatatcactgatcattagagaaatgcaaatcataaccacaatgagatactatctcataccagtcagaatggctattatcaaaaagccaaaaaaataacagatgctggcaagatcgcggagaaaaggaacatttatacactgctggctgggagtataaattagttcaaccattgcggaaagcagtatggcaattcctcaaagagctaaaagcagaactaccatcacttcaacaatcctattactgggtatataccccgcagggaaataaatcattctaccataagacacatgcatgtgagtgttcattacagcactattcacaacagcaaagacatggaatcaacctaaatgttcatcagtgacagactggcataagaaaatgtggtacatatataccacggaatactatgcagccataaaaaaagagatcatgtcttttgcaggaacatggatagacctggaggctattatctttagcaaactaacgcaggaacagaaaatcaaattctcacttatga

SEQ ID NO: 624806 - DNA, 166 bp, Homo sapiens
atcttcacggtcactatttatactaaaagagtatacacgctcatcactcgatggagatccttcgaaatagtctcagcatatctacaaactgccagtatcaggcggcggcttcaaatccaaagtgatgtttggatgtccagtgaaactattaattggccttatcgag

SEQ ID NO: 624807 - DNA, 1727 bp, Homo sapiens
  misc_feature (1325)..(1325): n is a, c, g, or t
gccggcggcgggagcgcgcttcgtaagacaccgaggacgaggaatctggtgcttcgggctccgaacagtcggcggcttccccgtttgcggggaggcgggagcttgctggcgggtagcgccggtaggcgtgtggctatgctggcatctcgtgcccttctacgagctggcgggaggccgcaagcggggcccgtttcagtcatgacgagcgtggctgtgatgtacgcgcgcgcggcgcccacagtagatgccttgtagggagatcggagtagttgctgaagcagtgtacatgatgtgcctattgaaagggtgaatggcttgggctcctcggtgagttagtgcacacatgtgccaagcataggtacctcgggcaatgcgtggagatgagacgtgtgcaacataacccgttgcaaagcatggcacaaagaacattgcgcgaccaaggtagcgccacgacttgcacatattgcgaaaagaaaccttttcactgggactggacgttgtcttaaagtattcgtttgccaaatccatacaaatgtgagcggcaagcacctgtgccgacagcaaggtgacaatcaccgcgcctcagtagggatcgccgacactagaggtcggacctaagtttgggagcctccgaggaacgaattggatgggcccaaagaactccgagggggcaactgggccacccaaggcggattggaaggcagctcaagaaacgactcctagattcgagcatgacaccaacgcctagctggtgcgctttgacccatacagccggcgccccgcggttacaagggcgatttttgctgggccactgggactttggacttcggttaacctactttggacgctttcgccacactgcgccgccggcggctaactaaatttgcgcgcggccgtatttggcagcgggagcgctggcctctcacaacttcttggggcatccgcgcgattggaattcactttgtggcccgtacccgccgaataaagtagacttagactaccgggagggcggaggcaagatgaaggcaccaaatgtatagtccccccccaatgtggagtgccttgtactcttgctgctgcacacacgccccctagctgtggacatatgagacaccgaaaggtgccgttccccccactgagagcaaacaccgcatttgtagtgccaaacagcttattcctgtggggtcaccccaacactgcacatatagcagtggtcaccccctcttatcacccagttaccccgcggaacacgtggtcagggttgaaccccccggtgggactttgttcacattgttcggtctctacatacacacatctggttagtnacagaggcgccaatactcagtatctgtgaccgaaaaccctaaatcttctctactacaccgtgcgacagaagaggagcttacttcgcagagcatcggccgaatgtggtgctggccaatgttccgtatctgtgcacagcgcctgttaatccgcgacaccatatgtaccctgagtataatcaagctaccacgccaccacatctttgtaactaatccacatcacgactgacatgcaagacgaaaacactctaccaccctagaggcaagcaaataccccacgatacaaactatctgtcgatgcgatccccctctaccgaacagtgcctcacaggcaggccacatagatatctccactggtactgtcgccaaacgcagagactgcactagatactaacactcgataga

SEQ ID NO: 624808 - DNA, 221 bp, Homo sapiens
cctgcaagagagatggcagcaggtggcatgaatgagcctcgtgcctgatggagcatcattgctgctcattctgcctcttcaggaaagagggtgctcctgcacagctacacagagttattttgtattaaactttgagggagagcctttgtccggctggatccctgctggtgaatgtgccattctaggtctcgggtccccatcatcatcccagtgtcctgcct

SEQ ID NO: 624809 - DNA, 107 bp, Homo sapiens
gcctcaaccagtatttctttccttttgttactgaagggtgttttatggactaggaagcctttttatgaattgaaatagtttaaataaaatggggctatggtgtttta

SEQ ID NO: 624810 - DNA, 88 bp, Homo sapiens
tatgagacactagcattccacaggaaacactatgggagaaactgttctcccacaaaaataatctcttcttcccttctgtcgtcttctc

SEQ ID NO: 624811 - DNA, 816 bp, Homo sapiens
gagagtactgagaagcgtcggggagcgcagcccaacagccatggcgttggaaggaggaatgaagtgtgtcaagtttttgctctacgttctcctgctggccttctgcgcctgtgcagtgggattgatcgccattggtgtagcggttcaggttgtcttgaagcaggccattacccatgagactactgctggctcgctgttgcctgtggtcatcattgcagtgggtgccttcctcttcctggtggcctttgtgggctgctgtggggcctgcaaggaagaactactgtctcatgattacatttgccatcttcctgtctcttatcatgcttgtggaggtggctgtggcattgctggctatgtgtttagagaccaggtgaagtcagagtttaataaaagcttccagcagcagatgcagaattaccttaaagacaacaaaacagccactattttggacaaattgcagaaagaaaataactgctgtggagcttctaactacacagactgggaaaacatccccggcatggccaaggacagagtccccgattcttgctgcatcaacataactgtgggctgtgggaatgatttcaaggaatccactatccatacccagggctgcgtggagactatagcaatatggctaaggaagaacatactgctggtggctgcagcggccctgggcattgcttttgtggaggtcttgggaattatcttctcctgctgtctggtgaagagtattcgaagtggctatgaagtaatgtaggggtggggggcgtttggtcttttcatggagtggattctccaggtttttcaattaaacgg

SEQ ID NO: 624812 - DNA, 1016 bp, Homo sapiens
agtacatgaaaacgcattggctctcggagttagtcaggcagcgacttgccttcggcttgttctctgctgactaagatctcctatagagagctagaacaatgccgaaaagaaaggctgtggaggtcagggtgatatgagggaggcagtcacaaccagccagatctgccaggttgtctgatatgcttgtgtacagggtacatccagagtgtaaaagctctaaaaagaccatcaaaagtctcaaggaactatgaagagaatagaagtgaatatgaatgtgcaaggaaaatttcagatacaggtgctccaaagcacgcttagtctgcaaatcctaagcaaaaagcaggcggttgaacgacagattacaaactgcaataagtgcgtagaaaatggagaagccgaaaaattaacagaggcagccaggcttctgtaaacacacagacagtttgtggagcgctccacacagaaggcacatatgagaggatgtccacagaacgggggcggaccacaagcacaggacagcacgggaagattagaaattacatcacaaatgcatgacggaagatccagaccggacagcatgacgcagatcactcgagggagcaacagggggacagctggcgggaagaagaccatggatcgcacaaggcgaacaaggactggacacacgacggatagaactgtcagagtgcgaaaggcgaagaatgcacagcgaaaaccagatcgcaacacaaggtgagacggaaaggcacgggaacaaagcgaacccaacggcgcacgctacacggaagcaacccaagacgacccgaccgcaacaagaatcgacggccagcacgacgaacacacaggggaacagaagagcaccccagagacgacaaacgcgacacaggtaaggcggaccaccagagacaaagagcacgaggacacacagcaaaaccagcagacagacgcaatatacacacagcacacacaaccaagaaagaaatccaacacagacacgacagacaaccaccaacacg

SEQ ID NO: 624813 - DNA, 941 bp, Homo sapiens
gaaaacaccaaatggcggatgacgccggtgcagcggggtgggcccggaggccctggtggccctgtggatggggaaccgcggtggcttcctgcggaggtttcggcagtggcattcggtggccgtgtggtcagcgtgcctgtgagactgtgggcctggtggcctgagtgccgctggacgctcgctggatgtgcaatgggccggagcgattaagggaagtggattgccctgtcaaccaaaggtttggggcccgctttgggtcaaaggaaccattgaaagatcacagtcccttgggagggagaatctagtctctttcgtcccttgcccagattaacggacactcacgagattcaattggatttccttcgcttggagggccattctctccaaggggacttgacggcttttccgaacgacattatgcacagttgcaaggaagcgagaccgcgtgaccggtgccagcgtcacccagtggttcagaggcgattctgttaggctatcgggggaactaccaactgtgccagcgatcgggtcatggggtggttacagttgctcccaaagtgagggtgagccacacgcaccatcacgtgcggagccaatcagtccgtgcgccgaaggctactccagtcggtccgccgttgctgcagaagagactacctgagggtgaaaccaagcactcagcgcaaggcccgcagcacttgttacccttgcaatggttgaacacggcccgcatgcagggctcatgtgcctggttacgccctacattccctttgacaacccaagggggacaacttgggcattcaactaccagcaacttgtgccctaaggaacgctgctcaatgatgggctggcaatcggatgaactgctaccaccttcaggcaccgagggcttgcacttgccacccttggggaaactttcggccaagggccacctttggatgcca

SEQ ID NO: 624814 - DNA, 1077 bp, Homo sapiens
aggagacagacagtgcgcactccaccctccagctcgacggcagaccggcccggccgacagaccgccgagactgacagccctggcgcgtccggtccccacctccgaccacctgccagcgcatccaggccccagccgctccccgctctgccggcaccgcgccctcctgctcctgccgcagtgccaaccatgacctgccgccagtatgggcccctgtccggcgatcgccttcgatggtcctcctcgccctctgcagcctggctggccgtctggccagaactgccagtgggccgtgccggtgccctggacgcagccggctgccgcgactgcccggcagggcgtgagacctcgatgctaggacggctgcaggatgctgccgacgatcatgcgccaagacaactgaggcgcaactgtgcaccgagcgcgagcacatgcgaaccgcacacaagggcctctatcatgcgcacaacggcaccccggaccaaccgcaacgatcggccgtgtgcaccgaccaaaagcatgggtagctcccctggcacatctacgcaagggcaacaggaggtacacggccagcggcaccacgaaccaaacccagacgacacgactgccaagtaccacgtggcacagatgcccagaaacgagggccggagggacctcgactgcccccatgcacacaccgacaacggagaacgaacacgcgcaagacaccagacccacatacactagggcacacgtaacccggacagcgcgcgccacccgcaagccccagggcaacaatagcaagcaaacggaaactgcagagcagccatggaccacaggccccacacgggcacccaaccccccgtgggagctcgggcacacgccccaccgcacggacctacaccagcagacggggcacaagcaaaaacgacaacagggggccccaaaaagcccaacccccacggcacgacacacagcccgcacatggacagggctgcacgagacagcccaacgaagaagcgaaccgcgcccacggacaccccagccacccagagcgccaagtatgacaccaacccaagacacgagcccacccacaataca

SEQ ID NO: 624815 - DNA, 507 bp, Homo sapiens
ctgctgctactactaccgtgtgggcgtgtctggcagaagggaagacatgactgtagtggcttctcagagcctgtatgaacggccttactttattcagtgaaagtgtctattagactaagaggtatttagtttcctgaatcatggcatgttgagtaaagtgtcatttgccagtcctgggtggggcaaatcctccagcctgatgtgtagggaagggaggggggctgaataatccctgaggagtagtagaatagccgatggaacacttgagaagttatttccttgaggatagatttccacgatggaaaggaaatgagaggttctgagaggtgggctagtggcttgtactatagcataaactggctttgctggtgtgttggcgattagggctggttggaaacttccctcaataaatccagcgtgatccgggtgcgggaccggaaagcaggcacatattgggggtgactatccggtggcaccgcgagcatacagtcatggaggtcaggtgtg

SEQ ID NO: 624816 - DNA, 916 bp, Homo sapiens
  misc_feature (299)..(299): n is a, c, g, or t
agtaaacctgacgatttcatttatatcaatactttccagaaggtaatcaaacgggtttcctccccctcttgcaccccccctgcttaaagacccaccgtcgtgtcctcctccgcccgcttctcctataagttgccgccacaatctttgcactaaacagaaaccttgttggaaagcaccacaatattgggccccacttaatatcctctcccttgggacaccccaatcttaaccacgcaatcaactttttaatcctttccgcggccgccaattgatagtgtccttacactccccctaatctnaggtattctcttacataaaagttctacagagggggtttcagacaacaaatttctttgcccaatcccctcccccgattagcccaacccccggtgttcctattccccttagagtataaaaaaggcttcttcaaccccccggaaactaaaaaatattggggccagacaactaaagataataaagccctcggcccgaccagttttaaaagtcatagacaacccctttttccacccttctaggaaaatgtacatgcgctgttctttcacgtgcgctatcttcaaaatatagccttgaacagccctatccaccttccaccccctgaacccatcgtccttcattaatagccccaatcagttcttgcccgtcaaacacacaaatacattccacttcccacacatttttcttacaccggtactataaaaaacatgtgtagttagaacacccctctactggactcatcctccctcttcataagccaccggtggcataaccccctttcttggcaatatcttgagaccccaaagtttactaaaaccatcacaggtttttccaaatttgggaaaatcaccggaaacattcaggggtgaaaacaaaatccccactgaggggcccacataac

SEQ ID NO: 624817 - DNA, 473 bp, Homo sapiens
agttgtagaggtgacacgtggagagcgatgagaagcggtcagcatatagtgagcatcataacctctgcagatctcccccgtatcttcctatgcaaaaagcgaaacgaccgatagtgtgcccagcgatgaagagagtgccgaggagcgccacagtggcggaagaggaatattgaaggcgaacagtacctcagcaacatggggactcgaggctcctaacctagctgcccggcatggagtcttcgtcactatccaataaactggagctcgaggtcaccattcaaagaggagagcaatccggtagccttacaacagctcctgtcccccttttcaggatctccccctttcttttctccatgtaccctgcatgcagcagcagtcgggcagaccgaaagaccctgggtcagcgtcagtccatgaaaacatcggcatatcacccaggcccgcgtctggagctgttagagcctctgactctc

SEQ ID NO: 624818 - DNA, 201 bp, Homo sapiens
aagggaatctgttatgagtatagtctcatttttgtaacgatgtaaaagttctagagatctgattcacaacaatattcaggtattcaatatttaaaacaattgacattgtacacttaaacaatgtctaagactgggccatggtgcagtgagctgcaggcctatatatccctaggactgttgtggaagtctgagagcagggag

SEQ ID NO: 624819 - DNA, 143 bp, Homo sapiens
atgctcctctggcttgcctgagcgatgacataaatgacccagatatgaatgcgttcagggtggtcagacatgcagagaggtggagtattgtgatcataaaactgaggtacaatgtttcctaaataaaccatcagcatctctga

SEQ ID NO: 624820 - DNA, 540 bp, Homo sapiens
atcagctcggcaccgttaacttagaagttgtggttctttattcctcccctgattgccaattctcatggtatcgtggttgggtggtggagagctgcgtgtcatcatgcgtggtggaactgcccacagttgggcgggcggagcctctctactcgaaggtgaccacgttcagattctgagacgggaagtggagggtgaataggtcacggtggcctttgaaattagagaatgaagttctccttttgtgctgtctagtcagccacgtcgggcttctgtcctctcgggtcccagcttcgtcatcttcatcatctacagatgcccggctatgtccgtgagtgtactcagtgttccgcatcttcatctccatcctctgcatcaccaacacgcttatcctgtcctgcctcgctacttccgccccagcgtaccttcctctactacgtctaaacgtcagtggtcagcctgcgggctccccattttcctcattagcattcccgttagcaggggcgtctcttccatttactgcctacttccacaactcctaaa

SEQ ID NO: 624821 - DNA, 379 bp, Homo sapiens
gtcgttcctgaggtatccccacttgggaggcgaggcgagcggatcacttgaggtcaggagtttcgagaccagcctggctaccatggtgaaaccccatctctactaaaaatacaataacttagccaggtgtggtggcgggtgcctataatcccagctacttgggaggctaaggcaggagaattgcttgaacccaggagggggaggctacagtgagccgagatcatgccactgcactgtagcctgggtgacagagactccctctcaaaaaaaaaaaaattaattagaattaaaaaagccaggctcgtgatccacctgcctctgcctcctaaagtgctgggattacaggcctgagccactgtgcctggccagttttattttt

SEQ ID NO: 624822 - DNA, 361 bp, Homo sapiens
cgcaatggaggacactagcctcactttctggccttcaggtaatgaggtatagaagagagaacacaatcactgcttgaggttatagaaataattctgttctcagaggataagtaggtttcagctaagattaggaagtccacggaaatgttctgagcacaatgaacagtataaagcagcttgaggaagtgaggagaggatcacagattgggtctgaatagtagatgatactgtaaaatttgcgatgatgagtctgggtgaaaaccaatatccagtaaggtccactgctaacagtggtgactgaagcaagcaagaattagatacacaggtcggacagtcctcatggatctgagatgggttcttt

SEQ ID NO: 624823 - DNA, 102 bp, Homo sapiens
tcccagtctggcgaaaactgggccttgcagaccccttagcatttttttccctttatttccttccctgactttctacttctttggggagccccttgtgttatt

SEQ ID NO: 624824 - DNA, 702 bp, Homo sapiens
  misc_feature (469)..(469): n is a, c, g, or t
  misc_feature (702)..(702): n is a, c, g, or t
tctccaaaagtgtttctcagctgttacataagtggtttttttaattgtcatgtatttatttaaagcgataccggttttcccccctaaataataccaatacaagcagtattcatatcgtgttggctctgtggcaggcactattggaagcacttgccgtaaattaactttacatgttttaagtcatttacccttgaaccacctctgtattcagtaggcgctattgttagtgctgttttgcagatgaagtgcagttagcccacatctattgccactgttagttgagtaaataaattcactcctagaaatcttaatttctccttctgtagtgtttccttggatttagaatcaatttcatagactgttgttaactcacttgtccagggtcacactgctcataggtgactgtcaactccagagctcatcaattacaggtgtctctctattgaccaaatgcatggccgtaaagctntattttaaaaagagatctatttcactacaagatgagagttggttgaagaaaatactgagttactggacctggtggtacagaaatatggcacaaacctgaaactagtgcatgcgcattggaagtttggaaacgtacagaataccgtgtatggtgtctggcattgcaaatttttaggatgggctcggtgggtgccaaggctttttcaagtggccagaacagacgtgctggccgcn

SEQ ID NO: 624825 - DNA, 89 bp, Homo sapiens
gctgtctgaagatagatcgccatcatgaacgacaccttaactatccgcactagaaagacatgacgaaccgactagtcagaggaaacaaa

SEQ ID NO: 624826 - DNA, 309 bp, Homo sapiens
tcagaagggtgtctgggtacctctgagactcagaagtgaaagagggctattcctagttttattgctacagccattatgcttcttcatgctagagtattgatagatagtattggttatggttcattgtccggagagtatcttgtagacgaggatcgctacttacgacaggattactggactgcggttgcttgcgtgacggacataccttgatggcagcttctgtggacaccgacgggataattaatttaaggttacgaacctgaatacaacgctacgcctgtatatttctacggcctcctctggaaagtg

SEQ ID NO: 624827 - DNA, 153 bp, Homo sapiens
attaagcgtatggcttgttctttgacctctcgtaggtcaaacactctgcactggaaggactggggtgttcccagactgctggcaaaacactctgatgggggctgttgacaaaagtgctctggttgtgggggcaggctgccacaggagaatgtc

SEQ ID NO: 624828 - DNA, 1125 bp, Homo sapiens
cagctattccatagttacaccttggctgctatcctatgaatgaaaaacaacgcgccggaatctagagtcgacactccctatggagtgcattgacaaatgatgagcaggtggtaatatattggagatatctagagtcggaaagtgagtcactagagatgggtgcattctgggagcaactgtggatatgtaatcaaagatcattagatccgttctagctcaaatctcccctaacagaccagtgagtattattcattgaacttaactgtctcacagatgaaaaactgaagcaggtcagaaactatatcaaggaacatagccctcgccaacggcctgcaagcagaggcctggaagagaagcaactttcagttgtgcaagcaccagtggagtgagcggtgccagtgccagcgccagcagcagcagtgccagcatgaagcgatccaagcagcggaagttacagcagaaggccttccgcaagaggcagctgaacggagcagaggcaggcccggcaggagaggctcagtgggctcttccttaacgaagaggtgctgtccttgaaagtgactgaggaagaccatgaagcagatgtcgatgtacgatgtcactacagggtgcatttatcaacgatcttagtgagcattagaatactccatccttatgggtatacatgcatcttgacaacaatttggttagggctgtgctgatgtaccattaataattaaagacaggcggactagggcaggtgcacccaaaactggagctcaggatcactggcaaacagttgtacggacagctaaatagagcccggccccagacataggcaccaaaacaacagggggcgcacatggatatacacacgctgggaatgagacaacaacaagtgagaccgaaagagggaagcagcaagagaggccacaacacagggggaaacggcgaccaacagcaacgcaacaggcaagaacgcacgaggagcgaagagaagaaagagaagacaagagaaaaaaacaaaaagaaagaaagagaacgccaggagagtacctacccacacacaacagcaggaaagcacaagacgaagacagacagcaacagcaccacgacacagataagacgacaaactcaacagaggag

SEQ ID NO: 624829 - DNA, 1014 bp, Homo sapiens
gtgcttctcgtacggttgtgtgcctgctttaagcgagctcgtaccccgtacaactgcgcagtccactggcatcaaacacaatgcctcctcgatatatcattggctttgtgttgccactggtctctctcaaggtcggttgctaggggtttaaacctgccaaagctgggggcgtaaacgcccccgctgtctttgttacgacacttccacggggggttggataacgtccctgtggcgacgggcaattacggtggtgtgtctcccagttacatggccactcccatctgggaaattagcccctctggaccctgggggacaattgggacgctagtatgatgcgacggcacgcccaatgcgttgatattgatcgaggatttgtgggtacctctcgctatgctgaagtgccctttctccctggctaccgctctggattggtaccggtctgcgtccatacatcgctgtcttgcccatgtacagctgtatgatcaccagactgaggaaccttgcatgaggcctgacgtcaggagctgctctctgacatgggagaccccaaaggtggtacatggctggcagagtggctaccagcacaagcggatgccatctgctggatgtctaagacgtgaccgtgacccaccttgccgcctacccttcagagcctaggggtcctggactgcctggggaccattgccatacatgcttctccactgctagtcacccatggctccccgcttgctagggttgctcgggtcatgccagtgtctcccgtaccaccgcaccctcagcatgcatctagcttccgatggcgccatcaccatcgacttcgactgcccactcaggcgttctgcccgttgtgggtgttgagctcaccgcgccaccaacaggcactcatgggaagaggctatccttctgagatgggggcggctggtagacacctattgctgttcttctagccctcgtgggcggggcattagggcacaaatccccaggcaggctttgataattctcaggtatagggca

SEQ ID NO: 624830 - DNA, 236 bp, Homo sapiens
ggagagaatgggatgacctctgaagatccttccagcccaggagttctcttgaggtctaactgccatccctcctgctgtaaaataagtccattacctctagctctgtactctcttcagatgccacctcaggttgcacaggaaggctagagccctctgtagtcactagaactggagccagaggaggaggaggacgacgacgacaatgatgaagaggaggaggagctatttggacgacg

SEQ ID NO: 624831 - DNA, 727 bp, Homo sapiens
tgtctaatgctctacctaagattcccagtgctttactgaaaataactgttacttacatgtggaattcaaagaacttaaactcatagaagtagtaagtagaatggtggtaataggggctgagggagggaaaaaataaggctatgttagtcaaggggtacaaagtttcacttaaataagatgaatagctactagaagtctaatgtacaataatttgaaagtagttaatactatattatatacttgaaatttgtcaagagggtagattttaagtgttcacacacacacacacacacacacacagagacagagagagaaaagatggagaagatggtaactatgtgaggtgataaatacgttaattagcttgattggggtgattatttcacaatgcacatacataacaaatcatcaggtattacaccttatatatatataatatacataattttgtgtcaaaaaagtaatgaattattcttacgagtaataacataggtgactatcacagatgtaacattgaccaaaagaagccagatatattgtataattctattcttttttaaaaaaaataattttgggaatacatagtaggtatatatctttatgaggtacattagatattggggtataggcatactatgcataataatcacattagggtaagtggggtatccatcacctcaaagcatttatcatttcttttggtacaaacaaatcattataattatat

SEQ ID NO: 624832 - DNA, 211 bp, Homo sapiens
  misc_feature (149)..(149): n is a, c, g, or t
ctagtgtctcgatcgtgaagtggggtgatgggtacatggaagttcattacattattttccactttggtatatttcagggttggggttttttcatcacaaaaagtttggtgttggttttatggtttgggggtttttttagttagcatctngctctatcacccaggctggagtgcagtagtgcaaacatggctcactgcagccctgacctccg

SEQ ID NO: 624833 - DNA, 996 bp, Homo sapiens
gctgcaggtgcgtcttctggggggggatgcgacttgacgcggggctcaaggagctgtgggggagacagctcttttgtggccctcggcattttccccccgttctttggagcccgccggggacacaccctttcggggggggtatccccctttatgatgttcgcaccaagactgtttggtcgccggggtctttatgctcgggagtctcccccctgttctcgggcattccgggggcaccacccacggttggtagcgttaatcgtatagggaatgttgggtacacccttttagcccgggagtcagacggtcaccctggcaccacgagggatcacacaccagtgtccgtgcctttttcagcccttgctagatacccaagtggagaccttctgtgtgtgattatgcatgagactgtactggtaagacttgtatcctgccatccacctgaaggaggacttgctggctcactctttcacggagccctgcccttcctccctgtggatggtcgcgcgcttgtggaaaacccggtcacggtaatgatagtggcacggaggcacgtccaatgcccacggcagatagtgggtgggtacctggtgaaacccagacccttgaagctgaagacacgtcccggcttaatcctcatactgaattgagaacctgttttcccatttggtttgctttcctccgattgatcccaacccttcacctattttacagtaaacctgcccatttcctaattcggtttttacaactgctagtgcccacaccttttgaattggtgcctcttgcataacttatcacacactcactcaacgctgtatttcccctaattctgagcccactcatatatgacccacgactcaactccacctggatggacgagaagtcacccctgctgtgggggttggggaccactccctgcatcacacctttccactgagagctgattcttttgactcaattcaacttctgttctacccaaatctcaaaaggaaaaaaaaa

SEQ ID NO: 624834 - DNA, 803 bp, Homo sapiens
tagatgctctacttcacttcctactctgaatggaagcagctcgagcgtcttcaccacgaacatatgtctgctgtcaagcgtgttctctccagcctacagaactgtgaatcaaatacaccctttctgtttatgaatggaaatgaaaatggacaaaagagcaaaggcttatttcaaaacctttgaccctcaaatacaagaggccctctttgcgcctcggagagcggtactatgcacccgttttcctatgtggacggtcaaactgtcagcccacatgcctgactccatatacatggggctttctgcatgccgacagcgatgtcatctcactcaaaggctgggatcacacgtgtatcctctatgcacgccgcggaatcacgccacggaactagctcgttgtgacacctaaggcctggctagggcccccaacattctaaaggccttcactttggggtacttcctttggctcgccccccctgactagcttgacaaaaataaccgccaaattatggggcggcaaacccccacgggacgttaaagcactccgggcgcccccccctttattctccatcctgtgtttttgagacccaaccctgcctattactagatacccgtccctctttttccttttagaaaagataagacttttttgattcttcacgccttaaggatctaatttctgggaagctttcttttatcaaggggtactgcttgccccaaccccccggacatcccagacctctggccttttcttggtgaatattggtttagctccatcctcggtggtacattctttttttcctctg

SEQ ID NO: 624835 - DNA, 252 bp, Homo sapiens
  misc_feature (57)..(57): n is a, c, g, or t
  misc_feature (63)..(63): n is a, c, g, or t
cccgggggaaaatttatttttgggcccttaaactgtgttgcaacccccaattttttntttttntggattttccttgccctcaaaaaccctggggggataaactgttccagttggagcccactacccctggtgggcctcaatgtaaattcagttgaaatttgcaattttatcagcaatttaatggattgaattcagatcatcatttgtctttttaaccggcccccccccaataaatttattttgcagttttga

SEQ ID NO: 624836 - DNA, 117 bp, Homo sapiens
ggcgtgcatgtatgattcctacttacccagttactaagtccctccattgcttctcctatatctttgggtgaagctgcttggtctacggtgggtgacaagccatgcctacttaattct

SEQ ID NO: 624837 - DNA, 215 bp, Homo sapiens
ttctgagacctgcatgctattgctgcccccggtgttgtcaaaccacaggttctgtttttcttgcttcatgatggctggggtagctgcggtgttgcgctggttggagctgacgaatccactggtgcccaagaggcccaggcgggcggaagggacgttccgagaggggatctggtactggcgcggattccgtctgcccatgccaccgctcacagagc

SEQ ID NO: 624838 - DNA, 156 bp, Homo sapiens
aaaatccattatacactatacatatacatcggcgtagatctgactttcttcccacaacacttgctcggctatccggaatgccccgacgttactcggagtaccccgagagcaggctgtggaacctacgcggtgcaggtatagggacctaccggtgca

SEQ ID NO: 624839 - DNA, 1369 bp, Homo sapiens
gccaaggaaacgtaaccaatcaagtgacgcaagcaaaaaataccaaagaagactatgaaaactaaaatcaaacggcaaatggacgtgacgacaccttgctttgaagtggcaaatgccagaatgacattgctgactaaccattacgcacacacggacacataccacggaagatttggaaaaaccatgaaacgacccagatctaccttcactgcagacccgaacacaccaagacgtactaaaactgacataccaacacactctgagtgtggccagctacgcaaggttaacaataccaacacgaacgacctactgacacaacgacatacacacggacacaagcacgattactaacttgtcgctctccctggacttcacgaggaaccccaaccagccttcacgcgccacgcctggacacgggccacgccagcgcagatggcccctaaaagatgcaccacaacgtactacgacagggcacaacacgctactgcaaccacagcaccaacagacggccaaagaacgccactcacccatttacacctgccgcagcacacccccccaacaatctcaaaagcctcggaatacactgggctatctaggcaagcaaacatctccaagaccacgttggcactcaacgcaacaaatcattacacaggatttcccgtcaccattttaacaacacgaactcattcacctggaggcacaattcacatggtacgggccaggccctctcggcagggaattcccagatgaacacaatttctaccaacctggcacagtgggcaccacggtctacacagcgagtccaaaaaaagcacggtgagcttcaccacacacctacacaaatagacaaggacatctacggcacaggcacaggcacacggcaggtgccaaagaggggctatcactttccccattcaagtacccaatttatcctttccacagcacacttattggcaggcgccaaacaatcaaaagaaaacgcaaggaagtacaggagcgttacaaggaacgcaaccagccttacacacaggacgcaaaatcccagcacgatcacgcagcgcgcacatgttacacccgccgagaggatataaccagggaaacctgctgtcaccaggatagcagggggatcagaacacagcccccacagggcaaacactccccaacacacacttggacacaggacccgcaacacatacgcaaagccaccaacccgtcccaccgcgtgcaccagccctcaccgtggcaccaaatcccccccggagcacacaggagcgaaacacgagccacgcctaacgaacacacaacgacagggacaaacctacaagcacccagcgtccaagacaaacagcaaagagcagccacacagcag

SEQ ID NO: 624840 - DNA, 1843 bp, Homo sapiens
  misc_feature (1045)..(1045): n is a, c, g, or t
  misc_feature (1104)..(1104): n is a, c, g, or t
  misc_feature (1171)..(1171): n is a, c, g, or t
  misc_feature (1189)..(1189): n is a, c, g, or t
  misc_feature (1224)..(1224): n is a, c, g, or t
  misc_feature (1324)..(1325): n is a, c, g, or t
  misc_feature (1334)..(1335): n is a, c, g, or t
actatgtggcctcctgcatgtgcaggctggttaacaattcctggccagttgcttttttgatgcacttgttagatcactaaggtcacatatattagcactcccctctatttccagatgatgtggaatgggaccttctcctgcagagctcccaggatgaacctccctcggggttgctagaaaggcatacctctagaaggtggggcggggaggagcaggagcatttttctcctggtgttttaaaattgtctttaggacttaagtggtttccagaatcattgatccagagcctttctggggaaggggtagtgttgccaggtaatttgggagaacaggcaagatggaagggccctctggctgctagagaagaatattttcttttcctctgattctatcaggatcacctctattgagggcatcagcaaaatctactggaatgcaaagctcctctgttccaggccttgagggatgctatttaactgtctgtgctcctgggcctttgggggcaaggtcaggggagaagaacggtgggcgccatggtcggtgatggtgagaacatggctgcttaggaattcagagggctttgctcccttgtctcattttatacaacccttcgggagctcactggggacaggctgcttttccctatttggagataaggaaaccaaggcaaagagagatagggcacaggcagtatgacaagattgttttgtcaggagggatccatcaagccttgtgcatgagttccacatggcacagcgtgcacagtaaacactcaatgttaatttttcaacgttccagtggagcttgctgaggaactctgttgggcacaggtgcccagaggattcatggagcagccagtcctggggaatgtgagtgggtagcgagctgcctgctgctggggcaggtgatgtgtcaaagcagcaactgctaggggtttgccttcctcccctcatgtgcattctggcaggcaaagggggtttcttcctttcctccttgtcctcctggtgtatagtggggtctgggggatctggagaccacccttttngttcccaggcagccacggtatgacagtgggccataccatgcagtttaaaatgtatcttngagtgaaatttggtggtttccttattcttttttctctcttcactgtccttccaaactcacttttctngtgtcccgaccgcatttngtgaatcatccttactccctttaagttctcgcttnggatttcaccaggtgggctagatggtgccatttcacttccactgtttgatgcggctggtaatgttgactcacctgttacgtgttatttcactggtttctnngattttacnntctttctcatcagtgacctgggctttgatgaaattagctttcattaagtcctatttttttttaaatttgcatccttacctctttctttctctgtgaatgccatcatgtgtgtggtcttatgtacccttcatccatctgaagtcctggctgaatgattgtttctattagcagaaagaaaacaggtccatcctaatgtatctgggaagagataaaccctctcgtatgtggtgggattcctgacggggacattttgcagcagaattcttcatcatgtccagattgggctgggggagggttcatgaaccttagtccttgtacatctaacatggcttggtgtgggcgggaggggggacggaaatgacggcatcttacaaccctggttattaacggaacaagacaggtttgaaaccaggtgttatgtggcaccaagggcgtctaaaaaaaaggggccaaaatggcggtttttctctcttttcggtgtttctacttccactatacgcaaaaaact

SEQ ID NO: 624841 - DNA, 660 bp, Homo sapiens
ggaatccgcacggggggcacctttttactggggttcttaccaggctaagccaaactccactcttgtttagcagaagccataaaggttggtttaaaaaggattcttgacctaagcctttttttagaaaggttgatagattaggtagaacttcagaacatcagatcagtctcaaatgggttttttgggaatttatatttgacaataattatactataccaaacctatttgcagttcttaggtttggtgggtaaaacaattttttaaagcaagaagttatagaaaatgttttcatttaatggaaggctgggcgatggtcagcatcaacccctatgggatgcatttcccagtggccttctcatcttgggcctggaacccttggttcagggcttaggggagaaacagggcacatggcaacagccacacaggcattgtctttaacacagagccacgtgtccccaaaccagaataggcatggcccttgcccaggttgggatctaaatgagaccacaggggcggtggcttccttctagtagagctatctaggtttggctggaaagcttccgcccctgctttataggcccacaccctaggtcctccccagggttcgatccctggattcagcctttgttcagcccaataaccttggggggaggacccaac

SEQ ID NO: 624842 - DNA, 302 bp, Homo sapiens
tacatcgagctcgcacccttctgctcatcactagcgcatgaatgtcatatgtcataaagttccaataacagtgcttggcacatagtaggtgctaaataaattactccctgaactggcgtggtggttcacacctgtagtcctagaactttgggaagttgaggcaggcggatcacttgaggtcaggagctcgtgaccagcctgggcaacgtggtgaaatcctgtctctactaaaaatacaaaacctagctgggcgtggtggcgcttgcctgtggtcccagttactcgggaggctgaagcaggag

SEQ ID NO: 624843 - DNA, 749 bp, Homo sapiens
agcgggcaggagcccggacgcgggcaagatggcggccgcggcggtgcggcccgtgacctggaccactgggctgggacccacgaccccaccaccacgcctggaggacgcgtgagcgtgcgcctcggccttggaacggggagtttcccagcgcgagccccgcccttccccgcccgggaggcgcctcggggcggggtcactgtgccgggaggccccgccttccgcccgaatagcgccggtgcaccccgcaggccctgcccgtgggtccacgaggccggatccccgggttcctaggctgggactgcttctcagaaccactctgtcgtttttaagcagggtcacacactctagctcactgggtccattttaatttctattaaacattttgtgggttttggcaaatgatgtagctaggagatccaagggtgtcgggtcaaaggatgttatgcgactcataaggcatctccgacaaacttgtctggagcacctgtttatgtaccaaggcacttgtcctggaattgctgaggaagacaggacgtgacagtaaaaagacttggtcccggcaggaaacgggcaaggaaagccttgcactgggatagggctaacacagtgctacccaggaggggacgcccgcatcggatgtcgggggtccagcaaaagcttccttagggaccactaggttgagacgagaaggatgacgtatgggattagccaggaaaggggaacagggcagtgggaactggacgcaaaga

SEQ ID NO: 624844 - DNA, 1046 bp, Homo sapiens
  misc_feature (27)..(27): n is a, c, g, or t
  misc_feature (148)..(148): n is a, c, g, or t
  misc_feature (212)..(212): n is a, c, g, or t
  misc_feature (311)..(311): n is a, c, g, or t
  misc_feature (317)..(317): n is a, c, g, or t
  misc_feature (333)..(333): n is a, c, g, or t
  misc_feature (353)..(353): n is a, c, g, or t
  misc_feature (357)..(357): n is a, c, g, or t
  misc_feature (361)..(361): n is a, c, g, or t
  misc_feature (370)..(370): n is a, c, g, or t
  misc_feature (372)..(372): n is a, c, g, or t
  misc_feature (395)..(395): n is a, c, g, or t
  misc_feature (400)..(400): n is a, c, g, or t
  misc_feature (406)..(406): n is a, c, g, or t
  misc_feature (408)..(408): n is a, c, g, or t
  misc_feature (425)..(425): n is a, c, g, or t
  misc_feature (439)..(439): n is a, c, g, or t
  misc_feature (455)..(455): n is a, c, g, or t
  misc_feature (458)..(458): n is a, c, g, or t
  misc_feature (466)..(466): n is a, c, g, or t
  misc_feature (468)..(468): n is a, c, g, or t
  misc_feature (472)..(472): n is a, c, g, or t
  misc_feature (481)..(481): n is a, c, g, or t
  misc_feature (483)..(483): n is a, c, g, or t
  misc_feature (491)..(491): n is a, c, g, or t
  misc_feature (512)..(512): n is a, c, g, or t
  misc_feature (516)..(516): n is a, c, g, or t
  misc_feature (519)..(519): n is a, c, g, or t
  misc_feature (521)..(521): n is a, c, g, or t
  misc_feature (527)..(527): n is a, c, g, or t
  misc_feature (533)..(533): n is a, c, g, or t
  misc_feature (535)..(535): n is a, c, g, or t
  misc_feature (582)..(582): n is a, c, g, or t
  misc_feature (586)..(586): n is a, c, g, or t
  misc_feature (590)..(590): n is a, c, g, or t
  misc_feature (603)..(603): n is a, c, g, or t
  misc_feature (645)..(645): n is a, c, g, or t
  misc_feature (938)..(938): n is a, c, g, or t
  misc_feature (968)..(968): n is a, c, g, or t
  misc_feature (971)..(971): n is a, c, g, or t
  misc_feature (979)..(979): n is a, c, g, or t
  misc_feature (993)..(993): n is a, c, g, or t
gggagcgcctctcctccgcgtccctcnccccagccccctgcccgccccactttgggaccctccagccgctttccccacaaatgagatctttgcaatgagcaaacgaaagtgtcgcggatttcggggcgcccagcaggagcgagcgcancgccagccgcaagtccgcagccgtgtcccgcgccccacgccggcctccccggcggcagcgacgnacgagcgccacaccggcgggacagcagcagatgcgggccgagagccggtcaggggcgcagaggcggaggggatcggcgcggcggggagctcaccgcganctggangctgcgtccgcgggcncaccaggagctcaggcagcnagcnatcnaacgctctntngcaggcggtggacgctgctgaanctctngctctnanctcaccgctccgccgtncgttggaccaagcncagcattttacaaacncanctcctttntncaanggtcctcanancgcccctncgttaccccctgcagggcgcngcanacnangcgctnaccttncnctcgctcccctcgctggggaaggacacactcgctggcgttaccggcnggcntggnaagtaggactaangacccgaactgcaaccctccacaccagatagcacagaccacnccaaggctgctcaatctgctcaaatctaaaatatctcccctgccaggacctcggtgccgtggagactgcggggaactgctctgcccacacctgctctggcccctagacggaagcacctggagccaaccacggaactccagatcccagctgtgtgactgaatccacgccagcctctctgagccaaagctgcttgcagaaggggggagatcccagttcgaagactcccgcgcagagcctgtggccctctctgccaggcctcagggtgcctgagacactcacctctctgcctcgcnttgggggctgaggctggggctggctgccanctncagttctnggagcgctggggtngctgggccacaggcacagcagctcacctcaggactgggtctctggctgctggg

SEQ ID NO: 624845 - DNA, 469 bp, Homo sapiens
  misc_feature (27)..(27): n is a, c, g, or t
  misc_feature (148)..(148): n is a, c, g, or t
  misc_feature (212)..(212): n is a, c, g, or t
  misc_feature (311)..(311): n is a, c, g, or t
  misc_feature (317)..(317): n is a, c, g, or t
  misc_feature (335)..(335): n is a, c, g, or t
  misc_feature (337)..(338): n is a, c, g, or t
  misc_feature (341)..(341): n is a, c, g, or t
  misc_feature (343)..(346): n is a, c, g, or t
  misc_feature (350)..(350): n is a, c, g, or t
  misc_feature (354)..(354): n is a, c, g, or t
  misc_feature (360)..(360): n is a, c, g, or t
  misc_feature (363)..(363): n is a, c, g, or t
  misc_feature (372)..(372): n is a, c, g, or t
  misc_feature (394)..(395): n is a, c, g, or t
  misc_feature (400)..(400): n is a, c, g, or t
  misc_feature (424)..(424): n is a, c, g, or t
gggagcgcctctcctccgcgtccctcnccccagccccctgcccgccccactttgggaccctccagccgctttccccacaaatgagatctttgcaatgagcaaacgaaagtgtcgcggatttcggggcgcccagcaggagcgagcgcancgccagccgcaagtccgcagccgtgtcccgcgccccacgccggcctccccggcggcagcgacgnacgagcgccacaccggcgggacagcagcagatgcgggccgagagccggtcaggggcgcagaggcggaggggatcggcgcggcggggagctcaccgcganctggangctgcgtccgcgggggcncnncgncnnnncggncggncggatngancggtgtgtnggacggggtggacggtggtganntgacnacgacgatgggggttgttggtgangactgggtggtgggggactacttggacgggggggaggggggggga

SEQ ID NO: 624846 - DNA, 467 bp, Homo sapiens
caagtattcaaccccgcccagtattttaaaccaagtgattctaagatttggttggggatcaataggaaagcatatgcacccacccaagatgcaaatgttttgcaaatgatatgcccaaaattttaagtaggaaagtcccccaaacacttctgctttcacttaagtgtctggcccccaacactgtaggaccaagcatgttcttgttactgtgatattttaaaaacccccagtactccctttttccaaatgatcctagtaattccctagaaatatctttctcttccctgttatttaccaatttttcccagtatttttacacggaaaaaattgtattgaaaccacttagtatccagttgataagaggaatttggtataattatggtgggtgattattttttacacggaaggggccaaagctttactactgtggaaagccaactgttttaataaaagatttccatccccca

SEQ ID NO: 624847 - DNA, 420 bp, Homo sapiens
actactttcaatgtgagttagacaactgattcaaatgatccatattaaagaatctacttacatcctttagagtgataatgtttggatgctgtccataacgaagaagaatttcaatttcttctgttgggtctctcttgcttttatcaataatctaaaaggcaaatgtttatcacaaaacctcatcaactatacagttataaacattaattgtttatagctacagaccttgggtattacctcatgtaaatagtgtataaataagccatttatcagtcagttttattcaactacctggccagattgtttaatcagaaagccagtcttgatatagatggcaaggctgtaaattctaactcatgagtcgcattcccaccatgcctctccaatctaagtttgtaagtttgtagtaagtttaggact

SEQ ID NO: 624848 - DNA, 604 bp, Homo sapiens
agttctgtaaggagacggagtctcagtctgtcacccaggctggagtgcagtggcacaatctcagctgactgcaccctctgcctcctgtgtacaaggcgattctcctggctcagcctgccaagtagctaggattacaggtgtgccttaccacaaccagctattattgtctttagagtagggtcagggttcagcatgctggtcaggctgtactggaactcctgacctcaagtgatccgcccaccttggcctcccaaagtgctgggattacagacctgagccaccgcgtccagccgttagtcaattcttattccttataatgctgtgtattgttttgacctcataagtcagaaggtagtgatcttaacatgtatttcagtacttatgatgtctgctggtggcaagtagaagtcgtggcatttttcttaacagggaattgtttagaattgggcatgtagtataaatgtacttattatttggttcctggttgtatgggtaacaatatattactaattaattattatgattgtacatgaggctttacggtatgtggtatgcaatataactgacacagatcaatagttaatgtcacacagtgacaccagag

SEQ ID NO: 624849 - DNA, 113 bp, Homo sapiens
aaaacattatgatgatgacagaaccactatcacacataaacaaaaatagagcaaccaagcgtgtccacatctccatgaattcagtgatatgaaatacaatgttgttactgtta

SEQ ID NO: 624850 - DNA, 549 bp, Homo sapiens
gggagatgtatgatgttattatacaagcatgagttcttctatagggtgatagattggtccaacttgggtgtgaggagtacagttatatgtaagggattgtttaggtagtgggtgttgagcttgaacgctttcttaattggtggctgcttttaggcctactatgggtgttaaattttttactctctctacaaggttctttcctagtgtccaaagagctgttcctcttaggactaacagttaaatttacaaggggatttagagggttctgtgggcaaatttaaagttgaactaagattctatcttggacaaccagctatcaccaggctcggtaggtttgtcgcctctacctataaatcttcccactattttgctacatagactggtgtgctcttttagctgttcttaggtagctcgtctggtttcgggggtcttagctttggctctccttgcaaagttatttctagttaattcattatgcagaaggtataggggttcagtccttgctatattatgcttggttataatttttcatctttcccctgcgaacct

SEQ ID NO: 624851 - DNA, 840 bp, Homo sapiens
  misc_feature (536)..(536): n is a, c, g, or t
tctcatgtaatgacaataattatatgggtcttatataaattaaatatataacattatatattagtctgcatacttgggatagtgtgcatattcattatggtatcataatttccaaaacagaaacaatgtgatatcttaataagtatctatttaatggagtttgcactaggctttaatttcatggtgtacattaattgaactaaaccgataaatttatggccattaatctgtaattcatcatacatttttcatgcctgatataatttagtcatccatgtgtcttgttgatgtatcctaattcattccagtcagtccaaatgtactgtcttccataggttatccttcccttcaagtgaactgaaacccccacagtgtttgcactacacaccactaacccctttccagcaagatgatcatttagtgatatctctagcatagaatctccccttagaacccctagtagattgagtgatgggctagtgccttcccaggggaccatagagcattccgagattgggaccttccagtcgtaactnggcagaaagacggtttcctttagaaagaccagcaacttggaagactcaggtggctttaaacagaaatggccttgagaccagtgcgtctcaacatgaccacccacgttggcgaatttgttgtcctcgtttggccactcggactcccagttggaaccctaaaagcctggggcccagccggagagcactgggggtcccacacccactggttgacagcctcgaccgtggagatcctacccccatccacaggggagcgggttggaccatggccaccacccccaccgaacattcatcaccccactgtgcg

SEQ ID NO: 624852 - DNA, 696 bp, Homo sapiens
tctatgactcatacctgatttaagcgcgatctgggagatcatggctaggatggtatacaagttcgagcgtttgctcacggcctggacgacccacttgatcgaggtcatttctatcaaatccatgccctgtgaccatctcatgttcattgctatgattctcatagactctatcactgattccgtggtcatcatagtcacagtgcagctgtaggagcaaacctcagtgctgacgcattaccagtctagactatgtaacagtatcagcaccttacttgccttaccagattacaacggccgcatggatctggacgtcgacatatccacatacatgagcatggtcatgacgtaaatcattatgctggcaaagattactgaggtcacaatctcaaaaactgagtattaaacacgatgatgcagtgtgactatatagttacagggtgatgagactctgcgatcatgtgattgtagacgtaattgcttcagaaagtgcgacaatatgctcattagtactaatgcataacgagctgcctgatcaccaaacccatgagatcatgcgtcacgctgtgccgcattggggcccctttggaccattcataagagctacttttacatggctaggtctataagaactgagtttaacccattacacgttttcaattaacggttgcctatcagtggctacctgcccttatggag

SEQ ID NO: 624853 - DNA, 135 bp, Homo sapiens
cccccctcctatcatgcacaagaaaaaggcaaaatcctcaatagaaaaaatggggccaacagacttaaacatagtttacaagacggatatcccagtggtcacagaaacacacaaatcacgagaaaatgcgcaata

SEQ ID NO: 624854 - DNA, 280 bp, Homo sapiens
ttttcccgtgggggggggtggtcttttggttttttttaggggccccttctcctttccttgggggggagggggctttccccactttttttggggggggggggacccctttttgaaaggggggaaagggggggggtttttttttgggggggcgggcccaatttaatttttggggggggggccccccggggggggcccccccccctttttggggcttttttttttttttttggcccccccccccccggccccattcccatttagggggcttttccccctttga

SEQ ID NO: 624855 - DNA, 807 bp, Homo sapiens
cagtcctttggccccagcagaggtgctttaccgtggtcctggccccggactgaggtgttgcgacccggcgcgctgttgccgtcgctggggtggggccgggccccggaggaagccgctttcccggctggggtgggcgggccagggaccgggagcaggtctggtcctcgctgggccgtgttcgatggcctcctgtcgcggtctggggctgggaggtacagtggtctggtcggcgggtaatgagggtcgccccccaggctccaggaggtgcggggcaagggtggggtgcggcttgtacgtcagcgctggtacccgtgtgcgtgcatcggatcgggtgtgtagctgcgaggcccgtgtgggccggcggtgacgttcggcatgtcgaatgtagtggacttgcctcctggatgcacgaagcagtgcccatgcatcatgccccagggtccgtcccccgcctgcccctctagtgaacggaacggggacttgtgttagtgtcctcacgcctggttcgtacaggctggcggttgtcctgggggtttccagcgaggaatgtgttggggagcgctcctgggtgtggctgctgggtaggaggggaaggcagggtcagcagcccctggggcgaccgtaaagtgggtggcccttcaaattcaaggtactggaacaagggggctgggccctcctgcccaccattgcccgtcatttggcttgcaggcctcccgggactggcgagctggctccttggtgccctgtcctttggaccagggccgccctgaggggctggcacagctaccttctccactgtggtcccat

SEQ ID NO: 624856 - DNA, 618 bp, Homo sapiens
  misc_feature (567)..(567): n is a, c, g, or t
cgccgagcgtcagggagggtaaaatgtagtgctgccaactgtctgctcccacggtaggcagccagcccagttcaacggagaatacctgaattaaaagcatccccagagcaaatgccggaaacgagatccccgacaccgcaatggtcatactcaatcgatccggccaacggttacgccagactgcggcgataattcccgccgccataccaaatataactcgccagaccatactggttatggtcagccacagcgttggcataaagcggctggcaatctcatcggcaaccggacgacgcgacaccatcgacaggccaaaatccccctgacagcattgctgatataggccagaactggtgatacagcggctgatcaaccccagctgctgacgcaccagttctataacctgcgcatcagcttcgggcccggcaatcaatcgcgccggatcgccgggcagcatatggacaaataaaaacaccagcaccgagacgataaacagcgtcggaatcaaccccagtaagcgtttgataacgtaattaagcattccactccctgcgttgcttattgcanatccgcgtcttcaaagcttgagccggtgtctggcatgatccaatccacggg

SEQ ID NO: 624857 - DNA, 726 bp, Homo sapiens
  misc_feature (4)..(4): n is a, c, g, or t
  misc_feature (9)..(10): n is a, c, g, or t
  misc_feature (14)..(14): n is a, c, g, or t
  misc_feature (56)..(57): n is a, c, g, or t
  misc_feature (82)..(82): n is a, c, g, or t
  misc_feature (84)..(84): n is a, c, g, or t
  misc_feature (86)..(86): n is a, c, g, or t
  misc_feature (88)..(88): n is a, c, g, or t
  misc_feature (99)..(99): n is a, c, g, or t
  misc_feature (110)..(110): n is a, c, g, or t
  misc_feature (117)..(117): n is a, c, g, or t
  misc_feature (120)..(120): n is a, c, g, or t
  misc_feature (123)..(123): n is a, c, g, or t
  misc_feature (140)..(140): n is a, c, g, or t
  misc_feature (156)..(156): n is a, c, g, or t
  misc_feature (158)..(158): n is a, c, g, or t
  misc_feature (161)..(162): n is a, c, g, or t
  misc_feature (165)..(165): n is a, c, g, or t
  misc_feature (177)..(177): n is a, c, g, or t
  misc_feature (179)..(179): n is a, c, g, or t
  misc_feature (216)..(216): n is a, c, g, or t
  misc_feature (256)..(256): n is a, c, g, or t
  misc_feature (274)..(274): n is a, c, g, or t
  misc_feature (284)..(284): n is a, c, g, or t
  misc_feature (364)..(364): n is a, c, g, or t
  misc_feature (366)..(366): n is a, c, g, or t
  misc_feature (377)..(377): n is a, c, g, or t
  misc_feature (407)..(407): n is a, c, g, or t
  misc_feature (412)..(412): n is a, c, g, or t
  misc_feature (420)..(420): n is a, c, g, or t
  misc_feature (510)..(510): n is a, c, g, or t
  misc_feature (525)..(525): n is a, c, g, or t
  misc_feature (527)..(528): n is a, c, g, or t
  misc_feature (541)..(542): n is a, c, g, or t
  misc_feature (547)..(547): n is a, c, g, or t
  misc_feature (549)..(550): n is a, c, g, or t
  misc_feature (559)..(559): n is a, c, g, or t
  misc_feature (565)..(566): n is a, c, g, or t
  misc_feature (591)..(591): n is a, c, g, or t
  misc_feature (613)..(613): n is a, c, g, or t
  misc_feature (674)..(674): n is a, c, g, or t
  misc_feature (696)..(697): n is a, c, g, or t
  misc_feature (699)..(700): n is a, c, g, or t
  misc_feature (705)..(705): n is a, c, g, or t
  misc_feature (712)..(712): n is a, c, g, or t
  misc_feature (717)..(717): n is a, c, g, or t
tcgngatcnngggnaattttgactaggaaagaaaattttaggcatacagatatctnnagaaaagtactaccttattttcccntnangnggaaaataatntgaaaaacaanttattanatntanctggacaacgagagganctaagtaactcccaantntanngcngcattacaagananaacatccctcaccacagtgtaagatttaagggcaacntgcccaaggatgcatgttatatcaaacacagcaagattgntgctgccctgccaagtanttccaatccntacccaggtcctactgaaatacgggtggtcccagttagttttattgaaataaatctttaaagaaaaagataaagcatttnanaagacaagtcnaaatgcatcaggaaccacatatccaacatngactntatcctcnaatgagttatgtttgcctcgcactaataacttttatttcactcagagcagtaatcttccatacataagtatattccctgccaataattcncagaaaaaaaatccnanntgattagtaaagnnaaatntnngaattaacnggcccnntaaatttgttttaaatattttgaanatttaaaaagtgtttaaagttngtaattcctagtaggaaaacattatctgaatgaataccctaatggcaaacccactgtaaantgcttcagctgcatttgggggnnanntcganaattccnggcancccgggggg

SEQ ID NO: 624858 - DNA, 364 bp, Homo sapiens
  misc_feature (272)..(272): n is a, c, g, or t
  misc_feature (294)..(294): n is a, c, g, or t
  misc_feature (310)..(310): n is a, c, g, or t
  misc_feature (332)..(332): n is a, c, g, or t
  misc_feature (335)..(335): n is a, c, g, or t
  misc_feature (359)..(359): n is a, c, g, or t
attcggaacgagggaccagcctggccaacatggtgaaaccccatctctacacaaatacaaacattagttgggcctggtggcaggtactgtagtcccggctactcgggatgctgaggctggagaatcacttggacatgggaggtggaggttgcagtgagccaagattgcactactgcactctagtagcctggacgagagggcaagactccatctcagggaaaaaaaaaaaatatatatatatatatatacatatatatatatgtatgtatatntatatgtatgtttgtgtgtatntatatatgtatgtgtntatatatgtatgtgtgtgtgtntgntgtgtgtgtgtgtatatatatatntatat

SEQ ID NO: 624859 - DNA, 401 bp, Homo sapiens
atcatagctgactcttgaggataaacagcgggcaggatgccacctcatattctgaatggaaagaacataggggctgaataaatcttcagccaggtgcttgccgaccaacttagaggaacaggggagcgcacatattgttcatgctattcgcatgcaagctaccagacgctttgaagagatgtaccatgctatatcaagcaaagaaaatgccaattctcagccaaatgatgaagaagcctcctctgatgcctactgctttgagctgctctctatggatttagcactgagtggctctaacggtggccgtaaatatctggatcaacatttaacacatgcttaagcactattatattcaaatgacatgcttgctatgcaaaatcataagctcagaacctgtattg

SEQ ID NO: 624860 - DNA, 822 bp, Homo sapiens
atcgcttgggcctgggaggtggaggttgcagtgagctgagatcatgccactacactccagcctgggcaacagagtgagactctgtctcaaacagaaaaaaaaaaaagaagaagaaaggctgaatagtaatagagctaagcattcagctcaaggaaatggaaaaatagaaaaaccttgaaacgaataaaagaagcaataaagagaagaatagaaataagtgaacatagaaattcagaaacatcagaatcaagaagtgggttctttgaaaaggccaactagaaatcgatacacttccaatgaaatggacaaaacacaaggaagagaaacacagatagtagtaggaatgaaagggaggtacactgtagatcctggtcgattgaagacattgaagatccggtctggtgaaataaatagaagattattttggagaaaagaaattatacccaaaatatattaacaaattatagatgaacgaaatttatagaatacaagagaagaaagttggacacgaggaagaaatagaaaacctgaatattctcataacgatttgggaaaagctaattagtaattaggaagccttcgctacaaagaaaatccaaacccgacatgacttcactggctagtttctaccaaaaatcttacgaaaaagataactgccaatcctaattatccacggtggcagagaatagaaacaaggttataacctccaattgtgttttaagaggctatcatgaatctgggtaccaaagctcagtgaagaccatacaagacagaaaatttgcaggccagtttgaaaatatagatgcaaaagtcctaaacaaa

SEQ ID NO: 624861 - DNA, 993 bp, Homo sapiens
gcctgaaatctgcgcaggagttcccttggcggatgtctctcgacctcacctttcgagacgcagaaactcgagcctgatgtacagcggtcctagcattagctctcgccatggctctcaggcgatgctgacgtgcagaacgcagatcaagcatatgatggcttgcaattgaacaagaagccaactgagaaatcggaagaaaagtgggatgctaaaggcagaagaagagttgcaacatagatgaaaggtccggcttgtgttgacctaaagactagagattatggacactattgatgagaagaagagagaaatcggattgagcatggagaagaaaattcagatgtagcaaatggagagtggaatcaacgtgattactctaacagtcctcagggagcaacgagatgagctttatgcagcagaactactaaatgatagtcaaatggagagctcagcaaggtggtgacacagatacaagccaggtcatgcaaggtgcgtgctggatggactggttctccaggttttggtatccagttgctggagccccgaagtgattgtcgtccggagtgacccaagatttccctctggtcacggctgctgtggagaaggcaattcctatgtacaagatcgtgaacaaaaaacgatgttgatgtcaaattgagcaggagtcctacctgtcctgaagaacatagctggtggcagttgagatctatcatgggatcgtcaaataaaggtttccaaacacctggaaaaggcggctggatctcattagcccaggagatgatgcgagaagtcgggggagctagttgtgcaatgccaccagggagtttggcatacgccttcaggaggcggagtcgtcacagcctcctggtgcaattggaactttcgctttgaaacaaccatttcctcctcactccactgccagtggtgattctaaacagccttctagcgcgcactgtaagtgggtctgaccgccccctctacgaacccgtccctggg

SEQ ID NO: 624862 - DNA, 244 bp, Homo sapiens
tgtcagactgcaggccgtcaggactaccagctccgaaatcaccaccaaggacttaacaggagaagaaggacgttgtggaagaggccgacaatggaacgacgacgcccctcctaacgggaatgctactcaggaacatgtggcgcagtgatctgacaattgaggtagactaagacataggaagaaggtcgggaaggaagaggaggaggcagacagaaggttatggtaaggaaggttgctcatggcg

SEQ ID NO: 624863 - DNA, 879 bp, Homo sapiens
gaacacactccggctgcagcagcggcatcagctagagagctacaagcagcagaaaaaagagctgctccagaagggctccacctgcatcaccaacaccgaaggatgggtggggcaccccctggaccccattggctgcctctgcagggcgctcctggaggcctgtcgtctggaggaggagacacttaccctttacccagactcaggccccgagaagcggaaggtgggctaacaagcacgtgtgctgttgtgccgggagaccccctgtgggagatccttatatctggggtgctgctggcgcgtgggaatgtggctagctgcgtggggctggggcagcagcgggtcctgccggaggggctgtacgcccaggacaaggtggtgcgcaacgaggagcagctgctggcctgctggaggaggtggagttggatgagcggttggtgcaggtgctgcgcaagcaggcggggctgctgctggaagggggtcccttcagtggctttggggaggtgctgttccgggagagcgtgccactgcacaccctgtgaccgatacctgtatcaccgcaactgatgcctccatgaccggacctggctatcggcctcgcgctgagagctatgaggctgccaatacggcgacagacatttccaatgctgggacgaactccatcacaggaccagtggactccactgatgaagcaacccggtacccccgcggttcatactgagcacactggggaacccgccaggtgaaggcttccaccagttgcggcgcacgggacaaccaaggggtgacaagagatgggtccatcagaaagatcaacagacggcataagagcgagacgccacatacagcacccgcagagcaacaaaaccgtgcgcatctgac

SEQ ID NO: 624864 - DNA, 1796 bp, Homo sapiens
gcagtgtaggttacggtcggatggctggcggcggcggcgagccctggggtgcgagtcgcggacgggaacaggaaaagccatccgtgcgagcccctgcgtgtgctgtgtgtgtgctagcctactgttctgcgctccgatggtgaagcctgtgcgcggagaggcagcggggtgttttcccctctgtccgtttcggcgcccccgacacttcctttcagtttcgtgcgccgcctcggctcggaaagttggcggtttgacggagcagatggcgaggcagccggtgccccgtggccgtgttgcccgcatgctgcctgcggggggaccgtttctgaggttttgggccggctggctaggggacgaactccgttgcatgagggactgtcgcggaatgccagccgggatgccctagtgaggagactccgtgagaagaagtcgtcacagacgtgacttgatgcggtgcgcacaccaggaaatagacggtgcagaacaacgtaggtaaattgggaccttttgcagggtatatcaaaaaaggccaatagtatgcaccagaggggcaccgacatcgagggacaagggacgtgactcatttgaacgcacgagaggccgtttgcaacaggcaccggcagcaagaggcaccagaatggataccatgagaggcggcacatggacagcgacaaaccacgtgggacatgaacggggcaggcggaaacagtagagggccccgtcaccagtaatgggatagtgcaaattccgagaggatgagggaccacacagtgggtgcacggtgtatgcatcggcccaggtgcgggaggacgagcacggaaaggacaagcagcatatgacacagcgcgcgccggacattcacacggagtagccggtgagctactagacgagtgatagagcagatacacagctaatagcggtagccaaaggggcctacgccgtgatagccggaacctttcagtgaaccatccgtcgcactgagcgagcagacacgacaaaccgtgtgaatgcagccgtgtatccaacaacacctcgtacgtttagacaccctgactagcgagagcaccggagggcggaccagcgaataccacacgagcagagaaggcatagggagaagagccaaaggagcaggcagtatggaccgcacacccgtgcgtgacgatgcacagagccaccgggtcacacaaagaaagagaggacacaagcaccaccggtgaccacgtagccaaatcacacaaggtagaacacgatgacacgagaccctgggtgtggagggaaacacggcacagccctatgaaaacgccacaaacatgtgagtcgcatgaccaagcatgagacacgagaggagtgggcacacgaacacacgacggcgcatgagccgtgaacaagaacagacaggcacagagacgattgataatggcacgacccgagcagaatcactacccaagagaggaaacgggggagctataggggacaccaccacagacaaacaggcacagtgaaaggaccccgaaacctccagaaaataacgcaatagtagacacaacgacacaaacccaacacaagagacctcgacacaagagcacaaagaacgacaagaacagtgcaggacagcaacacagaatcaaacagaggaacacaaaataacacagacaaaaccacaaagacacaaacacgaccacagcgagacagaacacaaaaaacaacacaacaacacaccaagatcagcacagcaagagaaaagaaaagcagaccacgcacaagaaacagacacgaacacaaattcaacacacagg

SEQ ID NO: 624865 - DNA, 209 bp, Homo sapiens
  misc_feature (40)..(40): n is a, c, g, or t
aagaaatactgattttatttcaaaaaaaccgaggcatagnttctgactgctattctgcaggcttttggaactttaggaaacagtccaggagggctccagtcagacccaggaatgacaccagccacacttgtaactagcagagataacctctttgatcttcagcgattttaaaagttcttcatcctaatttctgtgcccttttcaaggta

SEQ ID NO: 624866 - DNA, 342 bp, Homo sapiens
ttttttttcccttctttttcccggtgccctttatttttcatccattggctcctaactggggggaggcccccccttttggtttttcccaaactggcttctggtttggggttccttggccccctccggccccttttcccccctggattccaaggcccaggaaggggggggagcttttttttccacccgggggttttttggtggctacttccaccggctttttaaggagccgttttttcccccggcccttaaagttattgaaattgaattttgttaaggccttaaggaaggaaaaggttaagggaaaacttgaagttggaaaggaggaggttaaaagggcccgga

SEQ ID NO: 624867 - DNA, 620 bp, Homo sapiens
  misc_feature (7)..(7): n is a, c, g, or t
taagtcntcatttgatgcctaaatactcagttagtctttgaattcgaatcttcgagtcaatcttatcacttgatgctctccgtacagatcaagtgtatcagcatcatggacaagtctgcttctaacggtcgacaaagttgcgcagattgtagatctgcacactaaggtagacgccgtttatgtgttagcatttcctacatcagttctaacattctactcactccgacagccagtaatgcacgttgcaacatatctaagatggaacacatgatcacatggtgtcaggtcctatggtgataatgagatatatgtgatgtctctagcatagacttggtagctagcttaatgcgcttgatatggcctatgctggattatggcaacaaggcaagcattggactcggtaggttgtgccagctgagctcagatggctattagcggtctcgaggctcacacttgtccctcgagtgtcatgtaagccttctgggcagtgaacatgatcttagattagacagtgttgaaaattggtaagctatcatcaagagctgagcggagagattgtgcgattcaatacaagcacattatttaaccaaagtaggcacataaagtcaatatgggtttac

SEQ ID NO: 624868 - DNA, 486 bp, Homo sapiens
tcctatcggaaccaatgagctccggttctgaagatggcttgagggtgttgcccggtagggtagtgtctgcagggcaccttgtgcatctcccctctcctccatcagctgggagtgtgggcagcactggagtggggcctgtgacatggaccctggggtgagaggctggttctttgggtatgaatgtcagtttttgtttacaatttctcaccacccacaccaaagtcctaccactgcctgtacctatagcagagagatcgtggtgtgtgtgctactcgcatgtgttggcggtaccaatgcacggaggttggataaatggggtaggaacgagagagtagcctgggaatggtggtcctcagggctgtggctgccccgtcacgttcttgtccttcgtgggagtggattggtacatgggctgctgctgctcctccatgtcctcattatcctcctctgtccctgagccccggtccacctcggggtacacgacca

SEQ ID NO: 624869 - DNA, 234 bp, Homo sapiens
agtatcacgcgtgttcttaagagggagtgtattaagcgggtagtagatgttgacctgtgatcacgcatggactgcaatccatgggtacagctgtctttggttatgagggctggcttgctaggttaccagcataccttagacagtgccagatcaaagctgacaaggactaacttagcagtgggctacaggactggggacttccagctacacactaatgtccatgatgggtaccga

SEQ ID NO: 624870 - DNA, 230 bp, Homo sapiens
ctgtcaatcattggctaagggctgctcttgggcaacataaattcccaggtgcttctagctctccgtgcattcagagaaagtggattccaatattctgaggctgttgggagtgaaagcacatgggaaactggtgtgcacaaaatcatcaagggagctgaggggatgtgggagggcactgacagcatctgctgctcaggttcattgtaaaacattgtgacaatatggaaaaa

SEQ ID NO: 624871 - DNA, 184 bp, Homo sapiens
cgacttatgtacatcggtcctttcccagactagatgggacggcatatgcctgactgcgaggtgatcgatgacagggaagatgttaccagatattaaatccatggagtagtgcagacacgacagatatctggaacgcgattgacgccgacaaatcgggacaatcagccagaaaaaccagcgtctc

SEQ ID NO: 624872 - DNA, 135 bp, Homo sapiens
cctacaggatcctttgtatccggggagagagtcagcctctggttagactgcagtaacactatatctgacaactgactgaagttcactcaggtcacaccacaagctgaggcccagtggagacaaccaatgtttcag

SEQ ID NO: 624873 - DNA, 215 bp, Homo sapiens
cgactgactcctggctatgtgatccttccacctctgcctcccaaggtgctgagattacaggcgtgagccacatgtccagccagctcccccccccccccctcgccgtctttagggattactatatataagactatgtcatctgcaaaaagataattttacttcttcccttccaatttggatgctttttttttcttgactaattgctttggctagga

SEQ ID NO: 624874 - DNA, 845 bp, Homo sapiens
gtgatacaccagccctctcggaggggtttcggaccgaagggaagaagctgcgccgtgtcgtccgcctccctgcgcgccgcgcggcacttctcctgtggctctccccgaactctcccgcgacctctgcgcgccctcaggccgcttccccgcctgggctcgggacaacttctggggtggggtgcaacagaaagtttgcggctcctgccgccggtctctccgctcttggcctaggaggctcgccgccgtgcccgtcgtatcggccttgcccgggaccgcgtccgtgccccgagaccgctaccatgaacaagcatttacatcggcaacctcaacgagagcgtgacccccgcggacttggagaaagtgtttgcggagcacaagatctcctacagcggccagttcttgcgtcaaaatccggctacgccttcgtggaacatgccctggacgaccactgggcgatgaaggccatcgaaacatttctccgggacaagtaagaatcacacaggaaacacgcttacgacgatgacacactacggagcccaaaacacacacaggagccggagcacatccaaatccgaaaggattacagcaccagctccgatgggaagctacgtgggacaaaacagccggcaacaggaaaggcaacagaaccagaacctgtgagccaagtgaaaccacgagagctgaagacggcagtgagtgaatgtcaccctataacaacccgcgaccagaacaggccaagcgcatccagcagctgactggcaccaattggagaaccatgccagaaggacacctacatcccaaatgacaaatcacaccgcacagcaacggcccgaggagccgaaccg

SEQ ID NO: 624875 - DNA, 1112 bp, Homo sapiens
gacccgtcatctactctatcatcttatgtcaagggcacatcctaatcaatcagagctcacacgcatcgccacttgaatttatctacccgtggatgtaaggacctatacaataacacatgctttgtgctgttctagttctcgaagttctacaccatacaacaataagacctcatcgttaagaccatagagctgactatacacagtatgtcctcaccagaatcaacctgcaattcagtacatccttacctacgtagactggtccactttcagagcatagatatactcctcgcgtaaccaatctagaaccaattaggcagcctatcaactcatacttaaatactcgctcacttactaactcaataagtgggcgatagtagctaatatataaccggatgaattatgctcctcacttacaacatatccttgaaatccctacgagggttactcaacggtgctcgctctgaactatccaggcacgtgctttcattacgtcgccaattgaccaacacacaggtagaccgcccaatctattaaaatccatagtagcgcgagaatctcgtcccttccccataatttagtaagccgtctctctcacttcctcttcgagagaccttgatcctatctattaagccagaggctagtgagagggtcggacttcaagtcaagaaacgaagcaacgctaaaactcgatacgtatactctcttcaattacaccaacaatacggatcgaaaaaaatggccagctaatacacgacaacaccttaactatatactcagttactgaatatgagctatttatatcatcttagaatactactcgcatttctgatatcaaatttaaacatcccattatcacagacctatgaatatctcgggactgtaaccactggcattaatgactaaatgacattaaatccatatactcctccatgaccttaagagggctggcccacgaataaagggtatttgcccatggggccatttcgcaaaaattaggacggaaaatagtttcaaaagccacaaatatgcaattgcttattactttaatgtacttaggctaattatcactaataaaataccctcttccgataaaaaagaggtgtttaaccacc

SEQ ID NO: 624876 - DNA, 866 bp, Homo sapiens
gtctttcccaactgaggtcatccattgagcagaaagttctatggacttctgaacaatatagctgaagtacagggaattacatgctgaattcacactgtggacaagattttcatagaccacagtcacgtaagtcatccatacacagtggtggtaagtggaagtcacgtggatcttgcgagtcgtgtgcaatcgcatcgtccagttgtagatatccagaggtgaccaagcttggagattgagttcgtaaccgagaggaattctgctgctgcgcatgatgtgagccatttgcaggctactgatggcacatatcgtgacgaagctggttcccacgaggttgctgatggatggctaagcaggtatccagggtcccttttacaatcgcgaggtcttatacagcctagtttaccttaggggtcgtggtgtagtccagctaaactacactagggcatgtatgcattgccctattcgtgggcaggtgtcgcggggtcgcaattgcgaaacgaatgtactagtcatgttacagacattcccttcttcacagtggcttattggcacgcatactagcttccgaatttcgagatgaacgggaggggcatttggggaagctatcagagtaacgagcgattctagaaagcatttccagtgcaagcattaacttggacatgccccgcaattgttcccaagtcgaggaacatgggcctgatatggtgccatatttcgtgagaagtatgcgttataagagaacaagaactacaacttaaggtgacggccaatgggcgaagggcacaaaccttcaaacggttttacaataaaaacaagactcccataggccaagaagattagcctttgcatagtgcccagttaaa

SEQ ID NO: 624877 - DNA, 382 bp, Homo sapiens
  misc_feature (9)..(9): n is a, c, g, or t
  misc_feature (49)..(49): n is a, c, g, or t
  misc_feature (134)..(134): n is a, c, g, or t
  misc_feature (201)..(201): n is a, c, g, or t
  misc_feature (258)..(258): n is a, c, g, or t
  misc_feature (276)..(276): n is a, c, g, or t
  misc_feature (376)..(376): n is a, c, g, or t
aaaggatantgatgaactgatagtttatctagaataatgtttattttanattttattttattgagacagggtcttgctctatcacccaagctggagtgcagcggcatgatcatggctcactgcagcctcaaccncctgggttcaagccatcctccctacctcagccttctgaatagttgggactacagggtgcgccaccanacctggctaattttgagggggtagaggggaggtacagatgagatctcactgtgttgnccaggctggccttttgcncctggactcaagcagtcctgcctcagactcacaaagttctggaattacagatgtgagccactgtacccagcctgggcgacagagcaagactgtctcaaanaacaaa

SEQ ID NO: 624878 - DNA, 377 bp, Homo sapiens
ttattgggaggataatgggaggatcgtctgagccggagctcagacagctgagcaacagtgagactcgtctctattttttcctattataaaaaatttttcattaaaaaaaattactggtcttctcttgcgaacaatttaaatcaatggatagagaacatccaaaactaatttggatggccctcctgggagatcttttgggtccgaaacttgtcttagaacaaaattaggggctaaggtgcactggctcatgcctgtgatccccagcactttgggagggtcgtggagggtggatcacttgaggtcaggagttcaagaccagcctggtcaacatagtgaaaaccccatctctaactaaaaataccaaaaattagccagga

SEQ ID NO: 624879 - DNA, 181 bp, Homo sapiens
tggaatgatgagccttcgggcccccctttccccttttttggtcccccaactttgaaatgtgtttgaaggcttttgggctcctccctgtgggagtgtgggtgtggaggcagccagggctttacctgtgttacacgtgactttgaaaccagtttgaattaaaaggtgcacacctttaaaaatt

SEQ ID NO: 624880 - DNA, 134 bp, Homo sapiens
ggacgaggaaggaggcaactggctttggagaaaacagcgggcaattagaaaagcggttaccagcatgtcagcggacagctcacttctactaaaaagccccccaagaaagcgaatgagaaaacagagtcatcctc

SEQ ID NO: 624881 - DNA, 821 bp, Homo sapiens
  misc_feature (14)..(14): n is a, c, g, or t
  misc_feature (45)..(45): n is a, c, g, or t
  misc_feature (318)..(318): n is a, c, g, or t
  misc_feature (529)..(530): n is a, c, g, or t
  misc_feature (565)..(565): n is a, c, g, or t
  misc_feature (621)..(621): n is a, c, g, or t
aatgaaaggagggnaggaaagggaggggaggggagagggaggggnaggaaagaatggtctatatgcttctatctttgcttttgcccctgtggaggttttaagggccaaacagaaattgaagtgaattgttctactgcagtgtctgacaataaaactgttacaggtactctttggttattcattctcgttagaacgaggccccatttcatataccaccaggtgcaaacatataagacgcataacgaaagtatttcattcttatatgaaattaacaatattctgacaagttatatgcgaccggtcacactatttaggagnatagactgccaatctgccctagcacataacaaggccacccatcaaggtcccccgcacacgcctccaaagaccccctggagcactcaccatctcacgccaccctcccacaataccccgccccccccgaaatcccccgctccactcaccccccgccaccccaccccacccccctccccacccctccaccttcttccctattcatctctcggcnncaaaaaaaaattccaacccaactcctccctcatcntaacccaccctccccccaagttcgcccgccctccccatcacccacagcccacaccnaaatttcccaccctccaatccccctcctccccgcccccctctgtcgcactactcgcacaccaaaaccccccgacccccgaatccagaaccaccacacgacgctcaacccacgccaccaacgccattatcccccttactccccaccattgtctcgcccccccgattgctgtcctattttttttgctcaacctactccttct

SEQ ID NO: 624882 - DNA, 208 bp, Homo sapiens
ttctggctttggcatatttatggcagaatgtttggccttcagtgttttgaatgtggatggataggtggctgaagctacatttataaagtgtttgggactgttaaagtttcctagccacttggagaaagcagtgtgtttatttctggctttgttcttatttagcagccttagaatatttatttttccaaatttagtattcttctgatta

SEQ ID NO: 624883 - DNA, 176 bp, Homo sapiens
agtttggctggggaggggggcagttttaaaggcttccccttggtgttcctcaaaatgatatttcttactccgggggccaaggtaggggttagcttttgttctctttgtagtttaaaatggatctcctgccctgttcaagttcccaaatctttttgtgtatacccatatgtacatta

SEQ ID NO: 624884 - DNA, 609 bp, Homo sapiens
  misc_feature (517)..(517): n is a, c, g, or t
  misc_feature (539)..(539): n is a, c, g, or t
  misc_feature (567)..(567): n is a, c, g, or t
  misc_feature (585)..(585): n is a, c, g, or t
  misc_feature (603)..(603): n is a, c, g, or t
gactggttcaatgccctccgtgcagcccgtctgcagtacctaaaaatggccttccctgattagctatttaataactaacgtccttaattctttttcaggtaaataagggatttctttttggtttggttgtattgctggtggctagtgtgatttttttggggggtgttgaagagccttgttttcttatattaccagagttgggtttctggttccttctcatttgggtaggctctgtcagagggaaggtctagggctgaaggctgttgtttagattattttgtcccatgaggtgttctcttgatgtagtactctcccccttttcctatggatgtggcttcctgtgagccaaactgcagtgattgttgtccgtcttctgggtctagccactcagcaagtctaccaggctccaggctggtactgggggttgtctgcacagagtcctgtgatgtgaaccgcctataggtctctcagctgtggatcccagcacctgttctggtggaggtggcgggggatgcantggactctgtgagggttcttanctttggtccgtgctttgcttcttattantattaaattttggcccanttcctgcaggctaaccanaaacat

SEQ ID NO: 624885 - DNA, 102 bp, Homo sapiens
agaaaagacaaccaaccacccgaacaaagaacttgatatcactaatagggcgctagggttagagcgaacgaccgagcgcaggagttttgagcgaggaagcgg

SEQ ID NO: 624886 - DNA, 1004 bp, Homo sapiens
gagcacaaccttgtccacagccattttaaatatccacttagccctgtgtagttggtaggtggacaccactttcataagtgaacttgagctcactactcaattgtgcagcttaatatgctgactagggacattcccctatggattatctttatatcactgtctttctaagcccagagatgtcataagtgacaagaaaagtgataggatcaagaaatgggtgtcacttgctttcattttggaaacatgttattaaactatggtctctttcaaataaatagtagttttatatttcaacacaagttgctataaagcagtccttgatggggttttgattgcatcaggtggaaaagcctcaaatcttaagagggtttccaatcctaagatatacaattagggtggttggcctaatggcctgtgccttataacactctgaccaagcgaaattgaaggacactttttggcaaaatgcccagaatggttaccgattcatttcaagtgtgctccctgggccttttatgggcatgggtgggacaggatttggtcaattttctaaaattaggcttcattcaatatttatcatcctcctttccctctctgagaatgaactatgtataaaataagcttctgcctattgcatttatcttccaaaccaatctagtaggatggtctcattttaaaaacgaggggaaaagaccaggagtttatcagggagaaactgggcgaccattgtgcaccaaaaactccagaaggccagtatttccaagcaagttacatagattaacaaccccaatgtttgcctccaagaccgttgggctgggaaatcatccgggaatttaacccttcagaattgtgacggccttttctgggcaaagcatttacaggtcgttgttaaaagccgattcccgaacaccttcaactgacatgggatacatgcacccaataaggcgtggtcaaacttcttacaccttgcgcaccacgtgtttcgttcaagggccacgttctac

SEQ ID NO: 624887 - DNA, 180 bp, Homo sapiens
gtgaacagagacagaggaacaaacatccaattcaaagtctgtttatcagagcatcttgttttctgaaaatgcacagcggcactttcattcaaataacccttcatctgcagacctgcggaagggaggtggcctgtgtcccttccttctccctaacatagtttattttggcccttatccgag

SEQ ID NO: 624888 - DNA, 132 bp, Homo sapiens
ttggcaggctggtctcgaactcctgtactcaggtgatctgcaccttggtttcccaaagtgccagtttagttttttaaaacggctttaccagatcatgcgagaaaataaaattacgagggataattttgcgtg

SEQ ID NO: 624889 - DNA, 632 bp, Homo sapiens
  misc_feature (403)..(403): n is a, c, g, or t
tcctaattttactttaatataattagaaataaacctatacaaacaagcgactaaaacaatatttcccaaaaaatatggcacgggaagaattttacaacatatatttataaaatggaattcaattggtaacaaaaatttattataaagtctcggtttttctggattctctatcaaattaaaatccaatttattttatttcatagttttaaaaataggccaaattatctaaataagccaagaaaaatataatatctaagtaatcttcaagctagtagaacttttctcaccaaaattataacaaaatacagcgtttctcgagcccccatatttataaagagtggttacctttctccttttttgttggaagaagtgggagtgtgctcgcttcgtgccaacccgaggncgtgtagtgtgccaggtgcggtgccgttaactccgcgctctccacgtggcaaccttccggccttcccgggccttcaacgcgagatatcttccgggccttcagccttcccagagcacgccggggactcacagggccgcccaccaccacggcccgggctaaatctcggatatcttaagtaagaagacgggggttcaccaatcccgggccagggctgggtctttaacacctg

SEQ ID NO: 624890 - DNA, 929 bp, Homo sapiens
actcctgatctcatgatctacccgccttggcctcccaaagtgcttgattacagctgtgagccatgtgcccagcctatttgtcacatattttatctttccttatgttagcttattagctttatttctttattgtccttttttttttttggaaatgaagtctcgctcgtgtctcctaggcttcagggtaggtggcacagctctcaactcacgtgcagcctttgaccttccttaggcctcagggtgactcctttccaccttcagtagttggggactattaggcacattgccacttatgccgtggccaattattttattttttttatattttatactaaagaggaggtctggcttggtattcttaaggctgggtctgggaactcctggggcctcaagcaatcccccaaccaccccttcccaaagtcactgggtattataagctatgagccaccatgcctgggggtatctggtgtctttcccaattatatttatagagttacttggtctttaactaatttcaagtgactcgtgtaaatctttcatccaacttttacaacctgataactcctttcacactaagttgaaaaatgtccttcactctttaaacccataatcttgaggaaactaatggccgtgtgagaaacatgggccatatccttccaagaatacgtacatggtgatgtgaacatccttccatattgtcatattccgtggcacatttggtgccaataccttatgggatcctatcttaaatccctttatcaaggagtgtggcataatacttgcatacatatgagactggtactcacaatttacccagttacccagatacaactgtgctggaagccaataagggccccattctacaatattggtgagagcccctagtatacgtgaaaattaacccccctaagcaaggtgttgacgcacac

SEQ ID NO: 624891 - DNA, 128 bp, Homo sapiens
agcgaattggcaccaaagcagcagctgtattgccgcagttcttagctcacctcacgatgttcccttggtcaaagcgcactaatcgttccagttccgagcactcagcacacatggcagcgacaccagaa

SEQ ID NO: 624892 - DNA, 291 bp, Homo sapiens
acaatatgacagacacttcacaaagaagatatgtggacaacaactaagcagctgaaaagatgaccccacacagtgagtcaccacggactgccagtgaagggccccgacacacctgtaagattggctcaaaattcaaagcaccgacccacaccaagtgttgcacaaggcagcaccagcaggaactagcagcttgtcgccacggcagcatgcttggcacttgccaaaagtggtgatttgcttgctttcagcaaaactggttttgtccagttgtcactagcaacagttgacagc

SEQ ID NO: 624893 - DNA, 339 bp, Homo sapiens
cagagaatgtttttttacatgaatgaacagattaaaaatggaataatatggtcgggtgcggtgctcacgcctgtaataccagcaatttgggaggccaaggcgggtggatcatttgaggttaggagtttgagaccatcctggccaacatggtaaaaccccatctgtactaaaaaaatacaaaaattagccgggcctggtggcatgcacctgtaatcccagctacccaggaggctgaggcaggagaactgctcgaatcccgggaggcagaggttgcaatgagctgaaatcgcaacactgcactgcagcctgggcaatggagtgagactccgtctcaaaaaa

SEQ ID NO: 624894 - DNA, 269 bp, Homo sapiens
gcttgtgctatttgagctcagatatgcaggtctgctctgggccacagagcctcacaaaacccgattgtgagttatagagcagcagtgccccgtcacagctgtgtgcagcccagcgtgcagctcgaggatgaccgagacctttattccgatggcaaaatcaaccagcgcagcattaggggcgctagtgcttgggcagctgtggctccacgccgtgatcatcccgagccacttatgggcagcattgcgagcatgggcatgtgcatttgctt

SEQ ID NO: 624895 - DNA, 995 bp, Homo sapiens
  misc_feature (928)..(928): n is a, c, g, or t
atttggcccaattaagttaggggacgaggggccgtcgccaaagggagaccgctcaattggcgcagagaaggcaaagtcgtcaaattcagtattcctgcagattcgtcaagacagtccggatgcaatcataatcgcggtttgccaacccagtggacattcttacgtatgttactggagaactaagtggattacccgagacaccgcgctgattggaagatggatgtaatctggagctctgctgagatgttcgctaccttacggctgaaaaacttggcattcatcccagcagctgccatggatggattttgggggaacatggtcgatctcaagtgtcggctgtgtggagtggtgctgaatgtggcaggtgtttctctccaggaattgaatccagacaagtgggaacggacaatgatagtgagatacttggaaggaagtgcataagatggctggcttgcaaagtgcctactgcaagtcatcaagcgtaaaaggatataccaactgggctattggattaagtgtggctgatcagtatagaatccatgttgaaaaaatctatcaaggattcatcccgtgtccacaatggtaaaggggatgtacggcatctgagaatgaagtcttccgtgagccttgccatgtatccttcaagtgcccggggattaaccagcgttactcatacccagaagaccaaaaggatgatgaggttgctcaggctcaagaaaagtgcagataccctgtgggacatccagaaggacgctaacaacgatcctgtgacctatgtgagctctgacggctgtagcaatttcaaaactagcaatgtgattaagctcgagcctcttagtcttgagtctatgtacatggataacagtgtcgcttgatcttcttctatatgtgatttggctacagattcaagccatgctggttaagctangccattaactcaccgtcgggttagaacatatagcacttttttgtttgcctttgttttcttgtcttgt

SEQ ID NO: 624896 - DNA, 153 bp, Homo sapiens
cacgaggtgatgtgaggtgatctaagatctacaagtcaggacagaattccgtgcacagtcagtctctcgttgctaggttcgtggcacagtcctctcgttgctagttcgtggcacagtccttccgctggcacagtccttcgctgtgcacagtcc

SEQ ID NO: 624897 - DNA, 107 bp, Homo sapiens
ctcgtctggtggcgggcgttcttgatgtttgacctgaccgcgcggggtccatggcctgaccacgtccgccccgaccgcgatgggcagccacgcatatccatcatgtc

SEQ ID NO: 624898 - DNA, 965 bp, Homo sapiens
  misc_feature (609)..(609): n is a, c, g, or t
gaaaaaaagcttgacattactgatctgacatgcaaattaaaaccacaatgagataccatctcacaccagtcagcatggtgattattaaacaagtcaagaaacaacagatgctggagaggatgtggagaacataggaatgcttttacactgttggtgggaatgtaaattacttcaaccactgtggaagacagtatggtgattcctcaaggatctagaaccagaaataccatttgacccagcaatcccattactgaatatataccccaaggaatatacaatcattctactataaagacacatgcacacacatgtctattgcagcactatttacaatagcaaagacatggaaccaacccaaatgcccgtcaatctacaggcatgagctgctatgcccagccaagtcgatttatctcaaaagtagctcagtatatacccaaaggaactataaatcaacttattctatctcataacagaaacatgcacacatatgttcatgtgccagcactatttacacatagccaaagtcactggcaaatcagccctaaatgcgcatcagtgatagtcctggaccaacgaccatgtggcaccatatacatccatggcaatacnttattgccaggcttaacacaggacatgaccatcattgtcctttgccaggggcacatgggatgaagcccagaagccatcgttcctcagccaacacttatgcacggacacagaaaaccaaaacacccacatgtctctccactcccttaacgttaggcgaagttggcacccagggacagcacccaccttgggcactaagggaagggggcaaccattgacccaacagcgcgaccttcccggcagataggcgcgcgtcacagggacagggaaacgcgtagggacagacatactcaactgcgataccaggggcctcaacgcccacgactgactcgcgtctcgaccacgcgccccgcaagcca

SEQ ID NO: 624899 - DNA, 281 bp, Homo sapiens
ctgtagctcatcatggtgacacccccgtctgctaggaatacaaaattagctgggtgtggtggcaggcgcctgtaattgcagctactccaggaacctgaggcaggagaatcgcttgaactggggaggtggaggatgcagtgagctgagatgtgccattgcactccagactgggccgtaagagcgaaactccgtctcaaagcacaaaaaagaaaagctacctttaccaaagacagttaaaatgatggaccaccaaggggacagtgtgcagcaggacaaacggg

SEQ ID NO: 624900 - DNA, 320 bp, Homo sapiens
  misc_feature (111)..(111): n is a, c, g, or t
  misc_feature (240)..(240): n is a, c, g, or t
  misc_feature (265)..(265): n is a, c, g, or t
  misc_feature (277)..(277): n is a, c, g, or t
  misc_feature (294)..(294): n is a, c, g, or t
tgggaggccaaggcaggtggaacacttgagaccaggagtttgagaccagcctggccaacataatgaaaccccgtctctactaagaatacaaaaattagccaggtgtggttntgggagcctgtaatcccagctactgagggaggccgagccaggagaatcgcttgaacttcggaggtggaggttgcagtgagctgagattacaccagtgctttccagcctggatgacagactgagactgtntcaaaacaaaagcaaaaacaaacanacaaaagatttntaaagagtccgccttgnctacagagtaaaggctgcacaacttt

SEQ ID NO: 624901 - DNA, 766 bp, Homo sapiens
taaaagcaaaccattgtttgtgtagtgttaagtacctttggtctatgggctcttggccagccctcccttttcccaatgaaagccaggtcaaatttaatcacgggatggacggcgtctcactcttttttattttttaactggaacgggttgttccacgggtggtaacagcaataagattggagatgacacactatggaaacttccgcttttggcctaaaacatacgccaagtgggaatagtattcaacaaaccttagaaagatttagttcaaaaggatggcctcctttctctaccggggacttttaacaaaactcaatgggcatctaaataggagttaattggtcttatagacccaggttctcactgtctaaaaaaatctcttgacttttaaaccttccaccgatgaggcagcgtaggaagataaacagactgactctcgtggactgtacttaaaagtactcatttttaacctgggtagggacggtgtgccatggggtacccggaccttatggagggtatggcttccttttaattgcatcaccttgttatctcaaagagactcggagcagtgatcctttaatcctggcaacggcttagggagccacaagaacagaaaaaaacacaaaacttgtggggccggcccggaaagcttcccaaccctcgttggcgcgcggcccacatgatagtactgccaccgttcagagatgggcatagaggtgggttccacaaacccggcacgcgttgacacaggtgggtggctacggcg

SEQ ID NO: 624902 - DNA, 344 bp, Homo sapiens
gctcggaccccctaggtatatgtcgtgctgcagatggcgtaggcagattccagtctgagtacacagagcgagaagacggccagtttcaaggtctgggaaaaaatcaacagtgagaggctgaatagaaaagattgcataataggcaggctaagaagcagcagcagcgcagcatggctcagagacggctggaagagtctcgctcatgtaagcagcagtcgtatgatatcaccgagaaggcaagaagataagctcgcacaaagtatcctttggatgagtcatatagtgcctgcttaatctggggggttacattcccagcctcgcagcggatgcgcgaaaccatggat

SEQ ID NO: 624903 - DNA, 843 bp, Homo sapiens
  misc_feature (674)..(674): n is a, c, g, or t
tgtgaaagttctctttttctagcagcagttaaaaatgtaaacacaccgttagtttcaaaagtttcattataaacatttgtgacattgtcaataacaaataggcatttttcctaaaaaaaaaaaaaaaatctgaaaaatcaaagcaagttagatgcagttttatcctaccgagggtctcattgggtacaagtagtatggtaaaacattaataatttcgggtattggggtcattctgggtttttgggtttgggtttgggtttttgggtgggtggtgggttttcccattgggttttcattcaggggttaaatcaaaagctgggcttcaaaagggttttttttccgggccaagtggttttttcgtggcagtaactaaccctggttcttccatcatggtttctggttcctggtagattctggtgttggttccaagaagatgggcagcacaacctctggaagtttttccttctctggtgcataacctaatgggtggtggcctggttgtgggccctctatttttactcatttttcttacataagtaagtatgtctcattgaaaaacacagaatggtcggaatttaaccagtggactgtggatctatcttcccttgattccacgcaggtgtcatccagcaaaccctccttctctgaggtcctctctgaagcacttaacacgntggatgaccttccaagacctttcttgtgtaacctgctgctcgtttggggtttctaccgggtcccttttgtgctttacccttggtttttattcaccaagtgctgagtatcttacctttatggacacgccgtgggtctcggcttttaacccttattcctggctctgttggg

SEQ ID NO: 624904 - DNA, 343 bp, Homo sapiens
gattttggaaaaccgtgacagcgcctacctcaccccagacctactgaattctgagtcttcaagggatggggccaggcaatctgcataactaatgcgctccctgaccaacgcttcagatgcgtagaagtaggggaccacggtgcctgggccaggtcagcaagagctgcctcgtacatgctggggtatcgtcatgtggagatgggaaggagaatgcaaccccaaaagcaggccaaaacctttggctccaacgccaaagcttgctacatctagggccccaaaaaaccattcctgagcgatgtgaactcatagacaccttcagggtgtgggagtacaaggactctct

SEQ ID NO: 624905 - DNA, 125 bp, Homo sapiens
accggtcctgaggattttacatctatgttaattaaagaccctgtttcctggcttccctcatcttccagttgtccctcagtctacctgggctctccctctatcctctctctcttccctcgcaaata

SEQ ID NO: 624906 - DNA, 470 bp, Homo sapiens
  misc_feature (89)..(89): n is a, c, g, or t
  misc_feature (141)..(141): n is a, c, g, or t
acgttcagcttgtggatggggcaaagaaggaggctaaggccaagggagttaaccttcaggtgcaggacgcgtcagacgacgccgccacncaggccaaccagcttgctaacgcggtatctacctcagccaaagtagttatcntcaatccgactgattctgacgccgttgcgccgtctgtgaaggccctcaataaggcgaaaatcccggtgattacggtcgaccgcagctccagcagcggtgatgttgcttccttcattgcatctgacaacattgctggtggtatcgatgccgccaagaaactcgctgagatcatgggagacaagggtgaagtcatccacctacagggaaccccgggtgcctcggcttcccgtgaccgtggtaagggattcagcgaggaaatcgccaaacatccaggcatcaaagtggtcgccaagcagactgccaattttgtcgacgcggccgcgaattta

SEQ ID NO: 624907 - DNA, 122 bp, Homo sapiens
cggtagtgtacataggtattatagtatacaatatacatgacgttacgccagctagatagaatagtacttatctcaacaaatgtatctagctggcgaaacgtcatgtacatagtatactataa

SEQ ID NO: 624908 - DNA, 671 bp, Homo sapiens
cagacgaagtatgcggagatgtgggcgcgtacacccaagccgatgttcggctacgcgggttccacggcgtcgccgcccacgctgacaccgttagtcaagccggatcagaccaccaaccccgggcgggaccaatccggagccgtagcgcaggccaccggcaccgccgccgggagcacacgcaacgcggttgcccagcaaccgttctcggcggtacccaacatgttgaccagaaccgcagtggggccaactgccgtcgacccgtcggtgacggacgtgctgggcgtggagagcgatctgatcacggtctttctgaacgggcccgccagcgtcgctggactcggcgtggtaacccccttcggtgcgacgactcttcccttcaacattgccggcgcgctgaccggtttccacaccgatgacatcgtcagcgggtgggccggtgtgcagtcctggccgggggcgggcgcggtgccgccatcgccattcccggtcatcacgaacccggcgggtggattcggaactctggcgtcagcggggctcggtgaggccaacaccgtcggcggcctgtcggtaccgcccgggtggacggccgccgccccggcgatacggccggccgctttggcgttgccggcgaccagcgccggcgccgccgcggaagccgccgccgcggccgc

SEQ ID NO: 624909 - DNA, 117 bp, Homo sapiens
cggcagcagacaacagcattatgcagagcagacgtgaaggagagatcttcattatgggcccatttatcattatgtgtacagggaagcgtgcatgcaatttgaaatcttcttaatggc

SEQ ID NO: 624910 - DNA, 257 bp, Homo sapiens
cgggatgttgtcgaacctatatgcactgtgaggtggtgaggtagagaagataagactgaaaaaaataggccgggcgcggtggctcactactgcaatcccaggaatttgggcggcagaggcgggaggatcactaggtcaggggtttgagagcctggccaacatggtgaaaccccatctctactaaaaatacaaaaattagacgggcagatcgcgcccctgcactccagcatgggcaacaagagcgaaacttcgttgtc

SEQ ID NO: 624911 - DNA, 396 bp, Homo sapiens
gttgggggcctcagggagggttcaactctgagacgagaactgccttggtgaaggcaagttcaagcaccacttgagaatgggggcacatggagaggggagggaacgggggaaaggtgaacctgaacttatactgagccagtaaacaaggtgacgggtgtgtaggtacacaccagaagatggagcactgcagatcagcaacctcagccccacctgggaatttgctggaaatgcaggctcaagccctcccacacctggtgaatgagagagcccagctgaccaagccagggactccatacctgaagctgggcatgctgggcagcaccggtgccaaatctggctggtggacagaagcacctggagagttggagagctttttaaaaagacatctctcagcac

SEQ ID NO: 624912 - DNA, 394 bp, Homo sapiens
gacttgggctgtgtcgttggacttcgtactgctaggaagctccgtagtcagcgacgagacctgaagtgggcatgataaaccgtataagaaagctcctttggggcccggcctaaagggccaccctttgtggggggtggcttcttcatgccaaagggatcgtgctggaagaagtaggagttggaggcaaacaggcaaattctggcattaggaaggtggttaagggtcccgcttgattcagaattgccagaattatcacagcctttgtaccccatgacggttgcttgaactttattgaggaaaatgattgaaggtctggttgctggatttggtcccaaaggggggtggccggtgggggaattcctgggagtccggtaaagggccggcttcacggggg

SEQ ID NO: 624913 - DNA, 845 bp, Homo sapiens
aacgtgttttctgtcgagtttggtccccccgcgcgatgtcgccgcgatccccgtgtggggtccccgcgtggcccaaagtgaccttttttcggtcttaggacaacgggtgccgcgtcttgcctgtcaagaagtggggcggtccccccattttttttagaccgtgcggtgacccgcccgctctatggggcgtgttcccctgcgcgcccacctctgtttggtttagggatgcttgtccaggaggcatacacacccacgggggcgcttccactggcggttgagaaacaaagcaacggccgaccttggcggggcggggtgaaccaacgccagggtagcaaaaagggcgtccaggcagtggttcggtcaagcagcgccacaagcgggccacgcaggacaactcttattggatgccttgtcgatcggagtgtttgtacgctcccactatttgccggccccgcccccctgctgatcatatccgcgggcggaggaacgccgcagtattctcgtatctggcttgtatcgcgatggcggcccactggatagaccagtattatgataaacaccggtcttatttaaagacataaacgaacacactgctgtgtgctcccgcccagaagggcagaagataattcttgttgcggcccactccttggagtattattctagtctgtcgagaggtgcagccttacagccagcaatggctattctatcaagaacaggcactatgttctagcgctgaagaacgctcccctgtccccgcacaggggtgtgcagcccgcagtgctgctgtgccccgggggcaaacaaatgaatagtgcagcataagtagcataaaaagataatacaca

SEQ ID NO: 624914 - DNA, 400 bp, Homo sapiens
cggtttccccgctgatacctgagcagcccccttgtcctcccagcacactcactgtcagtattaaggcacagcagcctgttaataagctagccctgcctcagagtgcacatgtggggacctgccagtggctctgctctgccgcacacagcggagcaccacccttgatggtcagagcagagccaccgaatgttgtaggctggcctgatttctgaggggcctaggaaagtgtccagcctggcccacttccttttgatgtgggagggggacagcattttgtacctggccactgatgcagcttagaaccatacccagataatccggcaaatccttcacaacctggaaaatgttgaaagcaaccattcctattttggttttttattaaatcttgcacaaaaaaaaa

SEQ ID NO: 624915 - DNA, 272 bp, Homo sapiens
  misc_feature (264)..(264): n is a, c, g, or t
cctgggtatcaagcgaggggctgtcattgccacggtatgaagaacaacagctacaagtttggcccggtggacctgctgtgctttcgctgggctggatctgagtacctcaagcttggttatgtttctcggtaccacgtgaaagacccctcacgccacgtcatcctaggcacccagcagttcaagcctgatgagtttgccagccagatcaacctgagcgtgtacgcatgcctggcggcttttaacggctgccgcttgaagtccacnatttcttg

SEQ ID NO: 624916 - DNA, 207 bp, Homo sapiens
  misc_feature (33)..(33): n is a, c, g, or t
ggtcgactcgttgtccgcagattctatattccnatctgcagggtctttagtagctcccccgccgcaagccggtccgcatgacccagattctgtctcgagccagcagatctctgaacggagtaggcaatcgttcccctacccaggttctttccacgtccagcttctttccatatccaggagttcagaatctacggctagaggtcgacg

SEQ ID NO: 624917 - DNA, 124 bp, Homo sapiens
ccgaaggactcagaagagaggacttgaggcatgaggtctggcctcttccctccccatctgagactctttctccattgctggctggggtctgtagcttggtgttattgaaacttctagaagtagg

SEQ ID NO: 624918 - DNA, 757 bp, Homo sapiens
gggcttctgctttgacggaggttatgaagaatacagtggaaacaaacctttgttcatcaaatacataggagaaggaacaccatcatacagtgatggaagaattagatgtggagatattcggcttgctgtcaatggtcgaagtacatcaggaatgatacatgcttgctttgtctagactgctgaaagaacttaaaggaagaaggactctaactatagaagcttggcctggcacttctatatagaatcaatgatgggtcagaggaaaacagaaaaatcacaaataggctaagaagttgtgacactatatatagtctgtaacgctttgtatttaaagaaagaatccactgtaaaaaagccatgaaaagtatgatcatctaatgaaagccagcctcccctcagaaaatatgattcccaaaaaagcgtaactactacttatttttgcagtgggggaggatttcttatttactctacaaggatagtttatatattctcgtatccataaaaaagccctaaaacaaccttaaagggatttggataccccaccggatttccaggctggtgtgaatttaagaattgcgcatatgctggaggtcgcccacgggacattatgggcctttttagtttacagctggaaaatttcttaaaaggcgcgggtagaaacggtgcttccataaaccggaataattttgtccaaagcaaaaaaaaagtaaaaatgggcctgttgacctcacgggggaaaccttgaggccgtttccat

SEQ ID NO: 624919 - DNA, 1349 bp, Homo sapiens
tgggtttcctgaccttgggctacggttgaccgtttttggggggtgtactccgtgccatcatgtgttccgctcctgtgaccgccgctgtgcttgcgtggggggctttgacagggcttcggcccgggggcttcccagtgtgccgccgcgccaagatctccatttcgtgtgccgccggagggagaagctggggactcatgtggaattgggccggtggggcttatacctctccgtgctttcgtgtgaacctttccttcctgtgccaggggggcgggaatccgtgttcacaacctgggaagaaccttacgagggaggcccagaagttgagaggggctccgttcttgctcccttcaacagtgtggtagacctgtgacacggcccccagcgcggcccattcgcgggtctcagtgttaacgtgacattttgggtgcgccgggcctctcccgcgtgggactcatgtgtgtcattctacaattctccagtctcaccttctttgcgtgaaaatctcatgtgaaacctctcttgtgaagtgctcttccgagtgcgtgtgcaccccctcctgtggggggggggctcagtagagaacccctgttctttgtggggggggggggcccccctctgttgtttaaacacattaaaacactcctattctaaaactttataaacaaaaacaacaaacaaacaaaaaacgctccagaaggggaccactcaaagagggcggggggggcgcggagacaaaaaaggggcggctaaaagaagaaacaggggggccacacaggtgcacgcaaaagagccgggtattcccgtgaagacaccccagagactttctttttgtgcaccacacacggcgtggacaaaaatccaagacagggaacccccccaaaaaaagggagaagacgccgcactataacacattccacaaaaacgccccgcggttaaaccccgactaagaaaccaaatggctcgacacaacaaaccacgacggccacgacgaacacaacaacggcaacacaccgagcaaacaacacaaccaagagacaccaagcacgaatgtgccaaacaaacaaaaagaactcacaacgacacacatcacaccactacaccataaaaaataaaaaactacacacaattccaatcacaaaaagaaacaccacaacaaacaaaccaagcagactaacaaacaacaccggagcaaagaaaaactaacacaaatagacagaacatatagggcaaaagaaacaaggccagcgggcgagaaggacgaaagacagacaagacgaggaagcaagaaaagcagcggaggagaaagaaaccgcaacagcaccagacagaaacacagagaagaaaaaaag

SEQ ID NO: 624920 - DNA, 821 bp, Homo sapiens
atgaaatggaaatgatgagatgagatgagataaaatgagatgaaatgatgagatgaaatgaaatgatgagatgagatgaaatgagatgaaatatgatgaggtgaaatgccataatgaaatgaaatgcatgcaaatggcaataatgaaatggaaatgagcatgcagatgcaatgagttgaaatgagatgaaatgatgaaatgcatgagatgcaaatgatgagatgcagatgtggatgcaaatgcatgacatgcaaatggatgacattaaaatgaaatgtactgatgcagcatgcagcatgcagcattaaaatgcattatgaaatgcaggcatgaatggatgcagatgcaaatgcatgcagcatgagcatgcaagcatgcatgcagcatgcaaatgcatgcagatgcaactgatgcagatgcaaaatgcaaattggaaataaataaataaacattgcaaatgcagcatgcagcatggaaatgcatgagatgcatgcaacatcaacatgcatcaaaactgcatgaggaatggtgatgacggatgacccatggactgacgatgaggatgacatggacaataaaacacaccacaaacgccaacacaagcaacaacacaactgtgtcgcgcccccgggcccccgaaaaaagccctccacaacccatcgctttcgggccccggggcaccgtacgacactgcacccggccccaccgcgccccacagaacccgggcaagcaccaggcgcgcttcccccaacaaaaaccccggggcccggccctgcgcaccccggcgccggggccaccgcctcaggggacaggcgcaaaac

SEQ ID NO: 624921 - DNA, 153 bp, Homo sapiens
  misc_feature (22)..(22): n is a, c, g, or t
cgccgtggtcggttcgtttganctttcccccagtaggtgactttccagtgtgtgggatccctttctcctcctcagttccctttcgagagtgcccgtcccgcttggattcaccttctctcgctctcctcttttctcccattctgcctagtaatg

SEQ ID NO: 624922 - DNA, 206 bp, Homo sapiens
  misc_feature (18)..(18): n is a, c, g, or t
  misc_feature (30)..(30): n is a, c, g, or t
  misc_feature (40)..(40): n is a, c, g, or t
  misc_feature (48)..(48): n is a, c, g, or t
  misc_feature (52)..(53): n is a, c, g, or t
  misc_feature (57)..(58): n is a, c, g, or t
  misc_feature (68)..(68): n is a, c, g, or t
  misc_feature (101)..(101): n is a, c, g, or t
  misc_feature (114)..(114): n is a, c, g, or t
  misc_feature (123)..(124): n is a, c, g, or t
  misc_feature (128)..(128): n is a, c, g, or t
  misc_feature (147)..(148): n is a, c, g, or t
  misc_feature (172)..(172): n is a, c, g, or t
  misc_feature (178)..(179): n is a, c, g, or t
  misc_feature (190)..(191): n is a, c, g, or t
  misc_feature (203)..(203): n is a, c, g, or t
  misc_feature (205)..(205): n is a, c, g, or t
atcccccgggctgcaggnattccgcacganagtagctcanaatatgcnatcnnattnnatactttctnatgatggttttatctgcagtaatatgtatatcntctattagaattnacttaatgnnaaantgaagagaacaaaatttgnnaccactagcacttaagtactcctnattctnnacattgtcttnnatgaccacaagncna

SEQ ID NO: 624923 - DNA, 170 bp, Homo sapiens
catcacacatccggagatgagacgtccccttcacagccttgccctgggcgttccctgagagcaaagggcagtccaggttacagagggaggaaggagacggaagcagcacggatgtcaaggttgagcaccttcagacttagcatgaggttatggcaggatgcagcagctcg

SEQ ID NO: 624924 - DNA, 420 bp, Homo sapiens
gtcccatcatgggatgcttttttttctcttccccctccccctcaaataattttaaatcatggatggagatacttattggccgctcttacttgggttttctctgcggatgctgtttggtgtccggtgtcctttacctcgtttttaagcgctaaatgtttggtttttatttgggtgtctgtctctcgatacctacatctgtgcggtgtgtaagtactccggtatggtcggggcatggcgaaggcttgctgtattgctgttagattcaagatttttctttttgttgtgctttattttagcatgtcagtcgtgcagctgaccagacatttagccgtttggattttccagagttcagtggttgtgaaatgtccttattataacaatgattttggtaaataaagagaagttttttgaacaccacca

SEQ ID NO: 624925 - DNA, 203 bp, Homo sapiens
cactgcttctctccagtggatgttaacattaatgctgatctcatgaactcagctaataatacagttttatgatcactgagatagaagtggggctgagctcaccacttttccaaggagaagaataaagtaaaccaggatttccttggagggaacatccaacacttggcttaagagaacaagcttgtaacaacactcttgagcaa

SEQ ID NO: 624926 - DNA, 107 bp, Homo sapiens
tatccggcgagtgaagggaagaaaaagaaacaacatagaggctttgagatgacagaatacaagttaattttacacaaatattatatttgaaatggcattttctctct

SEQ ID NO: 624927 - DNA, 749 bp, Homo sapiens
cgcagctgccatcttaggtggcgcctggacgctacggggtttcatcggttggatggctggcgttcgtggcagcatgtagacgaccgggagaaatggcataaatgtaccgattggaccgacacctttctttcctccggcctcggtagaaccggcagtcccgcgtccgaaggcggaggcagaggggaactggcgcgacgtgatggggccgtgatggctgagcggttagagcgtctcccggaaggatgggccggtcatcggagccggatgctcgatcccgtcgtccaagcgacaccaagagcggcaagcacaacaagaagcgcagccggtcccggtcgcgatcccgggacaaggagcgcgtgcggaagcgttccagactctcgggaaagtaaacaggaaccggcggcgggagtcgcggtcccgtgtcgcgctccagcaacacgggcgtgtcccggcgcgagcgggaccgggagcgcgcctcgtccccgcccgagcggatcgacatcttacgggcgcacggtgagcaagcgcagacagcgctggaacgagagagcgagcaatgcgagacggaggaggagaagaaagcggagttcgagcggcagcgaaagattcgacatgccagaaactagaagaaaaaactcatcgagggaagaaacagcactgaagagtagaagaattggtagcaagaaagggtggaggaagaagctggagaaaaggaaggctgacattgaacgagaagttctccgacgggg

SEQ ID NO: 624928 - DNA, 510 bp, Homo sapiens
cgacgtgtttccgcactgatgaccaatatccaagtagctacttcacatcgtgtcggaagctgtgtcatcagtgaggaaaacatctgcttaaattacaggaattctggtcttatacaggtctgaaaattctgccatttccttattaactagcagctttagtttgtagtttatgaaaatcttgaggggctcttttactgggcatttcttattttttggttttttccctgcttaatttggtgggaggtcaaatggaatataaccccaatcaaaggcttcttcaatgcacaaaattggcatgttggcatgcatgaaatggaaatgcacagtcatggcactgtccggtatacaaaataacattaattcaatgtcagataaaattacactagtttaaaacatgtgcattcacttgtcatttgttcagtgttttagtcttttgggcaaagcatgtgctctgttaatgtggcttttttttttttttttaaatacatggtagtctaacatttcgtggtc

SEQ ID NO: 624929 - DNA, 589 bp, Homo sapiens
cgacgaagaggtgacgtgttgtggtggatgcactgagtggcctgaagggtgacctggctggacgttactataggcgtcagtgcagatgactagaggcatgaacagctagccagcttattgatgaccactttctgtttgataagcctgttgtcccgttgctgacttgcagcagtgaatggctcgagattggccagcattttcgaagaatttgccacaacaatgagaagagcttcctgatctgggtgaatgaggaggatcatacacgggtgatctccatggagaagggtggtaacatgaatgagagtgtttgaaagattctgccgaggtctcaaagaggtggagagacttatccaagaacgttggctgggagttcatgtggaatgagcgtttgggatacatcttgacctgtccatctaacctgggcactggacttcgggcaggagtgcacatcagactgcccctgctaagcgaagatcgccgcttcccatagattctggagaacctaagactccaaaaacgtggtactggaggagtggacactgctgctacagtgcggtgtctttgatatttctaatttggaccgactagg

SEQ ID NO: 624930 - DNA, 105 bp, Homo sapiens
cgtgggccactatggatggtggtgtcatgcaccacacagggctcacacagactaaaattcttgtgttgcaacgcagagaccacggagtatctttgcctctggttc

SEQ ID NO: 624931 - DNA, 1588 bp, Homo sapiens
gctcgccgacagaccgccgtccgtcgcgcgcctcctccgtcgcacgcggagctccgggcagcttgtatcgccagagtccctggaactctcgcttatctttgttgaatcccgcgtgcatcggtagtcatccggacggtgcgcccgatgcatgtcaggacgtcgagccgtgagacgaccaggctccgaaatcaccagccaaggtacgttgaaaggagaagaaggaagcttgtggacacgaggcatgataacagtggaccgagaatcgccctctgactaacggggcaactgctacactgagggatacaaatgggcgccgtaaccaacggagaggggcattgaacccactggtagcgtaagaaccaagtgaagcgcagcaactgacggggacccgcccagagcagaggcgagccgcagaggagaggccacccaacgccccgcgccgcacctgcgcagcaggcgcacacgcagagccattgcgtaacacaccacacgcatgacaaggcaacgccctggaccgtcccgtcggaaccgtgggccccagaccgcggtcgacacagcacggtacatgacgagtacggcggagcttgaacaccagacatagctgagaccgaaagcaggacgcagacggcaagtaccgaacacgcgacccgcaaggaatcgtagcccaataccacggcgcgaacaagccgcgaggacacttccgaaccaggtagcccacgaaccccaccgcgcccgcacgggcacatcctcgggcacatcaccccgccacacctgaacaaccggtcctaaacggaatagccacaaagagcgccccacacccatcgcgacaacacagccccccctacagagcgagccacgacacaccgcaccgctcgccaacgcagacgacaccgccccgagaatccgcgacacgtcagccgggcgcccgtaggcacagaagggcaacgcgaaggtcagacggacccacgcaccgcatcaggcgcacccgcagtcacagcaggccaagaggagccagaccacgggccccccaacacgggccccccaccagcgcgtggcacggacaagacgcaccgactgaaccggcgcagccgctggctgcaacccatgcgcgggagccgcgcacgcaacggcacaacccggcgcccacgcgagccagcaccgcgccccccgcccaacgccgtgcacacgccggcccagtgcccaacccgtaagccgcgcaacacgcagagcggcacagcccccgccgccctacgcgaggccaacaagcccgtacaaggagcagagctgccccgcgcagggaggcgcgccgcgccccagccaccagcaacccgcgctcacagcacgcccctcgagccacgcgcacgccccgacgcgccgaaccaccgagaccacaccacaccggcgcaccagttcgcgcaaacaccacccagtccacccaacagacacacacgacgcccaacaagggacgcacccaaccccccacgctcccggcagaggcacccacgcagctggagcacaacacctaccaccgcgcacaacccaagcgcgcgcgcgaccagccaccagagcagcacgagcacacccacag

SEQ ID NO: 624932 - DNA, 878 bp, Homo sapiens
ttccgccggtggttgggggccaccgtctgccatattgtgacacgggtgtgcagttgactctgtgagagggctcctgttgtgcgatatgcacttctgccggcacctctgggggtgggccgcgatgtgccttcccgcctgggctttgtgcgtagtaccaatggccccccccccggccggggtctgtccaacgagttttctcggtggagcgatgctccctctcgtctatacggggtcctcatcattctcgcgggcacgtgggctctcgctattattgctgccttgttaggaggggcagtctcccgcctacccatgtggcggcccccccctccctgccttggttggtcgctcccgatccatttttgttttcacccgaagcgcctttttattgaccgcgtctcctgtttttgtcggccggggcctctgacgtgagggggtccctgttccccacccatggggctgcgactcgccccggcgggcccttcctctgtattgtcatgggcgcacccccgggtgcgccacccactgcgggactgtcaccgtgcgtcctgtgcatcccgcggccccctcctccgaagtgcggctctgtccgaggcccctccacgaagaagtgcggttgcgttctcggcttcactacgccccccccctggggcgctcacaccgttcagccgcttccttggagtccccccccctctgccgccacctttgttgtcgccccctctctagcaccccccctgtcgccgtctctttcgcccccgactgccgccatgcggtgccgccacgatactcttggtgggcctggggtcgtgttcttggcacccctaggccgtccgttcgctggcccccccaatcccccccaggggcctcccccccacataaca

SEQ ID NO: 624933 - DNA, 151 bp, Homo sapiens
tctagaggatcttggtgagcaagcaagaaaagctggggtcctccttcagtatacacagctccttggctcccggggagcaatgaaaaggacatcagctttggcatgatgcagtaggtgacgataagggagaagatgaggatgccgaagccca

SEQ ID NO: 624934 - DNA, 437 bp, Homo sapiens
taggtggatgtgtgatgatcagcgatcggcgtcgatcagagaagttcattcaatcactcagtcacgtgtaagtcatcgttagtaatgcaatcgctctgctaaataatcttcttcatcatcatgtacttcatcaagagcttctcttctacaacatcctcatcgtcctcgtctacctcatcttctccttcttcgatccatcctcctcttcatcacaccatccacctcgtcatctgagtcaggtgcttcctggtcctctcggtcatagctcctgctttgtagaaactggggcaggagcttgaagacactctctcggtagtcattcaggttggtaacctcacagttaaggaggtccaggcttttcagacattctaactttttcaaaggttccaaggtgctgatatctttcagtttatttccacttaagtttagatgtgtga

SEQ ID NO: 624935 - DNA, 1660 bp, Homo sapiens
  misc_feature (1352)..(1352): n is a, c, g, or t
tcacttgaacccgggaggtggaggttgccgtgagttgagattggaccactgctctccagcctgggcaacagagtaaaactctgtcccaaaacaaaaaataagaatacaacctttgcaggatgtctctcctggagacagcacgagggagaggagggagagggctctttcttacgaaaagaggccttggcgtgagcccggaaagtttggaaaccagcctgggccaattccagcaagatcccggtctctactacaaacaataacacaacaaacattcagtcgtgggtgcccactgtgccctggtggttccaccacactgtgcactgtggcgaagcgcatgcagggtggcgcagaacatgggccttacgcccgtaagcaagctgggaaggcctcaattgaaccccatgcatcaagtgccacgtggcaaatccaagcccgtgggcgtgggcccatgtgacatttccgtgccgcgtggcactgtgcctatacagagtgtgtgcactttggtaagggccacacctttctccaccagtgagcttgacccctgtggacaaccatggcccagtggaaccacggcaaaccagcacttccaccaaccccaatgaacgccttggggggtatatcaccgtccgatatacagatatcccagtgggggaataacccccaccttgttggcaccactgaacgctggcaacatatggggcactggacggtgtcaaaacatttctacggggttaactccgcattttcgccttaagcacccacttctagcacacacacagacttttctcccccacaaatcacccagagggggcccccttggtcggcgaccacttcgttcaacgttggcgaaacttcgccacacgggcgcacaatctactaccacggcccccttttcggtggaccccatgtggacagactacggtttggtaacctattatacacgatgtaggcactaacgtgaccaacgtctttgtgacaggaacacgacacgccacagcggcggccttcctctacaacggcgttggctcaccacaaccgcagtgacacaatcacgcagatgtgagtcacacaacgggctttatcatactaccccactgtaggagccttatgacacccacactttacaaccgtgcgatctcacagacaatttctgtatcggagcatcacgacaaccacttgatgatgctacccatacagcatgagctggccgcaatcctacggcggactaccggcatcatattcacgtcgaacattcttactacagcaggctgccttactaaaagtccacatcttctcatcagactgacgacgatcaagcatgtggtcgaggcgtttcctaacacacgcacgtngtaactccgacccccacaggggtatgtgctccacctcaacacaccgcccgtgtcaagctccacagagagcagagaactactgactcacacaacatgtggggccacccaaccacaagaggcgcgaggcggaataaaaacagagcagagtgaaacagccgacgccacaagacgcgcccagctaggcagccaactcatggacacctactccacaccagaccaacaccaaagcggcgagcgcgcccactaacacaaccccagcgagggcgcagccaaacacatacttccaccacagccagcgtacaaacgct

SEQ ID NO: 624936 - DNA, 1166 bp, Homo sapiens
cctggtccaaagtggacgagaatcccattgttaagacatgtctcattaagacttctctaagatggagccagcaaacagcccagtagcatcgaggctgctgcctgggaaagagtcccctcctctcccctgttcattaatgattatgggaggttttattccccccaacaaaagtgttaattagacatcatcggaacagggatattacacaaatgaattaaactcaaaccaatcaacaagctggctctgtgcttcaggtcccccgaacgaaaagggaattgaaggctgtaatgggaaacaaacggtaagatgtctttcctaatatcaaataataactaggaaggctgcctttgcttctagagcttgtcttcttattcttttctttctcccctccactacacacacacacgcgcgcgcacacacacacatgcacacacacgcactgccatgaggctggagagttagggttcattcttgtgactgaaactgaaactggctgggactgcccagtggtacttctcaggtgccctctaggctcaggggccaagtgggatggaaggagtcagaagagcccagttccagtccctctctgtcactcaccaccttcctcatcagagaatagtgtgtgtaatgctcaggagttcacagggatgcagtaggtactcaatacttacctgctgtgtccaaatggctgggcgacttctggaagcattctgtgccctggcagcaaattcctgaggctgattgacccctgtggggagagtgggaagaactggagggaaaagagttttagtccttgtattttgagggatcccagttgcttggagggatagataaagaagattgaaaagtcttctaaaaatggacagatgaagccagtgcaatggctcatacctgtaatcccagcactttgggaggcagaggcaggaggagcacttgacccccaaaatttgagactagcctgggcaacagggttagaaaccatttctacaaaagaaaaacaattagcctggtgtggtggtgcatacccttggccccagctacttgagaggccaaggtggaaggattgcttgagcctaggtggctgagcctgcggctgtgatcacacaactgcactccagcctgggcaacagagccagatcctataaatgagaaaaagaaaagaaaag

SEQ ID NO: 624937 - DNA, 187 bp, Homo sapiens
aatcagctcggtacccaattttcggaaagatccgcaggcggaacccggctcgactcgtcaccggcgcccgcatgccggccaggcgcgtttcatgggaaaccgcgtgtttccctaggaaaaccgggcgtttacggcattttttcgtctgcctggccgggctgaatctggcgctggcggagcagcattg

SEQ ID NO: 624938 - DNA, 662 bp, Homo sapiens
caagttcactattctggactgtaaatatctgagagcaaggatggaagagatctggttggcatgtgggacggtctgttagaagaaattcgaagaaattaggaaattgagctgttcagagaatggtgagtacatacagttaagcaagttggacttcgggagctaaatgtggaagagtcatatctaaacgatgacagaatgaagactgacgagaatcagccagaaaggttatgggggttaaatctctgggatgcttttctcttccgtgtagcgtagaggcttacctagaggcggtcgcggcgcaggtagtgtaaccagtataagtttgtgtacccgcgggatttgccaatctctgtgtagcttgcagtactcttcgtgtgagggtggcagccgtggcagttgcacattggtgatcagctttatttccctggtaattaaaccttgtgccattctattcctgttaaatccgtagaaaatgagaaaatactcgacattttgggggaaacttgtaaatctgagccagtaaaagaagaaagttccgagctggagcagccatttgcacaggacacaagtagcgtggggccagacagaaagcttgcggaggaagaggacctatttgacagcgcccatccggaagagggtgatttaggtttggactttcagca

SEQ ID NO: 624939 - DNA, 103 bp, Homo sapiens
agttccataaagcatcccaggaagattagaatgcaaatggacattctctgggaggtggggatacatagccaaggacattcccatacggcggcccaataaatcc

SEQ ID NO: 624940 - DNA, 113 bp, Homo sapiens
acgaagaataaggagatgtgaagaaacatctcagttatattggatagtcccattactctttcggtggagaaggaacgtgataaagaagtcagcgatgatgaggctgaagaaaa

SEQ ID NO: 624941 - DNA, 139 bp, Homo sapiens
catcctggaaaattcacctgtgtgacttatctgtcagacaccatctgctgatccagctgcctgtgatctgcagtgtgaagccaccagacactgttgtcacagtcagtgcatgtggaacactgtggcatcagtaatcatg

SEQ ID NO: 624942 - DNA, 118 bp, Homo sapiens
caagcgtagtcagggcatgggcagggcgcatgcaggcactcaggcatgcataggcgggccaggcatcagattccagcaccggtttcgtcagtttccctgcagacgtcctgcagcatgt

SEQ ID NO: 624943 - DNA, 550 bp, Homo sapiens
aaagacagtattcaaatctaaaaaagatatcgttatctcataccccattaacaaataacagggtttctaggaatactaagtaaaaacacacaggcagagacagggcacgaaacaccgctgctcacagagtaaagagtataatccctgcaggtctctagatccaatgggttctggtctctctggtcatgactttttcttctgaataccccacattattattttatatggtataggtactctgttgagatggagtctcgctcttgcacccagactttattcaactaacggcatcttccactagttgatcctcttaaatagaccagctggcgtgctaccttgttgccactcgccgtcgtaaaacatcattgttagtagaacccgtcgccgcccacaaaaaaaaaaaaaacaccccaatcaccactaccaataaaaacaacacacatgaaaacaaaaaaaacaaaacaacaaacaacgaattacaacattcaaacaaacaacacacacaaaaaaaaaaaccaaaaaactatacaataacaatacgaaccaatcg

SEQ ID NO: 624944 - DNA, 359 bp, Homo sapiens
aaaggaacacagaatatggattaagcgcagggggagcttctgactgagagcacaatctgcagattcatgggttcaaatccagactcaacctgtgtgatcttggtcaccgttctgtgccttggctttctcatctataaaatgaagccattaatagacacatgcctcatagaattgttgtaagaatgtatataaaatacttaaagcgtggcacatagtaagcactcaagaaatctttgctgtaatggtcattctaaaagccaagtgttcaagtctccacttgacacattcagaggcaaagcagagcctgaaagctcaccacagcctatagtttctggcctgtcatagcacagaatctgccg

SEQ ID NO: 624945 - DNA, 368 bp, Homo sapiens
caccctgctacgctccttcccctactcatcgcactaagtttacactcacatacaccctaggctcactacaaccttcctactcactcactctcactgcccagaactattcatctcctatatcttcttcgaaacctgacttgtccccagcttgagtatcatcacccgatgaggcgaacagccagaacgcctgaacgcaggcacatactaccaattctaaacccttagataggctcccttcccctactcatcgcactgatttacaactcacaaaaccctaagctcactaaacattctactactcactctcactgcccaagaactatcaaaatcatgagccaacaacttaatatgactagttatgtacgtga

SEQ ID NO: 624946 - DNA, 354 bp, Homo sapiens
  misc_feature (138)..(138): n is a, c, g, or t
  misc_feature (225)..(225): n is a, c, g, or t
  misc_feature (246)..(246): n is a, c, g, or t
  misc_feature (253)..(253): n is a, c, g, or t
  misc_feature (281)..(281): n is a, c, g, or t
  misc_feature (285)..(285): n is a, c, g, or t
gataaattcaaccaggtcatggcagggattgatgctgcatttgaggccggttttgagaaggtcaaagtcaataccgtgctgatgcgtgatgttaatcatcaccagctcgacacctttctgaactggatccagcatcgncctatccagctgcgtttcatcgaactgatggaaacgggcgagggcagcgagctcttccgtaagcatcacatctctggtcaggttctncgtgacgagctactgcgtcgnggctggntccaccaattacgtcaacgcagcgacgntccngcgcaagttttttgccatccagattacgtcggagagattggccttatcatgccgtattgataaagactt

SEQ ID NO: 624947 - DNA, 321 bp, Homo sapiens
ctactactactaaattcgcggccactcgacatctatctatctagacatctatagatatgttctagtatgagaaattctggcgagcccttaaattttctggcttataatgattgctatcgctatagactatcgctttcagttacaaacgcagtcttgatacggaggttagaatgtccagtgtgagatattaatcaggctgggtgcggtggctgacacctgtaatcccagcactttgggaggctgaggcaggtggatcatgaggtcggaagatagagaccatcctggccgagcatggtgaaaccccatctctactaaatacac

SEQ ID NO: 624948 - DNA, 113 bp, Homo sapiens
gacctggaattgtctgacccagtcccgcctgcgtggtgcctgcagccaccgtggactgtctgtatttgtaacacttaagttatttgatcagcactttatgcacgtattattaa

SEQ ID NO: 624949 - DNA, 111 bp, Homo sapiens
taagaggtcacacctaggctgtgccatatggtgtggggctgtgagagccccaggcggagctccgggggacttcgttagggagcctctgggaagaggttctggacggagaag

SEQ ID NO: 624950 - DNA, 85 bp, Homo sapiens
cgggggggttttgggggggccccccttttttttttttcccgggcccccggttgggtttttggccccccccccccccttgggggga

SEQ ID NO: 624951 - DNA, 301 bp, Homo sapiens
gtcacgcccacagactgggggtgatcccatggtgtggagagaccaccaggccctgcggggagccatggaagaaacttgtggatccgttcttatggagctcatgcaggagagtaacgtgtggacttgaacgatagcgtcttgatcaactggaacattgctgcatctacctgtctcggagagagacaagacaccatcggggaggtgggaaagccacgggctcggcgccgagagttgcacgttggctctggaggggctccagcgtctgatgtctgtcctcgctgcaggagagatacatcgcact

SEQ ID NO: 624952 - DNA, 349 bp, Homo sapiens
  misc_feature (119)..(119): n is a, c, g, or t
  misc_feature (264)..(264): n is a, c, g, or t
tccagtgttttactaatctggaagtcttccattaatacaacacggacgtgttaggaaatggatagagctgggtgtttacctgtctctgtttaaacctcttggccattgcgggtcttttnctctgtgaatgatgtctaaatatttctgtaactttaatccccttgtaggtgatttgtcctctcttgccaccccacccccagaggagagcagaagctgtttaggtagaaggaatagaatgaatataccttttatattcattgaggnaccctaaaatatgtgtggcattaaacagatggttttggtcacagcagagcaggtgctgtacatatatttctaaaataggcatatg

SEQ ID NO: 624953 - DNA, 406 bp, Homo sapiens
aggtgtcatactacatacatcaagtgtttatactacaactagttcataccaaatacatacatacagatgaaaagattaacatcaacaggaacagcatcaatggctccatattccgttccctccctctcgttgtcctcttccaagtcactgcttacaccattttcagccctacctccagaagcttcacttaataagtatatcatctttatctgaagtatatgtgctgaatcttacaagactggatacagtaatacctgtatacatctacatctcttgaggatgtacaggcttaaatctatgtcatttacactcactgaatcatcaacctcatcaccacctgtaccctgggtgtagcgggtatcatctgcttcctcatcatcatcattgaccagttcaggacgaaata

SEQ ID NO: 624954 - DNA, 385 bp, Homo sapiens
ctgaggtgactctaaggatcctaggcctggaactggaactgtatccccaagcagaaaaacaccagccttaagtcggctgcttttctacgtatataatgcaattgttacgtggagagagccaggggagccttcttataaaactatttccactggaaaacaaagtggatgaatgacatttttacaaaatataaattcctgttcgtatcttctactgttattagcacatacggggttgaaatacctctctatgacaaccatatatgtacgtgtgtgtgacaggcgtatgcatacacacacatctacctatggaggaacaaacactagatttttaggtcatcatagaaacaaacggccagccctataatgttacacaattacgccaaca

SEQ ID NO: 624955 - DNA, 877 bp, Homo sapiens
  misc_feature (80)..(80): n is a, c, g, or t
  misc_feature (110)..(111): n is a, c, g, or t
  misc_feature (129)..(129): n is a, c, g, or t
  misc_feature (143)..(143): n is a, c, g, or t
  misc_feature (167)..(167): n is a, c, g, or t
  misc_feature (183)..(183): n is a, c, g, or t
  misc_feature (193)..(195): n is a, c, g, or t
  misc_feature (200)..(200): n is a, c, g, or t
  misc_feature (207)..(207): n is a, c, g, or t
  misc_feature (213)..(213): n is a, c, g, or t
  misc_feature (240)..(240): n is a, c, g, or t
  misc_feature (242)..(242): n is a, c, g, or t
  misc_feature (245)..(246): n is a, c, g, or t
  misc_feature (258)..(258): n is a, c, g, or t
  misc_feature (285)..(285): n is a, c, g, or t
  misc_feature (290)..(290): n is a, c, g, or t
  misc_feature (298)..(298): n is a, c, g, or t
  misc_feature (322)..(322): n is a, c, g, or t
  misc_feature (325)..(325): n is a, c, g, or t
  misc_feature (359)..(359): n is a, c, g, or t
gcggtaggaacatggcggatcggctcacgcagcttcaggacgctgtgaattcgcttgcagatcagttttgtaatgccatnggagtattgcagcaatgtggtcctcctgcnnctttcaataatattcagnaagcaattaacaangaccgccagctaaccctacagagngtatgcccagcttttngcgcatgatnnncacgncagcaangacatngatgtttgatagattccttaccagtangnatnntacagctgcttnacaggctgctagctgtatagctagagnagaanaccatgangctgctacatgtctggaggatgtngtntatcgagagacatgctctggagagatacaaagcncacttgctgataattgcacaagtcacagctgaagcacaagaagtggtacccatagccagtctccttccaagaactccactaggccttcagatgggattacccatggttaagcctgcagaaaaaagacacctggtacgacgttgcccattatagagacatttctggcactccagacctctagaatagcaagcctttaccgcaaacaattgtcccgaaaccattacaccccactcatggaccaccatttaacccatttctgaagagaacctcgtataacaaagatacctaccgataaattattacacccatcctttgcgaattcaggggcctgtttgttatacacatccactgccgcactgggacactccacagccctcagcaacaagccacttcactttacccaatccacatttcggtaagacctgggcaagatggcaaccaggtcgtgtgacacagccgcacgtgatacaactcaacatatacacacatgaacaccttaaaatactacacggggacac

SEQ ID NO: 624956 - DNA, 1498 bp, Homo sapiens
ggtcagccgcatcttcttttgcgtcgccagccgagccacatcgctcagacaccatggggaaggctgacacggtcggagtcaacggaatttggtcggtattgggcgccctggtcaccagggcatgcgtatgtctaagctctggtaaacgtggagtatttgttgccagtcaatgatcccctttcatttggaccgtcaacgtagcatggcttatacaatgtttacccaaatcactgcatttcctacctcgaatggtcgaataaattcccgagtaggactacccgttcaaaggccttggagaaaccgcggaagcctttgggtctccattcatagtcggggagacattccccaatactaactcaatcctttgcccaagtgaagcccggaagattccgcacttccccaaaaaaattgccaaaagtttggggggcggaattgcctagggccggcctgcaaggtaaccggttccggtgtgcaaggtcactaccttgggcccgttcctttccaaccaaacccaactgggtatgaaaggggctggggggggcttccaatttctgccatgcgcgcgtccgcaagggccaattacacgcggggttccacttcacttccttcctgggccccccccttccttggcccttgcattggcccaccccccaagttggctttccgggtcaactggagcgaattgcttggaacacccccaatttgcaagcaacgagcctcacttgcaagcaaaatccaaggtccccttccacctggcaagttccaattcaaaggcaccataaatggcccttacccttgggcgagcccaagcggcaaaaccccttgggccgtatttattggccaaacgccaccccatttggcgtccaccaaacatggtggtcccaattacgccaagttggaaccaaaaagcttttttctcggggactaaattccggctaggtggaagaccgggaaccccttcaacttgggacaccccaatcaatggtgtgccgccaattgggccccaacttccgaagcattgggctccaacgccccccaggtgaacagggaacccttggcttgtgcgcaccttcgcgggcccccccggattcccggggggcaaaaaaactcttggcattgacgcccggcttgaaccttgttgtcccccggaccggtgcggcgcgccctttcctttcgccaatggaaaaaccctagtttcctaactatcctcccgttgggccccatttcataagacattgggggacggggcccctggatccccaaaattgggcccactgagcattggccgcccacaaagggcgttccaatcccccccttgtgagacaccacgtgaaaacaccgcgggggacacaggccttcctaaccttggggcgccccatggggggcccgccatattcccccgcgtgacgtatcccccccaaactcttgggcctccacaaaacccggcgtggtcattccacgcgacttgcggacttgggcaaaaccccttggagaaccc

SEQ ID NO: 624957 - DNA, 261 bp, Homo sapiens
gacagcgaccgacactcaatggaatcccgattccatggaaatggaaaatagctctatttatacagcaaattcaaatacagtagcttgctaagcaacttcataattcattaacactcgatggcagagcagatagtcacaattactaacgattatcatgatctgcattcttgacaagtatactatggcgagataaatcaaactcagacgatgataagcaaactcaaaaatgaaaatgatgatgccaactaagcttttgttaaa

SEQ ID NO: 624958 - DNA, 587 bp, Homo sapiens
tgcatagctgcgtctctgctttatcttttagcaatagctgtgaaatgtgcactgccacgtagatacactacttgacacatactcaggggactgttcgaatgctacagatttctcccagagcttggggaaacacaccaggaggggtgcggcatcctccagcacagaacgaacagctggccacacctactctcaaatatgcagtagtttagctcccagatgcacattctctctctctccctctctctctctctctctctccccctcatcatccacccatgtgaaaaacactccatttttattaatttccattagcaaacataaaatttttttcagagtgcaagtggaagtctttaaacaatttctttaccaactaatgaaacagaaatcattttagtttaataaaacagtgatcaaagagaatcactgggctgtataatatacgcattcccttatttaccagattttatcccagtcctggaagagatttacatcgtagcaggggataaaaacattacatgtgcatgtaactgctaatgatggtgagggtcatgaagggagcatgaaggcacttacgggagagaatgtgg

SEQ ID NO: 624959 - DNA, 578 bp, Homo sapiens
atgatattcacagcatcttctaaatttgggccaggagtcaaaataaatgcatttaaacttgggaacgtgccacataagacagtgaggctgatcccaacagtagttggggcggatacccacaaaccaaagtgctgggaaagtcaggaagagctgacagggattctacagtcagttcatgacctcggtgcagtgagacctctagactgacacgtacaagagagatgcagttccgtctacactggcagctgtcccttccattacttgctgggcctgcttctgtcccatgccgcactgtgcgaccgactggaataacttttcgattcctggggcaacagttgtacaattccatggtaccagaactgaaacgctgggtttgtaatcagctcaatgaagttaaatatgaagaccccgaaggatgtggcctatttacaatcaacctgtatccaagagaactcttgtgatctgttctgggctggcttccgtattggcctcgtgcaaaaggtacagcatggtgcaactgaagtagtgcgtgtggctatctgggtcacggagctgatttgcacttgcattcacaacga

SEQ ID NO: 624960 - DNA, 121 bp, Homo sapiens
acggggaaaatcacttgattagagggttaaaacttgtcggcccacttgccaaccttggtggttgcagtgacagagattgaactctataaaaaactcctaatactgatgttgcttactggat

SEQ ID NO: 624961 - DNA, 238 bp, Homo sapiens
cacacgcgatgggtataatactaagattgagatgatatcattatactgggggaaggctgctttgtcgaagtagcgccttatttctcttgtcctttcgtacagggaggaatttgaagtacatagaaaccgacctgcgattactccggctctgaactcaggatctacgtaggacctttaatctgttgaaccatacgtaaccctttagatacgcggcctgcacctatccggcggtgtgggt

SEQ ID NO: 624962 - DNA, 366 bp, Homo sapiens
gcttttggggcccgggggccgtttccccccaagtgtgggggggggccccaagccccccaaaacccccaggtggggctggggaagcccgggtttcccctgccccggggtggggagggggcccccccgggggcaaaagccccgggcgggggaggggttaggccccccccccaacaagggggggtggggggggggccccccccaagggggctgggggggcccggggttggtgtcccggccccggggctgttaggggcccccccctttccccttacccccagggggggggggggtccggggttgggcccggggaaaccaggaacggttggcctagggcccgggccggaacctggaatttttttttttcca

SEQ ID NO: 624963 - DNA, 236 bp, Homo sapiens
cttattagcctcggggtgatacctttctccttccggtcgaggccgttgcctgttacgtccatccatgcttgtatcagctgcgcctcatcttacttcatcccacgactcttgacctctggggtgactttcatggctgtgagaagaagtctctatcctcagactctcaccagagacgaatgaggtgatatcatccgtcattgctgggtccgctccgcgggaaacatgtgccggacctg

SEQ ID NO: 624964 - DNA, 743 bp, Homo sapiens
gtggcagaggcgtaaagcatgactcgctcagggccctaaactgggctcacactactctgtcattctgacctggctgctatccaccgtactccaaagattcaggtttactcacgtcatccagcatagaatggaaagtgaacacccctgaatcgctatgtttttgaggttgatgcatccgacatagaagaacactcactgaagaatggagagagaattgaaaagcggaacattcacacttgtgtttacagaaggacagtccatctctatctcttgtactacactgaattcacccccactgaaaaagatgagtctgcctgtagtgagaaccatacgactctgtcacaagccaagatagctaagtgggatcgacacatgtcagcagcaccattggaggtttgaagatgccgcatattgaccggatgaatcccaaattctgcttgctagctccttaatatagacaagcttatacacttacactttatgcacaaaatgtagggttgtataatggaaacagggcctgaccttcttatatcctaacttgagcgctgcctacaggttaagggatttgaacacggtccccccaggtaaaattaagatggctggcaactaaaggggggagcttaaaatattttaccaacatcacaattcggtaaaataaaccaataatccttgcccccaagcttgtaaaatttaaaccagataacttaactaaaactaaaccccgctaaaattggggcttttgg

SEQ ID NO: 624965 - DNA, 148 bp, Homo sapiens
agaagaagaagtcaccaaaggaaaggaaattcaacttcagcttagctgtttatcaatcaggaggtcaagattcttttacaggacttaaattgcgacttaggagaatcaccaacagttcccaccgttgcaagaatgactgtatatcaat

SEQ ID NO: 624966 - DNA, 692 bp, Homo sapiens
aagcggagtgttgctgtagctggttgagaggatcgtgctgctgttatggcggaatgtcgacaatccttcaccatggcagtcagcccggcccagtgtggcgaggcaatgatccgtctcaccatccagcacctggacgaagctcccggtcgtacatgatgccctcacctccaggcctggccgtgactttccaccatttgaggatgagtccgagggtgctcctaggacacagaggggcccctggaggaagaagaggatggagaggagctcattgcgagatggcatggaaagggacatatcggcacatcccacgagctggacgcctatgaggccgagggacatggcatcgtggatgatgagagacgtagaggagctgacggccatgtctatgagtggagtgcaggcacagcaggggccatgcggaggcggtgacacgggaggctggccgtggacggtgggtccgtgatgcgccagagggcctccatgtaatgagcagtcagatgaggaaggatcgcaggagcgccctgctacccgacaaggagcatgtctcatgtgagaacgggcacaatggagggacgggccgaggcgtgacggaggcagatgatacgacgagacatcggagaaaacgtggaaggattcctagaaaagggcacactctggtggcgcgaagtggggtgaggcatggagggagcaca

SEQ ID NO: 624967 - DNA, 278 bp, Homo sapiens
  misc_feature (2)..(3): n is a, c, g, or t
  misc_feature (90)..(90): n is a, c, g, or t
  misc_feature (109)..(109): n is a, c, g, or t
  misc_feature (125)..(126): n is a, c, g, or t
  misc_feature (129)..(133): n is a, c, g, or t
  misc_feature (136)..(139): n is a, c, g, or t
  misc_feature (141)..(146): n is a, c, g, or t
  misc_feature (148)..(150): n is a, c, g, or t
  misc_feature (179)..(179): n is a, c, g, or t
  misc_feature (193)..(193): n is a, c, g, or t
  misc_feature (198)..(198): n is a, c, g, or t
  misc_feature (200)..(200): n is a, c, g, or t
  misc_feature (225)..(225): n is a, c, g, or t
  misc_feature (252)..(252): n is a, c, g, or t
  misc_feature (254)..(256): n is a, c, g, or t
  misc_feature (259)..(259): n is a, c, g, or t
  misc_feature (263)..(264): n is a, c, g, or t
  misc_feature (272)..(273): n is a, c, g, or t
  misc_feature (275)..(278): n is a, c, g, or t
cnngcagcggggcggccgaggcagtagcggcggcagcggcggcggcggcggaggcagcggccggtgtccggctcgggctcggctcctgcnaccccggggcgcccggcgngccccccgcccccccnnccnnnnnccnnnncnnnnnncnnnccctcccagcgcgcccgcggccccgcggnccttggcgagaagntcggntncccccagcgctccccgggcacaaanatatggaaatggtagttagcagttggngnnnttntaannaggatgtnntnnnn

SEQ ID NO: 624968 - DNA, 538 bp, Homo sapiens
  misc_feature (84)..(84): n is a, c, g, or t
  misc_feature (90)..(90): n is a, c, g, or t
  misc_feature (397)..(397): n is a, c, g, or t
  misc_feature (440)..(440): n is a, c, g, or t
  misc_feature (500)..(500): n is a, c, g, or t
  misc_feature (507)..(507): n is a, c, g, or t
  misc_feature (511)..(511): n is a, c, g, or t
  misc_feature (518)..(518): n is a, c, g, or t
  misc_feature (530)..(530): n is a, c, g, or t
ggagtctaaaatgataccctgggtggagccggggagctgagcaggaggccaggtggcaaccagtagctgctgggcccgtgctgnaacccncctgcactcctccagctggagtctcaccgcggatcccaggaatacctgctgttcccacagggctgcctttccgtagtttgtctggagacaccaagagtggtttccatgcctgctgggaataggctgagcatgcaatgacatgagggccaaggcttgtgggaaaatgacagcttcacagccccttgaggagtgaccaagccacaaagtaaatcctaaagccacaaccccttctaccactgagctgctggaggtgggtccttatttcaagccatattcacccacccaacaaaacctaacattgaggtgngggcacacggccctgccgtggggctcactctgcagctggaggncagcatacctgaaacctgcaagaaccggtttataaaacaacagacagccaggaaaatggngctaggngagncagtggngaggccagagangcaaacca

SEQ ID NO: 624969 - DNA, 203 bp, Homo sapiens
gagaacatttttttccccctttttttttggtgaggaatttgaaaacaaatccccagggggggattggactcccgcccccttgagggggcatttttggaaaaaggatgttttttcccagccccccaggcggtaaatcaaaaccagtcattttttggaaccctggattagcaaggcccaaaaaaaattttttttgttgcccttga

SEQ ID NO: 624970 - DNA, 156 bp, Homo sapiens
aaaaaaaacccataaatgaaaaattcctaatgaaactgtggggacgggtttgtgcgtgcaacataaaaaaccagtagcccctaaggagctttaattttggttcctgtaaaatttcaaatttatgtggttttaataaaaaaaaaaaaacccccccca

SEQ ID NO: 624971 - DNA, 262 bp, Homo sapiens
ctgacccgaggattagtattggtggtgcatcgcggtcatgcctaacttggagatccagcttcacattcaccaacaccagcagcaacaatcaggacagcacagtcagactgagatgtccctgataatcatgttttctgataaagtctctgtgtcctgtgggcatcacatgatagtcacatcagtactctgctggtctcacaatttccagcaagggagatatcaataggtgataccacagttcacgctacagctattacagttt

SEQ ID NO: 624972 - DNA, 690 bp, Homo sapiens
gcttcgggcgctgatttctgtgttgcaccccgggggtgccccactccctccgggctctctgtgtggccgatctctcttccggcgcttgcaccgctagtctatcttagatgtgggcgtgtaccccccgggtcacccacagggtccccccccccggggataacatgggtgacagaagctccgtggatctgggcaccgacagggccccctatcccgcgccccccctgggagccactcccgtggctgcagctttacaaggagcctcctgcccatgaggttcaaaaatcgaaccccggagtgctgctgcagacaagcaccagcccaagcggatatctctcggggtgcatcgtagctgccccccccgctcgtcgtgtggttctccaggtccatccctgccgcatgggatgcacaccagagtgtcttatcaacagggctcaacaagggatcacatctacctcttatcatcctcacatctccacatataaagccagcctccctcactcttccccccgcaagcttcctttacgcagcatcctccctcccctcagcccccatgaattcatgctaggagctcccccactctttctctgtttatgttaaccccttgtttatttaacaacgttgtataccaccagccacagcaaatatggatcaactgcgacagataacaacgttttttaacccccacataac

SEQ ID NO: 624973 - DNA, 411 bp, Homo sapiens
atctcctctgttggaggtggggcctagtgggaggtgattggatcacgggggcggtttctcatggtttaacaccatccccccttggtcctgtcatcacaatagggagttccagtgagatctggttgtttaaaagcatgtagcaccccctccatgctcatggtcctgctcctgccatgtaagacgcctcacttcccctttgccttctgctatgattgtaagtttctcaacacctcctcagaagctgagcagatgctgccttgcttcctgtacagcctgcagaatcataagccaattaaacctcttttctttataaattacccagtctcaggtatttctttatagcattgtgagaacagactaatacaaccgggctacctctcagtcagtgccctttgccccagctgtctctca

SEQ ID NO: 624974 - DNA, 137 bp, Homo sapiens
atcatgcgccgattctggaagatgattggaacgctctcgagggccgagggccgaatgttatagagataggaacggggtgccgaaaagtaaaaggtttaaatatttaaaaagttgggataaaaatccaaaaaaagcgc

SEQ ID NO: 624975 - DNA, 324 bp, Homo sapiens
tgtgaatacaccagcgcagcagagaacttggtgtcaccgaagtgcctcgtccatgcgcgttcgaagaagcgctgcaggctgatgatggactgcacgtctggcttgtcttaagtaaacttgttgaattgcttgaacatgcggtccacatcctgggcaaactcctgtggggagctgtagggaggtgacacattctcctgtaggcgggcacggatcagggtcagatccagggtgccaccgaggggtggtccaggaagaaaggtgcagtcggtagccagctgatgcagggggcggcagggttcgtgacagaatagagcgacagcagta

SEQ ID NO: 624976 - DNA, 1179 bp, Homo sapiens
gtacgcattcatacgtagcaattgtagcatgatatggcacatgtctagggagaaggttgacttttctgccactatctagtatcatcagtcaaaaacagcagcagcaacacctgttcatcaccttcagtccacagatctcatcatatctctagcacatcacaacacacgtctcatcacatatcacaaggcagctttacggttccacaggctcaaataacacatgcaccagcagcgtggagtggacagagagtttggctgtgacaaaaaaaacgtgtgagccaccacggaccgctctaaggcgaccgtcacaacatagcgcgcccgtttcacacacccagtgactctgacctatgtcggcctctttccatgttggttgggcacccaggacgctatggcctaggagtatatagacccacggggacaatttattcatatctatcacgaccctgggaaaacaggaatatacccggccgcagttcgccttttgtcaacacgcccgcttacatgtgaacgcttgatccacaagacgacacgctcttcccatatgtgaagcgccccagaagacttatcttgaccctgcaaacggaacctacacgtttaacccaatacggacacaatttacggcacgggttaccccatattctggtaaacaccaaagtatgtacaaacggggtatggacaacatttcgacgtgggggaacttccaagggagttcaactttccccctttataagccaggtttcgttgtgcaaacgacgacggtcaccgttagtccacgctggattttctaacaagaacacgagttcttccacagccccatcgcatgccggcacgtcccgggcaggacggcacacacgggcaacgcggtaagtatagcatacaaaggcaagcgccgagtaagttacgtttataggctcccccaggacgtccacaggcttgtctccgtaggccaccaactagtgtcgtccaggatgggggtaatcacacttgggtccccaaccacacgatcaacaacagcagtcccttttccacaacgaacgccaccacggactcactttacagacccgctgtgttcgcagcccaaacacgactgttctgcctagagagcatccgagtttactatcgccatgggtgcgcacgaactaacccctcaatcaaaatgcataagtggactagcac

SEQ ID NO: 624977 - DNA, 919 bp, Homo sapiens
ggccggtggagggaaagtaatgccggctgttgcaccatggacgttcatggggaccctcgccttcgatgaatatgatcgcgctgtttcctcatcatcgaaatgatctaaggaccgtaagtgccgtcttatgggacattgagagcccttcaaaggtgtcaatatcaatggcaggctaaaggctgataagctaaattgcaactggagagcattctgccgttgtgaccaggatgaggtcattggatagtatgaatggtggattacatggactggggagtgtgatcctgtaactctaatgtgatctcggggcccaccaatcttagcgcaatgactgtgagtgttgatccgctcataattttgacccacaggcctggattgaggtgtgaaaaccttgggtcccgagggttaccttccaggcggaattggacattcgataggaatttaggggaccaattgggaaacccaaccaaggagaacgtgggttcggatcgctgggttgtggtagccatttgtctacgcaagtaaaggcagtgacgcaagttgtcttagacccgacgtgtcattcaacccgattccagatactagtcgaggggcctatcgaggcagggtctcgcataccgtcgattgtcgtgattgaagctacccctggaactagagattccacgcgactaggagttctttggtcagatcgataaaaaggggcaaccgaaactctcccttgaaaacaagatacaggtgaaagaggccctctcggtgtggggtcttgcccaaaaaggtggggtccgaaatcacgcgtttgtgctctcacacccggaaagtcaggacatggggggggtgtggaacaaccaattttgggcgcccggggctgggagagaattttgtgccccgtggccgcagtcgaacttgggttgtggttgccact

SEQ ID NO: 624978 - DNA, 693 bp, Homo sapiens
  misc_feature (98)..(98): n is a, c, g, or t
  misc_feature (102)..(102): n is a, c, g, or t
acacacccacacactcgcccgcccactgtcctgggcgccctggaagccggcggcccaagcccgacttgctgttttgttctgtggttttcccctcccgnggtnaagaaatgctgccggcctgtctgtctctccatctgtttggtgggggtagagctgatccagagcacagatttgtttcgtgcattggaagacccaccccaagcttggcagccgagctcgtgtatcctggggctcccttcatttccagggagtcccctccccggccctaccagggcccgttgggttgagcccctaccccacaccaggccgtccttccgggccctcccttggaaacctgccctgcctgagggcccctttgcccagtttgggcccagttgggttttgccaccctacctgttcagtgtcccgggcccgttgaggatgaggccgctaaaggcctgaggattagctggaaggagtgaaaggggacaaaaccccccttgttggagcctgcagggtggtgctgggattgagccagtcccaggggcatgtattggcctggaggtggggttgggattgggggctggtgccagccttcctttgcagctgacctttgttgtcctccccttggggggttgagagccccagctgacatggaaatacagttgttggcctccggcctcccctcaaatataaacagggaagacatgacgg

SEQ ID NO: 624979 - DNA, 383 bp, Homo sapiens
atggtccagcgtaagtactagttacattaagcagaagcattactattaagaacaggcaagttcagtggctcacgcctgtaatcctatgtgctttgggaggccaacgcaggaggatcacttgaggcaaggagtctgagatcagcctgggcaacaaagaccccatctcttaaaaaaaaaaaaaaaaaaaaaaaatttaaattcagttggggcaggggggggtatgccaacaggtcctagcaatgtggggcaggggggtcggggggggaggggcccttgagcccaaaagttaaggggacagggagctataaccagtagactccactacaatccagcgggggcacaaaaacaagacccggtcctcccaccaaaaaaaaaaattcaca

SEQ ID NO: 624980 - DNA, 417 bp, Homo sapiens
gacagtcgagatccccggcaccagcgccccaagtgacactctttttttttgttcgctttttgagatggagtcgtgctctgttgcccagcctggagtccaatgccgtggtctcggctcactgcaatctccgcctcctgggtttaagtgattctcctgcctcagcctcctgagtagctgggactacaggagcgtgccaccacacctggctgattttttgtatttttagtagagatgggatttcaccatgttagccaggatggtctcaatctcctgacctcatgatcctcccgcctgggcctcccaaagtgctgggattacaggcatgagccatggcgcctggcctgcactttcaacttttcaatatttccagcgtacaatgggcatatagagatgtagcaccatggtacgtgaggagct

SEQ ID NO: 624981 - DNA, 866 bp, Homo sapiens
  misc_feature (34)..(34): n is a, c, g, or t
  misc_feature (88)..(88): n is a, c, g, or t
  misc_feature (144)..(144): n is a, c, g, or t
  misc_feature (146)..(146): n is a, c, g, or t
  misc_feature (164)..(164): n is a, c, g, or t
  misc_feature (204)..(204): n is a, c, g, or t
  misc_feature (208)..(208): n is a, c, g, or t
  misc_feature (235)..(235): n is a, c, g, or t
  misc_feature (237)..(237): n is a, c, g, or t
  misc_feature (279)..(279): n is a, c, g, or t
aacagggtttggtttcgccggaggctgccccgcnttttattttcccaaaggcgttccgcgcgcccagcacaagaaaccagatggagantccccaggagcacggaggcccccttggcccggcggcccccttcccgacatcacacncnagcaaacttcgccccgcnccacttgttccttgggcgccccttggagagcccggcggcnccanagccacgactttgcttgtttttgtttntnttggtttttcctccttcccttgggtttcagtaaatgcttgcncttcccttgttcttttttcttccattcttgttttggtgggggtagagctgatccagagcacagatttgtttcgtgcattggaagacccaccccaagcttggcagccgagctcgtgtatcctggggctcccttcatttccagggagtcccctccccggccctaccagggcccgttgggttgagcccctaccccacaccaggccgtccttccgggccctcccttggaaacctgccctgcctgagggcccctttgcccagtttgggcccagttgggttttgccaccctacctgttcagtgtcccgggcccgttgaggatgaggccgctaaaggcctgaggattagctggaaggagtgaaaggggacaaaaccccccttgttggagcctgcagggtggtgctgggattgagccagtcccaggggcatgtattggcctggaggtggggttgggattgggggctggtgccagccttcctttgcagctgacctttgttgtcctccccttggggggttgagagccccagctgacatggaaatacagttgttggcctccggcctcccctcaaatataaacagggaagacatgacgg

SEQ ID NO: 624982 - DNA, 970 bp, Homo sapiens
  misc_feature (35)..(35): n is a, c, g, or t
  misc_feature (71)..(71): n is a, c, g, or t
  misc_feature (84)..(84): n is a, c, g, or t
  misc_feature (94)..(94): n is a, c, g, or t
  misc_feature (100)..(100): n is a, c, g, or t
  misc_feature (113)..(113): n is a, c, g, or t
  misc_feature (141)..(141): n is a, c, g, or t
  misc_feature (144)..(144): n is a, c, g, or t
  misc_feature (176)..(176): n is a, c, g, or t
  misc_feature (217)..(217): n is a, c, g, or t
  misc_feature (221)..(221): n is a, c, g, or t
  misc_feature (284)..(284): n is a, c, g, or t
  misc_feature (287)..(288): n is a, c, g, or t
  misc_feature (347)..(347): n is a, c, g, or t
  misc_feature (349)..(349): n is a, c, g, or t
  misc_feature (422)..(422): n is a, c, g, or t
  misc_feature (476)..(476): n is a, c, g, or t
  misc_feature (496)..(496): n is a, c, g, or t
  misc_feature (574)..(574): n is a, c, g, or t
  misc_feature (589)..(589): n is a, c, g, or t
  misc_feature (618)..(618): n is a, c, g, or t
  misc_feature (620)..(620): n is a, c, g, or t
  misc_feature (630)..(630): n is a, c, g, or t
  misc_feature (636)..(636): n is a, c, g, or t
  misc_feature (638)..(638): n is a, c, g, or t
  misc_feature (644)..(644): n is a, c, g, or t
  misc_feature (647)..(647): n is a, c, g, or t
  misc_feature (651)..(651): n is a, c, g, or t
  misc_feature (654)..(654): n is a, c, g, or t
  misc_feature (662)..(662): n is a, c, g, or t
  misc_feature (675)..(675): n is a, c, g, or t
  misc_feature (690)..(690): n is a, c, g, or t
  misc_feature (697)..(697): n is a, c, g, or t
  misc_feature (722)..(722): n is a, c, g, or t
  misc_feature (756)..(756): n is a, c, g, or t
  misc_feature (766)..(766): n is a, c, g, or t
  misc_feature (770)..(770): n is a, c, g, or t
  misc_feature (827)..(827): n is a, c, g, or t
  misc_feature (861)..(861): n is a, c, g, or t
  misc_feature (885)..(885): n is a, c, g, or t
  misc_feature (923)..(923): n is a, c, g, or t
ggggggggaactggttagggggcggcagggggggnggggggctggcactcaggcggggactaggcgggggnggggctgcccccnggcctgttgnggaganactgaggccagcnctggcggagacctagcccagcggggtanggngggtgggggaaaactgggtctgaaggaatganggccccctccctctgggctttcctcctagagggccttagtncctnctgctggctgggctgcacgacccccaatccttgctcccctaacccgtttttgggggccagatnttnnagggcagtggacagggagcctgggggagttggggagcgcagggcagggtccatggtgtncngagggggtggcagctacctaggtggtcagttcctggcagcgatgaccacagagagttccaaaccccccaaggnaacagcagttgccccaaacagccacttccatgggatggaccaggcacccttgcnagggcacttagcaggtagcnggctggggttgcccagcattttccggtacaaggcggtctccgtgctccgctgcgccgcatgctttttcaccagctttnagagctctgcgtggnttgtcttgttggaaggttccagcttcagngntgctcttatntttttngntggggngantgtnctncccctgcngggccagcccctngcccttgcggaaganagctttnatgttgtttggctggtgctccagcncaaggctgcaggagcgcagggctgcgcggtagtngtcgagcttnagcngcgaggccgccaggttgttcagacacttcaccttcaactgcaggagctgtgccttcncctcgaacgttatgtccactttggcgctggaggngatagctttgatggcgaggtcgtnggagttggcggccaggacgaatgcccccgctggtagtnggcgttgcgcactcccgcttccggttggcagggcacgcgctcttccc

SEQ ID NO: 624983 - DNA, 979 bp, Homo sapiens
cgcacattcgcagcccgggcagccctgcttgcgcaccgggcctcgcgccccgtgccccgtgccccgagcccctgagcccctgaagccggtctccaggatcatgtggtatgtcagcaccagaggcgtaaccccagcgggctcaacttgtgagggggcccgtctttctcatggctatgcaccgtgacggggcgtccttcctttatgccatgaagagcctcccacagcttggacacgagggacccatgttgaccagttggaagacacgagctcgtcctatcctgtgccttggtgaaggagctggtgatgcccatcttcaattgtgtgctcgtgagactcctttccacaaagatgaagttaacactgactcgtagatcgacccgaagcctttcaaggcacggattaccggtccaccagaacgaacgtgggtccaatcttgtcccaggttgacaggagactgcggctgaaaccgtgatatggacgccttgttgtgcatttgtcgcggtcaacatctattgccattttaaatgcggaacctggttccccgtgttcctttgacagcaaaccaaccaggttctcccgtggcatcgtaacctttacacttggagacggacagcacgcgagacgaaacggccacgcgattccaccataggctgcggtatatgctaccgtggagaccacttctttggggggagaaaccaaccaggtcgcgaacacgtttagcttgcgcccaacttatcggaaacaaaagcttggttaccatacacggcgtgcggccacagatacggacagcccatgttgtcgaacacaatttgaagtccctgcgatctcctatggcgttaggcccaccacaacaaggaggtaccactcatgggaccacccccacaaaacgcgcaagttttccaacgcgagaagccttcctcaaagcgaatttagaccccaagcacggggtagccctctagcaaagtcgcacacgaacacg

SEQ ID NO: 624984 - DNA, 374 bp, Homo sapiens
gtcttcagtagtgccaatgacatactgaattgcagagagtaataacaaagcttaagggttacgtgaagcttgccctctgtgtgtaaccagaactagggtaacattatatgctggcacatggtatgaatctgacacagaaatagggggaattgagtcacaggaagtacagctacctgatcatgtcctacaaggcatcgtcaagaaatggacaattagatttactttccactaccatactgaaccatgtacaaatatcttgggtggctgcgagatctgatcctaggaagaaatatcccttggctctcgtaacgatgtagataactcagtagtgagacatggatagagcgggagtgagtgagagtgttgcatgtaag

SEQ ID NO: 624985 - DNA, 427 bp, Homo sapiens
ttttgagatcctctccaaagaaccaatgtatcagtatgttcagctcacctgttctttgttcttcattttaactatacaattcatcattctttatgtctctgtgcccacagtttcagtaacaaatcccctcctagcctctgtcacctgctctgacctgagtcacctttagtcacctggtccgtaaccatctttcctgtataaacttctcaccccaccactctggcttatacccctgctctctttaaaatagccagtcagaattagcttagattgtgcggtccaaccctagcccataggggaacaacacagcagtagggggtacctgcatcagggataagaacccattcccctcccttgttccggtgtgctttcgccattgcaccatccatgagacgcacttttgtatagaagtaaaattgccttgctg

SEQ ID NO: 624986 - DNA, 308 bp, Homo sapiens
  misc_feature (191)..(191): n is a, c, g, or t
  misc_feature (196)..(196): n is a, c, g, or t
  misc_feature (207)..(207): n is a, c, g, or t
  misc_feature (258)..(258): n is a, c, g, or t
  misc_feature (268)..(268): n is a, c, g, or t
  misc_feature (283)..(283): n is a, c, g, or t
cttccaagctcctttgtctacctgtatctatagagggaggattgctacccactaagcctcctcctagaagcaactttagctcatcatcaatcctcagactggctcagcagctcactaagtgttaaagcacaaagggatctatggaagggagatgactaggagagggaaaatcttccaattagaaatctatnactgntttacaggtantaatctggaagtggccttactatataaattggatccatctaaactggagancacactgggnacttaaagaaggganctaattaaataaataatggcttggg

SEQ ID NO: 624987 - DNA, 779 bp, Homo sapiens
  misc_feature (340)..(340): n is a, c, g, or t
  misc_feature (706)..(706): n is a, c, g, or t
  misc_feature (763)..(763): n is a, c, g, or t
  misc_feature (779)..(779): n is a, c, g, or t
cttttatgaccggaatcccagagaagatgaagaaggacttcagagccatgaaggatttggctcagcaaatcaatctgagccccaagcaacaccatagtgctttggaatgcttgctgcaaagaattgcaaagaacgaggcagccaccaatgaactgatgcgttgggggctccgtctgcaaaaggatgtacataagattgaaggacgtgttctgccaatggaaagaattaacttaaaaaatacttcgtttatcacatctcaggaactaaactgggttaaggaagtaaccagagacccttccatcttgactatccccatgcatttctgggcacttttttaccnaaagagagcaatggaccaggctcgagaactggtcaacatgttggagaagatagccggccccattggcatgcgtatgagcccaccggcctgggttgaactaaaggatgaccgaatagagacttatgtcagaaccattcaatccacgttaggagctgaggggaagatacagatggttgtttgcatcatcatgggcccacgagatgatctctatggggccatcaataagctgtgctgtgtgcagtccccagtgccctcccaggttgtcaatgttcgaaccattggtcagcccaccaggcttaggagtgtggcccagaagattttacttcagattaactgtaaattgggtggtgagctctggggagtggntattcctctgaaacagttaatggtgatcgggatggatgcttaccatgaccccagtanaggcatgcgctccgcn

SEQ ID NO: 624988 - DNA, 181 bp, Homo sapiens
  misc_feature (167)..(167): n is a, c, g, or t
atagaggatcccctgataggcttctcagttagccttcatgcagctcatttggcagtatagctagaacactatcaagagtgcttatcctttaacctctaattgccgtgttactagacttttgggcccagagcatatgcccctctcaattgtttcttacgtttgtaccntttcacgtcgagtt

SEQ ID NO: 624989 - DNA, 775 bp, Homo sapiens
gtgtttcagtatcagtgcttttgagtgtactttaacaagtatagtaggcacggatggatttcgtttgaaactacccatgctgtccaatagcaagttaacggaacctagcgcatcaaatctggtatctcttcattcatgttggaacccttattttctgcgaaaagaccgtagtcctggaagtaatcaatgccatatagtagtttggcacactgctttattttctagaggctctgggagcaaattacattcatcgacattacctctgctctctcaatgattaaagtctttcagcaacattctttattgtcatcagtaaggcacaaaacgtgtttatcgtcaaatgatatgtcaggtctcacattgtaggtttaggcacgtatagattagtcattcagtaacattgcattgtcctctattggtaaacgagagactacataggtgacattctcattgcctgtgtctgcaggcttcagaggtacctggcacgcttactcaagcaaaatactagaaacaatcgagctttacttcaaaagcatgtgcctctggtaaattatccatcactttggattttaagagtggtccctccaagaatacatgtggcatacacagatgggtaaggttgtaagagcatgatgtacatagatgacttgcaagacgcctgctccttacatgcactcatggacaaggccctggtctgtatacgtaataggctgactactgttctagtcattctaacaaggtgacttggccattggaactttcgtgaagagaactc

SEQ ID NO: 624990 - DNA, 383 bp, Homo sapiens
gaccctgtgcacagcacatgctcttgtgccctccacaaatacttcaagcacagccttatggcccacttgaataactgataggttcgtggcccctgtgatcctggacagtccacccttcctgtgtaaaggctcccacaatgcccacctggaaaagtatgtcgtccaggtaatagtcccgcgaaatgatactctttggcagatagatctcacctctctctctgaactccaaagagtctctcccgcgcttcagggtctctgggaacagcatgcgcttccacttcctccctcgtgtcttgatcagggagtatagagagtgctctgcgcatcatctgtgtacctcagctcccccgcggcacagcacatctccgtgtcccgagagtgcg

SEQ ID NO: 624991 - DNA, 235 bp, Homo sapiens
attccgaacgcgggcaattccatgtcctaaccaaactaaacttcataagtgaaggagaaatagaccctttttcagagaagcaaatggtgaaataatttgttacgactagacctgccttacaggagctgctgaaggaagctctatggaaaggaaagaccgttaccagcaagttacaaaaacacacttaagtacacagacaacgttaactattaagcaaccacaaaaaggagtctgt

SEQ ID NO: 624992 - DNA, 111 bp, Homo sapiens
tgggggataaaaaaaaggccttttttagcctgggcataagtgaaatcaccaaaccccttgggggggtgggtaaaaggcccttccaaatgcataaccctgttccaatgttta

SEQ ID NO: 624993 - DNA, 441 bp, Homo sapiens
gcacagagaagccaggttacaaactacctgggcatcgagtggatgcgtaggcactttgctccagactacagagtacatatcatctcttttaaagaccccaatccaatgcacatcgatgccaccttcaacatcattggacctggtcttgtgctctccaaccccgaccgtccctgtcatcagattgatcttttcaagaaagcaggatggaccatagttactcctccaacaccagtcatccccgatgatcatcccctctggatgtcatccaaatggctttccatgaacggtcttaatgctagatgagaagcgcgtgatgggtaagatgccaatgaagttccaattcaaaagatgttttgagaagctgggtatcagtaccattaaggttaacattcgaaatgccaattccctgggaggaggcttccactgctggacctgcgacgt

SEQ ID NO: 624994 - DNA, 84 bp, Homo sapiens
  misc_feature (27)..(27): n is a, c, g, or t
ggatttgctggtgcagtacaactaggncttaatagaggctcgaattcgagatcccgaacctgaacttctgttgaaaaaaaaaaa

SEQ ID NO: 624995 - DNA, 113 bp, Homo sapiens
gcactgacaaatgctgagtttcagaaggttactcagggatctctacttcaaacggacatataggtgggttagaaagggaattacaccccttcctcaacctatttctgttctgt

SEQ ID NO: 624996 - DNA, 753 bp, Homo sapiens
attctagaggccgaggcgggtggatcacctgaggtcaggagtttgagaccagcctggccaacatggcgaaaccccgtctctactaaaaatacaaaagttagccgggtgtggtgatacgcgcctgtagtcccagctactcgggtggctgaggcacgagaattgccttgaactcgggaggcagaggttgcggtgtgccaagatcacaccactgcactccagcctgggtgacagtgagactctcacaaaagaagaaaaaaaaattcccaaccttgccaacataacaagaccatgtctctacaaaaattttaaaaattaaccaggcatggtggcgtgcacctgtagtcctagctactcgggaggctgtgacaggaagatcacttgtgcccagaagttcaaggctgcagttgagctgtgatcacttgtgcccaggagttcaaggctgcagtgagctgtgattacaccattgctctccagcctgaattcacagattgagaaccctgtctcaaaacacaaaagccccccgacctcaacagaaacacttgttctgagctgaatgcgagttcacagggacttgacactcctaggcagaatacacttcatttccgctctgccatttgcctatggagaacctgatgtgggccagataccgggatttagccgggattaatgaaagcccgcccccatacgccgggcgacccgcggcctcgcccactttataccagggccatgtagagatccccactctccacgatt

SEQ ID NO: 624997 - DNA, 1863 bp, Homo sapiens
  misc_feature (81)..(81): n is a, c, g, or t
  misc_feature (215)..(215): n is a, c, g, or t
  misc_feature (252)..(252): n is a, c, g, or t
  misc_feature (254)..(255): n is a, c, g, or t
  misc_feature (506)..(506): n is a, c, g, or t
  misc_feature (1246)..(1246): n is a, c, g, or t
gggcggtcgtggaagaacaaggcgccttacgacaaggcggcgaaggagaggttagccaagacatgaaagtggtccgatccnatttgctacagaaagattaggtgactgatggtggagcacgcacctggctactgttcctatctcattacaagaatagtacttgggagaatgactgctgcgctcgagacgaaggaagccacgaacggtagagacanacacatgagctacttcggtgatcgcgctccttcagangnnggtcgctaggtagtgtttgggacaaaggttgtagggtacttcgtcctggcgatctcttgtccacgccacattggaacttgaacacgatttcgcctaatttgtcatggagagacactttccaaaagcacttgagttttgacctggcacatggattcgctctccaaggcgggatcacacataggagctgtccgtggaacgtgaaagcgtctctccagtgggacaccatgggacagtcatttcaccccaggtgntacgaaagatactggtggttacccatggtgaatcctacatatacaatggggcttacccacagagatcccatgtgagacagtcatcgaacgttgtgtggcatgttcgaagcaacttaaagcctggagttgcggacttgaccttttaggaatattgccggatgccttggtattcgttagtagcgttggggggttgaatctggatcgtcataagaggagaaaatctcggcggaatcgaaaattgctaagggaaatccaccggggataggaaatcccgttcctttggattgaccttcaaggaaacacaaaacctaaggggttacccggggcttagaaattccaccggggaggaaagaagacggatttggaactcgggacactagttccattgggagctcgccggcacgcaaaggggtgggcgacagaacaaaaaagagttgaacactttcggcaaacaggacaccgctgggcttccaaacttagaagaccttttggaattttcccaaagaaagcaaagtctatctatggggacaccaacacggaaccacgttaaggacaacaagagaggcgcttaggccccaaagatcctaaagtttgtgaattcccgttccgtccccaattggtaattggtgcgtgttccggtataaggagaagacaacgttcaagaaaaagtgggctttgggaaaggcaaacggcgccccaagaggtttgtggacaatcttctgggcgggaacaagaggctnccgatttggcggagggctatcacacttggggtgaaaaaggggcagcgtgagggttccttggggaagaacagggccaactagggcggacccgaggacgagggtgtggctaagagtgttgagaaccggaaggcttgaattggggttgattgtaaagcaaccggtgttcccaggataattctgggtccgcacacggtttacaggaacttcacatagtcggtgtgcccacgtcttacacaagggtggctcattcggtgtgtgaacagcaagcacaaaaaaagaaaagtctcggagaggaagcaaaagataccgggggctgcggcgaacaaacggggatatctacaagcgggccccagtggcacataccccggagtaccggtgagacgagcccttttggacagacaagcgggcacacatcggcggcgccccacataaggagcgagaatatatgactaaccacggtcacacgcacagagagcgtacacaacacggcgaagagaccgacactatacacacagacagcgagcctgttactaagcgacaacacgcgacagacacacgagaacgcaacgaacgacacacgactatatagcatagacaacagaccacacacagatcag

SEQ ID NO: 624998 - DNA, 1992 bp, Homo sapiens
  misc_feature (1783)..(1783): n is a, c, g, or t
ggacgcgtgggtcgcggacgcgtgggtcgacccacgcgtcggatcgcgagggccgcccttttttttatttttttattgtgagaaatatttgtgggattttttaaaacatgtgattaataagtggctgagattagttctacaggtgtgcagaagtgtttaagcacccactttggtatcctttaaccgtgttaagtggcagcctatagtgggtatagacacgaccatgtgttcataccatacatttacccaacaaatacaaacacaaaaacaccacgttgcacatgtggcggggcaatatatctcacatacccatcttctcccacggatagacaacacacgatggggtgtgtttgcgcgagaacaacactctcatatggggccacgttgggaccacccccacgggggaacatcctgctgtggatatatctcagcggcccacgcggggcgacacatctcatttgaggaaagctgtgtgatatataacacaggcgctcacatcagaggggtagtatatatttcttcccccccagttgatacaccactgaaagaaaatatttctcacacgctgtagtgagagaaatttgtgaggcgaacaaccacacacatgtgttgacgacgagagccgcaagcgccagaaacacaacggtgctcgaatgacgcgcagtgtgctggcacaccacacaaaacaccacaacacagacaagcgacgccatcccgtaggagtgaggagctgcacaaccaatatgctatcagacgacgatcatgcagcgcagcgtggtggagacgccccaaattatagtacgaacaacccaaaccgcgacgggagcaaaatggcgacgggacaaccacactccgcgagcagctactcatcaactacctaccgcgcacaaatagagagaccgcacgcgccaaacaatatatggaggggcacacagacagccgcaggagacaacacaccactgattttgcatcagccgaacaccacagacagaacacaaacaaactacggcaggcgggcagagacgacgcgcgcagccaacaataaagacgggaacgaaaacacaccacaccgacaaagaaggagcgggggcaccccaacagcagcagtcactaagaaccgcgcaaccatattaaaccacgacagagagcacactcaagcactcggagtgcctccaccaacaagaggtggaggggcacccccccacaaaataagagaagagacgactgcaccaagagacgttagacgaagacagccacctatcgaaccaccagcgtggagcacgaccggacaaccaaattacacacaacacagactgagaacagccagacacagcatggcggcgaccacaaccacgcgagtcgcacatacaaccgacagcagggggacaacaacccactatagatgatgaaagaaagcagcgagacaccacaccactatcaaacccacggagagacgggcgacggcgacccaaaaacaatggaggacgacagacgaagacacacccgctcgatacggcagcggaggaatacaatacagaacgaccaacaacgggagggcggcaaccctcatagcaacagcacgcgctacagacggggacgaaactacgagctggggggctgacaacccaaacaagacgcgcagcaccgccaactctcacagtcgagcaggccgcagcagaacagacattattagacgcgacccgacgcgaggagatcacgtagacataagtacaggcatcacatttatctcacgggcgccgcggcagcgcacataaagacactnagtacagcgcagcaccacgacagacctacagacacagaccggcagccgagcagacccagccccgccagcataagtaagaggtacgtcatagcgaggacgatcatccgcagaccaactaacaaactaccaaacgccatccagacaacaaacacgacaagaccaaaccaagacgaacactatcagaccacaaagacacacaacagctagaa

SEQ ID NO: 624999 - DNA, 268 bp, Homo sapiens
ttttagaggagcagattgaaagaagaaaacaccacagtgggggccagtcaatatagtcataatgtcataggaggtgattaaggaatggttaaaaaaggaaaatccgaggaatcctttccggggaagccatccaaatgaatttttgggggaaggaaccagtttaaaagtcatgtaaaattttgttgtggaggaagatgggaattctttaccaccatttaaccccttggtccccgttttcattaaaaatgtaaggcaaacgatggccagg

SEQ ID NO: 625000 - DNA, 466 bp, Homo sapiens
gctcggcaccccggcaactgcttcggatgctgaggtgggaggatcactgcaacctctgcctcccgggttccagcatttttcctgcctcagcctcccaggtagctgaaactgctggcgcgcgccaccacgcctggctaatttttgcatttttttaataaagacggggtttcaccatattggccaggctggtcttgaactcctgacctcgtgatctgcctgcctcggcctcccaaagtgctgggattacaggcgtgagccacagcacctggccaatatattttaaatgatcataagatggcccattttggaccggaactgtcattgccagacagaattgtacctttagcacattctggtgccctggcctcttagtgttcaccagttgtactgcaatatagacaagatgtctctagagactcaaactactgttttattaaaaaagtaaacacctgagcacagctggcct

SEQ ID NO: 625001 - DNA, 140 bp, Homo sapiens
cctcaccgtttatataaggaggtgcacttactgtacttccccaatattgtcatcaaaggatcggagctccaatcggtatggttgtaaaccattcatgagaaatccatcttcatgatccattcacctccaatgtataaacg

SEQ ID NO: 625002 - DNA, 329 bp, Homo sapiens
  misc_feature (146)..(146): n is a, c, g, or t
  misc_feature (159)..(159): n is a, c, g, or t
attgcgggcttggttctagatcactgcaataaaacaagtatcgcaataaaacgagtcacataaatctttggtttcacagtgcatataaaaattatattcacggcatactgtagtctattaagtgtgcaatagcattatgtctaatngatactttaattnaaaaatattttattgctgtaaaatgccaacaatcgtttgagccttcagtgatttgtaatcttttttctttgatgagacggagtctcgctctgtcatccggtctataatgcaatggtgtgatcatggctcgctgcatttttgaattcctgggcttaggtgatcctcctgcc

SEQ ID NO: 625003 - DNA, 332 bp, Homo sapiens
gaaaaaaaaaattttcttccccccccccaaaaataaaaaaccccgggggaaaatttttttggtgggggggggggctcttgtggtgttcggaaaaaaaaacccttttttttgaaaaaaggggggggcggaaaatggggaaagcccccccgtgccttttaaaaaaaaaattgggccaataaaaaaccccccaaaatttttccccacaaaaaaaaaaatatggggacccgtccccacctttgggggggggggcccaaaaaaaaaaacccccccggggccccaaatttccaaagttttcgaccccctttttgaaagaagggcttcccatcatggtg

SEQ ID NO: 625004 - DNA, 232 bp, Homo sapiens
ggggcaccgagttcactaagctcgaagggcagatgggagaggatggaaactctattaaagtgaacctgatcaagcaggatgacaggcgagtcccccatcagacactatctggtcaggataccgagacgaagctctccatccgaagtggaaaacagaagatcagagctcccagtctggcagatgaccactgtcatgctgataatccctggaactggacatgctgagatatgag

SEQ ID NO: 625005 - DNA, 118 bp, Homo sapiens
tgagaacacttacacgtttgtgcaggtccattttgaacaacttgaaagaccgtaaaactttgtggttgccacaagcgtatctttcttttgtgctaatccaataaacagctgtgccata

SEQ ID NO: 625006 - DNA, 400 bp, Homo sapiens
tctcaggatggaactggaaatggcgaatgaaactgagatggcaagtagaaaacactatctcttctatgacggagaatccgtttcaggaaggtaaacctaacctttaagcactggaaagagtagaacaccaagaattagaattgatttgtaggtcaattgaacttttcaatgacaagaggtaatactcatgaatttgtaaacctagtgaaagaactagccttacctggagaactgactcagagcagaagttatgattttgaatttatgcaagttgaaaagccatatgaatcttacatcggtgccaatgtccgcttgaggtattttcttaaagtgacaatagtgagaagactgacagattcggtaaaagagtatgatcttatagttcaccaagcttgccacc

SEQ ID NO: 625007 - DNA, 540 bp, Homo sapiens
aaacaactaaactgatctaacagatagaattgtgttgcttaactgatctaacagacagaattgtgttgggcctgtgagctattccctgggccatttactggtggtgggggtgggggagtcaccaaaatgaagtagcaatataaacctgtctctgagcctccctcttgtctgtttcctcatgaactgtgttttgggcacagagagtcttgcactcctaatttctttctgttagtccagcacagaacaggaatgggaagggaagaaggggagaaggtgagtgggggaccatatttctacagtttttctgactgctactgggtagataaatcaagagctctgcctgtaggtcttggatatctataattgggtatgaaaagtggaagaccctgatgaattctccaaaacaaagctggttttgtctcttgtagggttctgtgtagcctcacctagtgccaccgtaatttccttacttgagggagaccagcaccctggaaacgaactgggaaacctgccttcttccagtcaaaacctgcctaaaac

SEQ ID NO: 625008 - DNA, 427 bp, Homo sapiens
tgagtggattgtctgagaagagacggatggatttatgttgtgaagtgagattgagaacatgagtggtcggcccaagggaatattccaaatgtcagtgtcaaggaagggctggtaagtgcagccttttctcctggaatgggatgctccagaaggcaggggcacgagacgaatccgaggtcagtgagcaagaactcctcttctgggtaccagaggtccgacctatgtcctgggtctatggcatggcctaggagagtttgatggtggtgtaggggcccagatccctgtcgtgtaaccactccttggagtggaagaagtcggggctggtgcctgttccaccggtctttaggccaggcctcaactcaggtacttggtcggctcgtgggtgctgtccaggtgatcattgctgcagttgtcccgggccctgtgt

SEQ ID NO: 625009 - DNA, 153 bp, Homo sapiens
  misc_feature (117)..(117): n is a, c, g, or t
tcgcggcgctcctgtattcatgctttttgatatcaactgtagacatgacgttaatttgttgtatattgctgagaagtatagtctgccatgaaaggtcattatatattcattcatccngtttatggactatttgcagttgctagcttgtagttt

SEQ ID NO: 625010 - DNA, 173 bp, Homo sapiens
agatgtgcagagaaccaccccaaccaaatctcatgtccaattgcaattcccagtgttgagggagggacctggtgggagatgatgggctcatggcggctgagcgtcccccattggtggtctcgtagatagatgagtagagtgctcatagggatctggattgtttagaaagcatg

SEQ ID NO: 625011 - DNA, 130 bp, Homo sapiens
ctcctccttgcactcctcccacaagaatatggtctggtgtcccagccaaagcagtggggagctcagccccatcagtgtcactgtcagaactgccatgcaggagctccaggagcctcagacacaccatgct

SEQ ID NO: 625012 - DNA, 266 bp, Homo sapiens
gcgctggcggaacatgacgccagctactgagcaccctgctggcatgagactccttgagaggtggggagcacggggccttcaggactccgactgccttcttgttggtcttgtctcatcaccttgcttgagggtgagaagacatgaattaaggcctctcggccgagccgtcattcctctccaggtcctccttgaagcagaggaacagcgtgtccacacacatgccatagacgctgaagaaaccgtgtgcaatcaagtaggagccaacg

SEQ ID NO: 625013 - DNA, 891 bp, Homo sapiens
ggatacgggagttcctccttgctctcgcccctactctttctggtgttagatcgagctaccctctaaaagcagtttagagtggtaaaaaaaaaaaaaacacaccaaaggctcgcagccacaaaggggatgaaatttcttctgggacatcctccggcttctcccgttacgggatcgtctgctccctaaagtcctttcgtgaagctttttattcctaagaggagaaaatcagtcaccggcgaaatcgtgctgattacaggagctggggcatggaatggggagactgactggcctatgaattggctaaacttaaaagcaagcgggttctctgggatctaaataagcatggaccgggagggaaacagttgccaaagtgcaaggggacgggggtgccagggttcataccttgggggttagactgcagcaaccgagaaagatattaacggctctgaaagcaggtgacggcagaacaattggagatgtcagtatctagtaaataatgctgctgtagtctatacatcagatgtgtgtgttccaagatcctcagatggaacagatttgaagttaatgtacttgacatttctgggagtactagggcatgtcttcctgcattggcgaagaataaccaggccatattgtcactggggttcggcaggtggacatggtcggtcgccttctagggtgaggtcaagcatttgtggcggggtcccacacttcgacgggaagtggggctcacataccgggtcacacaacggggtctatcgcacgggccccgaaacctaagggagcccggacggaggacagggcgcacggggacaggcacgcaaataaacgagagcggtcgtaaacgtcgcggcgagacccgagaggcagagcccccgcgcgagagggtgc

SEQ ID NO: 625014 - DNA, 906 bp, Homo sapiens
cgactgtggggaaccccccctcagtggggcgccaagagtgaggagtaggagcgtgtttcgtggcaggctctcaggggggaggacgtagtagatagtggcgggtgggtgtgaggcagcaccaaaagggggggccataagcgccttttgggggaggaatatttgtaggcgcgggtgggaccgcgctggggtgtgcaccggtggttgggcaccgcctttggctcccgagaactctgctgtgatgggggtcgtccacaccgccgttgggggcgcataatatatttgcaggcgagcctcgcgggttgctcccgagatgtcttgttttttgggtccccccctttgagatgagccgcctgttggtgttgtcgccagccccctcggtgtggggtggccacggcccaaatgtggtgtcccacgcgcaagaaactcgcgttccaaagagaggccgccggcgcgccaggtgagctaactctcctgtctcgcagctacgcactcctatcgtacctcgttggcccacggtggtgcagccaccacacgcgccgaagacatcccatcttgagcagcgccctcgggggtccaaattcaacgcccccctctcttggagcgcgcagtgtctccctgtgtctgtgtagatacacccttcgttcttcggaaggaaatttcgcgcactgtccatttctctcatacgtgttctaactcgagagggaggatccctcacccccggcgtcccctgctgttataagacgtcgcttctcaataggcccacgcaagtgtttttatatcagaggggcgtttatctgatctgtttctttggagacaaaatagttggcgccttcagccctctcgaatgacgatagttttgagaacgacgtccccctggaaaaaaaacccccagggtcccacaagaca

SEQ ID NO: 625015 - DNA, 324 bp, Homo sapiens
gcaggagaatcgcttgaactcgggaggtggaggttagagtgagccaagattgtgccattgcactccagactgggtaacagagaaagactccatctccaaaaaaaaaaaaagggggaaattagggggaccgggtttcttttgcccaaagatggggtaaacggggacgctttaggacggttttggccattggaggacggaaaattattgttctcaggcctgtcttgggggggaacccaaaaaatttaaatcccggcttttgggaaaccccccatctttacaaaggtaattttaaaattaggcgggggggggggccagccatttgtg

SEQ ID NO: 625016 - DNA, 400 bp, Homo sapiens
gcgtcgacgtccaggtccacgaacaccacccacaaggcctgcttctgccgctcggccgtgccgatggcctgctcaagatgatggcgcacgatgtggcggttgatcaggccggtgagcgtgtcggcctggcctggaattccagttcggcttcatagcgcttcatcgaggtgatgtcgtagagcgccgccacgaaatgcgtcaccacgctactctcgtcgcgcaccggggccatggtagaaatcgttccacagctcggagccatccttgtgatagttgcgcagtacaacattgtgttcgcgctgttcgccatgggatccagacagtctcgaaccttcagaatgctgtcgggccctccaggaaacgaatgctcttgccaccggttcacgctgtgtagccatga

SEQ ID NO: 625017 - DNA, 199 bp, Homo sapiens
atttagaggatcccgtcccacacctgcacggagtccactacctgcacctcaccggagtcaaagtatttagctgacttgcagcactccacggaagctatatgaaatgatctgctgcagtgctctgagccctaggatacatcttacttttcaccgtaggtggactgagtggcattgtattagcaaactcatcacgggtacc

SEQ ID NO: 625018 - DNA, 1326 bp, Homo sapiens
ggtcagctggaataaagagagacatcgggggaaatccgcgagaatggccagcgatcctgtgctgggagcagagctagccgagtagggcgcccggcatgtcaaactggccggcgcagtgcacgcatgggccgacccggagcggtcgcagagacccgtcgggagtcgtagtccgggacgggcccgcggaattgtccgacgacgcaagcatcgggatccgggtcggggatgatcaggcacgggattgcatgccgggacaccagatcagacgcgttagaccaaccagacaattgagcatgacaagacggcatgtatactcccgtaagacacacctcgcatcaacgatcgcgcattcgaccatcgaccatcgcactgaaccgtgccagatagaccctttggcataccaaggcctttaacactccgaagaccgacatacgggacccagaagccccgaaccgagggacagaagagatgccagacagagacggaacagagatgcacaagaagccgacatacgcaaccccacatgagacagggaaggaccaacagacacatccattgaactgcaaacacccgagaggaacaaaacagagaacaccacaacacacaagaaacatcaactaaaccgaaaagaagagacagacgaaacgggcaaccacaaactacatcggatgaataccgtaaatcagcacatccatacgaaaagaacaccacaccacaagagataacgacagcatattgagacctaacacagcaggggcaagaataaccctcaaccatggatgcgcggtccacctaaatttacgaacacaacaagccacagaatactgagatccaccagatacctgcaaggcgatctttcgacagaatgcaacaatgggtcctttacactgccaaacaaaataaacaatttacgaacaattatatatacatggacagacacacatatgcgagggcaaattcaaatataaagaaccagtacaatatatacaacgaaaagcgatttcaaacaacaccaccagtcacaacaagacaacaatggaaaggatacctatagcagacgcaacacatcagaggatcatcgagaacacatgcattgcgtagacggaccacactctacacacactaacacaccacttcaacactaccacaccaacacgatcccacaaacaccaactacctatcaacacgacaaccaaaaacaacacttccgtaaccacaccagcaacacacaaaccaatcaaacattatacatacaatcataaaacaacaacactaacatatgatattacacagtaacatactcaaatacacataaaaataaataat

SEQ ID NO: 625019 - DNA, 1150 bp, Homo sapiens
ttctgagtctgtgattgtttactgttgtctgttgtctgtttgtctcctcttgctcagcgccgttttcttgttgtccatgttctgttcgcgtcatgcttggtgttgtggccttgtggtctccgtgctttctctttccccgtgttggctcctctccgttggcccattctcgcttccgtcccgcccggttgggcagcccccggttgctggtccccgtgttttgttcgggcggtgttatgtccacgcctttgatcccggcccgtccatcgcccctgttcggtgtgtgatcccgtgtggctttattgcgtattggtcgtccccagttttgttctttgtcactggggaattctgtctttctctttgggcccgttgcgcaattggtgacctttgcttattcctgcagaactgccctgggttgtgcggtcccaccagccagttcctgttcgtgtcagcaggaccctaggggccacgccttcacgatgagtgacctcccgcacagtgcagccaccctctccctgatggtctgggagcctggcctcaagcaaggggccttcctgagcctctggctccacgtgaagctgaaagtcctcacctttgttgggtcacaactctttacacatttcttgtataggccattcttggcacacaccgctggggcttaaccacgtggcccacggtaaattcttttgcttttcactggacctatggactctgttccaagggattctgagtcctctttgagaattcttgcaccacgccctatgatacacatcccttttgagtataaaagggtctttgctttctgagttaccacggaggcacctgtggaaacgttctggaaaataaagtttttaataaattaccacagtaatatgttggtgtacacactccaaacctgtccccggcacgccacgtgctctctgtatagggccactaatggaaatttctgaagaaatccttggggagggaaggggagttggaacacaatgtctgtttccctgagacggccacgctcccacgtgctcacgacctttagagactccttgtaaggtgcccccgcccacctgagacccaagtgctgtgaatagtccatgaagtcgcgagcagcctttaagactgactgcttaacctcttatatataatatgaaaaata

SEQ ID NO: 625020 - DNA, 209 bp, Homo sapiens
tcgtgttttaaagatgaaaaatgggtcatttcaggttgaaatcttctagctaacaatacgtaaattacttctagactgggcggcaaaacttccccagccatcaaatgactgtatgtgtacaaaccatccagtgttacctcgctccattaccatcatggcagtagcagcattgcttaaaatgataatacgtgcagacaatacaacacaag

SEQ ID NO: 625021 - DNA, 225 bp, Homo sapiens
cggggggccccttggggcaaaggtttgatttttttttattatttcaaaaaaaaaccccggtaattttcccctcctttcctgggaaaaaaccccgtttcccctttggggtttttggggggcaaacaaattttacggattaaccccttttgcggttttaaccccggatttttttttttcctttgttttggggaaaagggggaaaaaaaaaaaaaggggggtttttta

SEQ ID NO: 625022 - DNA, 611 bp, Homo sapiens
aatggctccaccgagggttcaactgtctcttacttttaacccagtgaaattgacctgcccctgaaaagcccgggcattacccccgccagacgatgaagacccctatggagcctttaatttattaatcccacaccagtacctcaccaaaccccccaggtctcctataactatccccaaaccctcgccatttaaaaattttccggtttggggcagacctccggacgccagagaccccaacctccggacgccagtcaccatagcttaagactttccacccagtccaaagccgaacattactataactccaattgatcccaataacttgacccacgggaccagttaccctagggataaccgcgccaatccttattttagagtcccataatccacaccaattagggtttacagacctcgatagttggatccaggaccatccccaatggtcgcagcccgctattaaaggttcgtttgttcaacgattaaagtcctacgtgatctgagttcagacccggagtaatcccggtccggtttctatcttacttccaaattcctccctgtaccgaaaggaccagagaaataaggcctacttcaccaagcgccttcccccgtta

SEQ ID NO: 625023 - DNA, 279 bp, Homo sapiens
gccatcaccttcatccgccacatcagcgccagtgtggcccctacttagggacactctgctccagaggtggctttctccacctccaggatgttctgcagggtccggaactcggctgggttggtgtcgtacacagctttgattaactgaaatggcgcacacaagatttccccttgggtcagctgcccccatagacatctggcccgcacgctgggtgagacgcaccctaccggcatctcctgctccttcctgccctccaggagcagcatggaaagacagggg

SEQ ID NO: 625024 - DNA, 446 bp, Homo sapiens
  misc_feature (3)..(3): n is a, c, g, or t
  misc_feature (101)..(101): n is a, c, g, or t
  misc_feature (263)..(263): n is a, c, g, or t
  misc_feature (278)..(278): n is a, c, g, or t
  misc_feature (286)..(286): n is a, c, g, or t
  misc_feature (288)..(288): n is a, c, g, or t
  misc_feature (298)..(299): n is a, c, g, or t
  misc_feature (301)..(301): n is a, c, g, or t
  misc_feature (305)..(307): n is a, c, g, or t
  misc_feature (310)..(310): n is a, c, g, or t
  misc_feature (315)..(315): n is a, c, g, or t
  misc_feature (317)..(317): n is a, c, g, or t
  misc_feature (319)..(319): n is a, c, g, or t
  misc_feature (345)..(345): n is a, c, g, or t
  misc_feature (358)..(358): n is a, c, g, or t
  misc_feature (374)..(374): n is a, c, g, or t
  misc_feature (376)..(377): n is a, c, g, or t
  misc_feature (393)..(393): n is a, c, g, or t
tgngaccacaggcatgtgccaccacaccaggctaatttttttcttttattgcagagacagggtctcactatgttgaccataccggtcttgaactcttgggntccagcaatcctgggcttcccaaagtgttgggattacaggcatgagccaccgcacctgctcacagcatataatttttcctctgaggactgaggaaagaatgaatgccttgggcatgacaagaagcagccctgcttcctctggagctctgcctcaaagggaanaagtcccaccacttncctgaacnangccctggacnncngggnnncanacccntntntggctggagcattctataatggtggncacatgcagaaanattagaagcaaaatantnngagttgctatgggcanagagttggagagaagtatttccaaatattcaagaggatgctggggtgggtcga

SEQ ID NO: 625025 - DNA, 1243 bp, Homo sapiens
ccgcccacgcccctcaagtggttgttctcccgcttcatttcttaccagattgttgttctggggtgtcaagtatgtgtttgggagagaaaccccccccactaagagtgattcctctggtgggctcaataccatcatatgctgctcctcttattgagatgcgctgctaatggttgtttgtccgtaaccgtgttttcgtcgtcagtatcgtcaagtggccactacctagagtgtaataagaggtggggtcttcgccccaacaaggagttgtacccactctgtggtgtgatgttccttctccactattgctgccttcgtcgctgatttatcatcggcccccggcaacaccacctattgatgggttggggcgccgccacaagatggtctgcccgtcatagtaggatgcgcctcgtccatcaaatggggggcgacagagaaacacagagcgtgtgtataaaaattggacgtgttgtctaataagtggaggatagcctccccacacttgggggccgcaactcgtgttgcctctgggagcaattgcggctcacgtgtgagccacctggtagcacacacacgacgcgtggcttggctgtttctgagagctttgtggacactctctgttgacactcgccccctcgggtgtattgtgagagggctcttctctcgttctcgtgttggttgcgagaggagcaccccaagagagagtggagagacaagaagacccctcttgttcttgtccaccactctcactggggggactcgtgggggtttgtacacacctgggacacacagcggaggcacacaccgctggaaggcacacccgcgtgtatccacacctgtaaatcttgggggcctcgggtctcgtataccccgtttctgggtcacatgagccccacattataggtatatggaagaaaccttgtggagagagaaggcacattgttcacacgtgctccacccacagcgaatctcacggacacttgtgggttgtaagggtgagagtcacatggcctcttttcttggcccatggggtgtggagaagagatacaccccccagatcctcttctacatccgtcccagacctggaatattgtaaatgacatctccccaacacccctttggccctggccaggccacccttttggactgggctgcccctgcttgggcagaattaaaggtcccccggaggaccatgggtgtggaaatcctgtcagcccagaaattaaagtttacctcagaactgcca

SEQ ID NO: 625026 - DNA, 875 bp, Homo sapiens
  misc_feature (60)..(60): n is a, c, g, or t
gtcagagaacattgggtcggttgagtcataggacgggtcggcccactctaactaagtggngtagtggtgaggaagtcgtttactccccacgcgcggaggggttcctcgtagcacgggtgtcgtctgctctgatgtaagtctggggcgccagtagttaggcgcgcgacgatagttattatttttgtagtcccaccgagggcggctaatatttcctggggcgaggagtgttcttcgccccgccccctcggggttttttgcgggcgttatgatatagttgtggcccgccgtgtttttccgtttcaagagggacgcgccgccgctgcccccgcgttatgcgcccacaaggtcatttagggaatttcatgctgggccgcaaaaacacacagttttttcgtccagctcataaagtaatgttttttcgccagacacagggcatgtgggggtgcaccccgccctccggggggagaattatttgagagtgggtgctctggggtccacgagcagcccccacacccggctgtgccagaatgattggagattttttagaatacacccccttttttgtaatctacccccctcttcgagaaagtttataagctttgttatctccccccagatatgtaataataaagtaatttgtccccttctcccccctatctcacccgcttaggagtttatatattgtatagctccctgtgtgtattacaggtgtgtaatataccacttttctttttaaaatatatattaattggagagggagataacacactctctctgtaagtgccccccccctttttttgggggaaacccttttccccccctttttgtggggggggttttttcccctaaaaaaagagaatcaaggaaaaagggga

SEQ ID NO: 625027 - DNA, 360 bp, Homo sapiens
aaagtaaagaagttgcagctcagcacacgtaaagtagagacagagatggagacataccagcccacttctctgtgcaacatgaaagatgatacggggaagggaacacaggtcagtgtggaggacagcgcgtcacggatggacacgggggtgggctgtctctccacctcctcacattatgccaacaggaacgcagacacattcagatgcctttgcagaacgagatgccagaggctcttgaagtcacaaaggagaggtgtgaagaaatcctgcatctcagtcccacacaggcagctgtctcaagctttacacgcgatgagagactcatcagagacctgggcactgttgctggacgcagactga

SEQ ID NO: 625028 - DNA, 837 bp, Homo sapiens
tattatctttaataaaatgttattatgtcaaccagtgaggctgccctgaacaaaaaaaacaaaaagaaaaaaaaaaaaaggaaagaaagaaattgataaaaagaggcatcccagcccctatgtattggatgggacacaaagaaaaagaagaaaagcaatctcgcagtacatgttcactggtcgaaaaatttccgggacaagactaccctggttttatggtttcagtattctggaaaataccagtgtgttgggcagttctcgcagatgttacctaaaactggctgaattgaccgggcagaatgtcttggcccgttcttgctccctcgacacttgatgggagggctgtcgacctctcctccggggggggcttccccagtgcctatcttctcggatagtcagggagaggttacactaattcattggagatgtaagtgtgggttggtgggttggttcagaaaaatatatttaatatataatagatatcaatcgggtatagaataatggtataaaatgaggttgttaagaggaagaacaacaattcatgtttaaaatatattatgcatgaaaagtttccgctcgggcggaatttaaaacagaggatgttgcaagaccaagtgcaggacagggatgcctgaacatttagggctactctgagtttctcacgcggcatggcatatagtagggagcataatgtgagtctctagagaaaacgaagtatagggaatagcacggggttgtggccccaaactagtgatagcgcgaaatgcgaaatccaaaagggacaacggcaggacaagaatagtcacaaaaacactagaacagggcagtcgtcgtatc

SEQ ID NO: 625029 - DNA, 190 bp, Homo sapiens
cccccctcccacccaaagaaaaagaaatggtaactacctggacaaaacatttcacgtgcattgttttagtaaacagacacaaccttggcttcaggtcttttttgttttctgtcacccaggcggagtttgcagtgagctgacatcgcatcactgcactccagcctgggtgacagagcaatactccatctca

SEQ ID NO: 625030 - DNA, 1259 bp, Homo sapiens
cattccctttcccggctcaagtccttcctctctctttcctttctttccgcctatcttttttctgctgccgctccgggtccgggccattattaccgggaccgggacgcacataaggtgcgcgagcccgagggacccagtatatgacccgacgatcctgactatcctatcagcttaccccctgacccatgtggactgcggggccgcggaaggagctgaacacaatatggacccggaaagtagattagcaggaagcggaaagcagcccgacctcgacggagagctgggagcgacgactcagggcccgcaagaaaggcatgggctcaactcgcatatacacaaaaggaaaagcacatacctcctgatgaagaagaatccttagacatacactcacaggaaaagaaaacggggaaagatacagggctacacagcactggcaacccaggacaacactctacacagtggtggccatgggaactgcacagcaacacagcacaattccaccagccatcccttgaacacgaggaaacgaggagataatccaaccatgagcgacaaccataactacaaagagtggtaagacatacatacaagaggcgacgacaatcactacggcaacagtgagcgaaatgagccacaacaaatggcaaacaaagacacactgaggcacgaaacaaggaacaaagcaccaaccgaacacagacaccaccccacgacatcacccaacaaatccaggacaaacgcaccgaggaaaaccaatgaacacggattgatgaccccccaaacgacggcagggagggaatacaaaggacactcaccagaagaaagcacagcatagaaacacaccagaaaacccaaatgaacaggaaaacacaaccacacaacgaacatcgcaaccacaacaacaacacatcagcatagcaataataaaacgaaacacacgaagaaagcaacacacggcaatgacacaaaaccaacgcaagaaaccacgaaacaaacagacaagatgaaatcaacacaaataaatgaaagcgagcgagcacagaggacgcacgcagggagagcaacagcgagaagcgcgcacgggcgaaggcaccacgcacagagaaagacaagcaagagagtaggcaagcgagcgagacaaagaggaagacgcgcgacaacgggcgcgacacgaagaggacgacaaaacagaaaagcagcagagaagaagcgcgcaggcgagggagggaaaacacagcaccaacaaacgagagcgccag

SEQ ID NO: 625031 - DNA, 299 bp, Homo sapiens
accgttcccaaaccagggtgcagttcacgtgttacggaatctctttgtcctataccctatattgtggctgttatatatcgacatttcactttagatttcagattagtcatagctaatatccttgtgtcaaagatcatttattcacagaaagagaaacggttcagggaaccttttacaatgcaccctgggtcctcatcccaactctgcctgtagggtgccggtggtcttaggcctacaacttaagcctcttaagactcaccaccaacaagcaatgactgggttgattgggttgacgtcag

SEQ ID NO: 625032 - DNA, 154 bp, Homo sapiens
ttatctaggggcttccagaatcacctcattgaaagggccttatatgaatcaccaaaaaacagtcatttcatctttaaggctggagctatttcaaaagctgggaacaggagtcccccttgttacgggttcccaccataacgaacctgactagtat

SEQ ID NO: 625033 - DNA, 147 bp, Homo sapiens
gattaaggatctcgtacgagcgctctacagcgctcgtacagcctcgtacgagcgcttcgtacagcgctcgtacgagcttcgtacgagctctacgagcttcgtacagccttctaacatcctcgtagaccctgttcacaagtgggtcgt

SEQ ID NO: 625034 - DNA, 414 bp, Homo sapiens
  misc_feature (30)..(30): n is a, c, g, or t
  misc_feature (57)..(58): n is a, c, g, or t
  misc_feature (74)..(75): n is a, c, g, or t
  misc_feature (103)..(105): n is a, c, g, or t
  misc_feature (183)..(183): n is a, c, g, or t
gatgatcctgattctcatcatttgcgcgcngaggtgctcggcctctacggtctcatnngtcgccctcatcctcnnccacaaagtagaccctctccgagcccannnagccacagaatattatgtaaagaccacccctcctcattccagaacgaacagcctgacacatacgcacggggccgccgnccccagtagttggtcttgtacatgcgcagtgtcctagtgcccatcgtctgtgccccgcctcactccgcccgccccgtgccgtggacatctgggcccactcatcgcccctcaaggcccccggggcccaaccctcaagaagtgccctgtgtaatgccggatgaattaaaaattgcaattccccttactggatgtttattaataaagatctgggccttgtccctgcggtcctgc

SEQ ID NO: 625035 - DNA, 346 bp, Homo sapiens
gggattgctccgcctccgccgggctcggctgccctcggcagcttccccgccgtggctctccctcgaccctcctcccctcccgctcccggttcgcgatggactgggcctccccgcgcggccgagtcgccgtcgcccgcagcaccgcgcgggcctctgagttgcagggcctgaggagccgcgtgctggggactgggacggtccgctggctgctgacggacgcgagaaccgtctcgcttcacctgtcaccgaggtcctcgacggaggaaggggagggacgaggcgcatgttaacctgtgccgactgccggttcgacctgcgcggctgcgggttcttgggaactctagga

SEQ ID NO: 625036 - DNA, 547 bp, Homo sapiens
gcttcaagtcaactcccggatggagccagaatccatagaaatttgtccttataaccctcaccaccgaatcccgctcagcaggttccagtaccacctggcgtcatgcaggaagaagaaccccaagaaagccaaaaagatggccagctgtaaatacaacgcctgccacgtggttcccatcagaaagctggctgaacatgaagctacctgtgtcaacaggagctccgtggaggaagaggacacattaggccctctgcaagtcagcctcccacagccgcagaaccaggacacactacaggttcgttggctttccaaccctgacatttggaatgttgacggcgccaactgtcacccaatgttcgtccttaagagttttgttccccaaaaacttgtttgtgaaagtgacatccaagagtcacggggaggagaccaatgcccagaagatcctcagactaggaccaggaaggcaaacttctagcaggaggaagagggctctcaaatgcgtggatggatcgcgcatctcatctgaataaaaacctgcaaagtgaaa

SEQ ID NO: 625037 - DNA, 1164 bp, Homo sapiens
tctcccgaaacagggtcttgctcgttggcgcccaggctgtggagttacagtgggcatgtgatcttgtggctcactttcagcctttggaattggggcctcaaggttgatccttccttaccgtgagcctttcgtgagttaacgtggaactacgaggttgtgcactccttcgcctgtgggctaactttttaaatttttgtgtacagggcaggactcttgccacctgttgccacaggctgtggctctttgaacttccgtgaggctcatgtgccattcttgcctgtgccttataagtctcccaaaatgtgctgtgggatttacagggagtgtgacgccaccatgtgcccggctgtggacagttgtgcatgtggaagaagaacaccttttttttagtggtctttaccctttttagaaaattttcataattatagtggtgtctcgtggtgtgaaaaattttgtgggttttttgtataaccgtttttattgtgacaacaaacagaaagagttcgaggttttgtgaaacacgaatattcttctccgtggtattcaccgtgtgtgtacacaattgagtgactaatgtgtgtgtccatgtgattgttttacatatagtatttttcatttcagaaaagaaggtttattatttgttaaattaacatttcttagtttaaccatttcatttcttgggtttttgccgtgtggaattgcacttgaagggacagtgtacttgggggtttggaatttgaccacaatctaaaaggtttctgggtaaataaacatttgtgtacttcgtttaaaaaacactctgttgtttgtgtgtgcaagacacaacatgtgcgaagacggtgaacaattcttcttctttggagtggggacaactcctttatccttttgcgcacaggtcgggcaaggtccactgtctaaagaatcatcttgtctttgtcaagaacggagaaatcaccctctgtggggagtatgtggttccaacctgttgtttttgcgacacccacgctatttgtctggtttgtgaacaccaccgttttctggttgtatgaaatcaagccctgggcatttctcctccttcaaatatcgggctgtcgtcaatactgagcacaccgatgtccacttcgccacttgtttgcgcaaaccagttcgagtcgtcggttctca

SEQ ID NO: 625038 - DNA, 468 bp, Homo sapiens
atatgtaaaaaaaaaaaaaaaaaaaaaaaaaaaaaaaaaaaaaaaaaaaaagggggggggggttaaaattttccctggggggggcccaattttgcgtgtccccagtttttttggtaaagggggggccccaatggggggggtttttttagggggggggggggggggttttaaaaagggggagtaagtggggaaaaagtggtgtgagagggggggacatttggtgggaagagggaaccattactgctggggggggggggaaaatataatgtgggaaaacacttatcctatacaggagaatttaaaaggtctcataggggtaattataatacaatttttcacgggtgttattagggtggtggtacaacaaggcgggataataattgagtggctggaaggtaaagagttgtggctcatacgggagtttatttattatataaaaatttttatcacgggggctagatgtaaaaa

SEQ ID NO: 625039 - DNA, 664 bp, Homo sapiens
  misc_feature (111)..(111): n is a, c, g, or t
  misc_feature (126)..(126): n is a, c, g, or t
  misc_feature (138)..(138): n is a, c, g, or t
  misc_feature (140)..(140): n is a, c, g, or t
  misc_feature (190)..(190): n is a, c, g, or t
  misc_feature (199)..(199): n is a, c, g, or t
  misc_feature (342)..(342): n is a, c, g, or t
  misc_feature (426)..(426): n is a, c, g, or t
  misc_feature (468)..(468): n is a, c, g, or t
  misc_feature (521)..(521): n is a, c, g, or t
  misc_feature (537)..(537): n is a, c, g, or t
  misc_feature (539)..(539): n is a, c, g, or t
  misc_feature (564)..(564): n is a, c, g, or t
  misc_feature (578)..(578): n is a, c, g, or t
tcgctattgtgatcgggtattgtaacagcactggacacgagcccacagcatgatggaacccccaacaaattttactgtgtgtagcaagtgtttttcttggaacgctgtgtncttttgccgccatgnataacatccctngntatgaccaaataactcaatcttttcgtcagtccacagcaccttattccanaatgaagcnggcttgtcaactgtgcgtttgattacctcaagcgactctgtttgtggcgtgtgtgcagaaaaggcttcttccgcatcactctcccatccttgtgcaaagtgcgctgaattgttgaacgatgcacagtgacaccatctgcagcnagatgatgttgtaggtctttggaggtggtctgtgggctgtttttcaccgttctcaccatccttcgcctttgcctctccgatatnttacttggcctgccacttctggccttaacaagaactgtgccngtggtcttctacttcctcactatgttcctcacagtggacactgacagcttaantctctgcgatagcttntngtagccttcctcaaaacacaatgtngacaatctttgtancaggtcatttgagagttgttttgaggaccccatgttgccactcttcagaggagagtcagagagaatagcaacttgcaatgggcacc

SEQ ID NO: 625040 - DNA, 1874 bp, Homo sapiens
  misc_feature (613)..(613): n is a, c, g, or t
cccaactctgatcccatgttctgctcgcaccagcgcctaccatggggacagggcctctgcacgtcgtacccatataccgctagagtttaccctgagttcccggagtacgagatcatgtatctacatatccacatcgtagttttcatcgcagcctcatcaatccacatgggacttcgtgacctccaggttcagttgagcagaataatgagcgtcgtctatccttcccatgagagtcccatgccggacccatgtggatgaaccgtcagcgctgggtgtcactagatataccagatgctttagatacggccccatagcgcctcctagatagaccacacaggcttccttcgcttctgcgtagagcccagcttgctagcacataacgaaggccaaggacccgacatcgggttcaccttccatgcggacgtacccctacactccacggcgtatggttacgcggaggacctcgaggggtgttcaaccgcactttatttggcgcgcgagagggaaggactaccatggggtttcgctcaactcctctcacagtgccacccgaggacagagcccttgagggaatcacacactagctagggtctccctctgatacggagagctnatacatttttgccacggcccgtctgtggcgaagtcacatgtcacgcatcaattactttgggaccgaaaatacccctaggaaagggctcccctccattgggctcgcacaagaaaatttcacaaccttttggcacggcagttcgccatgggtctttccccaagaaatactatctcggggggacagaagcttccgcttaacggtgtggggcactccctacctcgttggtgcgggggataagttcggccggtaagatttctgggggtggaagcaaccaaagaaagccttgcccggggaccccccgcgacgttccactaattaggaagcacactttcgctttggccaaagacccctccgtcgccccatttcactgatgctcgttgggaaccgtgaacacaacttgtgtggcaccccccgggagggaattacaagaaacggcgagggcggaagcacttccacacccatgtatcccaggtgaaacccactgttccttatggggggaaaaagccgttacccacttaagagcaacgcgattcccgctaagagcggctcgaaatcccttctctgtgtacgaccaattcgccccggagaacagggcacatcactctgttgggccactgacgtggtggttatcatcacgccaagcaatagagcaaggcttgtaaacgcaacaggaacagtccccatacgaaatcaatactgttatccccggtgctgatcaggagtatacacgattacgcaatgtttgtaaaactcttcaacgcacagtgtattcgccatactagaacaaacgcggaattgcaacattacgcacttactggtggtttcagtaccacccatcagccacaccacagcacaggcaagagggggagaggcgccactcgtgtagtgatttatcacacactccagacatgggcagcccccaagcacattggccacaccacccgacaggcaccctaggtgatacacacgagtggggccccactataacggaagaaccacagagaaacacagcacacaacgccgcctagagagataccaacacccggacacgggcgaacaaccgcagcagaagtggaacccccgcaaagaaccacaacacatctgatgtgctaggccacacactcgtggcaacacacacccgaagacaataacaacgccggcgaaagtaagaaagcacgagcaaaaacagtgaagcacgaaccgctatctagcagcacacaaaggcaaagacagcatctaaaacaacgacgaagccagcaac

SEQ ID NO: 625041 - DNA, 142 bp, Homo sapiens
tatatcattacttaattcccaccttaatttaaaatatcacaaaaaattgtgggtgtcatgaaatttttgtaagagaaattggttgtatagtgacccaaaagtataataaaaaatgtaaataatttgtgtttcacaactaagt

SEQ ID NO: 625042 - DNA, 109 bp, Homo sapiens
catgttaggagacaggccacgccttgcaatgtgcatcagttcactgatttcatcctctagtttccggcacagtggccaccataagtatgtcaacaagcctcgcagaagg

SEQ ID NO: 625043 - DNA, 796 bp, Homo sapiens
cgcagtggctcacgcctataatcccagcaatctgggaggccgaaacaggtggactgcttgagagtccaggagttcaagacgagcctgggaaacatagtgaaaccctgtctctaccaaaaatacaaaaaattagccaggagcggtggtgcatgctaatcacagttacttgggaggctcaggtgggataatcccctgagccctggaggtggaagctgcagtgagctgagattgcatcactacactccagcctggggaaccccagtgagacaccgtctctaaaaaaagaaggaaaagaaaaaaaaaaaatcagccagttgtggtagcatgcacctgtagtcccagctaccaaggaggctgaggtgggaggattgcttgagcccaggaggtggaggatgtggtgagctatgatggcatcactgcactccagcctgggtgacagagtggaaccttgcctcaaactcttatgactcaactacaaaaaagcagcttaggtgggggtctggctcaggatctctgggcaaggttgaaatcataaagaactctttttgggctgggcaacggtagcctcacaccctgtaatcccagcacttggggaggccgaggcaagcagaacacttgaggtccggagttcgagaccagctgaacaaccatgaaacccgctctcttccaaaaattcaaacttaccggtgtggggggggccctgtatccagtactggggaccgaggagagatcgtgaccagggcaattggggccattgccatggtcctggaaaggtccccggacagacggttcaaaa

SEQ ID NO: 625044 - DNA, 482 bp, Homo sapiens
aaatctcttcggcatatgcagatagtatattacatgtagctcaagagtaatcttgtcctttatggattccaattcataaatggtttatattgtaagctaaatattccaggagtgaaaagaaaaagaggaaggaagaaaccccgtctcaggcactcatgtacagccacccgaagacaatgaaatgtaatacattcataagacaagtgagagaagagcatggcagacacacagatgcaactagtgaaagttcctttccttaagaaatgcatggaagccggacttcttaattacttacttgaagaaatattagacagcgttcattcaattccagaagaactcatggatgagactacttcagaatcagactatgaagaaaatcgggagtgcactttttgactgtcgattgttcgaagacaccatttgtacatttgcaagcagcaatagagaacaacaattcatgcatctcaacaaatagtccgcag

SEQ ID NO: 625045 - DNA, 300 bp, Homo sapiens
tacctgcgtcgctactaaaaaattaaaaacaaattaatcgggcatgcttttccatgcctgtagtcccacctacttgggaggctgaggtgggaagactgcttgagccctgaaggtggaggttgcagtaagccatgattgcaccactgcgctccagcctgggagataaagtgagacattgtctcaaaaaaaaaaaaaaaattgcttcccttaattaaaaaaatttttatggctaaaaattgctaacaatcatctgacccttcaaagagtcatatccctttggctggggaaaggtcttgcctg

SEQ ID NO: 625046 - DNA, 1018 bp, Homo sapiens
  misc_feature (1)..(1): n is a, c, g, or t
ngcatcgccataagagctgtatataggggtatttcttattaccacctgcgggcttctattgcgtgccctctacccggtggtccgaatatgactgttcttgccttattgtttgatgtgtgcgctgtaatgttcctctacgttggtgattgtgtgtgccttcgcgtatagttgtgctcttcggtgccccctatcctgggcctatcatttcctatcttctggcctgtcctgtagatttcatagccgcgtactcttaccggtctctatggccacccatccctgtgtctaatggttggcctcaggagcgtgtctttgtaatgggtgtcccgtcattgatggcactctggccgcttgaagtctttaaggtgttaatttgtgactatgtaaaggactcctctatgcagctgtaatgtgctgggtcgcacttgtttgagaccgttgaatttgttgttcttcttcctatcaactacacatagtaggcttgtagaactgacttgtttcatttacgtgggttcttcgtaattctaggcgcccagacatactgtgttgagtagtatacttagagggaggtagtaggttttgtagaggttgatggtggtggggagggaaggcctctgatattgagtttgatgcagagctttttagccatgaagatatctttctagtctatagtactatataattatattttcagtatttaaaaagacaaagtattttgtccatttgagtattctgctactcctatgtataatagttctacttggacgcatggggccaaaagctgttgattttccccagttgacggttgtctatatatcgaactgttcccaagttagtcaagtatgtctcaacactagcatgatataaaagggacactgcaggcctgaatgaaaaaggaatcaaaatccaacttgaaacataagattaagtacatactccctaggaaacgtacaaaccattatgattatagcgaagataaaattgataatgtttaagtcaggctatatcgtacggaaaacta

SEQ ID NO: 625047 - DNA, 519 bp, Homo sapiens
atacacctacgtaatgccaatccaaggttcccaaatcgcccgcacatccaaacgagggatgaatcggaaagcaagtaatacctatttgcccacaccaagctcgccaccaccaccaccacaaagtccagatacaaacacaaacacaaacactcccaacagaccgcaataatactaactgagaatatgtgcatttaagcccggacttggcttttccggtataaggtcctaaaccttcgttaattccagtatcgtgaaggtctgcactgagaaacttcctatataccaaacgctataatttttaaggaggactagccacctaggggagggttgtggggcgtaggggtcactttagaatagccgggatccgagaacccctggctcctcccggactaagtctaaaatatggaggctatagtttcgaggtcgtccggtaacgagccgagaggtaagcgtttcttcggccgtcgatagtttcgtatccccaaaccccgccagcctactttccgactctcttaatgc

SEQ ID NO: 625048 - DNA, 369 bp, Homo sapiens
gtgagctgcagtgcacctcaggaatatctcggacggagagatcggagtgaaacagtaggggcacgcagaactcatgatgacgttccaatcgacgcattagatgaagcgggctgagcgagccagtccagaagggggtccatggtggcgagagtctgcgaggtgaaggccgcatcctcccgcaagagctcgttccacgcatcaccattgggcacgaagtagggcgccccgctgtggggggccagcgcacgaacgatctccgggctgcccaggacaaggcactcgcagcgtcccgtctccaagggaatgtcagtgacaacgatgcgcctgccccgggcatcggggtccacctgcactgcagctaaccggtgc

SEQ ID NO: 625049 - DNA, 503 bp, Homo sapiens
ggtcgacagagtcacagaattaactaaaaggggtgagtagcacccacccggagaagcccgcagcaggatgtttgtttggtactttttcaagaacaatgcccataacagatgatgaactctagtagccgaacttgcacaaccaagttttaaggctcagattgttttagtcatttgcagtaactgtttgagcgtttccctcagcctgagtcgaaatgcttatctcagcacgcattttctccctttcctccttttgtgcctcatttctgtttttttttttttttttttgagacggagtttttgctcttgttgctcaggctggagtgcaatggcgcgatcttggctcaccgcatcctctgcctcccggattcaggcaattctcctgcctcagcctcccgagaagctggggtaaaggcatgcgaccaatgccggctaatttggtattttaatagagacggggtttctcattttgggtaaggctggtctcgaaccccgactcaggtggt

SEQ ID NO: 625050 - DNA, 281 bp, Homo sapiens
  misc_feature (138)..(138): n is a, c, g, or t
  misc_feature (171)..(171): n is a, c, g, or t
  misc_feature (204)..(204): n is a, c, g, or t
ggatcgcgcacagtcagccagcgaatgtcatctcggaatcagcgggagagggctgctgtcatcaccgcgggcgtaaagcggcatcagccgttctgtttcctcagccgccattgggcggagctcaacttcgggcgcggngaacgccaatgtaccttcctgctggatatcgancgccaccaggccgacgccgcattcctgcatcancatcccaggccgtttaggcgtcaaaccggcttccagcagggcgtgggcggtgcccagcgttgggtggccggcgaagg

SEQ ID NO: 625051 - DNA, 896 bp, Homo sapiens
agcggagaagtcctgtagggagatgggcagttaccttctctccgatctctctactcggggactctattagtaggctggtggagctgtctaaaacgaaggagaaccatgagcaatgaatcttgtcataccttattacacagcccacaggtacacttcaatgagtgcgttcacaaacctccatgggggacctgcaacgacaatagtacaaaagaggagagtacaacattagacaagtatgcaccaatgtgtcagaggagataatataatatcagataaaacaacaaggggacagaaggtgcactagatgataacacaaaccatgatcccgaaataggtgacagatgggacaatcgaatctgacaaccagaaacaccatcactcacaccaatgacctgaacgatccatggcttctaggacacaagacaacattaagacacctgatgaacccagcaatgatcacgaaaatgaggaggccaggatataggcacaacaagggaggcagaagggatcgacaaaagagacacacggatgcacaagacacatcgttaaacgacctccacagaagaaactagacaacacccgtaagacacaaaatatcgtgacacagcatacaacccaaggacaggaaaaccactgaagaaccaacaagcaagcatgacgccacttgacaacactcgacgcaacaaggaccagacaaaaagaaacaaatcaacacaaacgaaaagagacaccacagaacatggaacaacaacgggaaaagaaacataaacaaagcaaaaagagaaacaaaaacagaaataaacaaaactaacggcccaccaaggaaaaaagaagaaaacagcaagaaacaaccaaaaaacaagtaatcaggaggaaaacaaccacaacaaagacaa

SEQ ID NO: 625052 - DNA, 149 bp, Homo sapiens
actaaaacaggccactgtctgtagtcttccgttgaactgtctaccctgtatgaggttcaaaatttctaagatatataagcctctactcttcatggatctgtggatgaaagaacactcgctggcagtagaacgttcctctggcatgacat

SEQ ID NO: 625053 - DNA, 111 bp, Homo sapiens
agccccccctggggtgggtttgtgggcccttctgctctgctagggaaaagcctgtgtggggcccccctcttcaagggagcgtggcctttataaataaaccagttctgttta

SEQ ID NO: 625054 - DNA, 654 bp, Homo sapiens
cggctgctgtaggacggttgctccgaggcgtcgagttgcccgacatgtgagtgccattccttgtgggcatttcttgccacgtgcagaccctcagtgcctgcctgccatgttggaagaacgagcttgagcaaatttatttgtgttctggttccagtcaaagcaaaattattcagcaccaagttccatcatgccatgcacctgcttgtcaccgccagggcaattgtcatcgcactttattttctaaaccgggtgctaaccaacggcccatggttttgctcaagacttgggccagacaggatctccaacaaggaaacaccatagagagcccctttgacatggaaccttttttaaccagtggtggcacacacactaattttcggggtggaccatttattccatttccttaaattcccccgtgtgtgggggaagttgtgtcaaccaccatatgtggattgatgtgtttgcagtaaaccagtgaagacaagtgtggatactgggcatgtagtgtacaggttggaaccaaaaagggcgatacagcacgaacaagttttatagtaagcccggtcaagagtggggtttgggaaaaagccgtttgggaggttgtaaaaaccgggattatggggatacgggaacaaaagaggtccgattacaatg

SEQ ID NO: 625055 - DNA, 150 bp, Homo sapiens
atacttccagacaatagtgtgcttcaaaacattaatttgttgaagcatttcaagatgagctattagtaactgaagtatatgatctccccaacgacctaatgatgttcagctcttttagggagcatgtgaaaaattatcttcagtatggga

SEQ ID NO: 625056 - DNA, 425 bp, Homo sapiens
  misc_feature (353)..(353): n is a, c, g, or t
  misc_feature (381)..(381): n is a, c, g, or t
cacgaggggagatctcgccggcgggtgccatggcgagacgggacgagaaggatgccgaggcgctggcgcctccggccacgacgagcgtgcgcgtgccgtaaggcgatgcgaccatgaccgatgtcgactgcgacgactcgttcgtcaccttcgcgatgacgacggccttgccggccacgcaccgcgtcgacgcctcgacgccgatgcccggcgtcaccgtgactgtcgccgtcaccggcatccgcgattcgtcctgcgccaccccgctcacggtgaacgtgccggcgttcgcatagtccgccgggtccacgccctcccaggagacggatgcggtcttgaccgcgccgtcggtngtggtcagctgcgcgttcggcagcaccngtgcggtgcctgctcgcgtcgtcaccgcgatcggttcgacctgt

SEQ ID NO: 625057 - DNA, 279 bp, Homo sapiens
aacccagacattcctttctattggtaataactctcaactaattgccaatcagaacatttttaaatctacctataacccagaagcccccactttgagttgtcctgcctttctggactgaaccaatgtatatcttgaatagatttgattgatgtctcacgaccctctaaaatgcataaaaccaagttgcaccccagccacctcctgaggtctgtgtcatgggcgtggccactctatttggctcagaataaatctcttcaagtattaaaaaaaaaagcccga

SEQ ID NO: 625058 - DNA, 170 bp, Homo sapiens
ttaatatgtgtcgggagtggtactgaatatggggttatagcaacattttggccggggacacttgggaggtgggctggggctttttggtggttggtttttgagacagggtctcactccgtcacccaggcgggagtgcggtggcgtaagcatagctcagcaggcggcaaaca

SEQ ID NO: 625059 - DNA, 565 bp, Homo sapiens
  misc_feature (67)..(67): n is a, c, g, or t
  misc_feature (101)..(101): n is a, c, g, or t
  misc_feature (134)..(134): n is a, c, g, or t
  misc_feature (207)..(207): n is a, c, g, or t
  misc_feature (284)..(284): n is a, c, g, or t
ttctgaaatatgccggagacgccaattgcctgggcagggagtcggtaccggtgagcgttgcactgtnacgtgtacaaaataataaaatacgtgagccaccnccggtcttacaggtagcgaggtcggggcactcnggccatgaacaaatagcttgtgataaaaatatattgtgatgccctcaagtctctgcgcataaatcaaagcatnaatggcttgagtgtagggaaaggaagggttgtttagtaatttttccccctgaaaacaaggaaattacagagaaatanatcaggcgctcggtggctcacccctgtatccagcactttggaggctgaggcgggtagatcatgaggtcaggagatcaagaccatcctggccaacatggtgaaactctctctactaaaaatacaaaaattagctgggcgtggtggcgtgtgcatgtagtcccagctactcaggaaaatgaggcaggagaatcgcttgaaccaggaagttggaggttgcagtgagccgagatcgcaccactgcactccagcctggcaacagagtgagactccgtctcgaaaat

SEQ ID NO: 625060 - DNA, 273 bp, Homo sapiens
agacacttacggaatgggagaaaatttaagtatctacccatccaacaaagattaatatcagaacttacaggaattaaacaattacagaaaaaaaacatccattaagaagtcaggccaggatatgaacagacacttctcaaaagaagacatttatgtggccaagaagatatgaaaaaactcaacatcactgatcatcggagaaatgcaaaccaaaagcacaaagagataccatctcattccagtcagaatggcgattattaaaaagtcaggtcg

SEQ ID NO: 625061 - DNA, 324 bp, Homo sapiens
  misc_feature (313)..(313): n is a, c, g, or t
catgttaccttagggaatcaagccgcaatccttttttagagtccatatccacaaataggggttcagggacttcaatgttggttcaggacttcccaatggtgcagccgcctataaaaggttcgattgttcacagggattaaagtcctaagtgatatgagttctaagtccggagaaatccagggtcgggtttataatatagttcaaaattcctcccctgacgaaaaggacaagagaaattaaggctttatattaaaaaagcgccatccccgttaaaatgataacttgtaaactttagtattttaccctcgcccancccggggttta

SEQ ID NO: 625062 - DNA, 298 bp, Homo sapiens
tggtacgctacacttcgatcgcggagaatgagagcaaagagcgagtcgcttcaacttgatggaaaagatgcttcagccttgtggaccgccagccgacaagcccgaggagaactgagactctgccttaccaccgcagtgcggggcaccatctcaccagcgtttcatccggtttcgccaactccatcttaagtattccgtgtctccacaaggaccggtttctccatgcgctcctcgcgcctcgctgcttctccgcagatcgaagtgggggatacctctagcagtcgcacctgcagcgcat

SEQ ID NO: 625063 - DNA, 184 bp, Homo sapiens
gtggagtcagtctgaggttgtgggggctcgagaacacaggcagattatttgggagatgtttccaaggaactaggatgcttggggagatgggggagcccagtccttgagaaagggggccctcatccccattatctgggatttttcaaaaatctgcttttagacttgcagctttctgtttgccttt

SEQ ID NO: 625064 - DNA, 851 bp, Homo sapiens
ggtcttggtcagtgaagcaccctcggctgggaagtcagcacggtctcgtcctctcctctcttgtgtatgaccatggtgcggagtaaggcagacgagtgtcaccaggcacttacagcaaacaggggtgggatgttcgagccccacagaaaaggtgcttggtatcttgccaagctcgtggccactagattgctgacgactcggtttctcagtcgaggcaaaagctggaagacatcacccatattgcaggagggaaccccggtatggcatgcgccgcaaactccgaagatgggcaccagaggaattggagacatgcttgtaggttgtaccacctaaaagactctgagagagaagagaatccgattcgtgaagaggtgggaaggagatggttaggaaaagtataagagaaaagcatgtccttgagaagctgatgacaaaatgatgatccagaatagaatttctcattcagtcttgtgaataacgtctccttgttaacctggtattctagaatgtaatgtggataaatgtgttgtccaagtaagcttggttgaaccaggtatttaattacagaaattgaggttaaggatagatgtgcacaggtagttgtgaaattgagcactttgtcagataattatggtagcttaggtagtattcaagtactgatggttgggctttgcaactagtggcaagtctgggaaagtagcatggttggtctaataccagtatgttgatttgatgctaatgttgatgtgcaccaatggggtgagccggaaggaaaagtgagcctaagtccaagaaggggttgggtaaagggcaaaattttcgttgaggaaaaatagggggggttaaaaggg

SEQ ID NO: 625065 - DNA, 358 bp, Homo sapiens
ttacaacagttacacaccacaatactatggcttcacacacctccacacctcactcatccaaccccaaggttccacgcgcaccgtcccatgaaacagctccacttctggacacagttccgcccagccccatgcaccatcacagtgacacacaatcaaaagtcaatcatagtcacctatcactgatccagtgccacactgtccaccacacgcgcgcgcgcgcgcgcgcgcacacacacacacacacacacacacacacacactaacaggcagaaagacaaccacatccgcacagcctcttgctcaatcacacctaattctacaaccagtttcactctctgccatgaagacagctacacac

SEQ ID NO: 625066 - DNA, 466 bp, Homo sapiens
  misc_feature (10)..(10): n is a, c, g, or t
  misc_feature (31)..(31): n is a, c, g, or t
  misc_feature (86)..(86): n is a, c, g, or t
  misc_feature (208)..(208): n is a, c, g, or t
cttcccctcntcccattaatttccctagacnaagagtttttaccaaaaggcagaaaaagaaacagcccttgactggaagtatccgnagatccctaagggaaaagaatgccctgctttgaacccctggagataaatagcacccacccccctctttaaaacctaaacattagggaatgtcctcatgcctgtaatcccggcacttaagagnccaaggcgggtgaattgcctgagtgacagagctcgaaaccagactgagcaacatggtgaaacaccgtctccacaaaacaacaacaacaacaaaatacaaaaattagcccggtgtggtgggtgcaagagcctgtagtcctagatactcaggagtctgaggcgggaggattgcttatgcccagaaggttgaggctgcagtgagccaggatggtgccactgtacaaccggtctgggtgacaaagggagatgctgtctttaa

SEQ ID NO: 625067 - DNA, 847 bp, Homo sapiens
cgcttgggaggtcgaggcaggcagatcacctgaggtcaggagtttgaaaccagcctggccaacatggcgaaaccctgtctgtactaaaaatacaaaaattagccagatatgatggcaggcgcctgtaatcccagctacttggaaggctgaggtatgagaatcgcttgaacctgggagatggaggctgcagtaagccaagatgtaccactgcactccagcctgggcaacagagtgagactctgtctcaaaaaaaaaaaaaaaaggagaaaaggaaaataggtggcccctgaaaagggggtgagagtagttcctgaaacctcttgagttacctgtaagtcaaggggggaatttgtcttataggcaagttcagttggctaggggaccatggtggggacaagtaatataccattggggtctggctctaatagcttatggaggcttactggtagtgggtgcacttgggggtcctggtggggcatggtagctcacacctattatcccagcactttggcaggctgaggcaggcggatcacttgaggtcaggcagtttgagaccaacctgggcactgtggtggaaacctgtgcgtgtactaaaaataccaaaaattagacagatctggagggcagggaacctgtaatcccagacactcgatagctggagaggcaggggaaattggctttgacccggggagggcgggagtttgcttgagcttgaatggggccattggcatcccagcgtgggaaaagagcaagaatcacctcaggtttaagataaattaattaaaattatccatacacttggccaccaaaaaaaggcggcggcataaaatacccgagggcgattatg

SEQ ID NO: 625068 - DNA, 274 bp, Homo sapiens
tctactcaggaggcatgggtagcaagaattaaaacgagtgggtttatcacaatgagctgtgtgacctgtcctggccagcatggtgaaaaccctgtttctactaaaaacagccgggcgaggttgcattgggccgagatcgcgccactgcactccagcctggcgacggagcgaggctccatcttaaaaagaaaaaaagttatttttgttttgggggcagtggtggcatgcacttgtggtcccagctactcaggaggctgaggtaggagaatggcat

SEQ ID NO: 625069 - DNA, 867 bp, Homo sapiens
caaaacgtgtaaccgatgccgttgctcctggtccccatttttaatatttgcccacgatcttgggtctcactgtgtgcttttaccgtctccgcactccagtaaggcccattggccctgttggtagaaacgatcgaatggttggccgctcgtgttgtttcttgtttgtcaagagaaccgcacatctctgttcgaaacaccgtctaatgttgccggggcacacacctgtgtgagtaatgtaaaaagaaattatgtgttgtgtggctttctgaccgactttaacgtggtagagatattaccggggttttatgggtggtccccccccaaagaggtattttgcgccaagcatgttgttttgtgaaaataataaattttgggggccccaatataaaacgttaaaatataaataggccctggcccttttccccaaaggagataggtagggtttaccccccatggaaaaagtagtgtggaataatatatctcctggtttagaaaaaattttcgcggtggatcgacaatttatggagcccactgctggtatataatgtgaaacccgtgggatattatcgcgtgggtgccaacactaatagattgtgttgtggcacacatctttttttggggaatgttggtgggtgagagtgttttaccacagaggagtttaaggtagtcctcaactcgttgtgtaacaaagaggtaccaccaaagttaaggggagtttcccctgatgacgtcttcactgtcccaacgggcgctttaccacatattaagaggcccccgcggcttttttacaaactggatccccaaaccccctttttccccttttgggaccccccggaaaaattttaaattccccccccccaaaaaaaa

SEQ ID NO: 625070 - DNA, 161 bp, Homo sapiens
cggccctgggaattggccccctccatgtgcatttcatacactaaaggccatttgtggtggtgtggtgggttttcccaggttttctaaaatccttttcaggtacatttcctgccctgtcccaggcccggctggccagcctcagccatagcacctcaccgccc

SEQ ID NO: 625071 - DNA, 308 bp, Homo sapiens
gtattctgtagataatttacttctgcagactgtaatctgccctatcttttccagcagaatttactcttccattcttaattcttctgtgaaatatggggtataatttaacatgcctttataacttcatataacagtatcactgctgtggtaggagggatattattttctcccaaaagggttccatctttgctatctgttgatcagccttagaaaatctaagtatgatcaataaattttaatggtgggggtcatcctgtgtcagctgtagtagttggttgtgaatattaaaacctagtactattttccct

SEQ ID NO: 625072 - DNA, 481 bp, Homo sapiens
  misc_feature (29)..(29): n is a, c, g, or t
agccataggagagtgaccacgggattccntgagaaacagggccggccccccaacttcagggacccaccgcccattccccgagagctgtcggaaccagatgcaacccggcagcccagagaactctcctgggaggctgtgggtgagccaggccaacattggtgtccctgtccccagagggaggagcaggcaggagagagaggggaagccggtatgcattgcagtccgcaccatcccccctgttcaacctcgggggagttggagtcagggaacgtccccaggaggccaagcatgattgctcagggaaaggagaaaggatggggtgtcatcaggagcacagcattggtttccagtcactgataggtgattcacagggtcagggatgccccgggggggggaggcaaggccctcacctctttttatatgaggtgtcacatgtcagttggtcaggattttccccacccattagtatttcgtccggagc

SEQ ID NO: 625073 - DNA, 324 bp, Homo sapiens
taagacagagattcactcttattgccaaggctagagtgtaatggcatgatctcacctcactgcaacctctgcctcccacgttcaagtgattctcctcaaccttcaaagtagctgggattacaggcatcagccaccacgcccagctgattttggtacttttagtagaggcagggtttcaccatgttggtcagtctggtcttgaactcctgacctcaggtgatccacccgcctcagcctcccaaaatgttgggattacaggcatgagccaccgtgcccggcctacacattcatttcttatgctgcatctttttcctcaaaactatc

SEQ ID NO: 625074 - DNA, 211 bp, Homo sapiens
tgtggattgaccacatttggcttctccattcatagttgatgatggccatatgcattgttaccgcttatgggctattaggaataatgctgcgctgaggctaacatttctgttgggtgaatacctcggactcgaactgccgcgtcaaatagtagctccatgttttgaacgactgtcagatttatccaaatcggctacaccattttacattctc

SEQ ID NO: 625075 - DNA, 129 bp, Homo sapiens
  misc_feature (79)..(79): n is a, c, g, or t
tacctggcctctcaggtgtaatacgatgtacagcaaagcgcacctgggtcatagatcagacggaaattctctcccgtcntgtcaatgctgatgacatccatgaatccagcagggtaggttatatcagtt

SEQ ID NO: 625076 - DNA, 492 bp, Homo sapiens
catatcatattttgagttctaaaagtaaacttcaaagggaggaaaaataatgctccaatatttgagctccagccttaccatgaagatcgtctcacctccagctcatgaacttgactttaagctacaaactgaggaatcctcaataatgttttcctttttgtgtagaaactgggtccaatatattccccaggctgctctcaaacttctgggctcaagcaaacttcccacctcagcctcccaaggagctgggactagatgcatacaccactacacacagctggtttttaacaatttttagtagatgtgaggtctaactatgctgtccaggctgatcttgaaatcctgggctcaagcaagttctcctgcctaggcttgccaaagtgcttggattataggagtaagtcactgcacccagtctgaccttcccttttttgttgatggggctgagcagcttcatcacagcctttttcattttttatttttttgaaatgg

SEQ ID NO: 625077 - DNA, 1085 bp, Homo sapiens
tttttctccttcttttgtcactcccctctttgttgctctaatatatagtccgttctatcctctctctttttattttattctccctttattatttttttttatcttccttttaattttctcttctatctcttttttgtttttcttttactaatatcttgtttttatattaatctgttttttctttctgtctattttttcttttttttttttttttctcctcttgtttgttgggtccccctctttttttgtttctgctgtttgctttcttttgttgtttttcttctctctcctctttctcgttcgttgtcttttgtgttctgtcgctttgttttgttttttttttgtctttctcttttgttttgttctgttttttgttttttttttgtttgtttttttttttcttccctttttttgtttgggtgttttttttcttgtttctttatgtgttgtttgctctctcttttttttttttttttgtattgttttgttttttctcctccttctctttcttttgtgtttctcttttttttttttcttttttctttgtttttttttttcttccgctgtttttgttttttttcttctcttgttgtggttctttctccttcttcttgccgcgcggtgtttttcttctctcgctccgtctttggtgtttttgtgttctttttttttgcctcccccccctcttctgtggttgctgtagttttgttttctcgctcttttcttctttttggtgtcgtctctttcttttttctctcccccctccctcctctcctcgtttcttttctctcctcacgcttatctctctcctttttcctcccggttgccccccccctctcttttttttctcctctctggtggttcctcccctcctcttctcctcccccccccccccgctttgtgttgtgtgtcttggataatatatttttctctcccctcccgcggttagcactctaggtgtttgtgtgtcccccccccccccccccccggcgggtgtgtttcttttctttggtgggggtgtgtgttcttttttcttttttgttttgcatccttctctcgctcgcgcgcgcgcgcgcgcgcgcata

SEQ ID NO: 625078 - DNA, 946 bp, Homo sapiens
ctgcaatgttaaagaatggcgcagatgagccgcaaataggtacgaagcacgcttgcttccggtactgtagcatactctcatgttattcctgtcggcgttgttacagtgtcgctcccttactaggtgtgcccgccttctagcgtctttttgtgtcgcacaactcattgcggttttgaaattttctcagacccctggctatttttttgttgaatccctcaacagttatgtttgaataacggcggctctttagttgttccatcctggcgggagttcttttcatcaccacgacagaaaatgggtctgtttgaaaaggtcttccccaacagtgggttcgccatgggaagctcccccttttttcaggcccaaccccgtggttgtcacatgaattgccgtggcccaaaccagtgaggtgtcctgctgtcccgcgccgttgacagtcaaacgtcaccagcggtttgattatgtcaccccacggtggtgcctggccaagaacaccgaacgattactacgtctgtccagactcaacgacagggtattacctgtcagacaacctgtattatctctggtcccgagacaccgcacacaccgtgtgcctttaagcgtacttgtggagcagacccccactgacgggcgtccttgaactttttatttttgtgcgcgcccttctctccccaaagatgcatgttaaattccggaacagagtggatctctggtatgactgtataattgctgcgagccctcttcttaccgaggaacttctaatacgaggattgtcaaagaacagctgtgctacacaaagagaaggcggcaacaaaactaccaccgggtgtctttacttagtgaaatcataatcgaagtcgccactctactattaatacagaggcttactcttgtgcaccaccaaaagggacaacttcaaaaaccgttctcccccgccaaaaaagac

SEQ ID NO: 625079 - DNA, 137 bp, Homo sapiens
cagcgaccaggattataattctccacggaaggtgcacttggtaacaaatagcaccttggggtccatgtggatggcttcatcgtctaatgtagctacacacttatatgtaggtatgatagtaagctcaggagacccaa

SEQ ID NO: 625080 - DNA, 89 bp, Homo sapiens
  misc_feature (39)..(39): n is a, c, g, or t
agaatccccacccctgctgccgccactggcttgtgcctnccccgccacctgtgtgttcttttgtttcatttatcttctgtttttctcaa

SEQ ID NO: 625081 - DNA, 309 bp, Homo sapiens
ccgttacaattatgcttggggatcttggtcatgcaatcttctaccgttcctatgtccagaagggtatagcctaggttatcttccagagttcacatagttgggggtttcacattgaagtctttaatccatctggagctgatctccgcatatggtgtaaggaagtggttcagttccactcctctgcatatggctagctagttctcccagtaccacttcactgcacatggggaattctttccccatggcgtatttcggtcaacttggtcaaagattcagatggtggtaggtgtgtagctgggttggctgggc

SEQ ID NO: 625082 - DNA, 161 bp, Homo sapiens
caagtagctgatatgggaaagaaggtgtataatgctgtggtgctaacaatttcagggccattagtatcagcggtatcagctgcagaaactgtagagacactagtcgcagctttctgtggttgtaacagcatcagctgagttgccttggataggtgactgtg

SEQ ID NO: 625083 - DNA, 821 bp, Homo sapiens
gcaaatacaatggagtaacatcacttggaccagactgggcttgataacgcatgatgtgctgtgaacttaacagatggggatgtgactgtataactaatgatggggccaccatcttaaccatgatggatgttgatcatcagattgccaagctgatggtggacaactgtccaacgtctcacgatgatgaaattgcgtagcatggatacgcacgagcgagtggtattgtccgtgggccatggttgccattgttcagcaagaagcggcaagcaaatgtgctagacacgaggccattcacccaatcaaaaatagccgatggccttatgacgctacgggttgctcgcgctggtctcattgtaaacacctgcgtacgaagatcagccgatagtggtccttgttgacataagaggacaccgtatacccctgaattcacgaacatgcaagaaaccacgctgtggctccaaagtggtcaacagtggtcaccgacagatgggtgagattgctgtgaatgccgtttctcactgtagcagatatggagctggagagacgttgattttgagccttgtcatggtagaaggcaaagtgggcggtaggctggaggacactatggtgatgtaagggcgtgatcgtggacaaggatgtcagtcatccgcagatgccaaaagaaagtggatgatgccgaagtattgcaagttctcacatgtccattagtaggcatgccaacaaaaaacaaagcataagctggtgtgacctctgtcgaaattataaaggccctcgaagatacgcacaggccgaatttgcacgagatgattccccatttcggg

SEQ ID NO: 625084 - DNA, 1088 bp, Homo sapiens
cagtcaaaggaagtcatggtggggtccatatacggactaccgtacgagccatgggcaaaggaactagacgcacaattcgttacgcaaggtaaccaccatggcgatacgatcatcaaggcgacttcaagacttgaggcaactcgcatcggagttcattgttgagatcactagaacacaaatcgttccagacgacgcttctgagacgtcacgtagtaccatcgtttccatcgatcgagactatgtccacatatcgatctgctgtggaatgagtggtgacacagaccatctggtgcactcattacatccgaatatatatgcatggacatgagatgattatggctcagaggcatcatggaatctcatgtcatggtggacaatgatatcctcatggactgcgtggggtggcgcagtggggatgtagtggtcgcctgtacgcatggctatagaccacccgtgcacagcttgaagaacgttgtgtatctccaaaacaacttagggaaatgtgcgttcacttgggtagttgtgagataccgaggggagaaaccttggttagtaagcaaaggtagagttctcttcgtgcctttagaggagatagcgaacaaaaacacttgcaatcaaagaagtacaaaccccgtcgccaatgagcgagtctatgtgaacctgaatttcatcgcaaagagttagagtaaccccttggccggggagttaccccttatttcggcgaggggtacggcattcgaagacactttgtaaggtctggattctttaggtcgaagcaattaggattcttccaagccaggattggtgtgtgccatgttaatagcgcctaagagaatcggtgcgtcacttttactctaccaggtcctttggtaacgtggcttgaggaacgtgcgtgcttcaacaatgtaagggagtcaaattgaaagcccaagggctgggaaaccgttcaccatttgtggagcccattagcacacaacaaaaattggggacccaagaaaattacacctttttctgccccagcgcgttttttgggaacgagcatgtgcgacccaaccagcacaaattttccatagtgggccaagatccac

SEQ ID NO: 625085 - DNA, 254 bp, Homo sapiens
caaaggggtggaaaacaatttttggttttatttttgtttttaaaagggggcctggacccccagcccccaaggggcctttcctggcccaaattttttgccccccccagggattgccattccagcacttttttccattttccccgtaaaaagcccctttctgaaaggacccgagggtttgtatttaaaaagcctcccctgggcctcaaaaaatttttggctttgtttcccataaaaaaaatggttgaactggtcca

SEQ ID NO: 625086 - DNA, 242 bp, Homo sapiens
gctatgacatgcagaggcagcgtaaaacatacagcactacagtcctgtgcccgccgtagagatcattgtgctcagagcattgcgaccgacagactgtctgggggtaaccaagaccctctcaggtagcccagtgagtgtcaaaatatcctaataatactaagatgttagtatttgtaaggaaatatttacttggtaataatactaatataaaagatgtttgcgtttttcatctctacagaaca

SEQ ID NO: 625087 - DNA, 200 bp, Homo sapiens
tatactatactacaaagcacacagtcatcaaaactgctggtactggcacaaagacagacatatatgactccgtggaccagtgagagaaagcccagaattcaacccacgcactacagcaacactcatctacgacaaaggagacacagactatacaatggagcaaggacagcttgttcaatcagtggtgctggggaaaccgt

SEQ ID NO: 625088 - DNA, 271 bp, Homo sapiens
agaaaagaccaccaccttgaacaattcttcctgagaaataatatgaggaaaaattgggttgttaggggggggccaaataatacagggcctgcacaggaacgcagaggaatttggattttacgtgggagtcaatgaagctttataaaatattgtatcttggatgaacaggtttccctgctgctggatacaagacaagtgagacaatctcatatcaccctacacttcacacggttacagtgttacagggaggatgcaccacgagtcacatgcc

SEQ ID NO: 625089 - DNA, 122 bp, Homo sapiens
  misc_feature (20)..(20): n is a, c, g, or t
  misc_feature (65)..(65): n is a, c, g, or t
  misc_feature (76)..(76): n is a, c, g, or t
  misc_feature (120)..(122): n is a, c, g, or t
gatcatgaccggaacatggnctgggtttccacccagctccaggccacatgcaatgtccacaagtntgccttcaatnactggttcagtggacacctcaacttccagattgagcaccatctnnn

SEQ ID NO: 625090 - DNA, 152 bp, Homo sapiens
tagtatctgcattcatgtgggagtgctgatgtcaccatgggggctttctgtttgagtgtcaatgtgctcgggatgtgtgtctctgtcagaaggtcagtgcctgtttgtatctccgtccctccctgtgctgtccagctgtccacctcctctgt

SEQ ID NO: 625091 - DNA, 336 bp, Homo sapiens
caggaaggcggtggcaatccatccaggccgaggacgagagcgccaagctgtgcaagcgccggatcgagcacctcaaagagcatagcagcgaccagcccgcggcggccagccgctgtggaagcaggcaagcgcactggatcgcattgcactgcgctggagcacctgctgccgttgcggccttactaccaaccaccggcctcctcccagcctggccgcgcctgcagccgcccattcgagcgaccttacctgacattatcggaccactgtcccccagcaccgggcccaaacacgcaggctgcgcaccgccgctcccctgcgcccaacccccctgcacca

SEQ ID NO: 625092 - DNA, 443 bp, Homo sapiens
  misc_feature (1)..(1): n is a, c, g, or t
  misc_feature (92)..(92): n is a, c, g, or t
  misc_feature (114)..(114): n is a, c, g, or t
  misc_feature (125)..(125): n is a, c, g, or t
  misc_feature (133)..(134): n is a, c, g, or t
  misc_feature (137)..(137): n is a, c, g, or t
  misc_feature (159)..(160): n is a, c, g, or t
  misc_feature (242)..(242): n is a, c, g, or t
  misc_feature (247)..(247): n is a, c, g, or t
  misc_feature (267)..(267): n is a, c, g, or t
  misc_feature (278)..(278): n is a, c, g, or t
  misc_feature (281)..(281): n is a, c, g, or t
  misc_feature (284)..(284): n is a, c, g, or t
  misc_feature (288)..(289): n is a, c, g, or t
  misc_feature (319)..(320): n is a, c, g, or t
  misc_feature (324)..(324): n is a, c, g, or t
  misc_feature (340)..(341): n is a, c, g, or t
  misc_feature (348)..(348): n is a, c, g, or t
  misc_feature (350)..(350): n is a, c, g, or t
  misc_feature (352)..(352): n is a, c, g, or t
  misc_feature (364)..(364): n is a, c, g, or t
  misc_feature (366)..(366): n is a, c, g, or t
  misc_feature (374)..(374): n is a, c, g, or t
  misc_feature (407)..(407): n is a, c, g, or t
  misc_feature (433)..(433): n is a, c, g, or t
ngttacaaattttgttctcttcagtttttcattaagtaaattctaatagatgatatacatattactgcagataaaaccatcatcagaaattnttaaattaattgcatattttgngctactctttntgggaagnngtnaaatatttaatacttgtaaggnngcggggagttggtttagaaactctcagctatttctataaaaatagaatggttagtaaaaatagctttcggtgttttttcctnaaggnggctatttttattgaaatcngtgactcagcngcngcnggcnntgaagtcccttcaagaacttagtacttccnnttcnattgtaaaaaaaaagnngttttanananctcgtgtttganangccgcccnccctggctgccctgggctccttcatttgtcgcntggcatgccgcccgccgccggtcccncggctgtccc

SEQ ID NO: 625093 - DNA, 235 bp, Homo sapiens
caccacggtgtgatccatattgagctcagctgggaacagactgaagtgaggtaagtgccgcccacagggcatgatgcctgaagccagtgccaagtgcctttagtttcttgagtggctctgtatcaggtcatcttgactgacatcctgggcgaacttgccccttcccttcgagcgacctggtggatgttgttcctccaatatgttcagtcgaggacctccattccgatgcttcagg

SEQ ID NO: 625094 - DNA, 256 bp, Homo sapiens
ttccctggtcatcgtcatcgctctttgccgagtgtgatgccctggccggcctcccgctcgtagctcttctccaggtacgagctgtaatcagctgtggccatctcttgctcgaagtccaaggatgatgtaacacagtaactccttactgtcacgcacggatttcccgatcgagaccgtgatgatgaagctatagaccgagctcggtgaagatctatcatgaggtagtcagtcaggtcccggacagccaggtcccaga

SEQ ID NO: 625095 - DNA, 1917 bp, Homo sapiens
ggggggaaaaaatgttgttgaattattcctctcaaatttaggcttgtgttacatgcacaaaaatccttgttctgttttcacttaaaaaaactaaatatgtataactttgtgtatacacacacacacatctatatatataattattagcactagagggatatagtccagttatgtagtatttaaatctccagtttcaaattataattcacctccaaaagaatagttttttaatcacacacataagaaattttatcacaatatttaaaactaatatttcattatctaatgctaataaattattgtggtactgccagtattaaatatatggcagatggtattaactactgatcaatagtaagcatacagaactggggattatggattttataaactatgagacagtcaccccagtttggactgggactaatccccagtactgatttgtcatccactgagtagactttatgaatattttgggtaatttgaaatgatctcattattgaaagatgatttcatatgtagagaagataatatttctttcttgaaaaacaagtcaggcttaccatgatgtgtgcaaccaatgtaggatctttggcttgtcaaatcagattctccattgctatagtgtacagtgcacacagctcatattgcttccttcctgggtgctgataaaaataagagcatggaaattggtttcttgaatataagctttaatttttaaggcttaaaagtattcatagaggtagactgtatgataaataaaaacaaatttaattcacaaagttatctgtacactgcagttttaaaatataccaactaaattatgggtttctggaagtgaatggagaaaacagcaagggaagaaatcgtttttaagataagtaaataattcccatggattgataaatattttccttttaaaatgttatggactgatattttttattcacctttaaatttcttatcaagaagtttatctttgtttttcagatttaaaaatgaaatacaggtattcgtcactttcctgaaaccatgctaaccaaaatcagtagccaaaccaattcagatagatgtgtctcatctaattaaacccattggtttttatgggagggctgcattaagagcacccaaccaccacatgtaagttgataattaccagcatggcaggtgattttatctgctgaccaagcgcatagttttgttttgttttcagaatgttctagggaacatttgagattttatgtgaaataaaattttaagtgccaaagccaaaaaaatacttaactcttttcaaaggccctctttcatccttgccttcgtcaactttcctttgcacacaggaagcaaaatctacttcaagacatttattttagaggaatccattaagaaaggattgttttacttaaatgaaatgctgtcttatttttgctgtgtcttttgacacctcttagctttaacattcttcttttaaccaagccattatgcaaagttatcaaagaagaggagaaggaaaggaggacagatgaaagtgacgggaaatgagaaagaagaggagtgaggaaacagttatttccttatgaatcctgtgtgtttctttggaagaaagagctgttccgaggaagtttggtccagctgtggttgataagaggtatatctcttaaaaaagacacctaatgaaagtgagagaaaagctaaagaaaatttcaatgtgaccactattatgtgtcaaaataaaacttagattccagtggttggcgggggggcgagacggtggcccgcgtgacccgtgaaggggcaatctgcccacctccagggacctgggagaaaaccccaatcttatggaagggtgccacacgtggagcaaccggcagcggggccacagcacggaaaggcccaacgccgtgataccccgcggga

SEQ ID NO: 625096 - DNA, 394 bp, Homo sapiens
cgtcgacgaagccgtacttcaaccactcctacactgctgagtgttcaaactgttttcaaataaggcaaacaccttatttgcctgtaaccaattcagttgtaatcaattcagttgtttctgcacctcacttctgatttctgtatgtcatttacatttttttgtccataaatgtgttctgaccacgaggcatccctggagtctctctgaatctgctgtgattctgggggctgccagatgagtgaatcgttcattgctcaattaaactcctttaaatttaattcagctgaagtttttcttttaacagtatcttcaaattcttagtgttctttcttcatgagatgaagcttaatttgttgtcgacgcggccgcgaatttagtagtagtaggcggccgc

SEQ ID NO: 625097 - DNA, 253 bp, Homo sapiens
  misc_feature (136)..(137): n is a, c, g, or t
cccccaggccccaaaaataaatgggtccctgttgataattaaaagaaaagaaaaaaagatattatttttgttaggccaaacccttgtaggattttaacaatggggatttgtgtgtcccccaccccctttcccattnnacctttttttcccttttttaaaaaaattatgggctaaatttttagtttccaaccccccaaatattaaaaaaatttaatttttttaaaaaaataaaaataaatgtttttaaaagtta

SEQ ID NO: 625098 - DNA, 573 bp, Homo sapiens
  misc_feature (527)..(527): n is a, c, g, or t
taggttttatcgtatatcatatccatcataagatcagctgttttcatcttgccataggtatcattttcggtaaacatttctttaatgtgcaggtgtgtcgtagcaatagaccttgttaacagtgtatgtgctcaaggaattttcagtgcagattctgtgagttcgaattcctgtacgtaatggtcattattccctcttgtctacctcagccccactgtccagtagaaaaatgatccagatttagtcttcaatatgtaatctatcttcttcttggatgtgcagaagggtttgtattatattgtatttaaggcttaacatctcatgccaagtaattttttcttctgaatcacagtaaaactgtgtggaaatcagttcaagaaaaatttgcttggtggtagtgcatgatggtaagtggggcattgggagttcatcctgagtaaaggaagagagcctgtttctcaagcagagtccattctgctagtgaattgcccacttctccaaatgaacataatgcagttaggtcaggnagaatgacacaggaggctcagcatcatttctgtctcctcacttttc

SEQ ID NO: 625099 - DNA, 431 bp, Homo sapiens
  misc_feature (128)..(128): n is a, c, g, or t
  misc_feature (132)..(132): n is a, c, g, or t
  misc_feature (135)..(135): n is a, c, g, or t
  misc_feature (166)..(166): n is a, c, g, or t
  misc_feature (182)..(183): n is a, c, g, or t
  misc_feature (204)..(205): n is a, c, g, or t
  misc_feature (343)..(343): n is a, c, g, or t
  misc_feature (373)..(373): n is a, c, g, or t
  misc_feature (391)..(391): n is a, c, g, or t
  misc_feature (402)..(402): n is a, c, g, or t
ctttgcaggacggccctacggggcttacaggaccttttgtgtgcctggtaccaactatttctgttccagccacattgccatcactcttccactgcctgccaccgcggaccgaggctggtgacaggccncagnagntggaagaaacaccctttcatctcagagtccnctgtggcactggccanncctccccagtacaggggtgcnncaggtggcagagtgaatgtcccccatcatgtggcccaactctcctggcctggccatctccctccccagaaacagtgtgcatgggttattttggagtgtaggtgacttgtttactcattgaagcagattttctgcttcnctttttatttttataggaattagaggaagnaaggtcagatggcgtggnccaggtttttnaacccccaatcttttggtgggggaagggt

SEQ ID NO: 625100 - DNA, 171 bp, Homo sapiens
ttgttagggtaggataatccaggcgcctgtactacccatgatggaagccaaagacgtaccctgtagccgcctacccgatgcaccctataacctgcactgtccacatggacacaactacagccgatatagacttcctactacagaactatagtctatgagcaaagggattaa

SEQ ID NO: 625101 - DNA, 450 bp, Homo sapiens
  misc_feature (404)..(404): n is a, c, g, or t
  misc_feature (411)..(411): n is a, c, g, or t
  misc_feature (442)..(442): n is a, c, g, or t
gaaactgcgcggcccctctcaccagtcaaccccaaactggaaaagtctgatcagagctccacagaagattcaggcaagcccacaggaggtaattctggcaagcccacaggaggtgattctggcaagcccacagaagctggttcgaataaggccacagaagatgattctggcaagtccacgaaagttgatttggacaagcccacctccaaaatctccccagataccggagactttcgaagacttgacaaagtccagccaacttgaaaaaggacaaaaacccaacactttactttccaaaacttgaatcttgggggaaacacttgggcagggggactctgacttctcttttaaagccagagaaaaggagattaagtctttcagagcctacttgaagacgtggaaanccaaggngattgaagaggggtgacacagaagccggaangaaaggct

SEQ ID NO: 625102 - DNA, 399 bp, Homo sapiens
acggttatgatgcaccggactctttcaaggcaggtctggtggtaacgaatccttcgctttgcttctctgaaaaggatataatttattcttgcttagttggctgaatatgaaattcttggttgaaatttttcttctttaagaatgctgaatatatgaccccaatattttctggctcatagggtctctgctgaaagatccactgttagcctaatggagttccctttgtaggtgacctggcccttttatctagttgcctttagcattttttctttcatttcgaccttggagactctgatgactatgtgtcttggagacagtcatcttgtgtagtacctctcaggggttctctgcatttcccgaatttaaatgttaaccctactattgtggcatcgataaaca

SEQ ID NO: 625103 - DNA, 1217 bp, Homo sapiens
tgagctgtgggacgtgtgctaccgtggaccgaacactgccactgctgtgatgtgtgtgctgatgctgtcatgtgggactgcctgtgatgtggtcctgctgtgcaccggatggtcactcctgtgggtgcctctgctgtgtgcatgtgtgcctactgcttggacgtgatgcctgaccttttgacctgtgtgtcactgatacttgctctgtgactcaatatgtaccaacctgtgtgtccctgtgtgactggatgtgtgactctgtctcttgccagtcttacactggcatgttacctggatgtgctacattacactgaaacatgaagctgttgccgagctcgagaacgagcgcgtatacagtataccttgcgcgctgcaaggcccagcgagcaagcgcgtttaacaggcgcctgggtgaccagtcctatacgaaatacgcgtacgagcccgttggctcagctgacgtattggttggcgcttcaatttgcattagagaacagggccgttagacccctctgctgcccaggcgcgcatacgatcgaacgccagttacaaatgatgcgcaccagacgtggtggccgcagttataacgcatcactgaacgtccgagaaatgcacagcgacagatgggctacagttcttcgccttcggcgtggtcgcccccgaacgtgggctatcaactttcgtcgtatcgtctgtgcgggacgtccatgcttattcccgcgttaatttcaagcttttggcttttcgttcgtcaccttggggtgaggaaatagagatattagccgacgaacgcgagggtcgaacgcaaagggatgcccgctttgaactctagcacgtcggtcaaagccgtgtatgtatcgtaccatcggcaaacgcattcgatcgtacatcaccccaaacggtgcaaagccagccggtattacgaaaacggttactccacccgaaagatcggacgaggctttcataaaacgcacctatttgtggatggacaactcaggcgggcgttatacgagtactgactggggtcgagcagttttcccatgttattggcgcagtgtgcattatcgagaacactgcagtattttgagcattatggctgggctatccgagtgttaacactctcaggtcaaaaaaggtgagccccgtatttgggctgtcacatctacatcaccccgttcaccgactagatttacacgatatgacgtatgacttcaagg

SEQ ID NO: 625104 - DNA, 475 bp, Homo sapiens
  misc_feature (464)..(464): n is a, c, g, or t
acataccaagagattgatatcttaaaaaaaaaatgagctcggtggcttacctgtataatcccagcactttgggaggctgaagcaggaggatcacttgagcataggagttcaagaccagcttgggcaacatggcaagaccctgtctttacaaaaaaattcaaaaactagctgggcatggtggtacacacctgtagtcccagctattcaagaggccaaggtgggaggatcacttgagaccagaaaattgaggttgcagtgagctgtgtttgcaccactgtgttccagcctgagtgacagagagagatcctgtatcaaaaacaaaaaacaaagcagaaattttggaattaaaaaaatgcactgaagcaaatacagaatacatttgaaagctccaataatagacttgaccaagtaggagaaagaatctcagaacttgaagacaggtctattgaaatcatccagtcagncaaaaagaaaa

SEQ ID NO: 625105 - DNA, 1250 bp, Homo sapiens
ttgctgtgggctcgggttcttggggcgtgttctgctggctgagtgttatggacctcactgctgtacatgactggtttatgtagtgtgtgtgtgcctatcccaacatccccctctcttctcccttacctgtgatgtacccaatgcctgttttttgctacatgtttgatgtgacatgtgcaaactgttttgaacagccggaaagtcaacccaccatttggcatcaattggtgcttctgctgcttggcccatcttccacgcacatacatgttttgtgcaccatgctttttgtcaccatgtcagtggcaatttcttcatccacattccatgtgcatcggcagcatcattgcacatgctgacaatcacccttcagcttgtgcacatttgcgtccacgttttttgtgcacacacacatttgtgccattcttccgtcttcacttgcctccgcattctttgacgagcgcacaagcattgcaacaattccttgcgttcaccatgtcatgggccaacacatgcccacttggccgaggagtcatccttgttgcaccttggcccaagcacacattcccaaatgcaggcacaccccaccccctagctcatttgctttgttgtccttggcttgaatcaagcaaaacaggtgcctcttgtgcaccccacttctggtttgcggattttggccccttctcaacctatgggcctcggccattaggttgtggtttctgggcgaggccaacccctgtgggcgtcacaaccagcattgcaacagcaccaggtctgaacgcaattgcacctgcctagtgcaatttggcggccggtcgtccgccagaggattacttgagactgccattttgtgcacgcggcaaccctttggcacagccctccttggctctgccgagcccttggagactctccaaagcaaagtccacacgttttcattcccacctcttgaacggcatttggcagtttcccacttctgagcactcgcccgggggccttactaacccattggagggcagaggaccaccccaactcagtgacttcttggtccgcccccatcccacaaccccccgagctcaatcccttctgaccccacccaaatccaatcggacagccagcaaagctgagttacatggacacagcaacagcaatttcccaacccccctggagctaaagtgggtatgccatatggcgcatttcccaataactccctttggcgctatggaacaactaaccttcatagcagcgtatccgcc

SEQ ID NO: 625106 - DNA, 302 bp, Homo sapiens
gaggagatacagaagtgttaagagtatttgaacagagccaggtgcaggggctcatgcctgtaatcgcagaactatgggaggcaggggggtggatcacctgaggtggggagttcgagaccagcctgacgcaacgtggagaaaccctggtctctacttaaaatataaaattggcagggcatggtggcacacgcctgtaatccctgctacttgggaggctgaggcaggagaatcacttgaacccaggaggcagaggttgtggtgagctgagatcgcaccattgcactccagcctgggcaacgaga

SEQ ID NO: 625107 - DNA, 120 bp, Homo sapiens
ccccgggctgcaggaattcggcacgagattgttgtttgtgtcctgttcaaaaatttcgaagttgtatccattctatatgcgagcagttctataatctgcgttaactcatcaagtatatcg

SEQ ID NO: 625108 - DNA, 962 bp, Homo sapiens
gacttcgtgtcgctggcactgcgggaccgccgcctggagttccgctacgaccatgggcaaggtgggcagctggtcatcagtgagcatgggagccagtcacacctggtgagccatggaccaggtgtctcactgcgagctgaaactggccgcacaggtgtgccctgacgatgtggtgctgactgtgtcacacccgtgctgttgcggtggacgtcccactggtctccgcaaaaaccagatcctcaaacccgtgacacgtgagccagcatctaccagtacgaggcgtgcagctccacgaccttcacgcaaagcttggccctgtgctgcatgccgatgtccatctgtcgcttcgactgtgtcgccatcgcacgcttgtgtctctcctctgcgagtgccctgcagcttgcttgacccctgagagcactgtagctgccggccacgtgtggcctgtcactgtccttctgcagtgtcaaccaccatgtaacctctgggcgcctcagggccacccgccttgccctcacatgcgcgtgcctccttggcggtcccagatggcgatggctttgcctactgtcgtcgccctgtgtcacccgtgtgcggactttcctccaacggcacctgcatcctgacgaacgcacacggggggcctggcctggaccgcaacgtccagcccgagcggcgcaccgtgggactcaccataatgcgccccattatggacctgcgagctggccccacttttacgtccgacgatcaccctccatcacggccttgctgaaccctgcatcgacaccggaagaaccgcgccacttgggctagacgccacaaccaccatatcagaaacttgatgtcccttgcgccccacttggacgcgccccccagcaaccggggaccttggtttcgctccttgcgcagttgccaacacggcctcacagagataaggacaaactcactaattctgcgaccatgga

SEQ ID NO: 625109 - DNA, 475 bp, Homo sapiens
  misc_feature (1)..(2): n is a, c, g, or t
  misc_feature (182)..(182): n is a, c, g, or t
  misc_feature (186)..(186): n is a, c, g, or t
  misc_feature (214)..(214): n is a, c, g, or t
  misc_feature (219)..(219): n is a, c, g, or t
  misc_feature (224)..(224): n is a, c, g, or t
  misc_feature (275)..(275): n is a, c, g, or t
  misc_feature (278)..(278): n is a, c, g, or t
  misc_feature (465)..(465): n is a, c, g, or t
nngcaacctctgcctacccaattcaagtgatttttgtgccttagcctcccaagtagctgggaccacaggcacgtgccaccacacctaatttttgtatttttagtaaaggcagggttttgccatgttgcccaggctggtcttgaactcctggcctcatgcagtccaccggcctcatcctccgnaaangtaggatagcaggcatgagccattgtgnctgtnacttngataacttgattaaagtgatgttctgcactgtaaagtgactgttgttctgnttnttaattttacttgatagaacctagaaatgagtcaccaagtcatatccatattctgggggaagggaattaagctccaacccctgaggggaggagtatcaaagaatttgtgggcatgtcaaaattcctaaagtaattagttaatattttgggggaagataactctgaggttatacagaatctgatttcnccttaaaaag

SEQ ID NO: 625110 - DNA, 258 bp, Homo sapiens
ggattcactggcatcctaaaagtgctagaagcagactgtgatccaccatgcccagcctccattctttgttctaaactttttcctgaagggcctggaggaagtcacacccacaggccagaccccacattcttttctgctgaacccaagtcttttgacaaagcttcccttctttaaccaattgcaaatcaaaaaatctttgaatctacctatgactttgtaagccccccacttcaagctatctcacctttttaggccaaa

SEQ ID NO: 625111 - DNA, 100 bp, Homo sapiens
cactgtattccttaggtctgcttcaggtttgttcaagtcatatatgcgtaacagtttatcctgtcccccggttacaaataattactatcctgcgtgaaat

SEQ ID NO: 625112 - DNA, 383 bp, Homo sapiens
  misc_feature (28)..(28): n is a, c, g, or t
  misc_feature (80)..(80): n is a, c, g, or t
  misc_feature (142)..(142): n is a, c, g, or t
  misc_feature (144)..(144): n is a, c, g, or t
  misc_feature (174)..(174): n is a, c, g, or t
  misc_feature (181)..(181): n is a, c, g, or t
  misc_feature (193)..(193): n is a, c, g, or t
  misc_feature (200)..(200): n is a, c, g, or t
  misc_feature (204)..(204): n is a, c, g, or t
  misc_feature (217)..(217): n is a, c, g, or t
  misc_feature (247)..(247): n is a, c, g, or t
ttttccagctttgcaatttggagttganttttgaaaccgatgaaccagttacaattacttctgatccgataacttttttnttggcaaagcatggtcctgttaattcctttcttggcacctaggatcattgtttcaacatctntncttttagaaaacaagtttaaacagcccctngtttttntaatcttccttntattttntttnttcatgttctttntctgttaggttgggttgctgctggctttcnggtccgccgctttgggctttattaggctttctgaggtgcttcccaaccccagctctgtggtcaaggaactgttaagagtccttcttttctcttttccttctcctacttttatttcagtttgttgaattcctcccat

SEQ ID NO: 625113 - DNA, 878 bp, Homo sapiens
atgaccccaatacgcaaaattaaccccctaataaaattaagttgaaccgacatcacgtcatcgagctccccagcactcaatcgcaacatctccggcatgatgaaacttcggctcactccttggtcgcctgccggatcctccaatatcacctacatggactattgctagaccatgcactactctaccgagacgccgtacgaaccgcgcttttcatcaatcgcccacgatcacgtcgagacagtaaatgatggctgaatcatccggtaccttcacgccaatggtgcctcaatatttcttgatctgcctcttcctacacagtcgggcgagggcctatagttacgggatcatattctactactcagaaacctgaaacatcggcattatcctcctgttagcaactatgagcaacagccttgataggctatgtcctcccgtgaggccgaaatatcatgtctgaggggccgacagatgaagttgacaaaacttactaatccgccatcccatacattgggacagacctagttcagtgagtctgaggaggctactcagatagacagtcccatcctcaaacgattcttgacctttcacttcatcttggccttcattatttgcagccctagcagaactaccagctcctatacttggcacggaaacgggatcaaatcaagcctcctaggaatcacgtcccaattccgataaatcaccttcacaacgcttactacataatcaaagacgccctcgtgttacttctcttactgtctctccttaatgagatttaccactattgtcagcagaactcctaggagaagcagacgattattacctaggcgaacccttaaagaaccgttcaccagatgaagccgagtgatatagccatg

SEQ ID NO: 625114 - DNA, 196 bp, Homo sapiens
acgtcttagatctgcatatcgagggtcctgtggttctgatgaggggagatcatcctgcattgtggagggtccccgaggttctgatgagtgggagaccactccatatggtggagggtctctgcagttctgataaagggagatcatcctcgcatggctagaaaggtccagagtatgcctggggattcctctagacgtc

SEQ ID NO: 625115 - DNA, 190 bp, Homo sapiens
gccggcatagcccttgtgacaccgggttgtggaatgacgcccaggtggcagcgtggcgcacatcactgacgctgtcacgagcttggcggcacgattgctgtccagttggtgccacgccggcgggaaagcctccacagagaaatggtggccgggtttccatggcggggtgattcctcccgaaaagggcggg

SEQ ID NO: 625116 - DNA, 580 bp, Homo sapiens
tagtctgaggatcccgtatttgacgcgtctcttctgtgcaggtttcgtggcggtctgtgcttgaggactgctgttcttcgctgatttcttggcctatagcagtcaggaagggcgcgcaggagcagtgggaagaggggattacccagcaccctagcccatcccactaacaggagatgcagctcgatcctttctgccgccctccacaatgtttgaaggtgctggggcaggatgggagaggagggaggacccagtgtccggtcctgagtggatcgtggggttcttggagcccaggccccattcagtggaggaacagcccccttcactcctcctgcccagcagtcctgggctgtggcttgaacactgcctcctgcaccaggagtacggtgcccttacttgtgatgaagggcgtgacagagagaagaacacggcgctgttcgtactttcccctaagaaggcaggcctgggtgaggggcaccagcacgtgggccccaggcactcagtctaggtgagactctggattcaggccacattgcctgaatctccagaagggtagagggggtacagggcccgcagcaccaca

SEQ ID NO: 625117 - DNA, 475 bp, Homo sapiens
ccgcagatttgcagcgaatctgatggctcccaggctcgctgccacgtggttggtgctgacgtgcggcgcaatgcggtggcggctgcagtcacagctggaaccagcgtgactttccctgggagcccagcaggtgcctcgcgtcgctggcaggtggtagggtgcccttgaagggggctggtcgtgaggaacgaaggaaaacccgggccagggcttccaaggacagcggccctggagggggccggagccgtcaggttactctgagcaccggagaaaaagccgcttcagcagaggtgtaaacgcatttaatctcccaacaggacatatacagagcggagggctttggcattcagatatattgaccgggcaagatggtaatccaagtttcctccccttcaaggtctcctgctgtatttgcctgggctctgatctgtcgtcaccgcttgggccaataaatcttgataccagcctccagaaa

SEQ ID NO: 625118 - DNA, 821 bp, Homo sapiens
ggagaagagtgtctggaatgcttgggagacattttaagcaggacaaatccagccttaggctagactgcacctgtccacagcccagcccaggcccatggaaaagaatagtaaaaccttgtctttaagcacatagaatatgtgtgaaacccagaaggctagaaaagaaagggaagtggaggagaaaaggcactgggactccagctgggagtatgaagactacgggagtgtacggaaaaggaaccttacagtgctggatggactctacagagaaaatgacctggatcccaggtactgggccaagggacagcatcagccctacagaaaaagggattgtggatactgggattttgaacagagtgaaccaagctatatggactgtggggaagcacatgaaagtggaaagggctgtgtgtaccacggaggtcatgatggttataggagtccagaaaatgtagattatgagagtctcagccctgggacgaaggataattcacctacgagaagcccagatgtgacctcgaaagctggtggatacggggaggcaaatggctactcagactgtaagaatctgaattataatcctgaggactctaaaaaagctgaacaattgactgactgtaggggtatggatgattcttcagcgaatttaggtcaacctcagttgtggtatatagaacatgagaatgttaaccataaatcttgagggatggtggggcaactaaatttttaattgtaagaggaacacaggcaatttatatcaatggttcctggggaaggttatctggatggctcaaggctgtgagcttttcagaattcgaatg

SEQ ID NO: 625119 - DNA, 161 bp, Homo sapiens
taggtgcattcattagcactttctattatattttactttttccattttgtaacttcatgtcaaaatgagccacaatagaatagtcatttctagtcaatattgctaatcattgtcatgttacactttcctgtctccccttatgatgcatttatgagtggtta

SEQ ID NO: 625120 - DNA, 394 bp, Homo sapiens
tctcttagacaatttgttcctgtgttgccaccatcagatctatgagataccagtgcgctcttgcgtagtacgtctttcaacgcacttaagaacttgcactttatgtttatcatcgcgtcatgatgtctctcctgtctccatagcctctccgagtgagcagcagcacattacaagtatggtgtgacatcactcatccatttaactgtgatcagaccataatgtttagttaataagtttcagggccaaccatgagacctttcatcagtgtatctgagcttgcaccttagacttttagtaagtgacgtgttgaattcctagttggagttaaaacgtctgttcaatttaccatattcgtgctgtctcaggcaaaaagaatctctggctgctctcaaag

SEQ ID NO: 625121 - DNA, 203 bp, Homo sapiens
cgttagtagtacttttgttctttctttttttctgttgccttcctttgtgatttgatcactttggaaatgatatacttggattcctttctcttaatcttatctactacaggtttctacttagtggttactatgaggcttacataaaatattttatagctataccatcctattttaagccaacaacttcaaacacatacaaaact

SEQ ID NO: 625122 - DNA, 107 bp, Homo sapiens
  misc_feature (35)..(35): n is a, c, g, or t
  misc_feature (95)..(95): n is a, c, g, or t
  misc_feature (104)..(104): n is a, c, g, or t
gaggaaagtttgttgaaaagcaaaatgtttttctntcctgcccgccccccccgttggttgttggtggtcagaattattgtgtaataaataatagncattttttntta

SEQ ID NO: 625123 - DNA, 244 bp, Homo sapiens
  misc_feature (1)..(1): n is a, c, g, or t
nccggccatgttgatcagcgcatggcgcacatgggcactcgaccaggccctgctcatccacgagggattgccgccctggtctcgtcatgccagaagccccaggtccgcgccagttccacggaaaccttgcgcacttcggccaccttggccagcgtgtcggcgatctgctgggcattgttcacgtcgagcggcagttgcagccaggcctcgggacgggcgcgccactggcccaggctttccagcg

SEQ ID NO: 625124 - DNA, 196 bp, Homo sapiens
aaaggggaacccaaagcccctttgttttctgccccccggggtttttccccgcccagccggggggggcccaggggggggtccccccccccgccttggggggcaaatggggggttttttatgggggcctggccccccaattttggccctcccggtggttttggtacaaggccctgttttggttatggcctgcctttta

SEQ ID NO: 625125 - DNA, 264 bp, Homo sapiens
  misc_feature (54)..(54): n is a, c, g, or t
  misc_feature (80)..(80): n is a, c, g, or t
  misc_feature (83)..(83): n is a, c, g, or t
  misc_feature (107)..(107): n is a, c, g, or t
  misc_feature (112)..(112): n is a, c, g, or t
  misc_feature (117)..(117): n is a, c, g, or t
gcaccatgcgcgcagagcccatctccactccaaagttagacaaaatgccaggantgttcttctctgctaacccaaagganttnaaaggaaccactcattcacttctngacgncaaantgcaaaaaaggaggccaaagactttttgggattggatattaaagcataccttagatctatgatcccacaacttggatcttggaattaaatcttcccaagtcccaaggatgtacttcttcttctgaaggaatcaatgtcttaaccttt

SEQ ID NO: 625126 - DNA, 849 bp, Homo sapiens
ctcagaaacaaaaaacaaaaaaaaaaaaaaagagagaagaaggataattaccaggggctgggaagggtagtgggggacagagggaagtagggatggctaaggggtataaaaaaaaaaaaaaaaaataaaaggaggcaggccaggggggcccaggccggtaaccctagaaactcggggaggccaaaggggggggatttgtttggagaatcaggagtcctagggccaagcctggggcaaactatgggtgaaaccctggtctctagtattattacaaaaaattaagctaaggtgtgggtgggtgtgtcgcctgtagtcccagctcactggggaaggatggggcaggaaaattagcttgacaccccgggaggtgggaattcgcagtgagctgagatttaataccaggtgcatctccacccggggtgtgacagaagctataaacttcattcttaaaaaaatatattattatgtattatttttaaggaaaagaagtgaatataaagacctgggtatttggcgatatgccaaaacaagggggtgacttggtaattcaaaaaatttaattataaggttgtgtaccactgttttttataaattaaccataaaaagaaggtggtgagtgtgggattgtgttgtgtggtaaacacacaaaggggatataaaatgtggtttggagggggaattatacaccaagaatatagtggattacattaacatttatttggtaattgtccttgaaattacaaaatattttttcggtgttaaccccaatttaaatatttttatacggttttttattgtttttacccccacaatgatgttataaacaggtttgaaataataataattttg

SEQ ID NO: 625127 - DNA, 771 bp, Homo sapiens
ccctctctcctctttgttttttttacgataccacacgggcggtgtttttttctgtgttttgttttcgcccccttctctgttgtctgtttctccctgctgttctcctcgattttttttctcttcccctcggtgtttttttttgccccctcctctctgtttttggccacgcctcactcctctcttcctcccttttttttctccccttctgtgtcgtcctcaactttctcctgggtttttgttgagaggagcgccaccgcctcttggcgctcccgcttaatctctcgcgctctcctccccacagaacacccctcccccctcctccccctcctcctctcccgcgctcttatatatataggagggttattttatattttattttttgttgttttcccgtggggtgttcccctcctcctcttttcctccccgcggcccacacgaggggcgcccctctctccccccctccccccccccccctcgtgtccctccgcgggtggccccgccggggtgtttctctcccacaaacacctccccgcgtgctttagagagagttgtttttctttatttcctccctctctcaccaccctctctcaaccctccttggagaggggcggctcctcctcctcgccggccccccactaccccccccacttctcccctttgctgccccccccccccgccccgcgcgcgggctcccccccccccccccccccccctgttgtttttgttggcccccccccccggccccccctaatcatttttttttttttttta

SEQ ID NO: 625128 - DNA, 1322 bp, Homo sapiens
catgcttgcccgtagtaagttaactcttgattccttatagttcgtgtgacattttcgttaaagggtttagtgttctttcatttttgttttcactttttttatttattttagggcttggtttggatgtaattagggtaatgggcagcaataaaaacatatggcacagcattatgttgataaagagggttcttggaaattaaaaagtctatctagttgaagaacccgtggaacatcataggggatggagggagacaattaattgtaaaactcgagtgagtcgttacatctcaggatctcatttctcaagaaggcacttggtgtgttccacgtggacgttttataaagtgaatcggccagtcttctaaccgtggtgtggtgagagtggcgtattctacatttgggggggtattgggactgtgtgggatctttactgcgtgaagtgggccagatgtatatgtattgtaggacattatcttttcccagtgggtgttctactatggggtgtggcatatagaagtggtttcctctactatgtgtggagaaaaaggtgtttcgtggtcatcaaatatatctctgtgtcaaacacacaacatttttttgggaagtgcgagagatactgagattagagcggtatttatatcgcattgtgtactaaaaaatttggggtatgcgggaagattctccacgtgtgcgtaagaaaatatcggtggggactaattattaaggcgcccattttgtggggtcgaagaagttgaacgactaagaggtgtgtgtggcacaaaaaagttgtgttgttctattccagcagcgttgtatgccgttgagtaagagggttggtgtaccccgttgtgttacaagcatccagtgtaagttggaccaaggtatatcactcccttatttgcggggcattgggttgaccaagaaaaaacaggcctgtggggtgatatagagggtagtagaaacaatcataagagaaattcccccccaagtattggggttcaccaaagcatatttattggcgggacaacttcaagtgggtgtctggacccacacagtgggctcgataatagggagcaggaggatcaacatgaaaggacaacaccacatgtgcccagtgtcaccccgtttggacagcccccaaatggcgcactaatatgttgccaccgtgcacacaactgggaggtactagtggcaccccatacaaggagtgtgagcccatctcaccaaagggggggagtaatgacacactgcacgatgcatacgagcgagcgccatacaaaaccagacaggactcaaccgccccgtaaacaacgacaacccat

SEQ ID NO: 625129 - DNA, 152 bp, Homo sapiens
cttaattaagagccagtaaaacctcagatgcttgatgaggtagcttcaactgttgtcacgaatgtggctcctttttgcttgtgcctgcttttggtgaaagtttctggtgtttagaatgccaaaggatagaaatatgcacgcagaaagataga

SEQ ID NO: 625130 - DNA, 1049 bp, Homo sapiens
gcaaaacaccaaatggcggatgacgccggtgcaagcgggggggccctggtgggtccctggtggcccatgggatggggaaccgcggtggcttccgcggaggtttcgcgtcagtaggcatccgggtgccgagggtcagcagtgccagtggacggggaccagggtgcacgaggcctgcggagctcggcggaggcaatgggccgagtgataaggagtggatgcccagttcacctaatattgggcctgcattggttcacatggcacatgataggatcaaagttccactgcgaaggcagatctatcgtcttctccgctgaccttaattaaggcgaagtcacgacgactccaatctgaagttatcctatacccttgtgaggagccgtcgtcctcgcaaggagcagtgagggctatattatgcaaaggcagttagtccgcgagactcgccagagacaagacaggaatccctgtgtgacctgggccgaggcaggcttccgacgggtttccaaggagccgacttactcgtgatggcctacttccggagggcgaagccgtaagcgaaaatgcgacccagcgggtccggatcccttgtggcattggttctagaggattggcgtcccaaaggtgtacagcgctgttggccaaacccctgtactaatgtcccagctgggaacgacccgagtcaaattcccatgtggagcacaaaaggtgcgtcattgcccacaatacggattcagcccccgtcgatgccgggccaagtaagtaggcgataacccttagggtgggctgaaagactcagacacgaattccgcgtggcaaaaagttagactccaatcagactttgtatcaccacgtaatgccaagaacgtggttggaaagcaacggtggctaccgcgtctattgaccgaggccgtaccattgaatccgccccttaggcgagtcaaacacgccccacgtacagagtccgcccatttgtaccgaaccccacagaggtggggaagaaccaacttataggggagcaagttaccggtaacccttccagcagcaaaatcact

SEQ ID NO: 625131 - DNA, 199 bp, Homo sapiens
gtacgcagcgcgacttggtagtcgcccttagtgtcttgctggatataatagtacagggacttgctgtacttactcttgacttcagacctaattttcaacatgtccacttcactgcggaagaccatgattctgatcaggaacttatctcgacggtccccttgcctatcatgaggtcataccagccgcatccagcaaaata

SEQ ID NO: 625132 - DNA, 305 bp, Homo sapiens
  misc_feature (32)..(32): n is a, c, g, or t
  misc_feature (57)..(57): n is a, c, g, or t
tttatggaaacaggtgtcaagagcccacttcnttttatagggccaaaaggaagcgcnaggatgacgagggcctttgtttagccgatagatgcccatccaggagcatgccatcacgcctggctaatttttgggatttataggagagacaaggttacatcatgttgaccaggctggtctaaaactttggacctggagtgatccatccatctcagcctcccaaagtgtagggataacaggggagagccaccgtgcccggccttccctgtcattttcaagcaatcctaaaactcccctcgagccgaaat

SEQ ID NO: 625133 - DNA, 1076 bp, Homo sapiens
gcccttgctccccctccgcaaatgtcccctccccggagcggagctgcaccatagggtccctcttcctgtccctcccagtccatgtacccgttcagaccatcagcctacgagggggcagcccccctgccaggctgtctccctcccgctcagccctgccaggcttccccaagccgatgaatctcgttccgattcctgtgtgagacctctccacacctccgtcgcacactcatcttgactactgctcacaatctggaagtcccgttcgatgcgccggaatgttcagaggaagagccaggtcctgtattgctgtggtgtccactgcccgatatctggaccctcttcaccaaatacatctcaggtctacaacacgtgtaaagaaggtggtctacatagcctgctccgttcaccacgtgtctggttgatttactacgccaactacaacagctacttacgatgggaaccagtgacacgttcagagtgcagttcctggtcgtacccacatgccattctggcgatccatgggtcaagtcatgacgtacagtccctcatggagatcctcttggaaacttctcacactcatacctggaagacaatgctggcccactactaggactgcaatgcatgattcacatggcctgcactgcaagaaaccggcacggaggttcggaaagaaccaatccacccaagaccacgtaacctctgatctcgcagatctaaccgcgattaaacccctgggactgcctcctaacttctcgtttcaaaacatgggcaatcctgggcgcgtcaccaactactacagaggagaggattccgattccgagaagccagtcacatcacgccccaatacgtctgcgcgcacggccatggggttcccatgaacgacgtagtcctaccatacaactggagaagatagagtgtcgtaacccaccgaaattctatccacgacgagggttcgatacaacggcgtcgaaagcacacctctgagtcgttttgacggtctatataagcccccagagttcgcgcgctaaaatatcttctagacatatgtgctccgatatgcctaagcgcatacgcga

SEQ ID NO: 625134 - DNA, 315 bp, Homo sapiens
tgtgacacggtcgctgcagagacacagtcaatcacatccttgctagtttcaaacactaccaggttcttcattggtgaagacatgaatccggatggcatggttgctctattggactaccgtgaggatggtgtgtaccccatatattattttcttgtcaggatggtttacaaatggaacaatgtttacacctgtggcgtttatttcggatctatcacctgtcatcctgaccgcgttactgctctgtcatccacaaccagaccaggtcttctgacgtctggcgagtgatgtcgtcttgaggttcatcatatgtcactg

SEQ ID NO: 625135 - DNA, 352 bp, Homo sapiens
tcaggactgatacttatctatctatgaataaatgtacattatctttcttcaacatagcagcaatcataagatccatgatattcatcacacatgacaacaaaaggatcatagaaatctactagctcagagggcactcatttgtcaattgaaagcaagtaatgcctctattagagcattataaggaaatctcgtcggtttcgacatcggccacaacaaacttaaacctctttttctctttaagtccaggacaagtaagacccatttggttcatggcccacaataacagtatgccatgtcacgtcaccatctgtcatcattcaaatataccaaactacacacatagagcattaac

SEQ ID NO: 625136 - DNA, 510 bp, Homo sapiens
  misc_feature (56)..(56): n is a, c, g, or t
  misc_feature (64)..(64): n is a, c, g, or t
gtgggggagtctgccccctcccaggtgggcctaagcaggaagggggtggggggggnagccggcngttgaccgtgagaccacgctgcgtctgacccctgggcccccacggccatggatgccccacgggcctactgctagctgcgtgctctccagtccccgggccgaggctccagcgttgcgcagaagcgtggggtgagctgacccagaatccctgccctgctctccccagcgctaggagaccaggccagcccaggaaccagggaggtgacctgctctctggcctcctggctgatgtcacagcactgagctcagcccaggccttcgtccactcatgtccaagaggcggggcatccccacccagccagagccctgacatgggctgactcgctgaggccagcagcctgcggagaggagcgcagagtgggtgtctgcggacgcgcgaggcaagtgtgtcggggctggggtgtgaatccagcttgtgagtcccggactatgtgggtaccctaccct

SEQ ID NO: 625137 - DNA, 351 bp, Homo sapiens
  misc_feature (295)..(295): n is a, c, g, or t
  misc_feature (311)..(311): n is a, c, g, or t
  misc_feature (336)..(336): n is a, c, g, or t
  misc_feature (348)..(348): n is a, c, g, or t
atcactgccaatagatatagttcttcagacacttctggcctttgcagttacctgttatggtatagttcatattgcaggggagtttaaagacatggatgccacttcagaactaaaaaataagacatttgacacattaaggaatcacccatcattttatgtatttaatcatcgtggtcgagtgctgttccggccttcggatacaacaaactcttcaaatcaagatgcattgtcctctaatacatcattgaagttacgaaaacttgaatcactgcgtcgttaagatttttacagattntaataacagggcaggncacagagctggaatattagagtttnggggtataaaanact

SEQ ID NO: 625138 - DNA, 398 bp, Homo sapiens
  misc_feature (15)..(15): n is a, c, g, or t
  misc_feature (122)..(122): n is a, c, g, or t
  misc_feature (135)..(135): n is a, c, g, or t
  misc_feature (145)..(145): n is a, c, g, or t
  misc_feature (329)..(329): n is a, c, g, or t
  misc_feature (366)..(366): n is a, c, g, or t
  misc_feature (383)..(383): n is a, c, g, or t
cggcgcacccgcgantttactcaaaacactgggatttttgctgaacaatttacgcgccattgatgcccaactggcaacaattgaatcagaacaggcccaggcactaccccataataatgacnaaaatgagcctcnctgatgacancccgcacggttgagtgatatctggctgcgtcttagccgtcacttcacgccggaatccgccctcttccgtcatgcggtaagaatgtcgctgttgttgtgcttcggctacgcaatcattcagataacccggaatgcatcaccgggtattggatcttgcttgacaagtttgtttgtctgccagccanaactatcacgccacggcgcaaccgcctggaagttaangaattaattggtacgcnggtaggtatcgccaa

SEQ ID NO: 625139 - DNA, 1436 bp, Homo sapiens
  misc_feature (67)..(67): n is a, c, g, or t
ttgcgtcctctgcgctccgttgttgttcgttcgttgactctttcttgtgtgggtcgagcgatcaatncgttctgtggatggtgactcatgctcttggatgtgttgtttgggtgtgtttgttgtggagcgtcgactgcgttgtggcgtggtctcgggacatgtatgtgtggttgttctcgctcgcatcgatgtcttgtgtttgtgggagtgagtgttcgctcgccgttgctccgggttcggattaatagagacagtgctgtggtgtgtgtggtttgtggctgtgcgctgcggtcctcacccccttcgtcttttgttcgtggatgtgtgtgtaggtgttcttctctccccggctgtggttgttgtttgtcgtgggtgtgtgccccgtcaactcctgtgtggtgtgggtgttcccttgatggtgtcgactgcgcggcgccgtctctgtctttgtgtttttgatctgcccctggaggtggtgcgctgcttggcggcgctccgatgggtttaatctcgtcggcccgcgcggtggctttgtggtgtggcgacacacgcggctcgtgtgtgctgtagtggtcttcgtttcatctcttctgctgtgcgcagcggcgcgctgcttctggttatagatcaggtggtccgtcggtcgagtagtgaggtagggttgtcatttcgtcactgctggggtggtgatgtttgtctcgtgtggccgtgggttctattctatttgtggtggcgtgctctctgcgggtgagtgggagggatagtgttcattgatgtctcgcgataaagtgagctgtctggggggatgacacaccctctcatacaaggtgctggttggcttatggggcaagcacaagaaattgctgtgggggcccccaccggacaggttggtgtctcttcctgctagatagtcgtctcttgggtgtgtctatctttcattataagcccctctctcttttttaacccgctaggtatttcttcgatatttttctctcactagagtgattctcccatactcactgtctataccctcttgagagtcttgctcgttatatagaagagcgctccctctcttatccacaagtagtgactcactcacacaagattagctcgcgttagagtttatctctctcggaccgcccggttgtctgtctatacaagccgcgtgtgtagaatggtgtatctctctgtcgccacatatgttcgcccctctaacgtctggtgagaacacgcagtcaaaatgtgtgttagataatatctcactaaaacaatggccccaccagttttttagaaggcgccaccctccacacatgggatcttatcgaccttcggtgctaacttcttctctcccctgatggacagaaaattttttttcccccccccatttttgaaaaagggagttttttaaaaaaaaaaaatatattttttcccccaca

SEQ ID NO: 625140 - DNA, 259 bp, Homo sapiens
  misc_feature (205)..(205): n is a, c, g, or t
cttgatctcctgtgcttaaacaatcctcccgcctcataggtgtgagccaccatgcctggctaatttttgttttttaaatgtttttgtagagatggggtctcattatgttgttctggctggtctcatcctgggctcaagtgatctttctgctttggctgtccaaagtggtagggtcacaggcatgagccactgtgcctggcctganaattttttttctccttgaaaatttggatcatcctattagtaatattttttcaag

SEQ ID NO: 625141 - DNA, 1500 bp, Homo sapiens
  misc_feature (914)..(914): n is a, c, g, or t
cttccgttcttgtttctcatactgggtggtgtgtctgtgtgtgttacaacatgctcttggtaccgttggtgtgctccgctactatgtatacgctttttacagggggctttttgtttacttttttatggcccccccgccgcttgggttttctgtgtcggcacactatctgaaggctctcgccccatggcggtcttccccactgttggtgttactccgttttttctctgcttctctcaagcctcccctcgggcgtacacccccgttggtggtgtgtagcccgcagccacgtcgtgtgggaagctgttgtttttttgtataagaggcccccccccacgacggtgtgtatgcgtccctttctacgactcttggatgtttggggagttggtggtggcctccccccctccccccgtttgtgccccgggcggagaatgatctgtcgttgttcgtccgacaccgggagagttgtgtttcgcccccgaaagagtgtgacccaattgcgcccaaagtgctgttcccccctgttgggggagaaacagaccacccgctgcctgccgcagagagcacaacctcaccccccctccggggtaaattatttatatagaccgcgttgttgtattcctcaaaccctggttaatcttttagttaagtgacccctcagcatattgcctcctgttggaaacaccccaatatcgttcaccgcagaggaaatattgtagatgttcttctggcgcgagagagccctcttataggggttgtgagaaaatggtttaatagttcgcagcccccgcgtcgtgatgtggatatatcccccactctccccatcgggtatatacccccacaggtatgtcccccgcgacggaaccactattcttgtccaccccgcagtgtcgctccgcgcacgcgcacacatgggncgacagaaacgcgctttcttcttatccctcgtatatttatatcttttatattgtcactcttgtgggtttttagcgcgcacaatatatagggcctctcccctctctaacaccctcgttagagagtgttatatattttgtatattctcttgggaaatatattttttacactgttataaatatttggatatagagtcacacagcagtttttctcttgtgtatacactcaaagagatatgtgtaaatgtcccgcgatagaaattgtttttttttatgggtctctccagtgcaccaagggagaagtataagtgaacacaaggtgtgacacctgaggcgtaagtattgcgctgtgtgatcttacactcttataaatgaggagtgagtctctatttttttgcgtagcccatctctcccagctctgccagtgtttccaccgtattccaggaagccataaagtagtatgaaaggtttgaagaatttttttttaccagactagttccttaaattaaccagccttattaaaaatttgtcttaaatttaataattagtataaggatatgacctaataaatgtttccttacccttaaga

SEQ ID NO: 625142 - DNA, 760 bp, Homo sapiens
  misc_feature (335)..(335): n is a, c, g, or t
gcaggtgtcgtgaaaactagccctaatagccaaagatgggaaaggaacaagactcatatcaacattgtcgtctattggacacgtagtattcgggcaagtccaccactacgtggccatctgatctataaatcgcggtggctatcgacaaaagaaccattgaaacaattagagaaggaggctgctgagatgggaagacgggcgtccttcaagtatgcctgggtctaggataaactgaaagctgagcgtgaacgtggatatcaccgattgatatctccatgttggaaatgtgagaccagcaagtactgatggtgactatcagttggatgccccaaggnacacgagaggacgtgttatcgaaacaacagtgattacaggggacatctcaggctgactgtcgctgtcctgataggtctgctgctgggtgttcggtgaatttgaagctggtatctgcaagaatgtggcagacccgagagacatagcccttctggcttacacactgggtgtgaaacagctaattgtcggtgttaacaaaatggattccactgagccaccctacaggcacggaagagatatgaggaaatggtaaaggacagtcaggacattacagttaagaaaacttggctacaagcccgacacagtagcagtatgtggccaatgttctggttggaatggtgacaactatgctggagccaaagtgctaacatgccttgattcaggggatggaaagatcaccgtaaggatggcaatgccagtggaacca

SEQ ID NO: 625143 - DNA, 208 bp, Homo sapiens
ggtcgacatagaggaaaacgtgctgacctaagtaactttagaaatgagtgggccaggcgtggtggctcatgcctttaatcccaggactttgggaggctgaggcgggaggatcactggagcccaggagttggagacaagcctaggcaacatagtgagatcccatctctacagaaattttaaaaaattagatgggtgtagtggcgcatgc

SEQ ID NO: 625144 - DNA, 649 bp, Homo sapiens
  misc_feature (1)..(1): n is a, c, g, or t
  misc_feature (30)..(30): n is a, c, g, or t
  misc_feature (178)..(178): n is a, c, g, or t
  misc_feature (394)..(394): n is a, c, g, or t
  misc_feature (420)..(420): n is a, c, g, or t
  misc_feature (437)..(437): n is a, c, g, or t
  misc_feature (488)..(488): n is a, c, g, or t
  misc_feature (501)..(501): n is a, c, g, or t
  misc_feature (512)..(512): n is a, c, g, or t
  misc_feature (555)..(555): n is a, c, g, or t
  misc_feature (576)..(576): n is a, c, g, or t
  misc_feature (578)..(578): n is a, c, g, or t
  misc_feature (630)..(630): n is a, c, g, or t
  misc_feature (649)..(649): n is a, c, g, or t
naggatcggacgagggaaggtgagcagggnctttgtttaatgtgctagtggctcatcatcaccagtgacctggttgggcctactctccttccagaacctgcattgcttcccagacctccccactgagatgcctctaagagccaaaggagtcaacacttgagcctagggtgggctacancaaaagattctaatttaccttgcttcatctaggtccaggccccaagtagcttgctgaaggaacttaaaaagtagctgttatttattgtattatataagctaaaaacatttatttttgttgaatcgaaacaattccatgtagcaatcttttttctgttcacggtgtttgtgataggaccttaaattccgcaagcatcagttttttgaaaaaatgggnattgaccggatagttacaaggaaagnttataaatagggtccancatcatttaacttttgtaaacatgccttctctcctatttgaaggcatctgntatttttcctggnaagttgggccntcctgaagaactctgccatggattcctggttcctgggtccagnaaaaggaaggtttcaattctngncataaaggatgctttcagattgggaattttcaaaataaggggggattatttnttgtggatgggaacttttn

SEQ ID NO: 625145 - DNA, 682 bp, Homo sapiens
  misc_feature (10)..(10): n is a, c, g, or t
  misc_feature (72)..(72): n is a, c, g, or t
  misc_feature (112)..(112): n is a, c, g, or t
  misc_feature (165)..(165): n is a, c, g, or t
  misc_feature (181)..(181): n is a, c, g, or t
  misc_feature (184)..(184): n is a, c, g, or t
  misc_feature (187)..(187): n is a, c, g, or t
  misc_feature (210)..(210): n is a, c, g, or t
  misc_feature (229)..(229): n is a, c, g, or t
  misc_feature (261)..(261): n is a, c, g, or t
  misc_feature (264)..(264): n is a, c, g, or t
  misc_feature (270)..(270): n is a, c, g, or t
  misc_feature (278)..(278): n is a, c, g, or t
  misc_feature (281)..(281): n is a, c, g, or t
  misc_feature (283)..(283): n is a, c, g, or t
  misc_feature (288)..(288): n is a, c, g, or t
  misc_feature (361)..(361): n is a, c, g, or t
  misc_feature (383)..(383): n is a, c, g, or t
  misc_feature (389)..(389): n is a, c, g, or t
  misc_feature (416)..(416): n is a, c, g, or t
  misc_feature (439)..(439): n is a, c, g, or t
  misc_feature (441)..(441): n is a, c, g, or t
  misc_feature (457)..(457): n is a, c, g, or t
  misc_feature (472)..(472): n is a, c, g, or t
  misc_feature (482)..(482): n is a, c, g, or t
  misc_feature (488)..(488): n is a, c, g, or t
  misc_feature (497)..(497): n is a, c, g, or t
  misc_feature (499)..(499): n is a, c, g, or t
  misc_feature (509)..(510): n is a, c, g, or t
  misc_feature (529)..(529): n is a, c, g, or t
  misc_feature (531)..(531): n is a, c, g, or t
  misc_feature (533)..(533): n is a, c, g, or t
  misc_feature (542)..(543): n is a, c, g, or t
  misc_feature (550)..(550): n is a, c, g, or t
  misc_feature (553)..(554): n is a, c, g, or t
  misc_feature (563)..(563): n is a, c, g, or t
  misc_feature (568)..(568): n is a, c, g, or t
  misc_feature (579)..(579): n is a, c, g, or t
  misc_feature (589)..(589): n is a, c, g, or t
  misc_feature (617)..(618): n is a, c, g, or t
  misc_feature (630)..(630): n is a, c, g, or t
gttcattaanaacataaaaagacacttgaaactgtataaccaactagattccttaataattaatcactaganaaagacccaaagacaaatattgggcaggaaatcaattctnactgagcccggtttccatgtaaaatctcatgttatggtgggcataggtggaancatctaaagaaaagangtnttnttttttgtttaaaaaagtttgtngggaggaaagacatctgtntatcacttcaaaatattgatttactgataaanatnaatctnaatttatnatntngatantaacttcataaatttatcggcattgtccaaaatattttattctttaatggaaaaagccattaatattcaaatnaagggatcacattaaaaaaaanccatanataagaaacagcactaaaagaacatanaagcagcagtaaaagaaaaaaanantaagaaaaacaagttntattaaaaatattangtaaaagaanaaaaancaattcaangnctacaacaannaataaaattatatacaaantnancttgaaatnnaaaaatncanngttgcagtnttttnaaatgaccaancaagtactanttcttggttaaaaggccactggtagaannatctgagtgtanagaatgtcccttcactgctggaaaaatccactggctcccaagaaaagaaaat

SEQ ID NO: 625146 - DNA, 109 bp, Homo sapiens
gtgagagagtatctggccttacatagaagaagaacatccatagaatttctctttcaaagaataagtgtacaattatctttcttgaacgaaaaggaaaaaaattagtatc

SEQ ID NO: 625147 - DNA, 822 bp, Homo sapiens
  misc_feature (24)..(24): n is a, c, g, or t
  misc_feature (113)..(113): n is a, c, g, or t
  misc_feature (219)..(219): n is a, c, g, or t
  misc_feature (229)..(229): n is a, c, g, or t
  misc_feature (235)..(235): n is a, c, g, or t
  misc_feature (262)..(262): n is a, c, g, or t
  misc_feature (274)..(274): n is a, c, g, or t
  misc_feature (306)..(306): n is a, c, g, or t
  misc_feature (328)..(328): n is a, c, g, or t
  misc_feature (334)..(334): n is a, c, g, or t
  misc_feature (339)..(339): n is a, c, g, or t
  misc_feature (344)..(344): n is a, c, g, or t
  misc_feature (346)..(346): n is a, c, g, or t
  misc_feature (349)..(349): n is a, c, g, or t
  misc_feature (355)..(356): n is a, c, g, or t
  misc_feature (365)..(365): n is a, c, g, or t
  misc_feature (387)..(387): n is a, c, g, or t
  misc_feature (392)..(392): n is a, c, g, or t
  misc_feature (404)..(404): n is a, c, g, or t
  misc_feature (440)..(440): n is a, c, g, or t
  misc_feature (460)..(460): n is a, c, g, or t
  misc_feature (469)..(469): n is a, c, g, or t
  misc_feature (481)..(481): n is a, c, g, or t
  misc_feature (487)..(487): n is a, c, g, or t
  misc_feature (492)..(492): n is a, c, g, or t
  misc_feature (496)..(496): n is a, c, g, or t
  misc_feature (503)..(503): n is a, c, g, or t
  misc_feature (511)..(511): n is a, c, g, or t
  misc_feature (516)..(516): n is a, c, g, or t
  misc_feature (561)..(561): n is a, c, g, or t
  misc_feature (568)..(568): n is a, c, g, or t
  misc_feature (571)..(571): n is a, c, g, or t
  misc_feature (579)..(579): n is a, c, g, or t
  misc_feature (649)..(649): n is a, c, g, or t
  misc_feature (663)..(663): n is a, c, g, or t
  misc_feature (687)..(687): n is a, c, g, or t
  misc_feature (707)..(707): n is a, c, g, or t
  misc_feature (744)..(744): n is a, c, g, or t
  misc_feature (780)..(780): n is a, c, g, or t
  misc_feature (813)..(813): n is a, c, g, or t
taacatagaagaagcttggtagtngacatgtggcatttgacgtttttatgactaagacagttcaggctcaatctcttacagaatgtaaatgtacccctatgcatgcatatgtnattcttatcaaaattaagcttaatcactaaaagaagattcgctatctgaactttcttctacagttttctcactttcgccatcaggcactggagcatctggcctctnaagaagatcngggtcnagtccttctgatatcattttgtttctnattgccatcacnggtacacccacttgaaccattttgagatatcnggcatatctgggatccttggcnacagtnaaganatttncngcngatacnncactttccngtagtccagagtcttgtgtccngtccngcggtggttgcnctgaagtggcttcaggatgtcccccatttgtgaaantggtgaaattaaaaggaganacttcaacngtaaaaccaccnaggccnggganagangaaaacnttgcatcnaaaanattgagagtggtgtcaatttgtgggatacgaaggaaagggcggcnagtgtcnccncacaaacngtagaaaagcggttgaggaactgtacagtgtgcaccacaaatgggttcagaaaagccaccgtccttttcngtcgaatagctggnaccttggtcaggtctatgcctgancccatgagaggtagcccgtnctcatccatcttctcagcgggcggtggaccccgagtncacccacaaacccctcccagatggggcccgcccaanccggtaatcacgtttcaactttccccccaagtncccgcctcc

SEQ ID NO: 625148 - DNA, 834 bp, Homo sapiens
atctcttgccatgtcgtccttttgacacagttctttacttttctactactgaacgccaggtcagaaaacgaaccaagcagattttaacagaatgctggagctcttccatgaactgcttcagccacactttcctagcaactttttgctttccctctggctgtgtcagtagactgctgggcacgacatccctgtgttgtgactggtgcactgttctctaccatgttggctctacttaacttgctctgtgatgactggctgaatgtgatctcacacaatgaatgtgactttccgtctgtaatgatacttggacgctagccacttttcaactggtacagcaacgaacggtgtctgctactctatgcttgactgctcctttacagtaaacttgcctttcgatggtatccattctccatgtggcagtcacttacactgacttcacttgcgaacagtaacgatctcgtgaccaaggatagctgcttcaaactatgcgatctatatgccaggcaattctgtaaagagccattccctgcacacttgacgcttttccccagatcatacagcacaatcttaattcctcacagaggctcagtcccagttccagaatgaggaacgctgcctcagggtcgccctgttcctccccttggacctgagacacgagttctgtagtctgggtggaacgctatgatgatattagaacactttcccctctcagagctgatgaccgagatcagtactggtgtggcacactactgccactagtagcattcactgagaatctacactcttggaactgcagtcctgtcatcttcattcacctttaacccggattattcc

SEQ ID NO: 625149 - DNA, 366 bp, Homo sapiens
gaggcaggccggtggctcatgctgataatcccagcacttgggaggcgaggtgggtggattacctgaggttaggagttcaagaccagcctggccaacatggtgaaaccccgtctctactaaaaatacaaaaaaaaaattagctgggcatggtggcacacccctgtaatcccagctacgggggaggctgaggcaggagaatggcttcagcctgggaggtagaggttgcagtgagtcgagatcatgccactgcactccagccgggccaacagagcgagactctgtctcaaaaaaaaaaacatactcaatatgcggttaaaataatcaaaatgtgccggggtggtcacgggcagaaatggatgcttgaag

SEQ ID NO: 625150 - DNA, 723 bp, Homo sapiens
agcatttatgcccccagcacctatgcccacctgtctcccggccaagacccctacccccaccagctatgattcccatgggccctgctacaacgggtaccctggaggataccctgtggatgacgtcgagcaggaatagctcagctggtggccaaggctcctatgtacccctgcttcggtgacgcggacagcagtgtggcctctgaagtccgcagtggctacaggattcaggccagccagcatggacgactctcatgtcgggtccgtgatactacatgagagaaggagtctggtcgcaatcgttcgagccccttctctatcctggcccccccagtggccgtgtgtgagcgggccatgaggtgaagtcacctccctccacaaggacgactggcgatctcgtgccattcccggggtccctgctcctcactcccgattccgggatgagggagtgtgtgtggccatgtcgccccggagtcccagtgtgatgggatcctagtagccctgccatggtgagcaggccacggccgggggctggcgggcgcaggcggccccgggcccgcgtccgtgggacgcccttggacgagccatcacctccgtcgagcaccgcactgagtcagggagccaggtcgtcccaagaggtaatggtgggaggagaagcctgggccgtatgatgcaccgcgcggagccgcagcagggacgactctatgagcgaagaagactcgaagg

SEQ ID NO: 625151 - DNA, 201 bp, Homo sapiens
gggccccctaacccttcctttgaaaagccaattggttttaaaggaccttgtttttagcctaaaagttgggcctttttttaggggttggatgaaaacctttgtggtgttttgccttcctttgctttggttattttataaagggcccttttttttccggatgccccccttttgttttgccccattaatttttttttaggttga

SEQ ID NO: 625152 - DNA, 317 bp, Homo sapiens
cctgacggatcctgtctcccatctggcatacctgtgcaccagccccagtcctcctttctccccacacaatgacccctcagaaggctgtggttataagaacaagcgggactggggatggacagaagaaagaggggatgcaagcaatgccagcttgggagcttggaagggcagtagtgctcttaacagaaagatcaggcagcggggcaaggtgaggggagatggagagaggtaagcttggttgggtatacacgaggtttgcctgtgtctgcagaacatctcacatatatgtccagggagtagctggagggggccgcgcg

SEQ ID NO: 625153 - DNA, 127 bp, Homo sapiens
gatgcaaatgtcacttgagaactgcagacaactgtgtcagtgcaggacatcaaaacccctgcacctgcctgctctactcactgtgacgtgccagctcccataagcttttgggtttgcatggtcctga

SEQ ID NO: 625154 - DNA, 528 bp, Homo sapiens
cccccgacgaattgtctcgggagatcagtggctcggcttgcccgcgggatatatcacttaaagctcaagtatgtgaactactctgaggtttaccacccttgccatctcagccacatgctttgggccttaaacgctcagtcttgtggagttcacctctgtcaaacgatgggacagggcatccatttccagatcgtgtggcattaaccctcgacgctgactctatgatgatcctacaactgtggccttactcaagctcagctgtccctgtagtatatgaggaacacgggtgagggaatgtggaggccacaaaagaacagggacttgcaagaacaaaatgtcacttcagtctccctttcacgaggtagcatgcaggaggacgttgctgcgtagaaggaaggggatcctccaggagctctctggagcccatctaggaaagctagagtgttgttggcccgccaggagctcaggaaggatacatgcacttgtcgacaggggaacaagtgtaggctaccccgtgaaagccaagcg

SEQ ID NO: 625155 - DNA, 304 bp, Homo sapiens
gtcgacgtggtggcgggcggtgtgtacgcgcatcagggccctgttcaactaagcactctactcccagtttactgctaaaatccacttcgacccctaagtttcataaaggccaatgtaagtttcctggggtagaaaatgtagccaattgtttgcaacctcatgggctacaccttgacctaacgtcttaacgtgggtacttgcgctaactttgaagccttcatcagggtttgctgaagatggcggtatataggctgagcaagaggtggtgaggttgatcggggtttatcgattacagtcgacgcgg

SEQ ID NO: 625156 - DNA, 140 bp, Homo sapiens
ggcccccatatgcgctggaacaaaggaaccattctaaaagcatcagcggagtacatcaagtggctacaaaaagaacagcacagagcccgagaattggaacacagacagaggaaattagagcaggctaacaggcgacttct

SEQ ID NO: 625157 - DNA, 465 bp, Homo sapiens
  misc_feature (126)..(126): n is a, c, g, or t
  misc_feature (133)..(133): n is a, c, g, or t
  misc_feature (136)..(136): n is a, c, g, or t
  misc_feature (151)..(151): n is a, c, g, or t
  misc_feature (155)..(155): n is a, c, g, or t
  misc_feature (158)..(158): n is a, c, g, or t
  misc_feature (168)..(168): n is a, c, g, or t
  misc_feature (179)..(179): n is a, c, g, or t
  misc_feature (183)..(183): n is a, c, g, or t
  misc_feature (186)..(186): n is a, c, g, or t
  misc_feature (196)..(196): n is a, c, g, or t
  misc_feature (437)..(437): n is a, c, g, or t
  misc_feature (455)..(455): n is a, c, g, or t
tgtaactgcagagagagccacccaactcatattaggttgtgatgagactgagacatgaacttttcttgtattaggctactgagctctagaggttgcctatcagagcagctgaggttgcttaccccnatggggnatnagcacgagcccttantttnttnagggtaaaanaaatggccttnaatncanttgacgtttnggtgaaatattactgagctacaaggtaagagacttgaacttctagcctaacatccaaaaactattcaagctcttggttttcagcaagtcactttctccttctgggcccttcagtttcttgatttccagaagggaggggagtaggaactacacttgcccacccatccatccccacattgctcttgaggacatcccacattgttgaaggccaaggggggttcagggccacccgatggattccntccacctgttatttgaantgttgcctaa

SEQ ID NO: 625158 - DNA, 476 bp, Homo sapiens
  misc_feature (29)..(29): n is a, c, g, or t
  misc_feature (126)..(126): n is a, c, g, or t
  misc_feature (264)..(264): n is a, c, g, or t
tcccgccgcccgcccgccacccgccagcncaggtgcccgcccgccagtcagctagtccgtcggtccgcgcgtccctctgtcccggagcccgcagatcgcgacccagagcgcgcggggccgagagcngagagacagtcccgggcgcagcgcggagctccgggccccgagatcctgggacggggcccgggccgcagcggccggggggtcggggccaccaccgcaagggcctccgctcagtatttgtagctggcgaagccgcgcgcncccttcccggggctgcctctgggccctccccggcaggggggctgcggcccgcgggtcgcgggcgtggaagagaaggacgcgcggcccccagcgcctcttgggtggccgcctcggagcatgacccccgcgggccagcgccgcgcgctctgatccgaggagaccccgcgctcccgcagccatgggcaccgggggccggcggggggcggcggccg

SEQ ID NO: 625159 - DNA, 346 bp, Homo sapiens
atcacataattttaacttataatagatccattggatgtatatgaggggcatgatccacacaatacataactcacgcatgtgggctaagtgatacgatatggaagacagatacgaagagacagttcagtattgctgagctgatgtgctaaacttagatccttaagagtattattattataaccgtaatattgagtctggggttacagcatgctggtataggtaaatacattacacaacgatgactgaatgcgaccagttgatcttagatgaacaagcccatgctgagatgctgtagcatgaatacattgagattatatatgcatagttgagggattgatttgactgg

SEQ ID NO: 625160 - DNA, 166 bp, Homo sapiens
aaattgttacatggtatatatacagagtgatcaagccaggatacttagagtgtcatcagcttagtacaatacatcttttgtggagtatagtcaccctactcgggctatcaaacattgaattgattccttctatcatactgtatgtttgtactctttaacccagttc

SEQ ID NO: 625161 - DNA, 122 bp, Homo sapiens
gcgtcgacgccaaagagaaggagaaaaccaaagaaaaggttgaatcccatcatctgtcccctttgagcccaatctgagggaggacaggtccctctctcagcctcagaaagtgaatgtcgacg

SEQ ID NO: 625162 - DNA, 124 bp, Homo sapiens
ggtgtgtgtgtgctgtttccctcccactctcttgagcagtgagtatagatctccttctgtgcttagtatgactatgctgggcagtgactcggggatagtcccctgcccatgacatagcccccta

SEQ ID NO: 625163 - DNA, 627 bp, Homo sapiens
gggaaacatcaatttcccccaaatctttggactcaaaaggaaacggatacaacagtaaaactttgcctggttgcagcatccgcccaattaagcttaagtcacacaagcagcttgtattatattttatattttgtaaatactgtataccatgtattatgtgtacattgttcatacttgagaggacattatagttttgttatgaaagtatgtattttgccctgcagctgtggtggtgttttgtatatatacagtggagatagtctaagtgggtgctaaggcacatggaagactgtttatttgcacaggtaccgaaatttttttaagaacagctgtcaaatctcaaaagtgaagatgtaactgtgaacaatttccttatgtactactgaaggtgaaattcggcacaatcactgtaatcatggagtctgtgttgctctaaattgacaacttgacttttaatctgcaattcctagaaagcttcccgtttttaccaaacttcatttctggatattggtatattgccattatggagatttaaaacacctctaattttaaataccaacaaaattggttgtaatcaaattttaaatcaataataataatttggcctccccccttttaaaaaaaaaa

SEQ ID NO: 625164 - DNA, 179 bp, Homo sapiens
cccgtggttgtgggttgacgtggcttgtgggtgaccgggctgtgagaatcttgttcctcaggtcctcaatggtcttgaagtagggactgtagtctttgatctcagcaggccgctgatgacttccgcaccaagtatgagacagagttgaacctgcgcatgagtgtggaagccacggtcaa

SEQ ID NO: 625165 - DNA, 183 bp, Homo sapiens
tatgaccagtggcggcagatggggctgtcgggctggtcctatgaagaggtgctgccctacctcaagcgcgccgagacacttcatggcgagccgagcccctatcacggctttgaagggccgttgcacgtgagatggggcgggctcgatcagcacccccttaacgccggggtgatcaaggcgggc

SEQ ID NO: 625166 - DNA, 394 bp, Homo sapiens
cacgagggcaccatgggcgtctacctgcacctgatgaagggctcggtcagcgtgcgtgaaggccagcgggtggaaaccggcagcctgttggcgcgctccggcaacaccggcaacagcaccggcccgcacctgcatttcgtggtgcagcgcaacgtcggtctggccgtcgagtccattcccttcaacttccgtcagccggtcaacagcctgccgaacttcgcggtcggcggcgaatagctcggcaaggcttgccggctgcgctccttctgcggatatcccgccgcaacactgtcgcgcgctcgcgcatttctggtgtttccgttgttgcgcagtggcgccggtgcgcatggcgcactttacggggcatgcgtgtaccgcgaacggggctggtgcc

SEQ ID NO: 625167 - DNA, 515 bp, Homo sapiens
aatcgtcgaaaggtggctgctaagaacttccgtaattagcccccagtaaatctcgccgcggtaaaacccccttatggcaccagcattccccccccctctataaagatgtataagagggcaaaacagcgcctcctctgtctaccaacagactcaaacgtcccgcggaccactttaggaataaagggccacgctggaacgcaagaccatctgtgcgaagcccacagttttgtggcggggattttcagcctggcgctcgcgggtagggcacgctttttcgcgaaccctggtggtaagccccgggtttttttgtagaccacagaatttcttgcggcgttgtgttccgtcagcgccaggcgctggaccccagcgtctgggaggttatgggcgacggggacgatccgtcgtcaacacccacggacggggccgggactcctcaacggctgcgggaaggtgatgcgcccgcgcccagaccaccttgggggcgcatgagcggcaattccccctcccacaaaaca

SEQ ID NO: 625168 - DNA, 364 bp, Homo sapiens
cacagcatgaagaatgggggtgtgaaaacaatccaatagtggaggcaaagggttgcacagtagagaatccgtcccaccaaactttgcagtgcaggggatgcccgtgtcctcgcctctgtgaggcgataaggcccattcttgaggagagaggaaagagacagggtttcttttcaggaaaacgatggagaagcagctcccttctctttgatcactcgccttttttgatgaccaggtacaagaaaattcagcatttctggggcaagggttgacgtcttgggatcacagagatggcagtctcgtgtgcgaggtcttatgaggctgtgcgttttgtgaaaagggagagtgtacagataagaatgtggag

SEQ ID NO: 625169 - DNA, 81 bp, Homo sapiens
acatctgtgtacttctgcgcgaccgggacagaattcccacgagcacagtactttgggccgggcaccaggctcacggtcacg

SEQ ID NO: 625170 - DNA, 1018 bp, Homo sapiens
actcgtgaccctccgcccttccccttcaagcatttcctcttccctttctcagggctgaagctcttccttcaagagtttctagatcttgtgttttctctaatccaacatgttcatttgggctttgcgttacttgaccctgtggagatccccacagccatatgggcatcctaggtgaattcggccttggttgggctctgccagagactaatggactagagatgtgaaacagacctcttgccctgtacctttccttcccattaggacatcctttagattataagcatcctttagaaaagagctactgaaggtgtatgagcccatccttttattcatggactctaagagtcagcttttctagtgcatatcctattgccagcataaggactgaggagggggaaagggtcttaatctctatgtacagcagagacgattaaacttgctgtgtccgggctgcatcatcttcctggactgtctcgtgtttgtcctctgtgttcccattgtatcctgcaacttttaaggctactgtcttgcttaaatagctatatgaacagcaaatttgggataccagtttgatcacgtgttcacaagtcagcggtgcaaattcctttcatccttttactagttaagatctttgcaatcttcaggtctgattggtgaacgtacggcgcaccaacagaacccattgacatcgctacatttctttgaagaaccttcagggtggtctactaacactaggtccttttaccctgtaggtccttctataaaccctaaagaccaggagttacttaggagcagagaccgaataggaactagttgttctggttcccggtatctccttgcggactgggtacctttaactcatttggcactcttcaagctatctaactagtaccctattaacttagcagggaatcagcttgattgttaacaaccgacgattctgggactttcatcacctgccctatgtaccgacacgagacctgttgcgacatcttcactttttctccaactcgccccc

SEQ ID NO: 625171 - DNA, 103 bp, Homo sapiens
gaatggtagatcctcaagcccaggtggttcatcccctactcaactcattaacatcacctactttttagagccttgctttccctctctctctcatctcgtcttg

SEQ ID NO: 625172 - DNA, 442 bp, Homo sapiens
  misc_feature (2)..(2): n is a, c, g, or t
  misc_feature (15)..(15): n is a, c, g, or t
  misc_feature (17)..(17): n is a, c, g, or t
  misc_feature (34)..(34): n is a, c, g, or t
  misc_feature (167)..(167): n is a, c, g, or t
  misc_feature (342)..(342): n is a, c, g, or t
  misc_feature (346)..(346): n is a, c, g, or t
  misc_feature (350)..(350): n is a, c, g, or t
  misc_feature (356)..(356): n is a, c, g, or t
  misc_feature (358)..(358): n is a, c, g, or t
  misc_feature (374)..(374): n is a, c, g, or t
  misc_feature (384)..(384): n is a, c, g, or t
  misc_feature (417)..(417): n is a, c, g, or t
cngggctgcagggantntggcacgagcatgatancttcaccaattagttaataaagatgtatatactccacttttgattacaatcagtgattatttctatttatttaatattttttttgcctctctatggtgcatacaggttcttagttccctgaccagggattgantacatgacccctgtagtggaagtgcagagtcttaaccactggaccaccaaggaagtcccaagtcagtgactatttctaaaggaaggcaagacatgagaaggaaaagaaatagaggaatctgaggaggaaaaatcacaaggagacacagaactcatgggtctggaatatgcatgcntgtntgtntgtgtntngggggggtgtgtgganttaggaaaangggtaccgtacaaaaaaaacaaaatatcctttncaagtggcctttttcttgggtacca

SEQ ID NO: 625173 - DNA, 441 bp, Homo sapiens
  misc_feature (25)..(25): n is a, c, g, or t
  misc_feature (312)..(312): n is a, c, g, or t
  misc_feature (359)..(359): n is a, c, g, or t
tggtggctcacacttgcaatcccancactttgggaggccaaggcggtgaatcacctgggatcgggagttcaagaccagccttgccaacatgacaaaaccccatctctactaaaaatgcaaaaattagctgagcatggtggtgcatgcctgtaatcccagctactcggaaggctgaggcaggagaatcgcttgaacccaggaggcggaggttgtagtgagtcgagatcgcgccattgcaccccagcctaggcaagactctgtctcaaaaaaaaaaaaaaaaaaaaaaaaataggtattctggctgggtgcagngtgtcacgcctgtaatctcaacagtttagggccaggcacagtggctnatgcctgtgatcccagcactttgggaggccgaggtgggcagatcacgaggtcaagagattgagaccatcctggctaacacgg

SEQ ID NO: 625174 - DNA, 206 bp, Homo sapiens
gtggatttctcatgctaggtgggaggtggctggatcatggaggtggatttctcatgcatcaggtttagcacctccccttggtgctgttctcttgacagtgagttctcgcaagatctcgttttttaaaagtgtgcggcacctcctcccttcgctttctcttgcttctgctcccactatgtgagacacctcgcccccactttgccttc

SEQ ID NO: 625175 - DNA, 536 bp, Homo sapiens
  misc_feature (396)..(396): n is a, c, g, or t
  misc_feature (482)..(482): n is a, c, g, or t
  misc_feature (523)..(523): n is a, c, g, or t
ctggaaaaaaaagttaaaagtaaaaagtatatgagaggttgtgcataggttatttgcacatactatgccatttgacatcagggacttcaacacctgtggattttgatatctgcgggggtcctggaaccagtctgctggggctgccaaggaacaacgtgtaccttgttattctgctctacctacatcctttattttgtcacattggcattgaattgagatacatcagaagaacctgtggccttttctttcccatttatagcatgtaatattcacccagaaaagtgcagatcataaacatacactcctgaactttcacacaatgaacacacttccatgagcttcagtgccaaagaccggattctaaatctgccttaccactgtgtaacttaggttaancttggggcctccatttctcacctatcaaaggggagaaataatagccttcaaggtgttgtaaggagtgaaagattacactcattacnggcattttcttcctttcctcggatgcagagagctttggagnaccctgctgggat

SEQ ID NO: 625176 - DNA, 320 bp, Homo sapiens
  misc_feature (78)..(78): n is a, c, g, or t
gggaaacatctctaatgtcgatacaaatggggaacatttagaaagttatgaggctgagatctccactagaccatgccntgcattagctccagatagcccagataatgatctcagagctggtcagtttggaatttctgccagaaagccattcaccactctgggtgaggtggctccagtatgggtaccggattctcaggctccaaattgcatgaaatgtgaagccaggtttacattcaccaaaaggaggcatcactgcagagcatgtgggaaggttttcctgtgcttccctgctgtaagccctgaaaatgtaaacctgttta

SEQ ID NO: 625177 - DNA, 366 bp, Homo sapiens
taacgcttctgctggcgctctaaacaggctgcagaagcacagcctactgcatgggtcaacctttcacctgtgtccttgacagccctgaacactgacagatccaccgccaagtggggccctctcgcgtatgtataaaaaggctctatctcagttcctgtgtggggcgcacaaaaaaacactctctatctcctgggcaactataaggtcctcagtttttttatccacacctctgagtccatctgttgagacaccacacaactggtttaactggtttctttccaatagctctcaatctttttacacgcaacttacacaagtgcattcctcttgattcatcaacttccacatggcccagggacttaaccg

SEQ ID NO: 625178 - DNA, 809 bp, Homo sapiens
gtgtcatatgtattgggcatcagcactgcgctgtcgtgaactgcatgtgatgtatacatcaatatagatgccaagtattatggggtatattatcctaccggaagattaggatgatatctggaactagctgatcacggaggatccttaactgtgatcctctttgctgaagaatataaaccccgcacagggacttcacacacgaagctaaggtcttgcgaagctcgtgtctcaggagtcaacccatgctcgtatccttaattgctccaaagcgagattgctcctattcccagatgtgcgttggtgactctcttcttctaatgctctgtataaagtaattatagctagctcttaacatctggagcgtgaagttgtctggaaaatgcttctctggccttggaggcccactaccgtcctttcctatttttacatcaatgcttgtattgttagacatttgttaagaagttctgaagtgatccacgggatattgacctaaaggaagtggatagctagtctagtgaaggtactcagggtctaaggaatacctaccgacgtgtgctctcctgacctgctggaatacgagaagctgcgcttttcctacacattaccattgcttcttgcactatgaggcggaaaatccggacaacctctaatacatctatgcgtaaagtcactccaagtggagcccggggcttgtgagagctgagttcggccggaactttcgatccctagacccatggctgatcattgtggcgctttaaatagtgaagctgattaaccaaggtcgtggtatacttagatgtgtgtgtctg

SEQ ID NO: 625179 - DNA, 220 bp, Homo sapiens
tgcagttagtacgcgtgccgcgctcagggcaaccagatcgtcgaacgttgccgaattcttctcgtgcggcaggaacgaccgtgacgcatatgaccctcggtatgcgtcgtcgcgaagatatcggcaaattcctccccgtccacctcgagaagggcattctgaagaacgacccgttccagatcctcgaccgcacggtgtgggacactctgatccgcgaggc

SEQ ID NO: 625180 - DNA, 320 bp, Homo sapiens
cagaacacaagatgttctggtcctgactttcccctgaataaaatctgcactaactaacaccgaggcatagccaaacctcacctccagatcaaattggctgaaataggcagggttccaatttgtgatggtcatttatttttaatggcctttctattccctgaaatgtagacaaatttgccctttgctgcctcattgcagtggaagagcctcatacctgtgtgcagagctgatgatgaaaggcatctatgtgtgtatgtgtgttgtagataaatagtgtattaactatgtgtaattccttatttcaaagtagcattttatgg

SEQ ID NO: 625181 - DNA, 783 bp, Homo sapiens
agcgggcttctgttcgccggctcgtgccgagactagaagacgctgcgggaagcagggtactgtggagagggcgctgggctcgttgggctacccatatgcgtggactatctgccgtccgtcgtagttcgctagcgaatatgctggtagctccagaatcagctaaagcggaggtctccagcaccactgtttgtgctggatcgcagcgctgtctttccttaatgaagaacgaacacaaacttggattctcactggtcatttactcttcaggctgctcctatttaatcctctcgctccaaactgaagggatctgcaggaagtcgtgtgactactagatgtcaacagagcgtcactaaatatggtggcgaatcttccgtgcctgtactacagtgatataccctcaaatatgtccctggggatggatgtttggccaaggtcattgttggataaagcggagatgtgtatgtacaagtatgtcgagaccaggcttgattgatcttctggagaatgctgttcgcgatattatctgataggcttgatgtaataattcgcagtcatagacaaacttgttgaagtattactgggatagaactatgtgggagctggcggtgaataggattaattgccatcttggagattcgtgaaaactattctttgcatagaagctgctagagtctcaggtctactgtagttcctgaaagatatgtcttgagtaatttctaattagatccctttgagggggtcagggaactttgtaggtggctggtgaggtagtgagagggtggg

SEQ ID NO: 625182 - DNA, 656 bp, Homo sapiens
gtgagcgatgcagggcgtcacccctctggtacagggcgcgtctactatccccgtctctccctttcctctcctccatgacctcacgacatcccttacgctctcattctaaggggggagtgctaaagcggggagagatgttcacaagtagagagatgacgagtgatagtatatcatgcacagtttctaaatctattgatagttcatctggacttacccaaaatcactctgcagccctgccacgaggctagtaggctgcaacctggtccccaccctaacctcttgctccccctcaagccaatctatgcagcccagcaagaaggccctgcgggcccccccattgcccagcactgtctcatagaaggctctggtggtacctctgggcgcgaggagcatcagccccttgatcatatggggtctgtcatcaccatattttctgccgctgctgtatccgcaagccatgcccttctgaccatctgtatgggacgaaggaaatacaaaggatctaaaatctggggttcgggggaaggtatgtcagcactctcacaccagcatcctcattgcccacacaccctttactccccagcccagagagacgctgcttttaccaggaaagagctattgaaagatgtttatctatttttcatttacctttccat

SEQ ID NO: 625183 - DNA, 261 bp, Homo sapiens
gtggatcaggcaactgcagttcgacttccaggatgagaaataactgtaactggtcatggagtattacgtggggggggaaccatgttgacacatgatgagcatagtttggggagcggattcgtggacgagatggcgcgctgctacctggcggagatggtcatgggcatagactcggtgcaccggtttgtcttgcggtgcgacaagaggacgtcaaatgccgacaacatcctgcttgaaccgctgtaggcacatccgtcatgg

SEQ ID NO: 625184 - DNA, 242 bp, Homo sapiens
caatgtagcacattcacagctgcaggaggctccgcatacatgccatatgaaggaagcctcgatcacggcgacacaggctggtataatcactaggattgggcagcgatggcactaggaggttcatgcccgtgctcagctaagagcgttcaccacggaaggagagcttatgcagcaggttggatggcgcaggcccccatggctgcatggcacagatcactgaggaccaggccgggtgggcgcca

SEQ ID NO: 625185 - DNA, 190 bp, Homo sapiens
gaggatccccggtgcaagagcagtgagagatgcacggaagacagaagtcaaagcaaatgctgagaagacttcgggcagcaacgtaaaaatggtgaaagtaacgaaggactaatctacccggactaaagctggaaaggctacatttccaaggatgaagagtgtgtgggcacagtgtcatggcagggagtac

SEQ ID NO: 625186 - DNA, 1171 bp, Homo sapiens
  misc_feature (1171)..(1171): n is a, c, g, or t
agctttgtacacatgcacaggggtcactgacctaaaaagaacgaggagcgtgtagcccacagcagcctacggatgtgctcactcacagtgggtgggggtgctgcccttgactggccttggcttgtggtgggaggtccagccagtgccttttacactgcaggagtgtaatacagttttaggcataactgcccgctctgactccagatccaggccttaccctggctgtaggtctgcctctgatgggagaagcagcttctttctgctgctgccgccccaacgtgagcctctcatggagagttggtagagacagcccaccttggctcttgtcagcagggctgggcctgcacctggctctttggggagaacctatcttttgggtgtatggttagttagttgtttgtttctgagaaataacaacttgagatttaagatcaaggtgaactaaacccttagtgcctgccctgatcacctccttgcctcacacggcctgaggcctctgcttcagcccgcacagtagagcctccctctccctgtgctgtggtggttctcattcgtggaatcctcaccttcaccttctcattttcaagtatcaaaagacctggcccccactttttcaaggccagcacaagtgccaggcccttcttacaggtcttccctgatcagctttccagaaataatttcttggagctttctgttctggccggggtggggaccgggccgttggtgccgggattcccggtaacgggatcctgggatattccccgtgtgtgtttgtgaccacagcaaggtgggccaacgtgcagtaaggccacggggggaataaactgcggaccgcgggaacacaatgtgacaagggtgattgtcgtcgtaaaacatctgtatccgaagggacataaggcacggcaaataaggcgcacatgccctccgcatgcaaaaggccccaaggagccggcagacgtataaaaaacgcggagcgaggctgcgaacaccacgcgctccttcttacctcaagaagacagcacagaacgacagacgatagaggaagccagacaactaagcgacgacgtcacacgatgcctcacagacactactacgagcacaggaggcaagacgacacattaagatcggagagatcactacgacaataagataatatagaggagggttgtgn

SEQ ID NO: 625187 - DNA, 418 bp, Homo sapiens
tcggtaccagtgctactccacaaacaggttcaaacgattctcctgctcgcctccagagtggctgggattacaggcaggcaccaccacacccggctaattttgtttttttagtagaggtggggtttcactacgtattggacagggtggtctggaactcctgacctcaggtgatccacccaccttggcctcccaaagttctgggattacaggcgtgagctaccgcgcccgagtaagtatcatggaagatctagcatatatctgaactagtagataccatcaataggctgagagacttcatgggaggtaaatattcagtaaacaggtgagaaaagaaatacaaatggagcttgcgttagattatatttctaattgctatgtgtaacttgggaagtgcggaacggtatgtggaggtagcact

SEQ ID NO: 625188 - DNA, 351 bp, Homo sapiens
  misc_feature (247)..(247): n is a, c, g, or t
  misc_feature (274)..(274): n is a, c, g, or t
gctctttctttacctggattctcatgtgctagaacataaagacacgtgtcatttttggtgaatgatgacaagttcagcttggatatcatcagagtgtcagcaggaaatagttggtctacttaaaaagggtgatcgaaaccttaaaaatagttaaaatggtcatgttatgtatattttaccttaattttcttaaagaacataggctctattccaccttttagggaagggcatagctctctatttcttntcttcttttttgtagagacagggtctnacttgttgtccaggagtttgaaaccagcctggcaacataagcaagaatctgtttatctacaaaaaataaaataatta

SEQ ID NO: 625189 - DNA, 179 bp, Homo sapiens
  misc_feature (7)..(7): n is a, c, g, or t
  misc_feature (20)..(20): n is a, c, g, or t
  misc_feature (99)..(99): n is a, c, g, or t
  misc_feature (142)..(142): n is a, c, g, or t
acttgcncctgaccgtcaanatggatctctctcgccacggcaccgtcagctcctttgtggccaagcttttcatctttgtgtctgcagagctctgagcanctcttccgtcgcggggtctccctcctgttgctttcctaaaccnctgctccggggcgttaataaagtcttagcaagcgtcc

SEQ ID NO: 625190 - DNA, 375 bp, Homo sapiens
gttgcctccaagcagtttgtgaaagtatcagatcttgggatcctggggattgattcacctaatataaatatatttctgtcatgaacctcttattccgttgctgggggtgtaatcttcatcatctagggaaacgtgtgtctgtgtgctatatctttttccaagcagtaccccttgagtgtccatattttttgggtcatgagtgagctcatagagcgcgcaggtgtatacatatctctgtgtgtgtccacagaagtgttgcagagccacccctcttcatccagagtctgtactcttctacatatataaaggggctctcatctcccccacgggcctcttcgtcgtcatgagaggaactcttccacaacagagaccaca

SEQ ID NO: 625191 - DNA, 188 bp, Homo sapiens
ctgcaggaattcggcctactgaggagacacattcgtattactcgcattcaagggaaggtatcaatccacccttggagcttcagccaatgagtttaattaaggaaaaaccaaccgaaaaccaaataatttcaagccatcctgcttattacacaatttttatcgtggggtttattactctctctacaagg

SEQ ID NO: 625192 - DNA, 389 bp, Homo sapiens
ggataccattactacctttatagtattttgtattaaattagcatatgatatttatgttttctctatatacatgtgtatgtgcacgcatcatccactactatcatgttgtcctctaactccgaaagctcatatttcagatgcctggcgttataaatgtcaactctaaatctatgataaggtcagtaaaggggtaaaattaaaattgtgaaaacggtgttgcccaaacaatgaaaaaggggagctctaacctgccctttactctcttccttcagggtaatttctgtttcaatttcaattcaagaatattacatgtagtaatgaatgtattccatggtaacaaagtttaccttttcttctccttcatctttcagctagactttggtcaagat

SEQ ID NO: 625193 - DNA, 115 bp, Homo sapiens
ggcaaggttgattgtacacagcactatgaactctgctcggatacaggttcgtggctatcccactcttcctctgggttccgagatgggaaaaaggtggatcagtacaaggggaagc

SEQ ID NO: 625194 - DNA, 662 bp, Homo sapiens
  misc_feature (164)..(164): n is a, c, g, or t
ccacgcgtcgcccacgcgttcgggaaggtggtggctggagaggttgtggtgctagttctctctaagtccatccagctgccatcctcgtcgctgcagactgacatgacgctcatcgaccgtctgcgcagtggactcgtcgcaaggatgacccattcggttggcgnacctacatcacaaaggggagtcccgactaaaactgagctgcgggtaaatccccaagatcgcttgacttactcctcgcgagttctccggagactatgatccatctactcgctcgtcgtcagaagattaacgcagcgagtctagtcgactgctggataatcgtggaactcacgcaggcattgaggtagccaacatcgtaggtgcgatacttctcaccaagcctgtttgcttctggtcggcgtggttccatcttctcctacctttctaggtactagggtcgcactggtgggtccacttccttcccatgcgacgtactgggggcgcgaagttctgtgtatgcccccccttccgttccggacggtgatccctttccgccgttgggcagcgttgcccatttttcggggggcaaaaaaccccccgggcccggtttgggcccccgcgggggcccccacatttttccccttttgggcgggggcgaaaacgtttccctttggcctaag

SEQ ID NO: 625195 - DNA, 559 bp, Homo sapiens
  misc_feature (20)..(20): n is a, c, g, or t
ttttctttttttttcccccnaaaaataaagcacaaaaattggggttttttttccctcagggcccggggaaaaaaggggatccttccttattaaaaatttaacccagctttcctattggccttccccccaaaggtgcaggcacaaggggggggggctatttgcctggagggaagattttgcccattgggcaaaaaaactccctttaaaaaggggggtttgccccttgctttggggggtcgcccttgggctcccaggaccctagggggccagggggttctttttttatttcccctattcgcgaagaccggagggggaaaaacacgggggccttttattagggggaacattcccagggggtgacaggtgacaggaggggaaaattttttttcccgggggccccaccaaacttcatgatttgaaacggggcctttggcccggtttttcgtgggtaaccgggttaggacaaatttttataattttttttggaacaagggggaacccggggccccccggggaaaaaaaaatatttttgaccccctcccccctcccccctggggtg

SEQ ID NO: 625196 - DNA, 288 bp, Homo sapiens
ggtgttgattccactgggttttgatcaatacaataacaaaccttgttcctttgacatactctgaattttgttgcttggggggagggggtgtgtgtgtgtgtgtgtgtgtgtgtgtatgtgtgtgtgtgtgtgcgcacgcgcagtgtctatcagtatcagtgcctgtctgagataggaaaattacattcctgtctctgtattgaggagaagggtgtatagcgcaacatgacacattcgctctccttatattatagagactagtgttttttgttcttaacactggatcag

SEQ ID NO: 625197 - DNA, 180 bp, Homo sapiens
gttttcccccccctttgagtagttggaggtcacaaacacagttttttttttattgccctttttggcctttgaatgttcattttttgtcctcctttgggcaggggaggaaggggggccctcaggggccgacactagtatgatgcagtgtccagtgtgaacagcagaaattaaacatgttgc

SEQ ID NO: 625198 - DNA, 721 bp, Homo sapiens
ggggaatggcgaacaagcggtcgcgctgtactcgagggagttccgggtcgggggtgggtagctccgggtccagcgctggcgttggtcgcagagcagggcacggaggtggcatctgcgtgtgagggcctctattccccgcagccccgggtctgcgaactgcctctctggcacggatggaaaggcgcctccctggacctcggtcttcagccttgggccacttctaccgagggtgacaggagcccgaggggacgaaccctgtgggccttgactgtgtggccttgagccagtgcctgcctattttaggccttgggaaacgactggacgtgacagtgccctgcagactggttggaggtctcaggcaggccacacactgaatctgtccaagggtgtcaacctgttcgaaaatgctcgtcctcggtgctgtaaaagaaactagaacttaaaccttaacatttaattatatagtaaggccattttacttcctgcagaaagggtacactcgccagcagttttgccaggagagtacactgaacaaaggagacaggtcatttataacgtggctgcgtcaaccctaactgcttgtgatcggtttcctttgggtggacggggacctcacaattctgtatatgtccgagtgattagcacatagaacttttttaaaagaggcaaaggcagaggagaacaaaggaagaaggaaagtacttggtggaatgctgaggaa

SEQ ID NO: 625199 - DNA, 180 bp, Homo sapiens
ccccgaacgatggcccatggccaagagcccactcgtagggcgtttcctcctccagaggcctgcacgcggggtgcggacacaaaaggctctccatcgaaggcaacattgctgtgggacagtccacgtatgtgaagttactcaggaaaattaacccagattggcacgtagctacagaacctg

SEQ ID NO: 625200 - DNA, 968 bp, Homo sapiens
gtgactttttgaactgtttattatatggtggatgatgattttcatctcacgtgctggacgctgtactgtatcagtgtgctctttggactacattagtcccctgtgggagcagcagggctggagatctactgcagtcccttcccacgacccgacacctgccagaaggccaaggaggcacgtggaggtgtctccttcctgacaattctatccctctccagaagctcagggagggcttgcccagcacctgtgctcacagaccgtcccaggatgttagtgtgaggccacatgatgcgtctgttgttgaccctctgaagtgggccatggactagtgtgaggcccaccatgtgcttccaattgcacgtatcatatgtgaagaaggtgttgagacagacaacagcacattttccacattgttgatataatagtgcaaccatgtggacagttgaggcaatcttcagtcattgcccaagtagagtcaaagagtaccttcaaggaatctggtggactgaggaacggccggagcaagacatgaacaggtgtgaggcgttggttgcttatgagtacaacccaggacattggcacaaattgcccgcgattaaggagaattggcaggcccattacggccattgggatcattggatgtccaaaaacaggacatagatttagtgctactggacgctatggaaaccgggggggaccagtggaaaagaagcaccatcaaagactaagaccgtccccctttatgtaatacgtcacttggatgagcgcttagtagggtcgagacagaggagggagagagcgatggcggagaaagacgaccccgccaaaggcagaaaacaaaaagagggcaaggaaagaaacgcccaaagagataggagcctaaagagaagacgacagagagcacgatagcaatcatagacacccagtggtagaatggcaacaagaatagtaaccacagagccacaggg

SEQ ID NO: 625201 - DNA, 201 bp, Homo sapiens
atagagatcagcgtacgtcctattatctgttcgtgtataggttatcattctgtactcgaggttcagtaagcataagtccatagcttgggtcccttggtataaacggttgttgatgagatatatggaggtggggatcaatagagggggaaatagaatgatcagtactagcggcgggtaggcctaatttctctcggaccaatg

SEQ ID NO: 625202 - DNA, 129 bp, Homo sapiens
cgggacataaccacaaagtaattcctggtcagcaccagcgatgtccaaaggtgcaatatcaaggaagggcaggcgtgatggcttatttgttttgtattacaatagattgtaccttccgccatatcatta

SEQ ID NO: 625203 - DNA, 873 bp, Homo sapiens
  misc_feature (24)..(24): n is a, c, g, or t
  misc_feature (93)..(93): n is a, c, g, or t
  misc_feature (106)..(106): n is a, c, g, or t
  misc_feature (108)..(108): n is a, c, g, or t
  misc_feature (110)..(110): n is a, c, g, or t
  misc_feature (112)..(112): n is a, c, g, or t
  misc_feature (127)..(127): n is a, c, g, or t
  misc_feature (152)..(152): n is a, c, g, or t
  misc_feature (157)..(157): n is a, c, g, or t
  misc_feature (167)..(167): n is a, c, g, or t
  misc_feature (169)..(169): n is a, c, g, or t
  misc_feature (203)..(203): n is a, c, g, or t
  misc_feature (224)..(224): n is a, c, g, or t
  misc_feature (226)..(226): n is a, c, g, or t
  misc_feature (228)..(228): n is a, c, g, or t
  misc_feature (233)..(233): n is a, c, g, or t
  misc_feature (249)..(249): n is a, c, g, or t
  misc_feature (283)..(283): n is a, c, g, or t
  misc_feature (288)..(288): n is a, c, g, or t
  misc_feature (293)..(293): n is a, c, g, or t
  misc_feature (297)..(297): n is a, c, g, or t
  misc_feature (313)..(313): n is a, c, g, or t
  misc_feature (318)..(318): n is a, c, g, or t
  misc_feature (322)..(323): n is a, c, g, or t
  misc_feature (325)..(325): n is a, c, g, or t
  misc_feature (345)..(346): n is a, c, g, or t
  misc_feature (348)..(348): n is a, c, g, or t
  misc_feature (364)..(364): n is a, c, g, or t
  misc_feature (366)..(366): n is a, c, g, or t
  misc_feature (371)..(371): n is a, c, g, or t
  misc_feature (378)..(380): n is a, c, g, or t
  misc_feature (382)..(382): n is a, c, g, or t
  misc_feature (406)..(406): n is a, c, g, or t
  misc_feature (422)..(422): n is a, c, g, or t
  misc_feature (440)..(440): n is a, c, g, or t
  misc_feature (443)..(443): n is a, c, g, or t
  misc_feature (450)..(450): n is a, c, g, or t
  misc_feature (463)..(463): n is a, c, g, or t
  misc_feature (468)..(469): n is a, c, g, or t
  misc_feature (473)..(473): n is a, c, g, or t
  misc_feature (476)..(476): n is a, c, g, or t
  misc_feature (656)..(656): n is a, c, g, or t
  misc_feature (737)..(737): n is a, c, g, or t
  misc_feature (869)..(869): n is a, c, g, or t
aaaaaaaaaaacccaaagccaaanacaataaatacacacaacaaagggtgatgggcaaaaacgtcatggggatattgtgatataaaaatccanatgctcagaaacncnanangtcacgtgaccagcntccacaaaaattaaactgcaagaanatganttaaacccananatttaaaaaaaaagatttaagaaacacatcagcnaattatatatggacctatggnantnctganccaaacaaaaaaatanatagtaaataaaacaaaaatatttataagactgnaaganataanaaanactcattgaataacgnatganttanngnatgattatcaattattttanngnctgataatggtattangnttatntttttgnnngngtccttctctttccaggataatanaatatttatgggtganatgatatgatgtccagantcngcttcanaataatagggggnggggnngggngtnacagagttacaactggctgtgagctgataatggtgatgagcgtgatgagcgtattgggctgaaatatcaatccatctacttttgtatgtctacaatttcctataatgagatggtacactgtaaacagcgcaatgcatcgctgcctattcaaacaaaaaagcagttgaagtctcagcctgnatgtcacccatacctgtgctaatcttggatttgttctccacagtggtcatggcaggggcagatgccgaagtgctgcagatnggcaggagctttccttccctttaacaccattagtcaccgttacccctctggccattccagctaaaaggtcatcactgctcttggtcttcatatttactcttccactgttctttattccttcttgaaattttnttcc

SEQ ID NO: 625204 - DNA, 520 bp, Homo sapiens
ctcctaaagtgttgggattacaggagtgagctaccacacctggctgtctctttaaactttgtatagaatcgttcaatcgttcaatttggattgttttgagtctatcttatatcttatgttaaatgaagctgtaatttattctttgttattaccatgaagtattcctctgtattctgtaccacaaacttctgttctactttcatattatttccaattttgagaatactgcaaatcatgctgccaagcacagtggctcatgcctacaatcccagcactttgggatgctgaggtgggaagattgcttgaggccaggagtttgaaaccagcctaggaaacatagtgagaccctatctttacaaaaactaaaaatattagccatgtgtggtggtgcgcacctgtggtcccagctgcttgagaggctgaggtggaaggatggcttgagctcaggagattcaggttgcagtgagccatgatcacatcatcacactccagtctgggcagcagagtcagacactgtctc

SEQ ID NO: 625205 - DNA, 791 bp, Homo sapiens
cgacgctgaacggtgaggtgagcgcgtcgctctcttcgactttctgttggacgtgtcctgccagatgccatggaacgatcccaccgagcattatgaccgagctcatgactcgtcacctggtttactgcgtgtgttctacggatttttggctggaattttgacaggattccttggatgaggcctcctgtaggtgttgtcgcctgatatgggcgttgtccctgacgccggtatcccaggagcattttgtccaatcagacgactttgactatctgaaaacgctcggtgcttgtactccccgtggctcgatcgtcttgtggcgtacgaggctggtcgcttcctaggcccgccgcgcttgctatgcgccgtcttggctttgcgtgcttgtctcggcgtggcgtggtcttcagtcgtagttgatgtgtgtagtcttctttcatggtagtttaccgtacgtgagaagcggcatacaacgcattgagtcttgaacagcatagaatcatctaccatctgaaaatcgcgagtcgtctgagtcacttggtttgcatcgcctcacgtgtcttgtcacgaagcatcgtgcgaagtattccccgagctaagtaaacgtcgcctggggtagtcagtcgacgagggttgtcagacagaaaaaaaaataaaaaaaaaaaaagggggcgcggcacggcactagggagaagggttcccccaagaggggtgccccctcgtgattggcgccgcaaccccttttttttttgccacacatttttgttccccaaaagggggggccccgaataaaa

SEQ ID NO: 625206 - DNA, 934 bp, Homo sapiens
atggcacatgcatgcgcaagtaggtctacaagacgctacttccccatatcatagaagagcttatcacctttcatgaatcacgcccttcataatcattttccttatctgcttcctatctcctgtatgcccttttcctaagcactcactaagcaaaacgtaacttaatactacacatctcagacgctcgaggcacatagaaagccgtcgtgaactatcctgtcgcgtccagtcatccgtagttcctcatcgaccctaccatccctacgcatcctttacataatcagacgtaggtcaactgatcgccgtcccttaccatcaatttcaatgttggccacctaattggtgactgaagcctacgagtacacgcgactactggcggacttaatcgttcaactcgcatacatcacttcgcgcccgattattgcctagaaccgaggcgatcgtgcgactccgttgacagttgacgaatcgagtagtgactcccgattgaatgcccccattcggctaataattacatctcaagaggtcttgcgctcatgagctgtccccacatgaggcttgaaatgagatgcaagttcccggacgtctataccaaatcactttcacgcggtagactgaccgggggttatactagcggccgatgctcctgaatgtctgtgggagcagaccacagtattcatgcccatccgtcctagaattaattccccttaaaattcttcgagatagggccgtgatttgccctatagcaccccctctagcccgctcgtagaaggctctaggaaaggctcaccaaagtctgcccagaaaagctttgaagggctacttggctctgatacgttcttcctgccaccccattgtgagtgcggcgcgatgaccgtccacagcgaagtgacctggagcatccgttcgacaaggacggtccccaaaaaaatcg

SEQ ID NO: 625207 - DNA, 107 bp, Homo sapiens
ctgtgggttgccaatgcttagtgagtgacactagcagcctggtccggctccgttgcacatggcaggtgtgatggcccccacgcagtctttggcagtataacgcagta

SEQ ID NO: 625208 - DNA, 179 bp, Homo sapiens
atggacgccaacttcacagcgcgaggcctcgttagtctgcaagacagagagaagccggcaacacaaagcagtaaaccctactgggcgcctgttcttctttgcccgtcgctgtccttcaggcttgcttcctggttccttcccatctgcctcagaatgtgttcatccctatacctcccctc

SEQ ID NO: 625209 - DNA, 139 bp, Homo sapiens
cacgacacgggcgactccccaggtctatggagcggggtaacagatggcggaggcgtgagagcctggagacagcggctgatcacgatcggatcctgcgacagatcgagagcactgacacggcctgcatcgggcccacgct

SEQ ID NO: 625210 - DNA, 336 bp, Homo sapiens
aaagaaggtcttgctttgtcgccagccaggctggagtgtaatggcgtaatcatagcagctcaccacagtctcaaactcctaggctcaagtgatcctcctgccttagcctgctaagtagctacgactataggcatgtgccattacgcctggctcgtggcttcctttttttttatgtttttctggaaaaaacagggttttactctgttgccagaatgttctcaaactcctggccttaagtaacccttttggttcaacctcccaaaagtgctgggattacaggtgtgtgccacatgtacggtcatgaaaattattttctatctttcagaatcatagttt

SEQ ID NO: 625211 - DNA, 229 bp, Homo sapiens
ccacattcacagcttagtaacttcctgactctaactgacttgaccctgagcatccttatcatacaaaccctagtactataaagatacaaggtaaaatcacacaacaataacttatgatcaacggcacgagcttccaatgactagcttactgactaaagcagccactccaacaacctggactacttcttagccagcctaacacttcccctagactcactcactggccctt

SEQ ID NO: 625212 - DNA, 667 bp, Homo sapiens
  misc_feature (149)..(149): n is a, c, g, or t
tggaaattcaaagtttggcttaattaggcgtctgtgaaaacaaaagattttgcagacccagtcccgtctggtggtgacctgctgcaaagttctgtgaagttggaattcatcttgtagtgatttggagacccccagtagctgattatttnagaatacgggcccatttttcaagcagaatgagaggtgtgcgctattatggcccaacaactttttataattagccatccactcaagccgttcccccagctatactattttcgcaggttaaaatccacagtcttatactattctctcacatattgtggacccctcagcgcctctgggctctatggccactattgcaacatggtcgctgtctgtgtcctaatatatagctctggggatcctagagtcctaatagggaggcctggtatgagtacattatatcaaaccctcatttcctcttatgcaggtagataacactgcaggggggtaacaactcaagaagaaaaaaacctcctcgaggacactccaagggacaccataatctccctggtgggagggttaactcccattactgtgaagccttctcccgtgtttctctccacatttccgtgccgtggcttttcacctcctttccccggtcctctgcccagccctttttccttcccacccaaatcctcctttg

SEQ ID NO: 625213 - DNA, 161 bp, Homo sapiens
acagaaactaggaattcttaatggaaatattctaggctcacactgattgatagcttgtttaaattcgagtatttaaaaggaaaaggcccaaatgtagctataatatttccctgttgatctggggggtgtatcctaacagggaactgccaagccacggtcaa

SEQ ID NO: 625214 - DNA, 382 bp, Homo sapiens
agttcgacgagactctccaacacttcccctcctttccgttcccagagtctgttttgatcgaactgtttcgcctccactcttttgtatttcatgtggggattgctaccttggcagcatggctgcctctgtcagtggaaaggaagtggtggatagtaaaggccgtatgtgtaccatatgttaccagggcttagctgtgtccctgttggtagtgtgtgtgtgtcaaagagacgagagagaccactgaagaacatttgggtgtacttatttccctgtccctagaattgatacctatttctagaatacagtagagaaatgttgccattatacagatcaggataaagagacgccaatttccgtgcagttagagagtctccgtcgaact

SEQ ID NO: 625215 - DNA, 526 bp, Homo sapiens
gggaaccattcaccatttattgtaccaaaaagggggtagggacaggacccctaggactggccaaggggggttctaaaggccaactggggttggaaaacaatggtctggacacttcactggcggcaggctgtgttccaagttccacgaaatagctcaaaaagttaaccagttccgttccaaccttcttgaccagggggggcaactgctcctttgacttttcaaagaaaaacttggcctcggcctgaagctctgggttcttgaccttttccataaaggccttgccaaaaccaagcccggcctggaagtcccgaaaaaccaggctctccacacatggctcccttgcctgtctccaaaccaaacttcttcaaagctgcaaaaggtgaaggataacaaaattttctcgagcaacttcatgttggaaaacaaggggaaggaggcctcaccccgcgctctgtccctggggtccgggcctcccccccccaaatgcccccattcccgggtaccaacacaaaggccccctctccca

SEQ ID NO: 625216 - DNA, 487 bp, Homo sapiens
taataataggcatgctcagtgatattcagattcagaatatctagccactaccttctggttcacactaagttccctcatactggctggagtagtgaccatttgctatactctatttaaatctaaggaggctgtagtaaaagcaattgtaagattcttgaaggcgaaattttgaaaaacagtgaatacttctaagttgcttgtccttttattgcgagaactacaggacattgtgtccgcacttgttagatacacttaaccttgaaactgtcagactggcccggcgtttacaacagctctttgtgcatactactaggtcttacagaacccgtctgtaaatgacattacaagatgcaaatttaatatctagttcacagctagattacatcactgattaaagctgccttcaaaatactctttaacttcttttagctaaactggttgtctttcatttgccatagaattccaaacaatactgtcttataaaata

SEQ ID NO: 625217 - DNA, 1052 bp, Homo sapiens
  misc_feature (1)..(1): n is a, c, g, or t
  misc_feature (435)..(435): n is a, c, g, or t
ncgagtcgttgcgggagaattgttgtgtggtgccgccccacgagcttgtcggttggctatgcttctgggtgttggcaccctctcgcgtcggccatttattttcgaacgtgtctgtgtctgtgctgcaggaatgattgttccgtcggcgtctctctccccccgctctggtggtgcgtgtgtcgtctccgcgggcacccctctggagaccactagtgtccccgtggtgtcagactttccgtgcgtatcttcgtcggtttctttgccacccgtgcggagcgtgactctgttgactcccagcgggttgccctcagacaaattccccggcgtgccactcactgcgtggtctgagcgataggaagatgtggcgccgcgtcgctcctctggtgaaggcgccgcaccagttgtgttccaggctagtttttgttgttgacaggnccccccaagcgcgcacaaattgttgttaatggtgtgtttaggaacccacgcccaggcgcttgcaaccctgctttcatgcgggcgattactttgtcgcacacaaatgtatgctctgcctgtcagtacatcgcactggttgtgttaattcgcgtctgtttggtatatgccgccgctatgtttcgagcctcacgctgtcgtttggcacgagagtctgtctcgagagcacgagggccactgctttcatagcgaacataagcaatgtgtgtcagtgggagaatttatctcgcacacaaagacacagagagacaaacaatagtgggtgttgttgtggaatattgtcaggcaaagtcactattttgttttagcgcgtccacgctgggaaggctccgcgagttcgcggcaaacacagaatgtatcattttgtctgggctcttctcgtttgaaagtgacacccccacgactctcccctctgtcgtaacgccgcaatagtcctttcggctcttttgttcggaggcgcaattcgcggcgacgtttttatctccacatcattgacccaccgtctggagtactcgcggaaaatttggggcaaaaaaaagtgtttggcgaaaaaaaaaaaa

SEQ ID NO: 625218 - DNA, 1305 bp, Homo sapiens
agcgggcagccgcggccccacagcttctggggctggggccccggcagccggtgcatggccggcctgtacctcgagctctctcggcacgtgccgtggctcccgacgcggatgtagttctcatgcccaggtcgaggttcgcacggaccctggtcgcagacagtcctcatccctcgcaccttcgtccctgtgcccccgagcgccaggtggcgggctgtcgctcggatggcaggtggcggggccctcgagggccggtcctagtggacgcgtcgagggcgtcccgcgcggaccgggggtcccgcgggccgcctctctggtcttgaagggcctgcctgcatgtcgagaccggcttgaacgcgtcgagactgcgatggcttgtctgcgacggaatcttgggatgggaagtcagcgctgtcgtgacctaggctgtcgcggttgcgggcccgattcgtacagcactttggcttccgtatgtctccgggccctgctctttgacaaagccctttacctatcgtggcgaatccctttgtgtcctcgccgtccctaggttgggaaacttcgccaccggactttcccttgaggaaacttgggcgcacgcccactaaaacttcccttattttctacccctctttggcctttgaggcgagcccatgccggccctccggttcccaaagccgaggttagtggtttaacctcgagcaggcattccggatggccattcgaattcattcacataatcgtggtgtactctcaatacgcggtcttccaacaccgcacatgtatgggccaacctcgattaatcttggcggaactctatttcaccacgtttttttttactttggttaggccaccctggggcgaatatccttttttcagtctgaattgtaataaacccacccaagctttccaaccgtttggggaaactcttggcccttaactgtgggcatttgggcggcggacaaatacccagaaggcggtccccaagcggaaacagcggaacaacctagaaggaacgcttttccttcattgttttatcccccgcgccgtttaatatacaggtggcggtggaacggccatttccattttcttggcagccaccgatttttggcggccctttggcttgtgaacatgtaatattccctttttgtcacaccaacctacagtgagtaccttcggatcatcttgggcggcccaaaagtgttggggggaagggccctttttccatgacttttggtccaccgtggccgttccggacccattttacggccggaaacctttttacacttcgcgtgtggaaacctttggggg

SEQ ID NO: 625219 - DNA, 125 bp, Homo sapiens
taagatatggtatacatcatatgtctctagaccaaatcttattacaagtgaggacaagatattctttaattaaaaacacattcattatgcaggctaccatactaaaagtgaactcccaagaacag

SEQ ID NO: 625220 - DNA, 348 bp, Homo sapiens
agcctggaatgtcacactaccagcgcacctcctgtccagacagacatcgtcaacaccagcagtatttctgatcttgagaaccaagtgttgcagatggagaaggctctgtccttgggcagcctggagcctaacctcgcaggagaaatgatcaaccaagtcagcagactccttcattccccgcctgacatgctggcccctctggctcaaagattgctgaaagtagtggatgacattggcctacagctgaacttttcaaacacgactataagtctaacctccccttctttggctctggctgtgatcagagtgaatgccagtagtttcaacacaactacccttgtggcccaa

SEQ ID NO: 625221 - DNA, 438 bp, Homo sapiens
  misc_feature (17)..(17): n is a, c, g, or t
  misc_feature (48)..(48): n is a, c, g, or t
gttaccaaaggcttggnaaattggccagttaatttcttaataggaacnaagttctatttggatgatgaaaaagtttggaaatagatggtagtgttggttgtaccagccattatgaatgtaactgatacccactggattgtacacttaaaaatggttaaaatgggtcgggcgcagtacgcctgtaatcccagcactttgggaggccgaggtggacggatcacaaggtcaggagattgagaccatcctggctaatgtggtgaaaacccatctctactaaaaatacaaaaaattggccgggtgaggtggcaggcgcctgtagtcccagctgctcgggaggctgaggcaggagaatgatgtgaacctgggaggcagagcttgcagtgagccgagattgcgccactgcactccagcctgagcgacagagcgagactccatctc

SEQ ID NO: 625222 - DNA, 861 bp, Homo sapiens
gcgagccccgactgccacgggccgggagacgggcctgggagcggcggcggctggcccgagagctgcgccgggagagctgtgccgcgagcctccgcctcttttttggcaccgcacagtggatccctggaggcctgagctgccactgcctgccctgggtaccctggcagatcgctgaggtggaacgggcctgtcagctgcgggggacagcgttccgagtgcagttggtccatctcctgggatgccgtagggcatcagcatgacctgtgcccagacccagcgatgacttacaagggggcacttgactgggcaattcactggcaggcatccaggccattgtcccgacttcttgggacgttggggaaagaacatcgatctgcgctgaggcgaggaaactactgcgagaaccacagtcagggcacgatgcaggcagagacggatgttggaggcggagcccgttgctgattcccttgaatgcctgtcccataccggccttacggcgacccgaagggggcctcgacaccaagtcccattcatttgccccagacggttaccaaccatcagaagaaaccttgaaccctacggcaggcatgggaagcatggggtccggttgcgatgactgggcgccaaggctggccttgcccggacgcacacgctacgacacactggaaggtgacattgccactgagaccgccaattggggacaaccttaacggcatggagtgaccgagacattacttgccacacacttggcatggtcctcttgggggaatctaatttgaaaccgccggacccccggatgagacaccaggctggaccacgggacacaggacagattggcacacacgagaaacgaacaagcgc

SEQ ID NO: 625223 - DNA, 133 bp, Homo sapiens
  misc_feature (113)..(114): n is a, c, g, or t
gagtaccccaacttgaccagttcacggagcacttcaacaacatgtcctactgggtccggtccataatcatgttacatggaaaatggcccagtgactggggaactgtgctgctnncttgaatgttcatcaatga

SEQ ID NO: 625224 - DNA, 562 bp, Homo sapiens
  misc_feature (154)..(154): n is a, c, g, or t
  misc_feature (182)..(182): n is a, c, g, or t
  misc_feature (258)..(258): n is a, c, g, or t
  misc_feature (297)..(297): n is a, c, g, or t
  misc_feature (303)..(303): n is a, c, g, or t
  misc_feature (313)..(313): n is a, c, g, or t
  misc_feature (318)..(319): n is a, c, g, or t
  misc_feature (348)..(348): n is a, c, g, or t
  misc_feature (355)..(355): n is a, c, g, or t
  misc_feature (436)..(436): n is a, c, g, or t
ccctcaaagccacagacaggaaatagaaagtggaaaagtaatatctccttttcttttccataaggagtttcaacactgtaactttaaaaagtctatcatattccagcaatatttttttctttgttcctttatagttgtaagttcgtgtggaaanaactactatacggtaagaaatgttactngagataacaacaagctaggctaatacgtgcatgtagattgctctaggttttaaacgtgactagcctgtacttcacnatagttatatgctacagccctccagtatgttcgcattantctcanaactcagggnacccnncacaggacaggtagaacaccctttctganaactgangttggaacgtgaaacggggtggtgaatcgttttggccacagcctgtcgggagggacaagtattgtattgcggagcaccctntgggaccaggcaagagggatgcccaggttcacactctggaccccttagacattttcagtgggtaaggtggagggccactgccagaagctgctgcagtgccctctgggaagtgccacgcgccctcag

SEQ ID NO: 625225 - DNA, 517 bp, Homo sapiens
tcgaggggggcgccccgcaagtatgggtctccgggacttggaacgccccggctgggtggtgtctgggctgtctttccccgcttcttcccacctcggctggtcccgtttcctcctgcgcccagtgcggacctgtctcggctgccctgctgcccatcctcacctgctcccactgcagtgatccctggcctgtgtcacctgggcatgtgtgatgcttcccgacttgccgcgtgggacatgctgatggcacacacatgggcttgtggccctgctgcctggatgtgccacactggtcctgtgctgagttgctcctggtctcccgcctctcccatggcgaccctggaggtagcatttcccaggatggcacggtcccccccatgggggattgggcactatgccaactgcccatgaatgtggactgaaggaaaagaacccaaattgaaatactgccatgaggcggaaaaatttgggccccctttgaatgccctttcaaccctctggaagcaatggtggtgcctgg

SEQ ID NO: 625226 - DNA, 277 bp, Homo sapiens
cttgaacatggacccctatgccagcgttgcatctgtcgtcctcacctcccatatatgcatccagaggaagaatgatgcttgcatttgctgagtgcgtaaaacatcatctccaataattcccaggtcctagccaggtactgttatgtgtcccgtatgacagatgtggtgacgagctcacttgctgactaatagtagtggaaccaggatttgagtctgtgtgactctatatcctgacttcttaacacccgtgcatttaaaaaaaaaattttttttttta

SEQ ID NO: 625227 - DNA, 319 bp, Homo sapiens
tcactaagagtccataatcatgaaatgctagatgggtcgcgagggtggtggcacacacctgtaatcccaggagtttgggaggccgaggcatgcggatcacctgaggtcaacagttagaggccagcctggccaacatggtgaaaccttgtcactacaaaacatagaaaaattagctgggcatggtggtgcatgcctgtagtcgcagctactggggaggctgaggcatgagaatcgcttgaacctgggaggcggaggttgcagtgagccaagatcacgccacgacactctagcctaggggacagagcgagactccaatctc

SEQ ID NO: 625228 - DNA, 150 bp, Homo sapiens
tttgaccacccgtggaaactgttacacagctgcaatgcgaaataccaaacctatgaaccaagtgtggttggagtgatgtgttggcagcatatagatcctctggaagttgcacagccacagcttctcagcacagagtgggactgcttcatt

SEQ ID NO: 625229 - DNA, 327 bp, Homo sapiens
  misc_feature (275)..(275): n is a, c, g, or t
gctggcaaacagccctatgatgtcatccagctgataaaagtgagtgaagcccaagtacacaagggggcagagagcttccctctgtgactcacttttccacagtggatctgaacaacctaggccaagggaaagcactttgttttgcccaagccctagagctaacttagaaagaggcttggagatgctgtgagagaaagataccagggaaaagctgcagatattttcccagacccaaggaatgaggagccagatgccattttttaatctggggtgcntacaaaatcagcctttgtttgggcaacctaggagtgtgggccacacaagctt

SEQ ID NO: 625230 - DNA, 1622 bp, Homo sapiens
attttgaaatatgcttctaaacataatttatataaaatctagtcatgtagcagttcacattagaatcttatgtacatttaaattggtctgtattatcgatgcacaattagaacttgagtctaacattttcaattacttttttcattgaactctactccgaaagaactaccagtatactgaattgagtttttttcccttgtccttcagatcattgttatgtatttacaagtcttagaatgtgaacgtaatcaaaccctggttcaaactgcctggaattacatgaatgacagtcttcgaaccaatgtgtttgttcgatttcaaccagagactatagcatgtgcttgcatctaccttgcagctagagcacttcagattccgttgccaactcgtccccattggtttcttctttttggtactacagaagaggaaatccaggaaatctgcatagaaacacttaggctttataccagaaaaaagccaaactatgaattactggaaaaagaagtagaaaaaagaaaagtagccttacaagaagccaaattaaaagcaaagggattgaatccggatggaactccagccctttcaaccctgggtggattttctccagcctccaagccatcatcaccaagagaagtaaaagctgaagagaaatcaccaatctccattaatgtgaagacagtcaaaaaagaacctgaggatagacaacaggcttccaaaagcccttacaatggtgtaagaaaagacagcaagagaagtagaaatagcagaagtgcaagtcgatcgaggtcaagaacacgatcacgttctagatcacatactccaagaagacactataataataggcggagtcgatctggaacatacagctcgagatcaagaagcaggtcccgcagtcacagtgaaagccctcgaagacatcataatcatggttctcctcaccttaaggccaagcataccagagatgatttaaaaagttcaaacagacatggtcataaaaggaaaaaatctcgttctcgatctcagagcaagtctcgggatcactcagatgcagccaagaaacacaggcatgaaaggggacatcatagggacaggcgtgaacgatctcgctcctttgagaggtcccataaaagcaagcaccatggtggcagtcgctcaggacatggcaggcacaggcgctgactttctcttcctttgagcctgcatcagttcttggttttgcctatctacagtgtgatgtatggactcaatcaaaaacattaaacgcaaactgattaggatttgatttcttgaaaccctctaggtctctagaacactgaggacagtttcttttgaaaagaactatgttaatttttttgcacattaaaatgccctagcagtatctaattaaaaaccatggtcaggttcaattgtactttattatagttgtgtattgtttattgctataagaactggagcgtgaattctgtaaaaatgtatcttatttttatacagataaaattgcagacactgttctatttaagtggttatttgtttaaatgatggtgaatactttcttaacactggtttgtctgcatgtgtaaagatttttacaaggaaataaaatacaaatcttgttttttcta

SEQ ID NO: 625231 - DNA, 488 bp, Homo sapiens
tgcccctggccttgaaactgtggtttgtggactccaaagcccctatccttccacagtgctttctgtcttgttatcacatttccttggaggagagcccagccttggtggaagagccctgctctggctttgtccctcggcatgagatggcaaaggatggtgctgctgggagaccctcacgtctgcacactgggggctgcttgccttctccattcctccttcaagtatctgagcagctcctgtgtgccagctgctggtctacaagatggatcggtccttggagatcatgctgtagcagaggaggcaggctgtagcccacacgccacaaccagccccctgcctgttcacacaaataaagttttattggaatacagccacacccatttcagtgcatattgtctgtggctgctttcctgctacaatagagagttgaatagttgggacagagacctatggcctgcaaagctgaactatttaccatctggctctca

SEQ ID NO: 625232 - DNA, 101 bp, Homo sapiens
  misc_feature (3)..(3): n is a, c, g, or t
tanaaaagctaaaggggaatttctgagaaaagaggaaataagaacataatatgatgcaggagacagaagtcttagaagctgatgatcaaaagaatagggag

SEQ ID NO: 625233 - DNA, 1139 bp, Homo sapiens
  misc_feature (731)..(731): n is a, c, g, or t
  misc_feature (752)..(752): n is a, c, g, or t
tcccttctgtgttaatagtaaagcatgttgcctaataactacaaccctgaccaaatttgggcctggatctcatgggtcacgtggagttttaaatacgatttttaatttacttgggtaattgagctgaatctttagttttcagattacttttttaaacagataggctcttagaacaaattattaaaaacataataccccattggaggggaatctggattaactacccactgttcccaccccccccaacttttgaaaaattttggccatatagaatgcatgaaaaatcagtatgatcttatgaggactttatagtactgtaaatcttaggagcactttagttgttttgtttgtttgtttgttttaccagtcaaatagcagtgggagattgtataccaactttagtgacactgatattagtaagttctgataacccactaccatcggaccagcctggagcacattactttggccagtggaaagtctcttggagagactttgaggtttgtgatgacaaatcatgctatcgttaaagttaaatacatatatatacacacctagaatataagcagaatggaaaagttggcagggatgaattcaagaacattagagtgaatttttttcattacagaattgttagttcctttaggaacttagtctcgtagatgtatatatttaattagcataacttggacagcacaagattaatgctttaacttgtttgcaggagtttnaaaagctggtttctgttgccnatagttggttggaagggaaaatggagatgccacaaataaaattttttggatgtgcaaaacagttttgattttatttcttacaaactataggactccaagccccctgatccttgatcagaactacattaacaccaaaaatcaagttatcaaagcagagaggagggtgctaaaggagttgggattttgtgttcatgtcaagcatcctcataaggtgagttgtagagtacagaaaattgggttcgtaagtattaggacttttctaaaaattttattttatatgaatttaatgtttctatctgagtgttaaacttggtttttaaaaagcattctttttaaggtttcaagctttatatcgaaaaacatatcttttggaagttgaagatttat

SEQ ID NO: 625234 - DNA, 2634 bp, Homo sapiens
  misc_feature (81)..(81): n is a, c, g, or t
  misc_feature (420)..(420): n is a, c, g, or t
  misc_feature (423)..(423): n is a, c, g, or t
gggacccgaatagggtccacagccctgtgttcttcgaatactgtaaagcagccctgctccagattccttgagggtcacttnatattacacattcgtccacacaggacaacaaagtcaccacttccacccgccaaagcgcgctcaggtcggccgccacttcccttggtacacgcggaacgcaagccgcgccgaggctaaaggaagaggccggaatgcagggcgaaggggcgcagagatgctagccaatgctgccacctctattttgggtataagggatcttgtaaagctccgttattcgtgtggctatcacaaacaaggtggtttcgaccggccttggctagagaaggcctcctcagcctctgaggatcccaaggtctgtcgcagcacccaacactcccctcgcaggcccagatgccgagngcngaggcgcggcctggagggactagttggcgcgcggctgcccggcgtggtgacgtcagggcggaagcgcacgcaggcgtgaagcggcccagaacccggcggtcacgggaatatccgtcgcgccgagaacgctggttagtcttgtttcgggttccggctgcgttgggcttgcgtgcggctcgctaagactatggcgtccgggcctcattcgacagctactgctgccgcagccgcctcatcggccgccccaagcgcgggcggctccagctccgggacgacgaccacgacgacgaccacgacgggagggatcctgatcggcgatcgcctgtactcggaagtttcacttaccatcgaccactctctgattccggaggagaggctctcgcccaccccatccatgcaggatgggctcgacctgcccagtgagacggacttacgcatcctgggctgcgagctcatccaggccgccggcattctcctccggctgccgcaggtggcgatggcaacggggcaggtgttgtttcatcgttttttctactccaaatctttcgtcaaacacagtttcgagattgttgctatggcttgtattaatcttgcatcaaaaatcgaagaagcacctagaagaataagagatgtgattaatgtattccaccacctccgccagttaagaggaaaaaggactccaagccccctgatccttgatcagaactacattaacaccaaaaatcaagttatcaaagcagagaggagggtgctaaaggagttgggattttgtgttcatgtcaagcatcctcataagatcattgttatgtatttacaagtcttagaatgtgaacgtaatcaaaccctggttcaaactgcctggaattacatgaatgacagtcttcgaaccaatgtgtttgttcgatttcaaccagagactatagcatgtgcttgcatctaccttgcagctagagcacttcagattccgttgccaactcgtccccattggtttcttctttttggtactacagaagaggaaatccaggaaatctgcatagaaacacttaggctttataccagaaaaaagccaaactatgaattactggaaaaagaagtagaaaaaagaaaagtagccttacaagaagccaaattaaaagcaaagggattgaatccggatggaactccagccctttcaaccctgggtggattttctccagcctccaagccatcatcaccaagagaagtaaaagctgaagagaaatcaccaatctccattaatgtgaagacagtcaaaaaagaacctgaggatagacaacaggcttccaaaagcccttacaatggtgtaagaaaagacagcaagagaagtagaaatagcagaagtgcaagtcgatcgaggtcaagaacacgatcacgttctagatcacatactccaagaagacactataataataggcggagtcgatctggaacatacagctcgagatcaagaagcaggtcccgcagtcacagtgaaagccctcgaagacatcataatcatggttctcctcaccttaaggccaagcataccagagatgatttaaaaagttcaaacagacatggtcataaaaggaaaaaatctcgttctcgatctcagagcaagtctcgggatcactcagatgcagccaagaaacacaggcatgaaaggggacatcatagggacaggcgtgaacgatctcgctcctttgagaggtcccataaaagcaagcaccatggtggcagtcgctcaggacatggcaggcacaggcgctgactttctcttcctttgagcctgcatcagttcttggttttgcctatctacagtgtgatgtatggactcaatcaaaaacattaaacgcaaactgattaggatttgatttcttgaaaccctctaggtctctagaacactgaggacagtttcttttgaaaagaactatgttaatttttttgcacattaaaatgccctagcagtatctaattaaaaaccatggtcaggttcaattgtactttattatagttgtgtattgtttattgctataagaactggagcgtgaattctgtaaaaatgtatcttatttttatacagataaaattgcagacactgttctatttaagtggttatttgtttaaatgatggtgaatactttcttaacactggtttgtctgcatgtgtaaagatttttacaaggaaataaaatacaaatcttgttttttcta

SEQ ID NO: 625235 - DNA, 3014 bp, Homo sapiens
  misc_feature (161)..(161): n is a, c, g, or t
  misc_feature (800)..(800): n is a, c, g, or t
  misc_feature (803)..(803): n is a, c, g, or t
ggtctgcacatgttccgtggcagagctcccgcgatcttcctggcttggatgccttgagcttggcgccgcggcggacctgcagggttctggggactcagccacttgtctgacgggcgtagcagcagactaccacccgagacaagcagtgtgttacgaggttnatccagaagatgaagagcagagcaaaaagcaaatgatagccgtggctttcacgtttaaaaacagttcttaggcagcgccgggtcgcggtcctgtagtcctagctacatcggagggtgaggcgggaggactgctgaagcccgggagttcgaggccagcctgggcaacatagtgagaccttgtctctcaagtcatgtagctttggatggtattttttttcccagtggaggaataaatacgcatttcttctcttcacctgcaattttcactggttgtcccacgcagaatcagagtcaggaaaactgtacgtagagaagcttttatcattttatatgttcctgtcttacaaagctccctctggcttaaggctggtggcccacatcttggtacacgcggaacgcaagccgcgccgaggctaaaggaagaggccggaatgcagggcgaaggggcgcagagatgctagccaatgctgccacctctattttgggtataagggatcttgtaaagctccgttattcgtgtggctatcacaaacaaggtggtttcgaccggccttggctagagaaggcctcctcagcctctgaggatcccaaggtctgtcgcagcacccaacactcccctcgcaggcccagatgccgagngcngaggcgcggcctggagggactagttggcgcgcggctgcccggcgtggtgacgtcagggcggaagcgcacgcaggcgtgaagcggcccagaacccggcggtcacgggaatatccgtcgcgccgagaacgctggttagtcttgtttcgggttccggctgcgttgggcttgcgtgcggctcgctaagactatggcgtccgggcctcattcgacagctactgctgccgcagccgcctcatcggccgccccaagcgcgggcggctccagctccgggacgacgaccacgacgacgaccacgacgggagggatcctgatcggcgatcgcctgtactcggaagtttcacttaccatcgaccactctctgattccggaggagaggctctcgcccaccccatccatgcaggatgggctcgacctgcccagtgagacggacttacgcatcctgggctgcgagctcatccaggccgccggcattctcctccggctgccgcaggtggcgatggcaacggggcaggtgttgtttcatcgttttttctactccaaatctttcgtcaaacacagtttcgagattgttgctatggcttgtattaatcttgcatcaaaaatcgaagaagcacctagaagaataagagatgtgattaatgtattccaccacctccgccagttaagaggaaaaaggactccaagccccctgatccttgatcagaactacattaacaccaaaaatcaagttatcaaagcagagaggagggtgctaaaggagttgggattttgtgttcatgtcaagcatcctcataagatcattgttatgtatttacaagtcttagaatgtgaacgtaatcaaaccctggttcaaactgcctggaattacatgaatgacagtcttcgaaccaatgtgtttgttcgatttcaaccagagactatagcatgtgcttgcatctaccttgcagctagagcacttcagattccgttgccaactcgtccccattggtttcttctttttggtactacagaagaggaaatccaggaaatctgcatagaaacacttaggctttataccagaaaaaagccaaactatgaattactggaaaaagaagtagaaaaaagaaaagtagccttacaagaagccaaattaaaagcaaagggattgaatccggatggaactccagccctttcaaccctgggtggattttctccagcctccaagccatcatcaccaagagaagtaaaagctgaagagaaatcaccaatctccattaatgtgaagacagtcaaaaaagaacctgaggatagacaacaggcttccaaaagcccttacaatggtgtaagaaaagacagcaagagaagtagaaatagcagaagtgcaagtcgatcgaggtcaagaacacgatcacgttctagatcacatactccaagaagacactataataataggcggagtcgatctggaacatacagctcgagatcaagaagcaggtcccgcagtcacagtgaaagccctcgaagacatcataatcatggttctcctcaccttaaggccaagcataccagagatgatttaaaaagttcaaacagacatggtcataaaaggaaaaaatctcgttctcgatctcagagcaagtctcgggatcactcagatgcagccaagaaacacaggcatgaaaggggacatcatagggacaggcgtgaacgatctcgctcctttgagaggtcccataaaagcaagcaccatggtggcagtcgctcaggacatggcaggcacaggcgctgactttctcttcctttgagcctgcatcagttcttggttttgcctatctacagtgtgatgtatggactcaatcaaaaacattaaacgcaaactgattaggatttgatttcttgaaaccctctaggtctctagaacactgaggacagtttcttttgaaaagaactatgttaatttttttgcacattaaaatgccctagcagtatctaattaaaaaccatggtcaggttcaattgtactttattatagttgtgtattgtttattgctataagaactggagcgtgaattctgtaaaaatgtatcttatttttatacagataaaattgcagacactgttctatttaagtggttatttgtttaaatgatggtgaatactttcttaacactggtttgtctgcatgtgtaaagatttttacaaggaaataaaatacaaatcttgttttttcta

SEQ ID NO: 625236 - DNA, 4183 bp, Homo sapiens
  misc_feature (81)..(81): n is a, c, g, or t
  misc_feature (420)..(420): n is a, c, g, or t
  misc_feature (423)..(423): n is a, c, g, or t
gggacccgaatagggtccacagccctgtgttcttcgaatactgtaaagcagccctgctccagattccttgagggtcacttnatattacacattcgtccacacaggacaacaaagtcaccacttccacccgccaaagcgcgctcaggtcggccgccacttcccttggtacacgcggaacgcaagccgcgccgaggctaaaggaagaggccggaatgcagggcgaaggggcgcagagatgctagccaatgctgccacctctattttgggtataagggatcttgtaaagctccgttattcgtgtggctatcacaaacaaggtggtttcgaccggccttggctagagaaggcctcctcagcctctgaggatcccaaggtctgtcgcagcacccaacactcccctcgcaggcccagatgccgagngcngaggcgcggcctggagggactagttggcgcgcggctgcccggcgtggtgacgtcagggcggaagcgcacgcaggcgtgaagcggcccagaacccggcggtcacgggaatatccgtcgcgccgagaacgctggttagtcttgtttcgggttccggctgcgttgggcttgcgtgcggctcgctaagactatggcgtccgggcctcattcgacagctactgctgccgcagccgcctcatcggccgccccaagcgcgggcggctccagctccgggacgacgaccacgacgacgaccacgacgggagggatcctgatcggcgatcgcctgtactcggaagtttcacttaccatcgaccactctctgattccggaggagaggctctcgcccaccccatccatgcaggatgggctcgacctgcccagtgagacggacttacgcatcctgggctgcgagctcatccaggccgccggcattctcctccggctgccgcaggtggcgatggcaacggggcaggtgttgtttcatcgttttttctactccaaatctttcgtcaaacacagtttcgagattgttgctatggcttgtattaatcttgcatcaaaaatcgaagaagcacctagaagaataagagatgtgattaatgtattccaccacctccgccagttaagaggaaaaaggactccaagccccctgatccttgatcagaactacattaacaccaaaaatcaagttatcaaagcagagaggagggtgctaaaggagttgggattttgtgttcatgtcaagcatcctcataagatcattgttatgtatttacaagtcttagaatgtgaacgtaatcaaaccctggttcaaactgcctgggtagtccatgatggtaagtcatagaactctgccctctgcacttcagcccatgacctcaggatggcctgattggctaccctgctctccagccaatccagtgcaagctctcatccgagattcactgaagtggtccatatccatctggcagcatcttctagttctgtcggggtgtcaaaaggatttgtatatttgcttctagaagtaactatttgacatgcctatgtatttaatgtatacttgtaactatcaaaatgaatagttcatttttgatagatttgttgtgcagccattatgaattaaatggtttattaggagtttgactaaatttttatttttagtgtgtatagcatgaatactaccaaaggagacgacaaacttgcagcttaaaatgggcaccagttcccacactggcttaatttatataactgcttggctgtattgcgggtaataatattagaagcaagaagcacttcatttttaaaagagatgttactataatattgcttaaatgctttagcacttggacttcttgagatgcagatgtgtgatttggagtgctggcttatttaaaggtcaagccaaggagtttgtggttcagccacaactactgtttcctaagactattgatgtgaaggacttagtgaagtaatttttatattctgggcttcccagcaagatgtcctttttatgactgccatgcttcttttggactcagtaaatatttgtaatgttagaaaagtctcattatttttataaaatgcatgacattttaagtatgtgttgcataaaatggattatagcagttctcatggtttaggatttttaagaaatagtccatttaatttcagcttaaccttttaaatgatctgtaaaatttctttgatagtttaggaatgttgtggggagggttcattaataaaagttcagcaattttttaactgaaatagtttatctcttttacctagtcacaaaaaaggtatgtaaacaaggccattatatgtgtttattgctctttatttccctatctagattttctaagtatcttagctttcttaatataagtttaacttggtacttactgaaaatgcctttttacccctgttaacggtattttgagcttttgaaaagaacttggttgacactgcttttattgtggataaaggagagatggtcagtaattaatggcttgaagtattattggagtggtttatcatttctgaaactaatcgtgtcagaattgactttgaaaagcattgctttttacagaaatatattaactttttaggagtaatttctagtttggattgtaatatgaaataatttaaaagggcttcgctcatatataggaaaatcgcatatggtcctagtattaaattcttattgcttactgatttttttgagttaagagttgttatatgctagaatatgaggatgtgaatataaataagagaagaaaaaagaataaagtagattgagtctccaattttatgtaagcttcagaagaactggtttgtttacatgcaagcttatagttgaaatatttttcaggaattacatgaatgacagtcttcgaaccaatgtgtttgttcgatttcaaccagagactatagcatgtgcttgcatctaccttgcagctagagcacttcagattccgttgccaactcgtccccattggtttcttctttttggtactacagaagaggaaatccaggaaatctgcatagaaacacttaggctttataccagaaaaaagccaaactatgaattactggaaaaagaagtagaaaaaagaaaagtagccttacaagaagccaaattaaaagcaaagggattgaatccggatggaactccagccctttcaaccctgggtggattttctccagcctccaagccatcatcaccaagagaagtaaaagctgaagagaaatcaccaatctccattaatgtgaagacagtcaaaaaagaacctgaggatagacaacaggcttccaaaagcccttacaatggtgtaagaaaagacagcaagagaagtagaaatagcagaagtgcaagtcgatcgaggtcaagaacacgatcacgttctagatcacatactccaagaagacactataataataggcggagtcgatctggaacatacagctcgagatcaagaagcaggtcccgcagtcacagtgaaagccctcgaagacatcataatcatggttctcctcaccttaaggccaagcataccagagatgatttaaaaagttcaaacagacatggtcataaaaggaaaaaatctcgttctcgatctcagagcaagtctcgggatcactcagatgcagccaagaaacacaggcatgaaaggggacatcatagggacaggcgtgaacgatctcgctcctttgagaggtcccataaaagcaagcaccatggtggcagtcgctcaggacatggcaggcacaggcgctgactttctcttcctttgagcctgcatcagttcttggttttgcctatctacagtgtgatgtatggactcaatcaaaaacattaaacgcaaactgattaggatttgatttcttgaaaccctctaggtctctagaacactgaggacagtttcttttgaaaagaactatgttaatttttttgcacattaaaatgccctagcagtatctaattaaaaaccatggtcaggttcaattgtactttattatagttgtgtattgtttattgctataagaactggagcgtgaattctgtaaaaatgtatcttatttttatacagataaaattgcagacactgttctatttaagtggttatttgtttaaatgatggtgaatactttcttaacactggtttgtctgcatgtgtaaagatttttacaaggaaataaaatacaaatcttgttttttcta

SEQ ID NO: 625237 - DNA, 219 bp, Homo sapiens
gtcggtacctacgaccgaatatgccatctcaacagcctctgagaatggggctgtgtgtgcctaacgtgtcgccatcaggtgtcagagtctcccatgtgataggatgcagacgctcaatccatgtgccctgaaacccggggcataatccaaaagcatcattgtgagctctcggcataggggcaatcgcgtactgaagttcgtgcgcaatgtgccctggga

SEQ ID NO: 625238 - DNA, 4258 bp, Homo sapiens
  misc_feature (81)..(81): n is a, c, g, or t
  misc_feature (420)..(420): n is a, c, g, or t
  misc_feature (423)..(423): n is a, c, g, or t
gggacccgaatagggtccacagccctgtgttcttcgaatactgtaaagcagccctgctccagattccttgagggtcacttnatattacacattcgtccacacaggacaacaaagtcaccacttccacccgccaaagcgcgctcaggtcggccgccacttcccttggtacacgcggaacgcaagccgcgccgaggctaaaggaagaggccggaatgcagggcgaaggggcgcagagatgctagccaatgctgccacctctattttgggtataagggatcttgtaaagctccgttattcgtgtggctatcacaaacaaggtggtttcgaccggccttggctagagaaggcctcctcagcctctgaggatcccaaggtctgtcgcagcacccaacactcccctcgcaggcccagatgccgagngcngaggcgcggcctggagggactagttggcgcgcggctgcccggcgtggtgacgtcagggcggaagcgcacgcaggcgtgaagcggcccagaacccggcggtcacgggaatatccgtcgcgccgagaacgctggttagtcttgtttcgggttccggctgcgttgggcttgcgtgcggctcgctaagactatggcgtccgggcctcattcgacagctactgctgccgcagccgcctcatcggccgccccaagcgcgggcggctccagctccgggacgacgaccacgacgacgaccacgacgggagggatcctgatcggcgatcgcctgtactcggaagtttcacttaccatcgaccactctctgattccggaggagaggctctcgcccaccccatccatgcaggatgggctcgacctgcccagtgagacggacttacgcatcctgggctgcgagctcatccaggccgccggcattctcctccggctgccgcaggtggcgatggcaacggggcaggtgttgtttcatcgttttttctactccaaatctttcgtcaaacacagtttcgagattgttgctatggcttgtattaatcttgcatcaaaaatcgaagaagcacctagaagaataagagatgtgattaatgtattccaccacctccgccagttaagaggaaaaagcgaccagctacatttaccaaagcctgggtgatgtggagtggtacatagagatgaagctgtcgtcatggcaacaaggactccaagccccctgatccttgatcagaactacattaacaccaaaaatcaagttatcaaagcagagaggagggtgctaaaggagttgggattttgtgttcatgtcaagcatcctcataagatcattgttatgtatttacaagtcttagaatgtgaacgtaatcaaaccctggttcaaactgcctgggtagtccatgatggtaagtcatagaactctgccctctgcacttcagcccatgacctcaggatggcctgattggctaccctgctctccagccaatccagtgcaagctctcatccgagattcactgaagtggtccatatccatctggcagcatcttctagttctgtcggggtgtcaaaaggatttgtatatttgcttctagaagtaactatttgacatgcctatgtatttaatgtatacttgtaactatcaaaatgaatagttcatttttgatagatttgttgtgcagccattatgaattaaatggtttattaggagtttgactaaatttttatttttagtgtgtatagcatgaatactaccaaaggagacgacaaacttgcagcttaaaatgggcaccagttcccacactggcttaatttatataactgcttggctgtattgcgggtaataatattagaagcaagaagcacttcatttttaaaagagatgttactataatattgcttaaatgctttagcacttggacttcttgagatgcagatgtgtgatttggagtgctggcttatttaaaggtcaagccaaggagtttgtggttcagccacaactactgtttcctaagactattgatgtgaaggacttagtgaagtaatttttatattctgggcttcccagcaagatgtcctttttatgactgccatgcttcttttggactcagtaaatatttgtaatgttagaaaagtctcattatttttataaaatgcatgacattttaagtatgtgttgcataaaatggattatagcagttctcatggtttaggatttttaagaaatagtccatttaatttcagcttaaccttttaaatgatctgtaaaatttctttgatagtttaggaatgttgtggggagggttcattaataaaagttcagcaattttttaactgaaatagtttatctcttttacctagtcacaaaaaaggtatgtaaacaaggccattatatgtgtttattgctctttatttccctatctagattttctaagtatcttagctttcttaatataagtttaacttggtacttactgaaaatgcctttttacccctgttaacggtattttgagcttttgaaaagaacttggttgacactgcttttattgtggataaaggagagatggtcagtaattaatggcttgaagtattattggagtggtttatcatttctgaaactaatcgtgtcagaattgactttgaaaagcattgctttttacagaaatatattaactttttaggagtaatttctagtttggattgtaatatgaaataatttaaaagggcttcgctcatatataggaaaatcgcatatggtcctagtattaaattcttattgcttactgatttttttgagttaagagttgttatatgctagaatatgaggatgtgaatataaataagagaagaaaaaagaataaagtagattgagtctccaattttatgtaagcttcagaagaactggtttgtttacatgcaagcttatagttgaaatatttttcaggaattacatgaatgacagtcttcgaaccaatgtgtttgttcgatttcaaccagagactatagcatgtgcttgcatctaccttgcagctagagcacttcagattccgttgccaactcgtccccattggtttcttctttttggtactacagaagaggaaatccaggaaatctgcatagaaacacttaggctttataccagaaaaaagccaaactatgaattactggaaaaagaagtagaaaaaagaaaagtagccttacaagaagccaaattaaaagcaaagggattgaatccggatggaactccagccctttcaaccctgggtggattttctccagcctccaagccatcatcaccaagagaagtaaaagctgaagagaaatcaccaatctccattaatgtgaagacagtcaaaaaagaacctgaggatagacaacaggcttccaaaagcccttacaatggtgtaagaaaagacagcaagagaagtagaaatagcagaagtgcaagtcgatcgaggtcaagaacacgatcacgttctagatcacatactccaagaagacactataataataggcggagtcgatctggaacatacagctcgagatcaagaagcaggtcccgcagtcacagtgaaagccctcgaagacatcataatcatggttctcctcaccttaaggccaagcataccagagatgatttaaaaagttcaaacagacatggtcataaaaggaaaaaatctcgttctcgatctcagagcaagtctcgggatcactcagatgcagccaagaaacacaggcatgaaaggggacatcatagggacaggcgtgaacgatctcgctcctttgagaggtcccataaaagcaagcaccatggtggcagtcgctcaggacatggcaggcacaggcgctgactttctcttcctttgagcctgcatcagttcttggttttgcctatctacagtgtgatgtatggactcaatcaaaaacattaaacgcaaactgattaggatttgatttcttgaaaccctctaggtctctagaacactgaggacagtttcttttgaaaagaactatgttaatttttttgcacattaaaatgccctagcagtatctaattaaaaaccatggtcaggttcaattgtactttattatagttgtgtattgtttattgctataagaactggagcgtgaattctgtaaaaatgtatcttatttttatacagataaaattgcagacactgttctatttaagtggttatttgtttaaatgatggtgaatactttcttaacactggtttgtctgcatgtgtaaagatttttacaaggaaataaaatacaaatcttgttttttcta

SEQ ID NO: 625239 - DNA, 288 bp, Homo sapiens
gcgaattcactagtgattcagccatgttggccgggctggtctcggactcctgacctcaggtgatctgtctgcctcggcctcccagggtgctgtgattacaggcgtgagccaacgcacccggctgactaatttttgtatttatagtagagacagggtttcaccatgttggccaggctggtctcgaactgctgacctcatgatctgcccgcctcggcctcccaaagtgctgggattacaggcgtgagccaccgtgcccggccaacatggctgaatcgaattcccgcggtc

SEQ ID NO: 625240 - DNA, 543 bp, Homo sapiens
agcggcgcctttaataggttccatatgaactttaaatgtagttttttccaattctgtgaagaaaggcattggtagcttgataggggatggcattgaatctgtaaattaccttgggcagtatggccattttcaccatattgattcttcctacccatgagcatggaatgttcttccattttgtttgtatcctcttttatttccttgagcagtggtttgtagttctccttgaagaggtccttcacatcccttgtaagttggattcctaggtattttattctctttgaagcaattgtgaatgggaattcactcatgatttggctctctgtttgtctgttgttggtgtataagaatgcttgtgatttatgtacattgattttgtatcctgagactttgctgaagttgcttatcagcttaaggagattttgtgctgagacaatggggttttctagatatacaatcatgtcgtctgcaaagagggacaatttgaacccatctctttggagttaaattcattatttatctaggtattggctattatcagct

SEQ ID NO: 625241 - DNA, 4330 bp, Homo sapiens
  misc_feature (81)..(81): n is a, c, g, or t
  misc_feature (420)..(420): n is a, c, g, or t
  misc_feature (423)..(423): n is a, c, g, or t
  misc_feature (1205)..(1205): n is a, c, g, or t
gggacccgaatagggtccacagccctgtgttcttcgaatactgtaaagcagccctgctccagattccttgagggtcacttnatattacacattcgtccacacaggacaacaaagtcaccacttccacccgccaaagcgcgctcaggtcggccgccacttcccttggtacacgcggaacgcaagccgcgccgaggctaaaggaagaggccggaatgcagggcgaaggggcgcagagatgctagccaatgctgccacctctattttgggtataagggatcttgtaaagctccgttattcgtgtggctatcacaaacaaggtggtttcgaccggccttggctagagaaggcctcctcagcctctgaggatcccaaggtctgtcgcagcacccaacactcccctcgcaggcccagatgccgagngcngaggcgcggcctggagggactagttggcgcgcggctgcccggcgtggtgacgtcagggcggaagcgcacgcaggcgtgaagcggcccagaacccggcggtcacgggaatatccgtcgcgccgagaacgctggttagtcttgtttcgggttccggctgcgttgggcttgcgtgcggctcgctaagactatggcgtccgggcctcattcgacagctactgctgccgcagccgcctcatcggccgccccaagcgcgggcggctccagctccgggacgacgaccacgacgacgaccacgacgggagggatcctgatcggcgatcgcctgtactcggaagtttcacttaccatcgaccactctctgattccggaggagaggctctcgcccaccccatccatgcaggatgggctcgacctgcccagtgagacggacttacgcatcctgggctgcgagctcatccaggccgccggcattctcctccggctgccgcaggtggcgatggcaacggggcaggtgttgtttcatcgttttttctactccaaatctttcgtcaaacacagtttcgagattgttgctatggcttgtattaatcttgcatcaaaaatcgaagaagcacctagaagaataagagatgtgattaatgtattccaccacctccgccagttaagaggaaaaagcgaccagctacatttaccaaagcctgggtgatgtggagtggtacatagagatgaagctgtcgtcatggcaacatgagtgaagtatcgaaaatccccaaggagaagcnagtgctctgagaataggtcactggaatcggggactaacaggactccaagccccctgatccttgatcagaactacattaacaccaaaaatcaagttatcaaagcagagaggagggtgctaaaggagttgggattttgtgttcatgtcaagcatcctcataagatcattgttatgtatttacaagtcttagaatgtgaacgtaatcaaaccctggttcaaactgcctgggtagtccatgatggtaagtcatagaactctgccctctgcacttcagcccatgacctcaggatggcctgattggctaccctgctctccagccaatccagtgcaagctctcatccgagattcactgaagtggtccatatccatctggcagcatcttctagttctgtcggggtgtcaaaaggatttgtatatttgcttctagaagtaactatttgacatgcctatgtatttaatgtatacttgtaactatcaaaatgaatagttcatttttgatagatttgttgtgcagccattatgaattaaatggtttattaggagtttgactaaatttttatttttagtgtgtatagcatgaatactaccaaaggagacgacaaacttgcagcttaaaatgggcaccagttcccacactggcttaatttatataactgcttggctgtattgcgggtaataatattagaagcaagaagcacttcatttttaaaagagatgttactataatattgcttaaatgctttagcacttggacttcttgagatgcagatgtgtgatttggagtgctggcttatttaaaggtcaagccaaggagtttgtggttcagccacaactactgtttcctaagactattgatgtgaaggacttagtgaagtaatttttatattctgggcttcccagcaagatgtcctttttatgactgccatgcttcttttggactcagtaaatatttgtaatgttagaaaagtctcattatttttataaaatgcatgacattttaagtatgtgttgcataaaatggattatagcagttctcatggtttaggatttttaagaaatagtccatttaatttcagcttaaccttttaaatgatctgtaaaatttctttgatagtttaggaatgttgtggggagggttcattaataaaagttcagcaattttttaactgaaatagtttatctcttttacctagtcacaaaaaaggtatgtaaacaaggccattatatgtgtttattgctctttatttccctatctagattttctaagtatcttagctttcttaatataagtttaacttggtacttactgaaaatgcctttttacccctgttaacggtattttgagcttttgaaaagaacttggttgacactgcttttattgtggataaaggagagatggtcagtaattaatggcttgaagtattattggagtggtttatcatttctgaaactaatcgtgtcagaattgactttgaaaagcattgctttttacagaaatatattaactttttaggagtaatttctagtttggattgtaatatgaaataatttaaaagggcttcgctcatatataggaaaatcgcatatggtcctagtattaaattcttattgcttactgatttttttgagttaagagttgttatatgctagaatatgaggatgtgaatataaataagagaagaaaaaagaataaagtagattgagtctccaattttatgtaagcttcagaagaactggtttgtttacatgcaagcttatagttgaaatatttttcaggaattacatgaatgacagtcttcgaaccaatgtgtttgttcgatttcaaccagagactatagcatgtgcttgcatctaccttgcagctagagcacttcagattccgttgccaactcgtccccattggtttcttctttttggtactacagaagaggaaatccaggaaatctgcatagaaacacttaggctttataccagaaaaaagccaaactatgaattactggaaaaagaagtagaaaaaagaaaagtagccttacaagaagccaaattaaaagcaaagggattgaatccggatggaactccagccctttcaaccctgggtggattttctccagcctccaagccatcatcaccaagagaagtaaaagctgaagagaaatcaccaatctccattaatgtgaagacagtcaaaaaagaacctgaggatagacaacaggcttccaaaagcccttacaatggtgtaagaaaagacagcaagagaagtagaaatagcagaagtgcaagtcgatcgaggtcaagaacacgatcacgttctagatcacatactccaagaagacactataataataggcggagtcgatctggaacatacagctcgagatcaagaagcaggtcccgcagtcacagtgaaagccctcgaagacatcataatcatggttctcctcaccttaaggccaagcataccagagatgatttaaaaagttcaaacagacatggtcataaaaggaaaaaatctcgttctcgatctcagagcaagtctcgggatcactcagatgcagccaagaaacacaggcatgaaaggggacatcatagggacaggcgtgaacgatctcgctcctttgagaggtcccataaaagcaagcaccatggtggcagtcgctcaggacatggcaggcacaggcgctgactttctcttcctttgagcctgcatcagttcttggttttgcctatctacagtgtgatgtatggactcaatcaaaaacattaaacgcaaactgattaggatttgatttcttgaaaccctctaggtctctagaacactgaggacagtttcttttgaaaagaactatgttaatttttttgcacattaaaatgccctagcagtatctaattaaaaaccatggtcaggttcaattgtactttattatagttgtgtattgtttattgctataagaactggagcgtgaattctgtaaaaatgtatcttatttttatacagataaaattgcagacactgttctatttaagtggttatttgtttaaatgatggtgaatactttcttaacactggtttgtctgcatgtgtaaagatttttacaaggaaataaaatacaaatcttgttttttcta

SEQ ID NO: 625242 - DNA, 4128 bp, Homo sapiens
  misc_feature (81)..(81): n is a, c, g, or t
  misc_feature (420)..(420): n is a, c, g, or t
  misc_feature (423)..(423): n is a, c, g, or t
gggacccgaatagggtccacagccctgtgttcttcgaatactgtaaagcagccctgctccagattccttgagggtcacttnatattacacattcgtccacacaggacaacaaagtcaccacttccacccgccaaagcgcgctcaggtcggccgccacttcccttggtacacgcggaacgcaagccgcgccgaggctaaaggaagaggccggaatgcagggcgaaggggcgcagagatgctagccaatgctgccacctctattttgggtataagggatcttgtaaagctccgttattcgtgtggctatcacaaacaaggtggtttcgaccggccttggctagagaaggcctcctcagcctctgaggatcccaaggtctgtcgcagcacccaacactcccctcgcaggcccagatgccgagngcngaggcgcggcctggagggactagttggcgcgcggctgcccggcgtggtgacgtcagggcggaagcgcacgcaggcgtgaagcggcccagaacccggcggtcacgggaatatccgtcgcgccgagaacgctggttagtcttgtttcgggttccggctgcgttgggcttgcgtgcggctcgctaagactatggcgtccgggcctcattcgacagctactgctgccgcagccgcctcatcggccgccccaagcgcgggcggctccagctccgggacgacgaccacgacgacgaccacgacgggagggatcctgatcggcgatcgcctgtactcggaagtttcacttaccatcgaccactctctgattccggaggagaggctctcgcccaccccatccatgcaggatgggctcgacctgcccagtgagacggacttacgcatcctgggctgcgagctcatccaggccgccggcattctcctccggctgccgcaggtggcgatggcaacggggcaggtgttgtttcatcgttttttctactccaaatctttcgtcaaacacagtttcgagattgttgctatggcttgtattaatcttgcatcaaaaatcgaagaagcacctagaagaataagagatgtgattaatgtattccaccacctccgccagttaagaggaaaaaggactccaagccccctgatccttgatcagaactacattaacaccaaaaatcaagttatcaaagcagagaggagggtgctaaaggagttgggattttgtgttcatgtcaagcatcctcataagatcattgttatgtatttacaagtcttagaatgtgaacgtaatcaaaccctggttcaaactgcctgggtagtccatgatggtaagtcatagaactctgccctctgcacttcagcccatgacctcaggatggcctgattggctaccctgctctccagccaatccagtgcaagctctcatccgagattcactgaagtggtccatatccatctggcagcatcttctagttctgtcggggtgtcaaaaggatttgtatatttgcttctagaagtaactatttgacatgcctatgtatttaatgtatacttgtaactatcaaaatgaatagttcatttttgatagatttgttgtgcagccattatgaattaaatggtttattaggagtttgactaaatttttatttttagtgtgtatagcatgaatactaccaaaggagacgacaaacttgcagcttaaaatgggcaccagttcccacactggcttaatttatataactgcttggctgtattgcgggtaataatattagaagcaagaagcacttcatttttaaaagagatgttactataatattgcttaaatgctttagcacttggacttcttgagatgcagatgtgtgatttggagtgctggcttatttaaaggtcaagccaaggagtttgtggttcagccacaactactgtttcctaagactattgatgtgaaggacttagtgaagtaatttttatattctgggcttcccagcaagatgtcctttttatgactgccatgcttcttttggactcagtaaatatttgtaatgttagaaaagtctcattatttttataaaatgcatgacattttaagtatgtgttgcataaaatggattatagcagttctcatggtttaggatttttaagaaatagtccatttaatttcagcttaaccttttaaatgatctgtaaaatttctttgatagtttaggaatgttgtggggagggttcattaataaaagttcagcaattttttaactgaaatagtttatctcttttacctagtcacactagattttctaagtatcttagctttcttaatataagtttaacttggtacttactgaaaatgcctttttacccctgttaacggtattttgagcttttgaaaagaacttggttgacactgcttttattgtggataaaggagagatggtcagtaattaatggcttgaagtattattggagtggtttatcatttctgaaactaatcgtgtcagaattgactttgaaaagcattgctttttacagaaatatattaactttttaggagtaatttctagtttggattgtaatatgaaataatttaaaagggcttcgctcatatataggaaaatcgcatatggtcctagtattaaattcttattgcttactgatttttttgagttaagagttgttatatgctagaatatgaggatgtgaatataaataagagaagaaaaaagaataaagtagattgagtctccaattttatgtaagcttcagaagaactggtttgtttacatgcaagcttatagttgaaatatttttcaggaattacatgaatgacagtcttcgaaccaatgtgtttgttcgatttcaaccagagactatagcatgtgcttgcatctaccttgcagctagagcacttcagattccgttgccaactcgtccccattggtttcttctttttggtactacagaagaggaaatccaggaaatctgcatagaaacacttaggctttataccagaaaaaagccaaactatgaattactggaaaaagaagtagaaaaaagaaaagtagccttacaagaagccaaattaaaagcaaagggattgaatccggatggaactccagccctttcaaccctgggtggattttctccagcctccaagccatcatcaccaagagaagtaaaagctgaagagaaatcaccaatctccattaatgtgaagacagtcaaaaaagaacctgaggatagacaacaggcttccaaaagcccttacaatggtgtaagaaaagacagcaagagaagtagaaatagcagaagtgcaagtcgatcgaggtcaagaacacgatcacgttctagatcacatactccaagaagacactataataataggcggagtcgatctggaacatacagctcgagatcaagaagcaggtcccgcagtcacagtgaaagccctcgaagacatcataatcatggttctcctcaccttaaggccaagcataccagagatgatttaaaaagttcaaacagacatggtcataaaaggaaaaaatctcgttctcgatctcagagcaagtctcgggatcactcagatgcagccaagaaacacaggcatgaaaggggacatcatagggacaggcgtgaacgatctcgctcctttgagaggtcccataaaagcaagcaccatggtggcagtcgctcaggacatggcaggcacaggcgctgactttctcttcctttgagcctgcatcagttcttggttttgcctatctacagtgtgatgtatggactcaatcaaaaacattaaacgcaaactgattaggatttgatttcttgaaaccctctaggtctctagaacactgaggacagtttcttttgaaaagaactatgttaatttttttgcacattaaaatgccctagcagtatctaattaaaaaccatggtcaggttcaattgtactttattatagttgtgtattgtttattgctataagaactggagcgtgaattctgtaaaaatgtatcttatttttatacagataaaattgcagacactgttctatttaagtggttatttgtttaaatgatggtgaatactttcttaacactggtttgtctgcatgtgtaaagatttttacaaggaaataaaatacaaatcttgttttttcta

SEQ ID NO: 625243 - DNA, 3927 bp, Homo sapiens
  misc_feature (731)..(731): n is a, c, g, or t
  misc_feature (752)..(752): n is a, c, g, or t
tcccttctgtgttaatagtaaagcatgttgcctaataactacaaccctgaccaaatttgggcctggatctcatgggtcacgtggagttttaaatacgatttttaatttacttgggtaattgagctgaatctttagttttcagattacttttttaaacagataggctcttagaacaaattattaaaaacataataccccattggaggggaatctggattaactacccactgttcccaccccccccaacttttgaaaaattttggccatatagaatgcatgaaaaatcagtatgatcttatgaggactttatagtactgtaaatcttaggagcactttagttgttttgtttgtttgtttgttttaccagtcaaatagcagtgggagattgtataccaactttagtgacactgatattagtaagttctgataacccactaccatcggaccagcctggagcacattactttggccagtggaaagtctcttggagagactttgaggtttgtgatgacaaatcatgctatcgttaaagttaaatacatatatatacacacctagaatataagcagaatggaaaagttggcagggatgaattcaagaacattagagtgaatttttttcattacagaattgttagttcctttaggaacttagtctcgtagatgtatatatttaattagcataacttggacagcacaagattaatgctttaacttgtttgcaggagtttnaaaagctggtttctgttgccnatagttggttggaagggaaaatggagatgccacaaataaaattttttggatgtgcaaaacagttttgattttatttcttacaaactataggactccaagccccctgatccttgatcagaactacattaacaccaaaaatcaagttatcaaagcagagaggagggtgctaaaggagttgggattttgtgttcatgtcaagcatcctcataagatcattgttatgtatttacaagtcttagaatgtgaacgtaatcaaaccctggttcaaactgcctgggtagtccatgatggtaagtcatagaactctgccctctgcacttcagcccatgacctcaggatggcctgattggctaccctgctctccagccaatccagtgcaagctctcatccgagattcactgaagtggtccatatccatctggcagcatcttctagttctgtcggggtgtcaaaaggatttgtatatttgcttctagaagtaactatttgacatgcctatgtatttaatgtatacttgtaactatcaaaatgaatagttcatttttgatagatttgttgtgcagccattatgaattaaatggtttattaggagtttgactaaatttttatttttagtgtgtatagcatgaatactaccaaaggagacgacaaacttgcagcttaaaatgggcaccagttcccacactggcttaatttatataactgcttggctgtattgcgggtaataatattagaagcaagaagcacttcatttttaaaagagatgttactataatattgcttaaatgctttagcacttggacttcttgagatgcagatgtgtgatttggagtgctggcttatttaaaggtcaagccaaggagtttgtggttcagccacaactactgtttcctaagactattgatgtgaaggacttagtgaagtaatttttatattctgggcttcccagcaagatgtcctttttatgactgccatgcttcttttggactcagtaaatatttgtaatgttagaaaagtctcattatttttataaaatgcatgacattttaagtatgtgttgcataaaatggattatagcagttctcatggtttaggatttttaagaaatagtccatttaatttcagcttaaccttttaaatgatctgtaaaatttctttgatagtttaggaatgttgtggggagggttcattaataaaagttcagcaattttttaactgaaatagtttatctcttttacctagtcacaaaaaaggtatgtaaacaaggccattatatgtgtttattgctctttatttccctatctagattttctaagtatcttagctttcttaatataagtttaacttggtacttactgaaaatgcctttttacccctgttaacggtattttgagcttttgaaaagaacttggttgacactgcttttattgtggataaaggagagatggtcagtaattaatggcttgaagtattattggagtggtttatcatttctgaaactaatcgtgtcagaattgactttgaaaagcattgctttttacagaaatatattaactttttaggagtaatttctagtttggattgtaatatgaaataatttaaaagggcttcgctcatatataggaaaatcgcatatggtcctagtattaaattcttattgcttactgatttttttgagttaagagttgttatatgctagaatatgaggatgtgaatataaataagagaagaaaaaagaataaagtagattgagtctccaattttatgtaagcttcagaagaactggtttgtttacatgcaagcttatagttgaaatatttttcaggaattacatgaatgacagtcttcgaaccaatgtgtttgttcgatttcaaccagagactatagcatgtgcttgcatctaccttgcagctagagcacttcagattccgttgccaactcgtccccattggtttcttctttttggtactacagaagaggaaatccaggaaatctgcatagaaacacttaggctttataccagaaaaaagccaaactatgaattactggaaaaagaagtagaaaaaagaaaagtagccttacaagaagccaaattaaaagcaaagggattgaatccggatggaactccagccctttcaaccctgggtggattttctccagcctccaagccatcatcaccaagagaagtaaaagctgaagagaaatcaccaatctccattaatgtgaagacagtcaaaaaagaacctgaggatagacaacaggcttccaaaagcccttacaatggtgtaagaaaagacagcaagagaagtagaaatagcagaagtgcaagtcgatcgaggtcaagaacacgatcacgttctagatcacatactccaagaagacactataataataggcggagtcgatctggaacatacagctcgagatcaagaagcaggtcccgcagtcacagtgaaagccctcgaagacatcataatcatggttctcctcaccttaaggccaagcataccagagatgatttaaaaagttcaaacagacatggtcataaaaggaaaaaatctcgttctcgatctcagagcaagtctcgggatcactcagatgcagccaagaaacacaggcatgaaaggggacatcatagggacaggcgtgaacgatctcgctcctttgagaggtcccataaaagcaagcaccatggtggcagtcgctcaggacatggcaggcacaggcgctgactttctcttcctttgagcctgcatcagttcttggttttgcctatctacagtgtgatgtatggactcaatcaaaaacattaaacgcaaactgattaggatttgatttcttgaaaccctctaggtctctagaacactgaggacagtttcttttgaaaagaactatgttaatttttttgcacattaaaatgccctagcagtatctaattaaaaaccatggtcaggttcaattgtactttattatagttgtgtattgtttattgctataagaactggagcgtgaattctgtaaaaatgtatcttatttttatacagataaaattgcagacactgttctatttaagtggttatttgtttaaatgatggtgaatactttcttaacactggtttgtctgcatgtgtaaagatttttacaaggaaataaaatacaaatcttgttttttcta

SEQ ID NO: 625244 - DNA, 4295 bp, Homo sapiens
  misc_feature (81)..(81): n is a, c, g, or t
  misc_feature (420)..(420): n is a, c, g, or t
  misc_feature (423)..(423): n is a, c, g, or t
gggacccgaatagggtccacagccctgtgttcttcgaatactgtaaagcagccctgctccagattccttgagggtcacttnatattacacattcgtccacacaggacaacaaagtcaccacttccacccgccaaagcgcgctcaggtcggccgccacttcccttggtacacgcggaacgcaagccgcgccgaggctaaaggaagaggccggaatgcagggcgaaggggcgcagagatgctagccaatgctgccacctctattttgggtataagggatcttgtaaagctccgttattcgtgtggctatcacaaacaaggtggtttcgaccggccttggctagagaaggcctcctcagcctctgaggatcccaaggtctgtcgcagcacccaacactcccctcgcaggcccagatgccgagngcngaggcgcggcctggagggactagttggcgcgcggctgcccggcgtggtgacgtcagggcggaagcgcacgcaggcgtgaagcggcccagaacccggcggtcacgggaatatccgtcgcgccgagaacgctggttagtcttgtttcgggttccggctgcgttgggcttgcgtgcggctcgctaagactatggcgtccgggcctcattcgacagctactgctgccgcagccgcctcatcggccgccccaagcgcgggcggctccagctccgggacgacgaccacgacgacgaccacgacgggagggatcctgatcggcgatcgcctgtactcggaagtttcacttaccatcgaccactctctgattccggaggagaggctctcgcccaccccatccatgcaggatgggctcgacctgcccagtgagacggacttacgcatcctgggctgcgagctcatccaggccgccggcattctcctccggctgccgcaggtggcgatggcaacggggcaggtgttgtttcatcgttttttctactccaaatctttcgtcaaacacagtttcgagattgttgctatggcttgtattaatcttgcatcaaaaatcgaagaagcacctagaagaataagagatgtgattaatgtattccaccacctccgccagttaagaggaaaaaggactccaagccccctgatccttgatcagaactacattaacaccaaaaatcaagttatcaaagcagagaggagggtgctaaaggagttgggattttgtgttcatgtcaagcatcctcataagatcattgttatgtatttacaagtcttagaatgtgaacgtaatcaaaccctggttcaaactgcctgggtagtccatgatggtaagtcatagaactctgccctctgcacttcagcccatgacctcaggatggcctgattggctaccctgctctccagccaatccagtgcaagctctcatccgagattcactgaagtggtccatatccatctggcagcatcttctagttctgtcggggtgtcaaaaggatttgtatatttgcttctagaagtaactatttgacatgcctatgtatttaatgtatacttgtaactatcaaaatgaatagttcatttttgatagatttgttgtgcagccattatgaattaaatggtttattaggagtttgactaaatttttatttttagtgtgtatagcatgaatactaccaaaggagacgacaaacttgcagcttaaaatgggcaccagttcccacactggcttaatttatataactgcttggctgtattgcgggtaataatattagaagcaagaagcacttcatttttaaaagagatgttactataatattgcttaaatgctttagcacttggacttcttgagatgcagatgtgtgatttggagtgctggcttatttaaaggtcaagccaaggagtttgtggttcagccacaactactgtttcctaagactattgatgtgaaggacttagtgaagtaatttttatattctgggcttcccagcaagatgtcctttttatgactgccatgcttcttttggactcagtaaatatttgtaatgttagaaaagtctcattatttttataaaatgcatgacattttaagtatgtgttgcataaaatggattatagcagttctcatggtttaggatttttaagaaatagtccatttaatttcagcttaaccttttaaatgatctgtaaaatttctttgatagtttaggaatgttgtggggagggttcattaataaaagttcagcaattttttaactgaaatagtttatctcttttacctagtcacaaaaaaggtatgtaaacaaggccattatatgtgtttattgctctttatttccctatctagattttctaagtatcttagctttcttaatataagtttaacttggtacttactgaaaatgcctttttacccctgttaacggtattttgagcttttgaaaagaacttggttgacactgcttttattgtggataaaggagagatggtcagtaattaatggcttgaagtattattggagtggtttatcatttctgaaactaatcgtgtcagaattgactttgaaaagcattgctttttacagaaatatattaactttttaggagtaatttctagtttggattgtaatatgaaataatttaaaagggcttcgctcatatataggaaaatcgcatatggtcctagtattaaattcttattgcttactgatttttttgagttaagagttgttatatgctagaatatgaggatgtgaatataaataagagaagaaaaaagaataaagtagattgagtctccaattttatgtaagcttcagaagaactggtttgtttacatgcaagcttatagttgaaatatttttcaggaattacatgaatgacagtcttcgaaccaatgtgtttgttcgatttcaaccagagactatagcatgtgcttgcatctaccttgcagctagagcacttcaggtaggtgtatatttcccattttgttctgtaggataaatcacacaaattttcggtggttccaatacagatttagcaaaaatttaatttaaaacattctgttcttatggtttagattccgttgccaactcgtccccattggtttcttctttttggtactacagaagaggaaatccaggaaatctgcatagaaacacttaggctttataccagaaaaaagccaaactatgaattactggaaaaagaagtagaaaaaagaaaagtagccttacaagaagccaaattaaaagcaaagggattgaatccggatggaactccagccctttcaaccctgggtggattttctccagcctccaagccatcatcaccaagagaagtaaaagctgaagagaaatcaccaatctccattaatgtgaagacagtcaaaaaagaacctgaggatagacaacaggcttccaaaagcccttacaatggtgtaagaaaagacagcaagagaagtagaaatagcagaagtgcaagtcgatcgaggtcaagaacacgatcacgttctagatcacatactccaagaagacactataataataggcggagtcgatctggaacatacagctcgagatcaagaagcaggtcccgcagtcacagtgaaagccctcgaagacatcataatcatggttctcctcaccttaaggccaagcataccagagatgatttaaaaagttcaaacagacatggtcataaaaggaaaaaatctcgttctcgatctcagagcaagtctcgggatcactcagatgcagccaagaaacacaggcatgaaaggggacatcatagggacaggcgtgaacgatctcgctcctttgagaggtcccataaaagcaagcaccatggtggcagtcgctcaggacatggcaggcacaggcgctgactttctcttcctttgagcctgcatcagttcttggttttgcctatctacagtgtgatgtatggactcaatcaaaaacattaaacgcaaactgattaggatttgatttcttgaaaccctctaggtctctagaacactgaggacagtttcttttgaaaagaactatgttaatttttttgcacattaaaatgccctagcagtatctaattaaaaaccatggtcaggttcaattgtactttattatagttgtgtattgtttattgctataagaactggagcgtgaattctgtaaaaatgtatcttatttttatacagataaaattgcagacactgttctatttaagtggttatttgtttaaatgatggtgaatactttcttaacactggtttgtctgcatgtgtaaagatttttacaaggaaataaaatacaaatcttgttttttcta

SEQ ID NO: 625245 - DNA, 484 bp, Homo sapiens
  misc_feature (410)..(410): n is a, c, g, or t
caaaaatccatcagagtaatcataacaacagaataacaaaatttgtgattatatcaactgatgcaaaaaaggcatttgacatatccaacatgcattcatgattaaaaactcttagcaagtcagtaatgaaagagaattacctcaacttgatataagcatctgcataacaacctctacagataacatgaaacttaatggtgagggccaggcgcggtggctcacgcctgtaatcccagcactttggaaggccaaggcgggggcagatcacgaggtcaagagatcgagaccatcctggcaaacatggtgaaaccccgtctctaccaaaaatacaaaaattagctgggtgtggtggcatgcgcctgtagtcccagctactcgagaggctgtggcaggagaatcacttgaacccnggaggcagaggttgcagtgagccaagatcgtgccactgcactccagcctgagtgacagagcaagactccgtctc

SEQ ID NO: 625246 - DNA, 628 bp, Homo sapiens
atagtagccatactgactggtatgagatgctatctcattttggttttgatttgaatttctcttctctaatgattagtgatgttgaacattttttcatatgcttattggctggatgtatcttcttttgagaagtgtctgtgtgtgtcctttgtgtactttttaatgggattgtttggtttttgcttgtaaatttgtttaagaagttccttatagacactggtttggttttattgcaattgcttttggcgtcttcgtcaggaaatatttgcaaattcctatgtccagaatggtatcgcctaagttatcttccagggtttttatacttatagattttacatttaggtctttaatccatcttgagttaattttcgtttatggtgaaagaaggggcccaatttcaatcttctgcatatagctagccagttatcctaggtccagttagggaatagggagtcctttccccaatgcttttatcagctttgttgaaaattagatggctgaaggtgtgcagcattatttctgggctctctattttgttccattagtctatacgtctgtgtttgtacaagtccatgccgttttgatgactgtagccctggcgttaacttgaagtgggtaacagaatgcc

SEQ ID NO: 625247 - DNA, 952 bp, Homo sapiens
ggctccggtccctgccccccgtgcgaatgtgctgcgcagcgggggtgcttacgctcgcggggttgggtgttgcaggcaggagctgggaggaggcggagggggggcggcagaaacagcagcggcggcggcgggcggcagcttggaggaggtggtgacgtgtgggcaaacggccaggcgtcggggacgatgggcgcgacccctggcaggttggttttccccttcttccctcttcccccaaaggcggaggcgctgccgcacgttgccagacccaggctggtgttgttcgcaccctccttagggcggaggccttcttcttaaggcaaggtgcccaaagagattcgcctttggaggggggtggcccttcgggaaaacccttctgttggggccccaaagcccaagaagcctccgtataagacactcccctcttctcaagatttggtgccccttccttggtgggaaccttaattcccgttggagcccttttcccctttaagggagaacggcttggttttggcccaaagccacacaatatttcttccagaagacggggggtagaagccgattcgggggccggattaaaggggcccttaccccaataagagaaaacccagctataccctgcggggggagggcttaaaataaccgtgggtaatggcgcgaggtgcagtggtaccgtgtgtattgccgtgtaaaatagtgggtaggtcctcaaccaaataaggttaaattactggggggcaggagtagacattgcttcgcgcgcggtcaatattccaataaagtggctgtgatgcgtgggacataggctcgtttgggcaagtgtaaacttctgaaatgttggttgttgggactttttcaaaggggttttggataatatgtaagggggccttttttaaggacccatttggtgggggtgtaaaaaggtggtttgtggaaccagcggttattaagg

SEQ ID NO: 625248 - DNA, 179 bp, Homo sapiens
  misc_feature (3)..(3): n is a, c, g, or t
tanttggattcctcactgtggctcagcacccaagaggagaatgctgattgttgtcgtcagtaagaagctgcagataccgtttcattgagaggggggatgctagaagtggaaggtgaatcagatttcactgcagagcctgtagcaccttcaacagattgtgtggtctgtaactgcgtggc

SEQ ID NO: 625249 - DNA, 958 bp, Homo sapiens
cagcctggaggacagagcgaaaatccatctcaaaaaaaaaaaaaaaaaaaaaaaaaaaatttttgggggccctgggccgagaaaaggtttttaaacccctttggtggggggcggggcccatcataggtaaagtggaccttgtgcccaaaggcgtgtccccaaaggagagacccgggcggccaagagacaaagcgtggttggggtttcctccccaagatataaaaacccgccggcggggcaacaccaggacgcggttctgtagaaacaacctcccagagatgggagctctcggccgccacataacgggggagcctatacacaacagggagagtacacaacgcgcagcgcccacgatactacaaacattaacacccctgcccagcagtaggacacacacacaacacacaacgcaacaacacccacacacacaaaactcaccaacacttcatccaacacatcaaccacacacacacacacacacacaacaataacagacacaagacataccaacccgaccaacacacacacagacagcaaccaagagcacaccacagcagccacagcaacaaaacacaacagccacaacacaaacgatccgcagacaacacaccataccacaaccaaaacacccatcacaataaacagacaacaaccccccacaccgcgagcgctgacgagccgcccgcccgcactcccaccaaccgccagccaaccactgccgccgcgccgccagccgcaccaccgcacgacgccacgccagtcacacaagtacagcacgcacaccgggtacagcgaacgccatggcgaagcaagccgaaggacaccagaccagcccacagcaagaaagatgggagggacgcaccaatgcaagcgagcacacagaaacaacaaagaagcagacacaggggaagcaccacacgacgacaaaaaccgcaggccaaacacacagcggacaaga

SEQ ID NO: 625250 - DNA, 484 bp, Homo sapiens
  misc_feature (110)..(110): n is a, c, g, or t
  misc_feature (142)..(142): n is a, c, g, or t
  misc_feature (150)..(150): n is a, c, g, or t
  misc_feature (194)..(194): n is a, c, g, or t
  misc_feature (196)..(196): n is a, c, g, or t
  misc_feature (206)..(206): n is a, c, g, or t
  misc_feature (228)..(228): n is a, c, g, or t
  misc_feature (327)..(327): n is a, c, g, or t
  misc_feature (414)..(414): n is a, c, g, or t
  misc_feature (446)..(446): n is a, c, g, or t
  misc_feature (465)..(465): n is a, c, g, or t
tatctcctagtagtgatctcacactttcaagtgttctctgggatagagagagatcaagcttttatagcctgacgagttcaaacatcagtaaatgggaattagatgattcntcagaaaagcatgcatacagttgggatatagngggttttntttaggaaaacattaccgatgctatttggggatctgaaagtaangntgaagctatnaaagaaggagtcaacattcganatttggacttgaagcaaaactgtgatgggctggtgattttggcagcagcatggcactcagcagacaatccatgtctcatctattactctctgataacantagaagataatggttgccaaatgtcagatgcagttactgtagaagtcactcaatatagtccaccttttcaggtctgaagaccctgantttgtgtcagttgacggtcccaaacttttcanaccagactgcctatcggtntaacaaagtgctgtccatg

SEQ ID NO: 625251 - DNA, 407 bp, Homo sapiens
  misc_feature (7)..(7): n is a, c, g, or t
  misc_feature (86)..(86): n is a, c, g, or t
  misc_feature (91)..(92): n is a, c, g, or t
  misc_feature (96)..(97): n is a, c, g, or t
  misc_feature (105)..(107): n is a, c, g, or t
  misc_feature (112)..(113): n is a, c, g, or t
  misc_feature (115)..(117): n is a, c, g, or t
  misc_feature (128)..(128): n is a, c, g, or t
  misc_feature (139)..(139): n is a, c, g, or t
  misc_feature (145)..(145): n is a, c, g, or t
  misc_feature (150)..(150): n is a, c, g, or t
  misc_feature (166)..(166): n is a, c, g, or t
  misc_feature (171)..(171): n is a, c, g, or t
  misc_feature (173)..(173): n is a, c, g, or t
  misc_feature (175)..(175): n is a, c, g, or t
  misc_feature (196)..(196): n is a, c, g, or t
  misc_feature (198)..(198): n is a, c, g, or t
  misc_feature (213)..(213): n is a, c, g, or t
  misc_feature (239)..(242): n is a, c, g, or t
  misc_feature (244)..(245): n is a, c, g, or t
  misc_feature (262)..(262): n is a, c, g, or t
  misc_feature (265)..(265): n is a, c, g, or t
  misc_feature (315)..(316): n is a, c, g, or t
  misc_feature (385)..(385): n is a, c, g, or t
cacggcnggctccccttggggcctttggctagggtgagtgaagctttgaagacagtggcctctagtggacttggataagtggcagnttttnncccnntaattttnnnttttnntnnntcatggtggcngcttcacaaangctccnatccngggggtggtaaaaagngggcncngntcattgcaaataccagatttncnctttctctttttgtnaatataccgtcatatataggctaaannnncnnttggggggggggggttnggnggggggggggggggcaggttgaacctacaattgcatatgtgatggggtcnnggggggggggcggggggggggggggctcttagcctgaagcaaaagaaaaggacactcgcttctggctangtgtggtacaaacactgggggg

SEQ ID NO: 625252 - DNA, 1230 bp, Homo sapiens
tctcagcctcactgccctgccctgggcttcagcacctattcatgtagcccaggtgccatcgctggaagccccagtgccctgcgcaccacatgaccatccccagaatgatcctggtcccctgctttaaccatctgaaacatgagccacatcctggtgccacactgttttgatcctgcaccacagtggctgctatgattggagatatatgaacatgaatcagcaactcctgcatgcctgttcagccagaccattcttctgtgtcacaactgcccagtatagtgtgacaacgacacgtgaccaggccatcaggtgcctcacatcttcagcacccaacccaacagaaacctgctgcctgatgagccgctgggctcagcatccacgctggtgaagacagccttggttgcagtgaggtgcaaccagaaccttctcagccttgtgtgtacccagcgtggttcgcctgtacccagtgacagctggccacatggcagctagagatgggtccggatggcggccagaatcaccagatgcggcagcacaccttgcgggggaccgcgacccccaacaaccagcaaccgacccaacccgccgacacgcccacacggtacagccacacaaccacacgccaaggaaatgacccagcaacgcctccctggccgacgggcacgccggcgcgctcacccggcaccccaccgtggaacacctgcacaccaaacgcggccgtcccgcgctccacgcacaccccacctacccccaccacaacccgcccggccccgacacactcaccgcaacgcaaacaagcaaacacatcacaggagccagcaacgcccacccgccgccacaacgccaacgcaccagaaccagcggaacaccacggcaccacaccgcgacaccccgcgacggaacacaccacaggaccgaggaacacacacaacacgacgtgccgcagacacacagacgccccccaacagccagcacacggggcccgggcgcccagccagcaccgacgcggcgcaccacgcgaccgcacgacgctacacgcgaccaggcccctgaccagaacgcggaacggcggagcagaccaggaagacgctgggagcaccgaaagcatggcgccgcgcgagagcacgggcgccgcgccggcagcccccgacagaccggcacaacgccccacaagaactcacccaggcacaccccgggccgcacacgacgagcacacaagcgaacacacac

SEQ ID NO: 625253 - DNA, 288 bp, Homo sapiens
gggaggcccgggtaggatgactgtggtaacccattaccttttagaagccaggtgtcgggcccttaccatgctggactgctataggcccaggttccccttgtcctgtggcccttttcttcctccttgaagctcccaggtattctttgttcttttccccgtctaaacctgtttctgagacgtggatctcaagcaagttcatgccttcaatcagatgttacttagcggtgggtatacctaaattataaacccttatgtacaagtcagtaagccttagcggaacggtgcagc

SEQ ID NO: 625254 - DNA, 804 bp, Homo sapiens
ggtcagccggcatctgctttagcgtgcgccaggcgagtccagatcgctcagagcaccatggggaacggtgacaggtgcggagctcaaaggattgggtcgtatgggcgcctggtcacccagtggctgctgttaactctggtaaagtggatatcgttgtccatcacatggatcgccgttcgaattgagccctcgaactatgaatggtgttacatagtcgcgcaagtatgcattccacccactgggcgaatagtatcccagtggcgaacgatcgaaggtctgaggaaggcggagaagctatgatcgagtcagatggaagatgccgcatcaacatctgtccaggatgcgagatccctccaaaatcaagtggggcgatgctggcgctgagtacgtcgtggagtccactggacgtcttccacctacacgatggaggaaggctggggctcatttgcaggggggagcccacaagagggtccatcatcatcgtgtccccctctggtgcatgcccctcaggttcgtcatgggtgtgaaccgatgtagaagtatgtacaacagaactcaagatcgatcagcaatgcacgtccatgcacacaacccaacatgtttagtacccctggccaaggtcatccatgacaactttggtatcgtggaaggactcatgaccacagtccatgtgcatcactgcatccagaagactgtggatgggccctccgggaaactgtggcgtgatggcgggggctctccagaacatcatccctgctctactgggctgcaaggctgtgggcaaggtcatacctgagttgaacg

SEQ ID NO: 625255 - DNA, 114 bp, Homo sapiens
gcggccgcctactactactactgctcgaattcaagcttctaacgatgtacggggacatggtttttctcctgctgcaagtggttcaagtgctgacccagttgctcgtaccaaaaa

SEQ ID NO: 625256 - DNA, 262 bp, Homo sapiens
gagaagatgagaagccagtcgatgccaaggcaaaactcatgaacgggtgctggggctaagtgccagctcagctgccatgtgttggtctcctagggaccaaggcctttgcattctttttctaccctgagctcccagcgttctaattgctctttattgttcattgattattcattttgcgtctgactattggtaatattttatagtaaattaaatgttattgtggtcaagaattcaaacagagagaatacacaaacagggagca

SEQ ID NO: 625257 - DNA, 173 bp, Homo sapiens
acgcatcgggaagctgaatacggagaaacaaattacctgcacggtacatcacatcctgtacaaggcagaagtgaacttctcctgcagaatgctgagcacatttgagtgagaccaaccgctatcctccgagacctcctgagggaacagaaccgcagttgaaagactgctagggt

SEQ ID NO: 625258 - DNA, 346 bp, Homo sapiens
  misc_feature (248)..(249): n is a, c, g, or t
  misc_feature (267)..(267): n is a, c, g, or t
acaagctcaagagaagccctgtgaagtagggtgtagggtgctggaggactcactgtggtgcaaggcaatctgccacaggatatgagtgcatggccaagttgtggggctgcactaaatccaagcacccgcaagccccagctcgagatagccaagatgaggtccagatggtggttccaacagggggtgtcattccaggaccatgagatcctgcagggggaccttgactttgttggccacctctcggatcnnggcctctgacaccgcgtntgaagcatagcgttgcttgctgttcaccttgatcacggggcccttgtggaataaaggccggtggttctccacatctcct

SEQ ID NO: 625259 - DNA, 408 bp, Homo sapiens
aggaactgctaacaaacatacagtgcagtggtggcttaagaagttttgcaaggaagagagccttgaagatgaggaacgtgatatgggccatgggaagttgacaacgaccaattgagagcaatcattgaactacatgaaaaattacagaagaactcagcgttgactattctacggtcattagggtcgttcagcatttgaagcaaattggaaaggtgaaaaagcttggtaagtgggtgccttatgagctgagcggaaatcaaaactatcggtttgaagtgtagacttcttttatgctacgcaacaacaaaccatttttcaatcggattgggacatgtaatgaaaagtgaattttatacaacaaccagctcagtgggttggaccaagagggcagcttccaaagcaagttcc

SEQ ID NO: 625260 - DNA, 261 bp, Homo sapiens
caatctccaacacatctggcctagactacgtacatcaactacacctactccaatgctaaaactaatcgtaccaacaattatattacataccactagacatgacttaccaaaaaacacctaattggaagcgccaccctagacaatatcaaccattaaccttccctctacactcatcatcttcacaattctaattctactgactatcctagcaaatcgctgtggccttaatccaagctcacccatacggaaagcaacccaagc

SEQ ID NO: 625261 - DNA, 195 bp, Homo sapiens
atcgagctcgctaccgttaatcgtgtctttcgtacagcgtaggatagaacgtacgatagagaccggagctggattacgtgccggtctgaactcagatcacgtaggactttaatcgttgaacaagcgaacctttagactagcggctgcgccatcgggatgtcctgatccaacatcgaggtcgtaaaccctatggtt

SEQ ID NO: 625262 - DNA, 338 bp, Homo sapiens
  misc_feature (57)..(57): n is a, c, g, or t
  misc_feature (295)..(295): n is a, c, g, or t
aggtaaaggaaagtgggattaacctcctgattataaagttaacgggaaggtggactnggtgaacactgctgtaagtagataattcaatggagaagaaaatttagaaataattttattttgaaatatgtatagtttatgttttcctagttgtaagttaaccttcctaatatgtttgaagactaaaagtaaaagcattactactggccaagtgcagtggctcatgcttgtaatcccagctctttgggaggctgaggcgaatggatcagttgaggccaggagttcaagaccagcctgnccaacgtggcgaaactctgtctctactaaaaatatatatatat

SEQ ID NO: 625263 - DNA, 192 bp, Homo sapiens
ttagaggaccccgctattcatctggcacccatgagacgtggcgctggcaagcacgtgccccgggctgtgtctgtagacttgtaaccccacagtcattgataagttcgcactggcacctaccgccagctcttccaccctgagcatgctcatcacaggcgaggaaaatgctgccaataactatgcccgagggta

SEQ ID NO: 625264 - DNA, 310 bp, Homo sapiens
  misc_feature (47)..(47): n is a, c, g, or t
  misc_feature (73)..(73): n is a, c, g, or t
  misc_feature (89)..(89): n is a, c, g, or t
  misc_feature (91)..(91): n is a, c, g, or t
  misc_feature (187)..(187): n is a, c, g, or t
  misc_feature (204)..(205): n is a, c, g, or t
  misc_feature (243)..(244): n is a, c, g, or t
  misc_feature (246)..(246): n is a, c, g, or t
  misc_feature (250)..(250): n is a, c, g, or t
  misc_feature (259)..(259): n is a, c, g, or t
gcttttctacaactaatgattcttgtggtttgcaaaccatgtttgcntttatttacctacacaaacacggaanagaatttccaataggngnggttcacacagctaacaaagcatagagtgtgttacctcaataaggcattcaacaaagacacacgccgtatttccctctgactgcgttcccttaggntgctctgatgtgggggnngcattcttctaaaagtagaatcaaatcttcaatcaggnngngttntctgccatntgttactctcataatatcaaaagccagtttcagattcttcattgcttgggg

SEQ ID NO: 625265 - DNA, 527 bp, Homo sapiens
ggcaggcaagcggtcttggcctgcctttcgatgcacagagaaaagcgttggttcgtggcaggtcagagatgttgctgtaaacctcatatccagggaggacgtgtgtgaccagtcatcacagaccattcttttttgaaccatacaatctgtgttttgtatcctccagcagatctttacattttgattataagtggtcacaggtctggaagcatgactccaaagaatggtactcatggggcggtgaaggtgttgggtcttcctccaggaagcatgcatggtatcccgcccggagctggcgtggccattcctaaagtagaacgtgcaaccatgaaacggggtggggtcagtgtgccacctggagtcggagtgggtcctgagtcagtgcagtatatgtgtcatttaccataaaggcagaggtcagatggatgggtgggggcacaggctggagaatcttagggtaacagtgttaacacttgtgccgtggcaatgggatgtgctctgattccacccattaataagcatgttaa

SEQ ID NO: 625266 - DNA, 366 bp, Homo sapiens
gctcgaccacggcgataggggtgggtgacgtcgcaatcgactgcttgcgacgcacccacgggttatcggggtccagtcggctggcaggtgtgcaacggtcaatcacgatatcgacctgttgaaaacccttggcgtccaagtgttggcgcacagcgtttgcaggttttgccagtctgtgccgaccacaaagcgcaactggcaatgcgcaatagcgggggtggaatggcgttgaccggtttggctggattgcctgcggtaaacgccaggatctccacggtattccagccgaagagtcgctcgcccagggtcaagtcgggctcgcccagtgcacatccaaaggacggcccagggaattctgatgtcgac

SEQ ID NO: 625267 - DNA, 445 bp, Homo sapiens
caagttgctggctcctgagaccagtatttcctggagctgtgcctcagtgaaggggcccagcctgaggaaccctggctcttttctttaaagcccaggccccccttacataaaacatttcagggtccctggaaacagtgaagtgccatttgttgaagcctactgcatgccagccccctgctcatccacgtggtttgccatgcctacgaggaaggccagcgcatgcaggactggtctctaattctgtggttcctttgcccaaaagggaaaggtttcaaggaagagtccactgggccaagcccaagccccccggacatggccttggtaaaggttagcagactggtgtgtgtggttctgcagtgcttccctggaaataatttattcattgcagatactttttaggtggcattttattcaaaaactgtgctttaaataaacaaatgtacca

SEQ ID NO: 625268 - DNA, 558 bp, Homo sapiens
  misc_feature (1)..(1): n is a, c, g, or t
  misc_feature (306)..(306): n is a, c, g, or t
  misc_feature (311)..(311): n is a, c, g, or t
  misc_feature (314)..(314): n is a, c, g, or t
  misc_feature (357)..(357): n is a, c, g, or t
  misc_feature (387)..(387): n is a, c, g, or t
  misc_feature (458)..(458): n is a, c, g, or t
  misc_feature (462)..(462): n is a, c, g, or t
naggttaactgccgtccacccaggcttgcccacttttccccctctggcttctgatcccaaatatttcactatggggtctttcacatttccaaagatatttctattctaatgccacattttcttgtcctggattacaaaagtgatttaagggtttttattaataagttgtttcactcaaaaaacaaaacactttctactgtccctgaaaaacagcaataacagggtgatctatatcatttgtaaatttacattctgaatctaaataaacctgttgaaacactagttgaaaaagagaaaaaaaaaaangtcancangttattcatgcataacaggaacaagggttaacgggccttttgnattacaaggtaaggaatctgcctaggcccncattggggggggggccggcgggtaaccttggctttggggggttggttggctatggcggtggtgccgggccnggcnacaactctggctcgggctcgcggctttctcttcatctttcaaggcttcttcgtaatgggttgggagggcgcagggggtggtaccatttaccttggc

SEQ ID NO: 625269 - DNA, 363 bp, Homo sapiens
cccccgggtattcatgtataaatccctcatggctgtaaattgaaccgttcctgcagtatccgagattacgagcatacactgctgtgcatctgcttcaacttgctttctataagaatcttctatcgaaggatggtattattcaacaaaaattccttcatcgtattgtacagtcaaagcagacttcccatcgcctcttgagccaagaacgcctagcttatactcacgcatgatgcaagcgtgtcaaaccctagtacctctcgcgctgtcaccgggttcttgcagccagtgtcgcaccgcgctccccccgggtcgatactctaggctcaacggcggtccagcctctgacgcacagctccggctggt

SEQ ID NO: 625270 - DNA, 695 bp, Homo sapiens
tgaggaggggtgtgacccttgagactttgagagacccggtgagaatctaacagggtggccccctttaaaaaacaaaaaaaaaacaaaacaaaaaaaaacaaaacaaaaaaaaaaaaaaaaaaaaaagaaaaaaaaaaaacaacacaaaaaaaaaaaaacaaaaaagaaaagaaaaaaagaagagacagacagagaagagaaatacaaaagccagagaaaaaaaacaaacagcagaaaaggggcggcgcgcgcggggccgcgacgacagaacagggtaggcagagaaaaagaacggagggagcgaggagcgcgcaggcgccagaacacacagacagagaaggaagaggagaaagacgagggaacagagacagagagagcggagaaaacaaaaagagggagagcaccagcgagatcggagaagaaagagggagcgggggagggagagggaacacacacagcaagagaaatgaaaagaaaggaaagagagcgggcggcgggagagaagcagaaccagacaggtaagagagaggacaaaacaaaacaaaaaaaaaagaacgaggagggcagagaagagaggacagagaaagaagaagacgaagggacagacgcagaaagacaaagcaaggaaagacaaaggaaaaggcgagaggaaagaaaacaaacaaaaaacgcaccacgcccggcgtgggggggga

SEQ ID NO: 625271 - DNA, 1131 bp, Homo sapiens
gcgtagaatcctgattgtagctatcaatgatccgttgctgtactgaaacactgaatggaggataacggtgagcgacacaaggtagcttccctgctagatggatggagacacactagtagacccctagtcaaatgttatatatggtgattctgtgtactcgtcccatattcgttgcataatatatgaatgtacacacatatcaccttcctggaggagttcaaaaaatcataggccatacaattgatatagatcctcattcgacatgtcgatgtgaactgtggcaggaattcactgggtataaacagatatcccaccttctgtctgaacataatcatttcctcgtatatgcaggagacgtataacatgctatctcttggagatggcatggtgctccgtccaactttcccatgatgttcagtcctccaacgtgatactcccgattctgatgaactatgtgaacctccagactaagacatcctgctcaagcgttgactcttattggttaggcctccagtagcttgcatatttacccgcatgtggacagctgttggatcatgcaataccaaccgttccagcgctcaaggtgtgatttctgtgcacctatgaagtctaggatggcccttcgtccatagtctcaaatgcagcccctgtagtgaatatctagcaagtaatttccctgaaatgttacagataagaggttctctcgaagtgagcgggggagtcgaccgacggggatcaaactatggccattcctcaggggtagtcccaataacctggccgtccaaggaagaaggtggacccctctagacgaaaggcattaacttcccgcagggaaagatgtgagcgcttccagcgcataggaggtttcccgggtcgcctgtggaagaacagtgcgacccctcagggaggcaatgggcgcgaaggcctttacacagacgaatgcggcaggtgtcgctctccacatctggcactctgcgggtagtccgggagagagaaaggcacacaatgtgagtcagattaccaacaggcgggaggccgaaactaagagcaacgagggcacacacgacacaagggggagcagccaacttacggcgacaccacgcctactacgcgcagctcatactcgcgcga

SEQ ID NO: 625272 - DNA, 937 bp, Homo sapiens
  misc_feature (702)..(702): n is a, c, g, or t
agcggagagagagaggatcccttgagccgaggagtttgagtctgcagtgagctatgatcgcaccactgcattccagaccccatctcgaaaaaaaaaaaaaaaaaaaaaaacaaaacacaaaaaaaaaggcgggttatccctcatttcccagctaagaatcaggttgtttcaaaattaactataagataaattcacttaaatttacattaaaataaaatacacttaccaagtttatgagatgttcagagcccgaggggagcccttcacacgcagccagggcagaccggttctgtgcagggacagcagcgttacattagggatagaaaaaatctccaagggccccaaggccttcagtgctatcgggtgatcttcccatttccccagggttcatatgtgtggccttcatcctttcaatttcccagcaaaattccctttgtcacaatttgttgggcctttccaagtcgggctgtgaacctagaggggatgcaccgcgacagcgttgtgctcacttcgtggtggcgccgacaataatggctggggcgaaaccgacataaacccttgcgggggccaggttgacaacttgggacggtcgcccagagaaatacccttagagaggtgcagggggataatgcaacggatatagacggtgtaacacccagaagggaggaacgcccgtcgaaggtggtgttgtgacccacccgngaccttttcaacaactcggtgccgcgggtcacaattggaggcgccaacatcggccatggcaaaatgttatcagccaggggctgttgacaaagtggcacagaggtcaaaggggggaccgtggaaaggaggactcggggccaacgaggatgggacagcaaatgtagtgcggtagtgacgacaaacactatctggaacgtctggtttgacacggaacaaaagcgcggctcatcacctc

SEQ ID NO: 625273 - DNA, 241 bp, Homo sapiens
agggaacatgatgggcactgacctcctgtaaagaataaaactgtgggccgggcgcggtggctcacgcctggaagaggcaggagcgaaatttgctcagttgcagggattccccaggactccctgggagtcaggccacacccagttgcttctgctgggctggcggtctgtctgctctggagtggggtggggtggtgaggtgcacaccacacacacacacacacacgcacgcacgcacgcacac

SEQ ID NO: 625274 - DNA, 934 bp, Homo sapiens
  misc_feature (666)..(666): n is a, c, g, or t
gctgaatgaatgattatgaggctgtcagaatgaatactgggggtgatgggaaaatgccaaagatgagcatcttaccagaactttggatgagtggccttttaaatgctcagttactaatctgtgttatcagtaactgaatcagatcctggcaagacaaatggcaaagcccatttcttggtcctgtttacttcggatactattgtgaagcaagtcagaggaatgaaagactgtcataacagtcttgaattgacattgttccatttctcaccccatagcatgtggaggcctgtctatatccaactgctgagtgtaaagaataaaaactgactgccccatagtctggtccacattttagtgtgtgcttgaaggattgcaaggtagagaaatagatgcttcaggctctgatttcagcccatgctgtgctatgcaaatgttctctacatgcctgagtgaccttttgagaaagagcctttgtgatcttctgtagctagggcttgttctgggaattctgtgccagattcctctaaaagtgggaaaagtgaatctgttaaaggaccacgtaaaaaaagccagtgcttttcctggatgaataccaataagtccatgtttcttaccatgtcttgccagagctttagaaattgtctgagttgtttacaggtggattgngattgaagtgtgtgagagggaactgtctaagagttcagtagctggaaactgttggttcaaatgctttgattggtgattaaattaattcccattgggttcatagtttctgaagattccaaagtttaagggtggtcccagatggtggtggtggaacaatctattgggaaggctttgcgccaaggggtttacactcggattaaaacttttggtattgggaaaaagactttagaacattttttttggaaaacgtttctgagaggaaaaacaa

SEQ ID NO: 625275 - DNA, 296 bp, Homo sapiens
tgctcactgcccactgtgacgtgtctgtcatggtcccctcggccctgcacacgtgtccactgtgacgcgtcggtcactgtcccctcggccccgcacacgtgctcactgtccactgtgacgtgcctgtcatggtcccctcggccctgcacacgtgtccactgtgacgcgtctgtcatggtccactcggccctgcacacgtgtccactgtgacgcatctgtcatggtcccctcggccccgcacacgtgctcactgtccactgtgacgtgtctgtcatggtcccctcggccctgcacac

SEQ ID NO: 625276 - DNA, 154 bp, Homo sapiens
  misc_feature (69)..(69): n is a, c, g, or t
agctcatcacgatagagctgggagcgtgcttgtctgggcctcccccattgttggatcatcagctttgtnggctcgagcttgtcctggattagctgagccagcatggcattgtccttgtattccccccgaatacaggcggatcctctagaagtcg

SEQ ID NO: 625277 - DNA, 554 bp, Homo sapiens
  misc_feature (1)..(1): n is a, c, g, or t
  misc_feature (22)..(22): n is a, c, g, or t
  misc_feature (60)..(60): n is a, c, g, or t
naggaaagtgctccccagaaancagaagaacccggatgcccagatacacgtttaagcttntgacaactacagtcactgtgtactaactagtggtaggttggcaatttgtaaaatttactcattaaagagggagacagagccaggctccgtgcctcatgtctataatcccagcactttgggaggccaaggtgggaggactgctcgaggtcaggagtttaagaccagcccggacaacatagcaagacccccgtctctacaaaaaatacaaaaattgccgggtgtggtggctcatgcctgtaatcccagcactttgggaggtcgaggcgggcggatcatgaggtcaggagttggagaccagcctggccaatatggtgaaaccctgtctctactaaaaatacaaaaaaaattagctgggtgtggtggtgcgcacctgtagtcccagctactcaggaggctgaggcagaagaatccttgaacccgtgaggcggaggttgcagtgagccaagatcgcaccactgcactccaacctgggcaacacagcgggaccccatctc

SEQ ID NO: 625278 - DNA, 1348 bp, Homo sapiens
ggcagatagtatatgaaagtctgaaagaacaagtaggaaggtgaatataaggagatagacaataattgaaaaatggtgcttcaggtgctgagcgaaatggtcagtaatgatagcccatatgacagaggatctgctttagcaactatgagagtcatgagtgtgtcttccgttgtcgaaagtcacgagagagtaaaggaatggcatgggtgtagagctactaaagggattaatgaagagggaatactagctactgatgaagtagtcctgtcatgaccaagggttatggcaagggtcgcgggtggcgtcgtacgcatgtgctggcctctcttggcaccctcaggatactgaaagcaagcattaggcatttggactttgctgtgagaagacagcgtgaaagagtaaaatcgccataaatgaaacaaatttgattaagtcaatgtgagaaggtacactttccgctgagtgacattgaatcaacccgagttgggcaatcgctcaatcccttgctattagtcacgtactagacgtggccccatttgttcccaactgtgtgctacgcaaaacatacctggggcacccctaggaaatctctgggggcttcgtgggccccttcggggaggaggatagcgcaatggctaggccttagttgaaacagaaggacccatagccccacctgcgtttattcccctgggacacctgggtggcatctgtgccgacaaccaatagtggcctggaacaccatgcaaaaaaccttctcatattctcttctgcgctcgcataccgcactgggaaccctttgaacgagtttctcctcgaacccaattccacaaggaatggcgcgcgctttctagcttttcggccctccatctttcccccacggggggcaaaacccgggtaagttgcgttttaagccacttgttggtccggaattagcttcccatctaggcagtccgtccagcggggtgaatagtggccaacaagcgctcgcaccaccggagacccaaagagagttttatctccccgcgcaaagtggctcccccggtacaaatgccctccattccaattttggtagcgaaaacgcccttgtcctccgcggagcgtacacgctcccaaggctttggaccacccaacaaaggattctccttggagaattacatcagtgccaaacaggccgaaaagtgacatacacggcaaagaattcccccctaggacttatattctcctcaaccacttctaaagagggcaagagcctgtccgtcgacttaagtctctggccccctggttgttcccgcaggggcccttgcgcgcaatccaagcatccgcctctgcctttgggcgcgaacccacg

SEQ ID NO: 625279 - DNA, 792 bp, Homo sapiens
gcctaaacgcgatggatatatgtttttgaaggcagaaagcaaaattatgtttgccacttgcaaaggagctcactgtggtgtctgtgttccaaccactgaatctggaccccatctgtgaataagccattctgactcatatcccctatttaacagggtctctagtgctgtgaaaaaaaaaaaaattgctgaacttggcttataacttattttggtaagaaatacgtgtacaagtgactttatggcattctgggtagctgtaaggcattgaaggatgccaagaaagttttaaggacatatgggagaaattagtgtggaaatttaagaagaaactaggtctgatatttcaaagtggacaaactgtgccagttttggttctccttttcacgtggccacagttgttgtgatgcatttaaaagaaattaaaaaaaaggaaaaaaggagaaaacgaaaaaaaaaggaaaaaagtgttggtagggcagaatcatttggttcaaaggctggtgggcctctgcaaagggaaataccaggttctggggcaatcagtggttaccggttcaccagttggccattggaggggtttcaggagagcctttttctaggcctacatgcttggtgaacaaggtcccggtaatggtggtcggtatgtataatttcaaaggcaccaaaataggaaacggatgtcagatttatctcatcatattatacagaccgaacggtggtataacatttattacgtgctagtcttaagaactgcttcttccgtggtttgttccactatttcccttctctctc

SEQ ID NO: 625280 - DNA, 1576 bp, Homo sapiens
  misc_feature (409)..(409): n is a, c, g, or t
  misc_feature (451)..(451): n is a, c, g, or t
  misc_feature (536)..(536): n is a, c, g, or t
  misc_feature (563)..(563): n is a, c, g, or t
  misc_feature (663)..(663): n is a, c, g, or t
  misc_feature (735)..(735): n is a, c, g, or t
atcatatagtaagaacccagtaccagggagccctaacaggggtcctcatctggaccctcgtaatgacctccggtgacttagccatgctgatcttcaacattcgcatctctcataactgcggcctcaatacataggccatactaaccaatcaataactaatgcaattgatagccgaatggatggcgcagatgtaacactgacgaaagccacaactaccacaacggaccactgacacaacacacgcgtgtccgaaaaacagggccattcagtactatcagtggtataactcctctagtattattaccttctcagtacagctatgtgtattcttatcgtcgaggccattttacctgcagttcctgttctacacgactcctaagcctcagcacactcttaacgcacgcgcgcnaatgtgaggcagcggcaacatgggcactcccaccacacgagngcaatctcacccctgagtaaagatcccccctacgaagtccacacttcccgtaatacaaccagtccagtctagtgcacgtcagtcnaatctcagagcagtgtcaagtccatantaccacacttgagatgctctctatacgataagactctcacagtcaggaaacaacaatatcacagtacaacacgcaacattgaattcaatagacgacatgncttatcatggacgaacatctttaaatctgggaggctccttctaattattttagacccccttcagcataaacnaacagtccgtcagagtccagtctccacctttccgagaggatacttctccccgtttacggagcccaatttttcacggggacggggccaaaatcaattaccgggggcgtctaagacccatatatagtggccgttttcaggaccccaaggaaggtggctttataccccgaaccggaggaacacttttcggagcgctggtcccacttctttcatattctgcggggtccttccataaaaactatttttgcgcctttccaaacttcacatgacctcgagacctttcaaattcacctggtcccaaaatttttaaaaatttaatttctccaaacatgtttttaccccaccttctcctaggaggattcattccgaacactgttctcgggcccttgtcccgaagagaagtcacctggccgggtcccctttgtaaatgtgacaccttgggcgagatctggttgtgggtaaacccaaaatggttgtgcggttgagtggaagctctcacactttctcgccgttggctcaatgtggtgtgcctctccccaagtccggttagccttggcgaaggcaacggcgggctctccttcaaaacaacacaacacgtacagcaacaaaacaagaaaagacgacaacacacagaccactaagacagcgagcacagaacgacaccgagcgagggaccggaccgactgacaacacatctacacaaaacagacaacatgcagcccgacacaaacagagagtgcgcgcactccctcagaaagagaagtcacacaccactagatgagggaggcacacgaaaactgaattcgcatacacagccgcatgatggtggtttccgacacacggc

SEQ ID NO: 625281 - DNA, 230 bp, Homo sapiens
cggtagatttacaatcttccagctatcacaaaaaaaaataagattaacaatgaattgaaatgtcaaataacaggcagggcatgggggtgcacacctgcagttcccgctagtcgggagggcgagacaggagaatcgcttgaacccacagcggcagaggttgcagtgagccgagatcgcaccactacactccagcctgagtgacacaccaagaccctgtctcaaaacaaatg

SEQ ID NO: 625282 - DNA, 134 bp, Homo sapiens
ctgggtttcttatgaggttggagtgcagtggtgcaacttcaaatgatcgactgtctcggcctcccaaagtgctgggattacaagcatgagccaccatgcccgaccctgttgttatttttgaactgggacataag

SEQ ID NO: 625283 - DNA, 1034 bp, Homo sapiens
  misc_feature (708)..(708): n is a, c, g, or t
ttcgggtgttcgggaaaagaagaggggttggggcggtggagtgccactgttgtgatgtgtcagagtttccccactggggggtttaacttctaaggagttttttccggacttttgttattggggctctaaaaacttatggcgaacacctgtggtgtatatgggcttcacccaaaattcgcggggttttaagagacgtgtgtaaaaaagactcgcgggccacataaattccctctttgcgggaaacacgtccttgcctccacacgctgttgtcagagccgttgtttagtaaatctaaggaggggccactgtgggaataggggagaggatgaatgaggccatatttcgcccttatgggccccaacaaaggggggagacaacagggtgttcaattgtggtgtgttttcctacaggcgcttggggttcacacaatcatggcgtttatgagatttcacagaagagcgtctttttctcccgtatataccacagccacaggagactaacaaacgttgtttgtttgcccatcgtggttcgtcaaggtgagttctacgttgttgggggcgatataataaatgggtaatgtttcgtgaagaaaatgtctgcaagagcgcggttgggggcacacaccctggggaactctcgtgtgttgtcgcgtcttttcacaatttcgccacatggggaataacttctgggtccaaagaatatcttggnccacaggggcctctttggtccaaaagtgtggtttcacgaggtgctttcccttgtgaaaactcggcgctagtcttccactaggtagcttctacatctgagtcaccttctaacagtttgggtgttcttcactaggcaccagtggcacaccctcctgggaactaattttatagtcacagttaagttaacttgggttaaagtgcttgggttttttctcccttctaagaggataaatccatgggtgccaacaaccgggttaagtacaacaggttcccctctcccccaaatttctgacaataggtagaacccataaacacttggtgacggga

SEQ ID NO: 625284 - DNA, 82 bp, Homo sapiens
tccccttcccttttggaagttttggggcctcagtgcttgcaacaaccggccttgggcaaataaaaaattaggttgttttcta

SEQ ID NO: 625285 - DNA, 101 bp, Homo sapiens
ggaaattacccagatctgtcttttaaaagaaaccaaacgcgtgagtcccggttttttgaggaaaaaggcccctggcccagtttttttggccccgttccctt

SEQ ID NO: 625286 - DNA, 334 bp, Homo sapiens
tttgctagagtctcactcctttgcccagactacagtgcaatggcatgatcatggctcactgcagcctccacatcccaggctcaaacgatcttcccacctcagcctcccttgtagctgggactacaggtgtgcaccgcacacccagctaatttttgtgttttttgtagggacaggtttcgtcatgttgcccaggctggtctcaaacttttgggctcaggtgatccacctgccccagcctcccaaagtgctgggattacaggcatcagctactgtgccaggccccaattcccaactttgatttctgaacttcaggcccacttctctctcttgtcga

SEQ ID NO: 625287 - DNA, 415 bp, Homo sapiens
gctagaggatcccatgtggatgcggctattgctcaggaaacagaatcctttcaaaatattcattgctcattgacagtgcaccttgtgacccaagagctctgacggagatgtatgtaagatgaatgttgttttcatgcctgctaatgtaacacccattctgcagcccatggagaagggataaatttgattttcaagtcttattatataagaaatatattttataaagcagtatctgccatagttggtgattcctctaatggatctgggcaaagtaaattgaaaaccttctggaaaggattccccattctagatgccattaagaacacttgtgattcacaagaagaggttgaaatatcagcattaacaggagtttggaagaagttgattccaaccctcatggatgagcggtttaaga

SEQ ID NO: 625288 - DNA, 133 bp, Homo sapiens
  misc_feature (44)..(44): n is a, c, g, or t
  misc_feature (48)..(48): n is a, c, g, or t
tagcggtgaggtgtacatatatgtgtgtatcggctatgagatanggantgctgcggtatcgatgtgagctgagactagttcggactcccccctttcgggcaatgtcgaatgcgtcgtgtctctgcagtgtgga

SEQ ID NO: 625289 - DNA, 260 bp, Homo sapiens
atcacataccctaaggcatcctgttggtcatagctagtgtcctgtagctgatgactctttaattattaagttgactgagcactgggaagctgtctatttcgttcctaacttcaacaactatatgagatatctgcacccgagctgtttgctgaacactagtttgcgtgaatgcaaaggtcaaacatttcatgaccacatggcagtatcccacttgagattcctcgctctccttccgcgtgccatcgggttccccgctgtac

SEQ ID NO: 625290 - DNA, 128 bp, Homo sapiens
  misc_feature (115)..(115): n is a, c, g, or t
ttgtagagccgcattcttccagtggccgggcactcctcttcaccgcttccccagcgccgccggcccgccgggaggaagggcggaggaagggagggagtgatcgagagagctagcnaagcctggcgagc

SEQ ID NO: 625291 - DNA, 594 bp, Homo sapiens
agatagccttcttcaaacagcaataccagtttacatacagtgaaacacatgtagagggattctttaaatataaacatggaaaggaatctatttacaaagaacccaaactcacaccactatcaaaaatttctcacatactccaacaagcacaatggttcacggaatgaccaactcatcttcaatcatataattacatctcatggcccatgtatagggacttactttatcatttacaaactcaagatactttccaaaaccaatcactggggatacctatcacatggaggaccaaggggaaagggagagaaaagaaataaataacaaccttatttcttaacacactttctataacattatgacaaagtacacatatttttttaaatctcactaacaatattcaaaattttcattatatcttaacaaaaatataatatacactcttacactaaacttacattttattcttccttacacactaatattataatatataacctacataaaccttttacctttaaactaaacttttcttttaaatattttgtttttcctataccccattctttaatacaataactattttatgactttttt

SEQ ID NO: 625292 - DNA, 484 bp, Homo sapiens
tggtcgcgtgaaaggatgctgttactgatgggaaggaacgctaacggatgactgagagaaagagtgactgtagaccaaaatgaacacatatggaaactaatgcaatgtagtggtatgaatgggcagatggtgttgaaatgagagaaaacaaagagtatgggaacccaacaaacagaggagtaagagagggagaggatggcaggaaatgaggtcatgggggagagggaaagaaaaggtcctagtacctgaagctccttggcccaggagcagtgccagtaggatagtcctacccacttgacaaagaactctcgctcctgatctgccttgaagaggacgggagggtgggacatctggatttccatctgcctgttgaggggctggcagtgttacaggtggctccccccagcgccaatgtaggatcttctgcactcgaccctacagcacggcgcatgtgcctcggggacacagccatgcaacattggga

SEQ ID NO: 625293 - DNA, 384 bp, Homo sapiens
cgggcgccggggttcactgggaatccgagctatcccgaggacacggtgtaatacgggctcccgcattactgcctatctgctttacagagcaactccaataccgcgtgctagtgagaatccttgcgcagaatcgcctcatctgaatgtgctgttttaccccagagctatcatagcacgtgtgcacacctccatgaatgcatgagtaacactactgattctcatcacttgtctgggtccttcagagatgcaccatgcagaaagactcctttttaaaaagctgctgacccgacaactgaaatagttgtgtaccaatatgtgcaccacaatacaggaaagacaggtaaatgctgaaatgtcgtacttctggagtttgttacacaggcg

SEQ ID NO: 625294 - DNA, 171 bp, Homo sapiens
gtacagttacccagcacgtgtacctcctcctcctcctattgctcgggctgtagtgccctcgaaaccgtcaagcgtgtatcaggaaaccattcacgaaggggccaaaagtggcttcaattctaaagagtggaccagcggggatctcccacgctgggaaagttaaaaggagtc

SEQ ID NO: 625295 - DNA, 197 bp, Homo sapiens
ccggctagagcggtctccacgaaacaaatgtatcagcacgccttgcaataaaaaggatgaaggaaacaaacgcagtcgctctctttcttgctctgtgaaaacgttcacctcctccaaagcccttgtacagaaattacccagtacatacacaccaggagataaatccccagagtacaacacatctacgattcaggccc

SEQ ID NO: 625296 - DNA, 252 bp, Homo sapiens
tttcagaccgcgtctcactctgtcgcccaggctggcgtgcagtggtgctgctcttgtgctcactgaaactcatgcctcctgggttcaagccattctcctgcctcagcctcccgagtagctgggataacaggtgcatgccaccatgcccggatacgttttttactacttttgggtacgagaccggggtttacccactgtgggccacggcttgtcttgacctcttgcgctcacgtactctgcctgcctctgcct

SEQ ID NO: 625297 - DNA, 370 bp, Homo sapiens
gattatgttggaaaatttggaattttaaaggagtaaagactgtccagcatttggttttataatgtttgtcccccgatttttattaatgtaaaaaaaaccaatttttaaaaaaaagttggactttggcagcttttaaggaaagttggaggggttttaggattgccatcaattttcagcattgtgctatttggaaataagggttttgcttttgtctgatggtcggggcccctttttaatttttattttaaaaaactgttgcaccaaaatattatgttttttggcactgttcagcaaaggtaacgtgtgccctttatgtgtacccaaattcaaatttaagttttttgcaaaaaataaatgcttttaaatgtca

SEQ ID NO: 625298 - DNA, 611 bp, Homo sapiens
  misc_feature (10)..(10): n is a, c, g, or t
  misc_feature (41)..(41): n is a, c, g, or t
  misc_feature (67)..(67): n is a, c, g, or t
tgcccatgcnaattacgtgatactgtagcaccgcccggttngtgtatagaatcagtcgatcccccgngctgcaggaattcggcacgagggagcctgttttgtggctgtcatggacgcctgtgtccgcttcagtgctcttagccaagcccgggagcgcgtgtgtagggccgcccagtatgcttgctctctttttggccatgcgctgcagaggcatggagccagtcctgagttacagaaacagattcgacaactggagagccacctgagccttggaagaaagattctacgcctgggtaactcagcagatgcccctgagtcagacgagatgttcacctatcagacgatgtcctgagattctgcatcactgttaggcaccctaatcgaggcctgtactttgcctgtgacaatggcccgtgggctggaagactggactggctccccgggggatcaagagaagtgggccccgcgtcattcaggaaccataaggtttccctcatcatgaacatttaaggaggggcctccccccattgcctctgaacctatcgctcaagtcccccccttccttcgagcccctcagccacaccccccttttttccgctcgccccggccct

SEQ ID NO: 625299 - DNA, 1169 bp, Homo sapiens
  misc_feature (1169)..(1169): n is a, c, g, or t
ggacacggctgagtgcggagcccgtgcgtaaagatgctctgacctttgaccctgccgttcagctctagggcccgtgcagtgcctacactcatgaacacctcccctaggtcactggtgggcagtgaccctggtcatccttggccacttgcagagctattgatcacagacctgtgcgtcttctggcatagtcctaaaaggctggctatctgtacgccggaccggtgcatgtacacgagcgaatgtccgcaagcgtgagacagtcctatgggagggtacagcacgggcgagcctgcgaggcgttgactttgctggcttggcagaggaattcgtgcatgaactcccgtgtgactccttcatacagagtcctaccatagacagcatccttggtgggagtccgagccctgaaagactaccacgcctcacaagtctttcaagcgattccaaggccctagttaggttcccccttaatgatgtttaaccccaatagcaattcacacgtaagctggcgagtttggtacctttgacggttccttctaacacaatcccagagtatattatcagccccgccttaactggccctccaatatccgatttctacgactgtagacatgaacctgctgcccggatcctgtactcacgacgccgaaaacacatttggtgggatacattggctgtggtccttttcccaagcttcgaaatgtgaagactgggcgcgtgctctgtgcgacgtggtttacccactctgtcgatgtcctgcgcctgaaggtgtatccctggaccatcaaggcagtccctcgcggaactccatggtgtgaaacgctttccaagtgtgtcccgctagtgaaaacgccctggcgcatggcatggccctgtctcaggtcaatatcctttcccctacggggttcgaaaacccagccaatcgctcgaaggttaactgcttggtcgaatctgttgcccctgtgccacgcccctcgtatcacccacggcggccgaagcgacgtcctatcatactccgcctgcgatatagcgcacccccatcgttacagtccagggcgggccgttaaatatcgccccgctactcctctgctggcaagccctcttgcatacaatactcacaacacacgcagaactctaggcaactgatatgacgtagtgacttttggtctccn

SEQ ID NO: 625300 - DNA, 339 bp, Homo sapiens
ctgggcgcagcagctcacacctgtaatcccagcacgtacgggaatttgaggcgggtggattgcttgagccaggaattcaagaccagccaggcaacacagcaaaatccccacacctctgaaaaaaacacaaaattagccggtcatggtggcacaccccgtagttccagctacccaggaggctgaggtgggaggatggcttgagactaagattgcagtaagccaagatcacaccactgcactccagtctgagcaacaaagccagaccccatttcacagaaaaaaaacagacccaacactcccacacagtatgttctttactgtaaatagaagtgcggacat

SEQ ID NO: 625301 - DNA, 465 bp, Homo sapiens
  misc_feature (329)..(329): n is a, c, g, or t
  misc_feature (417)..(417): n is a, c, g, or t
cgatggtcctcagctctagctgtctcagccggggccaacttagactcaagggcagcaagggtcatctggtggcggggcacgggccccagcatcctcctcacccaggcgtccccgtagctccgggatctgccgttccagctgcggccgcccgctctcggcctgggctgagaaacggcgctcagctgacagctcgggggtcagggactctaccggcaggagcagctggcggtagcggtcatggagcagctctgagtggctcggctcctcctccagctcttcctccaacggccccaggcgcccctccagctgacgcttctcctccagaaggngtgccttgctaaggttaccatgggccacctcatctggcatctcatcccggtcctgctgggcctgccggcgagcacggtccgaggcggncagttcctccggcagccgcagcacctcaggctccaggtgaggaccatc

SEQ ID NO: 625302 - DNA, 572 bp, Homo sapiens
cgttttgatgtgagagatcgataagcgtgccggagtacagcaaccacagcggaataatggcgatctgcatatgcaacaaccaacgccacagcggatgcgtggagattcggcggatggcatcgctacaggccagcaatgccagcgccgcagccagccagaaaccactgccgaggctggtacgcgccagcgcactgccattttgcgccagttgggtcgccgcctttccagctccccacaccagcaatacgaagacgaattgcgccagaatgagtgcacaaatgctgccttttttaccgggaataaaacaggccgtcagccaggcgcaaccaacgcccaccagcatccagaccgtttgcggccacagctgccagagatgacgcccctcacccgaaactaaacgattaggcgcgtaacagataaacggcagcgccgctgcgattgccgtcagcaacagcagcagcgccagaacaggattaatacggaaataagtcacgggaaattacttcgctcaccctttttggttcaagtagccgggagccacttttttgcattcagtccttcacaagaaggtg

SEQ ID NO: 625303 - DNA, 206 bp, Homo sapiens
cgtttctcccagtgcataacgtccaggcgttcgccgacacgcgccgccgaatccagtccacgcgccttcaaccaggccacggccgcgccctgctcctggcccagcgcggcctgctgcagggtttccagcgaagccaggcgaccgcgcaggccgttggcctgcttgcgcagttcggccagttcgttctggccattgcgctgctgttc

SEQ ID NO: 625304 - DNA, 577 bp, Homo sapiens
  misc_feature (411)..(411): n is a, c, g, or t
ggagtaaaggtgctgcaatgatgttagctgtggccactgtggatttttcgcaaaaaaaaaaaaaaaaaaaaaaaaaaaaaatttttggggggctgggcgaaaaaatttttaaaaccatttttggggcgccgcggggccccagatggtaaggtaaacctgtcgccacaaccgggctcccaaggagaactcgtggcacagagccatatgcgctgggagttcccacccaattaaaaaaccgcgccggggggcgccaccccggccccgttcctagaaccaaacttcccacagtggagagtcaggagagcgagcacaacaccgggggggcctcctatccacacgagggacgggccccgacgcgagagaggccctgcagatcattcaaaaatataagcccccccggcccggggggtnaacccgcagaaacaagcgacagaacagcaagccaaaacacaggagaacgagagcacacagcccacaaacaaagaaccaagacaagccagaacgaaacagcacaacgagcgcagcaactcacgccgaccacaaacaccaaagccaaacaaccaaccaccagcctaca

SEQ ID NO: 625305 - DNA, 527 bp, Homo sapiens
tacccttattttattatataatgtacagatgtattgaaacatcacactctaccccataagcatgtacaattattatgtgtcagttataaaaaaaataaaaaatattaatctggccccaatgtataaaacagaagtgaatgaggtaattagaaagaagatgaataaaatgtttttataacagaacatataaagaataactatttcacagagctttatgaagatgatagaatatgtgtaaatattttgtaaactgcaaggtgctagataagtctaatttttattacttctattattatagcagagaagaggtaataattcctaagaggactagaataggatcttcatgcaaggtattttgaaggaaaacctaacaacgtttggattacatgtaatgtgagggataaggaaaacggaagggtctaaatgaggggtgtccaaccttttggcttctctgggccacactggaagaattgtcttgggccacacataaaatacatgaacactaacaaaagctgatgagctaaaaa

SEQ ID NO: 625306 - DNA, 490 bp, Homo sapiens
atcttggaaaggcagagagtcaaagagcccttcgggcccccgcaaaaagttccctcccagagtccttaagaagaaccccctggaaaactttagaatcatgttggagcttaacccatatgcaaagaccatgggccgggacccccttttttgccaggccaggaatcccaagctccgggtggataaggcagcttcttcaccagcggcccttccagcccaatccaattagaagggggcggttgccggccaaaaacctttggttggttaaaaaagaaaaaaggcctccttttgggttttaaaacccaaaaaagcctttggggggaaaaaaggccgccgcttcccagaaacccgccccttaaaaaaagcctgcagagaagaaaccttctcccggggggaagaagcctgcggcataaactttttaatttgttttttccctaaagggccaatccttttgggccgctttttttgaataaaggcctggttttcccggcca

SEQ ID NO: 625307 - DNA, 316 bp, Homo sapiens
gtcttgtgaaacataattctgaagctgaagaaactaaacagtcagacctccaggactaagatgaagtgagccgtgaggagatcgtgtcataagaatgcttctgtcgttggccgggtgcagtgctgtgtgtatctagttccagctacttgagaggctgaggcaggaggattgcttgagtccagaaagtggcagttgctgtgagtggagatcacgccactgctctccagccttggtggttagagcgagaccctgtctcaaaaaataaacaaaaacaaaatgcttctgtcagttaacaatctttattagagggttttta

SEQ ID NO: 625308 - DNA, 1012 bp, Homo sapiens
ggagagagagagaactagtctcgagtttgttttttttcttgggttttttttttacccctccttagctttatgcgctcaaaaaccaatttaaaccccccccccttttaacgggggggcggggacaaaagcaaaaacgcagaaagccagcctggtggtaaaccaccaggttcgtgtgccccccgcaattttatcgcccgtgattgggatattgggttttcacatcttgctcccgtgttggctgggagtgagagttgtgaggggtgagagccctcctgtggggggcactgtggccactgtggagcccccctttgggagaaagtctcagagagggggaaggtgggaaaaggaggcccaagtgttcgcggacacgtggatcttcgtggggagaccaggtggctgtggttccccacagaaagagctcccgtgagagagggcggaagagcgggaggggttgagggacaggggactcctaccacagacgaggtgcgttacagagaaaggggcgtgcactcagagagaggcgcccacacagagcgagaggggggcgctcctccagtggggtgtgggccctgtgaaagagttgtgcgcacgggagaggggggaaaaaggggggcatataaccgagcgtgttgtgttgctacacacagagagagggggtttccaccaactaagaaaggacgtgggggcgacaaagaggtggtgggaacagaggcctcttatccgagcaacaaaacatgttgtgagaggagaaaaagcgcgcgatgccacacatatatgatcaacgcttgcgaggagagcaaaacatatatgtgtgccacacgcgaccacctcagtcagagaacaaccggctcgtgcgccacctggtgctttcactacccgaagaggaaggcgtctcacagaaaagaaaccttcgttgtgtgggagaaaaacacccactccatgaggggggggaacacaacaaagggagtctgggacgtgtaatgaaaagagccccgggggggaccaaatgaca

SEQ ID NO: 625309 - DNA, 378 bp, Homo sapiens
gctgaccttgagtgtcccggggggtcgaggaaacgattgctctcaggtaggttctgcgtcccgaccgccggccctgactatggtcgcaggccgtcctgtccctccccgggactccgaatttctctcctcaaaggacagacaacagggctatgcgcttgttggcaaaatgcagtggccggctcccaaaaaccccatgtgtgtacgattaaaagttggccgtccccaggcctcccagcgcaaacttaaagagacagggcttagatgaaaaccaaacatgggccaagctgggcataatataacaacctaagagactttccggagcagcctgaaacagagcctgcgagaaacggggctagcaagagacatcccccgagtcct

SEQ ID NO: 625310 - DNA, 502 bp, Homo sapiens
tggggccaatgaggggtgattcagggcggaaggaaatagcctattccccccccggttttggaggatgggggcccgcaccaccctggggaagggggcaaccgtgtctttgaatatcgaccacgcaggggtgtgggatcccctattgtggatatggccccctatgccattgggggtcctgaccaagaatttggggggggggggggcccggttggctttttataaccccaactctttttgaaatccccccaaaaaaaatttaaccccaaagggggtcctctggttttatttttgtcaaccggggcaagtggccgcccaaattccggttatttttttcccaaatggttgggaccgggataatttgccaaagaaaaatgaaacttttttttttttggggttcccccaaaaccaattcaaagggttttggttttttttttttcccaattcccatttcaaaaggtttcaaggggggtataataaataaacttcccccctttttttgata

SEQ ID NO: 625311 - DNA, 156 bp, Homo sapiens
cctgaacttcacggaccattcaataacttttcaactacagtgctgcttacgaaatgcaaggaacttggagcaaagacaacagagggcatataaaaccaaatccggcaaccattcattcagaatctcggcaaacacggcttgggcggaagtggctca

SEQ ID NO: 625312 - DNA, 707 bp, Homo sapiens
  misc_feature (376)..(376): n is a, c, g, or t
  misc_feature (509)..(509): n is a, c, g, or t
  misc_feature (538)..(538): n is a, c, g, or t
  misc_feature (540)..(540): n is a, c, g, or t
  misc_feature (557)..(557): n is a, c, g, or t
  misc_feature (622)..(622): n is a, c, g, or t
  misc_feature (631)..(631): n is a, c, g, or t
  misc_feature (664)..(664): n is a, c, g, or t
cagacgttcacaccacagcacccggctgggcactagggtgatactgggcttggctttgagctccgtgcctctgtgccccatacgcccctcagatctctggtgacagtgcggggctgcctacaggacacccagggctccttgatcttttaggaactgcggcacccccgaagctgtgacaggtgcagaggcgctgccgtcctgggccgggcctcaccttccgccttgtgtgctctggcgccagcacccagtcccaagggcacagcggctgcgacttgcctctggccagggcaggtggtggtgtcatacccaggacgggaacccacacttgatgtcctccagggttttttttttttacattatcttaaggactgacagnctcccaccccatctgctcccatctgtccctaatttcatgcgcctccgcctgagttcctgcacgcatttcctgaataaacacacccctgtgccagtcagaacccgcgggggttttggaagtgagagcccagcanggcagctggccagggggcggcactgcctncngggagcaccggtgcccnggactctgcttctgaggcttgcctgtacgatgaaatttgataaatatctccaatcagaacccttntagtgtatntcttaaatataccagaaactggtgtctttacangactagcttgcccggtgatgacacctcgagccgcggggctcgc

SEQ ID NO: 625313 - DNA, 245 bp, Homo sapiens
aaaaaaaaaaaaaacccccgggccccccaggggatgcctttttagggcccccttttttcaaattgccctttttttttccctgggcccccggccccggtggggtttttttttttttggggggtttttttaccaagcccccctttttttttcccccgggtttggggctttccccaggttggtttggggggttttttttttttttttttgggcttttttttttttccggttaattacccccctggcca

SEQ ID NO: 625314 - DNA, 290 bp, Homo sapiens
gccggccccatgagctcctggaaagccagatggaggaggggccttggagcctggccaggagcccagggcctagtggggcccagggaggcggggagggtccaggtgttgacctgcctgccccagcagccaccatgtcaggcccactggtccttccctcctcgggggtcacccagccttcagacaaggctgcctcacacatgggggccgcacggacttggggctcctcgttgtatgagaagatgacctgcaggtcaacagttacaaaaacagcctaagtcatacacgctccc

SEQ ID NO: 625315 - DNA, 169 bp, Homo sapiens
aatggaggcagagctggaggacgagaggaagcagcgctcgatggcggagtggccgcccggaagaagctggagatggacctgaaggacctggaggcgcacatcgagctcgcgccgaacaaagaaccggagacgaagctcatcagacacgcgtgcggaacgctgtcagggc

SEQ ID NO: 625316 - DNA, 632 bp, Homo sapiens
ccaaaaaaacagccttttaattccattcaaggggttttctttttaaaacccaacaaaccctttttttacatatggggctgggttttccaaaacagggggaaatttaaccaggtttttttttaaggcccttccaaatgtaaaccttggggaccttttaaggcctggcctaaaaatggtccccattttcggggaaacccagggggttttattgggaaaggggccatattccccatccgggggaatataattaaaaggggttcaatttacgggtttgttttaaggtccaagaaacccccaaggttaatacctagaactttgggcaaaatcataggggtctttttaaactaaggccccattatttaatgttttcccagagaagggagagggttttaaagattttatgttgccccatgttttttaaggggttctaaaatataaaaccagagtttttttttggcctttaattaacactaaggttggcgcgggggcttttataggaataactaaaatggatcaggagaagggccctcaaccctgtttttttagagcggaaaccccaagaatttttttcatttttccctgtcgtctattttcccttaaaaaaggtttttagggagatttttaaacggggg

SEQ ID NO: 625317 - DNA, 4580 bp, Homo sapiens
ggactcaggaagagatagacccataatgatgctgcctcaaaactcgtggcatattgattttggaagatgctgctgtcatcagaaccttttctctgctgtggtaacttgcatcctgctcctgaattcctgctttctcatcagcagttttaatggaacagatttggagttgaggctggtcaatggagacggtccctgctctgggacagtggaggtgaaattccagggacagtgggggactgtgtgtgatgatgggtggaacactactgcctcaactgtcgtgtgcaaacagcttggatgtccattttccttcgccatgtttcgttttggacaagccgtgactagacatggaaaaatttggcttgatgatgtttcctgttatggaaatgagtcagctctctgggaatgtcaacaccgggaatggggaagccataactgttatcatggagaagatgttggtgtgaactgttacggtgaagccaatctgggtttgaggctagtggatggaaacaactcctgttcagggagagtggaggtgaaattccaagaaaggtggggaactatatgtgatgatgggtggaacttgaatactgctgccgtggtgtgcaggcaactaggatgtccatcttcttttatttcttctggagttgttaatagccctgctgtattgcgccccatttggctggatgacattttatgccaggggaatgagttggcactctggaattgcagacatcgtggatggggaaatcatgactgcagtcacaatgaggatgtcacattaacttgttatgatagtagtgatcttgaactaaggcttgtaggtggaactaaccgctgtatggggagagtagagctgaaaatccaaggaaggtgggggaccgtatgccaccataagtggaacaatgctgcagctgatgtcgtatgcaagcagttgggatgtggaaccgcacttcacttcgctggcttgcctcatttgcagtcagggtctgatgttgtatggcttgatggtgtctcctgctccggtaatgaatcttttctttgggactgcagacattccggaaccgtcaattttgactgtcttcatcaaaacgatgtgtctgtgatctgctcagatggagcagatttggaactgcgactagcagatggaagtaacaattgttcagggagagtagaggtgagaattcatgaacagtggtggacaatatgtgaccagaactggaagaatgaacaagcccttgtggtttgtaagcagctaggatgtccgttcagcgtctttggcagtcgtcgtgctaaacctagtaatgaagctagagacatttggataaacagcatatcttgcactgggaatgagtcagctctctgggactgcacatatgatggaaaagcaaagcgaacatgcttccgaagatcagatgctggagtaatttgttctgataaggcagatctggacctaaggcttgtcggggctcatagcccctgttatgggagattggaggtgaaataccaaggagagtgggggactgtgtgtcatgacagatggagcacaaggaatgcagctgttgtgtgtaaacaattgggatgtggaaagcctatgcatgtgtttggtatgacctattttaaagaagcatcaggacctatttggctggatgacgtttcttgcattggaaatgagtcaaatatctgggactgtgaacacagtggatggggaaagcataattgtgtacacagagaggatgtgattgtaacctgctcaggtgatgcaacatggggcctgaggctggtgggcggcagcaaccgctgctcgggaagactggaggtgtactttcaaggacggtggggcacagtgtgtgatgacggctggaacagtaaagctgcagctgtggtgtgtagccagctggactgcccatcttctatcattggcatgggtctgggaaacgcttctacaggatatggaaaaatttggctcgatgatgtttcctgtgatggagatgagtcagatctctggtcatgcaggaacagtgggtggggaaataatgactgcagtcacagtgaagatgttggagtgatctgttctgatgcatcggatatggagctgaggcttgtgggtggaagcagcaggtgtgctggaaaagttgaggtgaatgtccagggtgccgtgggaattctgtgtgctaatggctggggaatgaacattgctgaagttgtttgcaggcaacttgaatgtgggtctgcaatcagggtctccagagagcctcatttcacagaaagaacattacacatcttaatgtcgaattctggctgcactggaggggaagcctctctctgggattgtatacgatgggagtggaaacagactgcgtgtcatttaaatatggaagcaagtttgatctgctcagcccacaggcagcccaggctggttggagctgatatgccctgctctggacgtgttgaagtgaaacatgcagacacatggcgctctgtctgtgattctgatttctctcttcatgctgccaatgtgctgtgcagagaattaaactgtggagatgccatatctctttctgtgggagatcactttggaaaagggaatggtctaacttgggccgaaaagttccagtgtgaagggagtgaaactcaccttgcattatgccccattgttcaacatccggaagacacttgtatccacagcagagaagttggagttgtctgttcccgatatacagatgtccgacttgtgaatggcaaatcccagtgtgacgggcaagtggagatcaacgtgcttggacactggggctcactgtgtgacacccactgggacccagaagatgcccgtgttctatgcagacagctcagctgtgggactgctctctcaaccacaggaggaaaatatattggagaaagaagtgttcgtgtgtggggacacaggtttcattgcttagggaatgagtcacttctggataactgtcaaatgacagttcttggagcacctccctgtatccatggaaatactgtctctgtgatctgcacaggaagcctgacccagccactgtttccatgcctcgcaaatgtatctgacccatatttgtctgcagttccagagggcagtgctttgatctgcttagaggacaaacggctccgcctagtggatggggacagccgctgtgccgggagagtagagatctatcacgacggcttctggggcaccatctgtgatgacggctgggacctgagcgatgcccacgtggtgtgtcaaaagctgggctgtggagtggccttcaatgccacggtctctgctcactttggggaggggtcagggcccatctggctggatgacctgaactgcacaggaatggagtcccacttgtggcagtgcccttcccgcggctgggggcagcacgactgcaggcacaaggaggacgcaggggtcatctgctcagaattcacagccttgaggctctacagtgaaactgaaacagagagctgtgctgggagattggaagtcttctataacgggacctggggcagcgtcggcaggaggaacatcaccacagccatagcaggcattgtgtgcaggcagctgggctgtggggagaatggagttgtcagcctcgcccctttatctaagacaggctctggtttcatgtgggtggatgacattcagtgtcctaaaacgcatatctccatatggcagtgcctgtctgccccatgggagcgaagaatctccagcccagcagaagagacctggatcacatgtgaagatagaataagagtgcgtggaggagacaccgagtgctctgggagagtggagatctggcacgcaggctcctggggcacagtgtgtgatgactcctgggacctggccgaggcggaagtggtgtgtcagcagctgggctgtggctctgctctggctgccctgagggacgcttcgtttggccagggaactggaaccatctggttggatgacatgcggtgcaaaggaaatgagtcatttctatgggactgtcacgccaaaccctggggacagagtgactgtggacacaaggaagatgctggcgtgaggtgctctggacagtcgctgaaatcactgaatgcctcctcaggtcatttagcacttattttatccagtatctttgggctccttctcctggttctgtttattctatttctcacgtggtgccgagttcagaaacaaaaacatctgcccctcagagtttcaaccagaaggaggggttctctcgaggagaatttattccatgagatggagacctgcctcaagagagaggacccacatgggacaagaacctcagatgacacccccaaccatggttgtgaagatgctagcgacacatcgctgttgggagttcttcctgcctctgaagccacaaaatgactttagacttccagggctcaccagatcaacctctaaatatctttgaaggagacaacaacttttaaatgaataaagaggaagtcaagttgccctatggaaaacttgtccaaataacatttcttgaacaataggagaacagctaaattgataaagactggtgataataaaaattgaattatgtatatcactgtta

SEQ ID NO: 625318 - DNA, 4652 bp, Homo sapiens
ggactcaggaagagatagacccataatgatgctgcctcaaaactcgtggcatattgattttggaagatgctgctgtcatcagaaccttttctctgctgtggtaacttgcatcctgctcctgaattcctgctttctcatcagcagttttaatggaacagatttggagttgaggctggtcaatggagacggtccctgctctgggacagtggaggtgaaattccagggacagtgggggactgtgtgtgatgatgggtggaacactactgcctcaactgtcgtgtgcaaacagcttggatgtccattttccttcgccatgtttcgttttggacaagccgtgactagacatggaaaaatttggcttgatgatgtttcctgttatggaaatgagtcagctctctgggaatgtcaacaccgggaatggggaagccataactgttatcatggagaagatgttggtgtgaactgttacggtgaagccaatctgggtttgaggctagtggatggaaacaactcctgttcagggagagtggaggtgaaattccaagaaaggtggggaactatatgtgatgatgggtggaacttgaatactgctgccgtggtgtgcaggcaactaggatgtccatcttcttttatttcttctggagttgttaatagccctgctgtattgcgccccatttggctggatgacattttatgccaggggaatgagttggcactctggaattgcagacatcgtggatggggaaatcatgactgcagtcacaatgaggatgtcacattaacttgttatgatagtagtgatcttgaactaaggcttgtaggtggaactaaccgctgtatggggagagtagagctgaaaatccaaggaaggtgggggaccgtatgccaccataagtggaacaatgctgcagctgatgtcgtatgcaagcagttgggatgtggaaccgcacttcacttcgctggcttgcctcatttgcagtcagggtctgatgttgtatggcttgatggtgtctcctgctccggtaatgaatcttttctttgggactgcagacattccggaaccgtcaattttgactgtcttcatcaaaacgatgtgtctgtgatctgctcagatggagcagatttggaactgcgactagcagatggaagtaacaattgttcagggagagtagaggtgagaattcatgaacagtggtggacaatatgtgaccagaactggaagaatgaacaagcccttgtggtttgtaagcagctaggatgtccgttcagcgtctttggcagtcgtcgtgctaaacctagtaatgaagctagagacatttggataaacagcatatcttgcactgggaatgagtcagctctctgggactgcacatatgatggaaaagcaaagcgaacatgcttccgaagatcagatgctggagtaatttgttctgataaggcagatctggacctaaggcttgtcggggctcatagcccctgttatgggagattggaggtgaaataccaaggagagtgggggactgtgtgtcatgacagatggagcacaaggaatgcagctgttgtgtgtaaacaattgggatgtggaaagcctatgcatgtgtttggtatgacctattttaaagaagcatcaggacctatttggctggatgacgtttcttgcattggaaatgagtcaaatatctgggactgtgaacacagtggatggggaaagcataattgtgtacacagagaggatgtgattgtaacctgctcaggtgatgcaacatggggcctgaggctggtgggcggcagcaaccgctgctcgggaagactggaggtgtactttcaaggacggtggggcacagtgtgtgatgacggctggaacagtaaagctgcagctgtggtgtgtagccagctggactgcccatcttctatcattggcatgggtctgggaaacgcttctacaggatatggaaaaatttggctcgatgatgtttcctgtgatggagatgagtcagatctctggtcatgcaggaacagtgggtggggaaataatgactgcagtcacagtgaagatgttggagtgatctgttctgatgcatcggatatggagctgaggcttgtgggtggaagcagcaggtgtgctggaaaagttgaggtgaatgtccagggtgccgtgggaattctgtgtgctaatggctggggaatgaacattgctgaagttgtttgcaggcaacttgaatgtgggtctgcaatcagggtctccagagagcctcatttcacagaaagaacattacacatcttaatgtcgaattctggctgcactggaggggaagcctctctctgggattgtatacgatgggagtggaaacagactgcgtgtcatttaaatatggaagcaagtttgatctgctcagcccacaggcagcccaggctggttggagctgatatgccctgctctggacgtgttgaagtgaaacatgcagacacatggcgctctgtctgtgattctgatttctctcttcatgctgccaatgtgctgtgcagagaattaaactgtggagatgccatatctctttctgtgggagatcactttggaaaagggaatggtctaacttgggccgaaaagttccagtgtgaagggagtgaaactcaccttgcattatgccccattgttcaacatccggaagacacttgtatccacagcagagaagttggagttgtctgttcccgatatacagatgtccgacttgtgaatggcaaatcccagtgtgacgggcaagtggagatcaacgtgcttggacactggggctcactgtgtgacacccactgggacccagaagatgcccgtgttctatgcagacagctcagctgtgggactgctctctcaaccacaggaggaaaatatattggagaaagaagtgttcgtgtgtggggacacaggtttcattgcttagggaatgagtcacttctggataactgtcaaatgacagttcttggagcacctccctgtatccatggaaatactgtctctgtgatctgcacaggaagcctgacccagccactgtttccatgcctcgcaaatgtatctgacccatatttgtctgcagttccagagggcagtgctttgatctgcttagaggacaaacggctccgcctagtggatggggacagccgctgtgccgggagagtagagatctatcacgacggcttctggggcaccatctgtgatgacggctgggacctgagcgatgcccacgtggtgtgtcaaaagctgggctgtggagtggccttcaatgccacggtctctgctcactttggggaggggtcagggcccatctggctggatgacctgaactgcacaggaatggagtcccacttgtggcagtgcccttcccgcggctgggggcagcacgactgcaggcacaaggaggacgcaggggtcatctgctcagaattcacagccttgaggctctacagtgaaactgaaacagagagctgtgctgggagattggaagtcttctataacgggacctggggcagcgtcggcaggaggaacatcaccacagccatagcaggcattgtgtgcaggcagctgggctgtggggagaatggagttgtcagcctcgcccctttatctaagacaggctctggtttcatgtgggtggatgacattcagtgtcctaaaacgcatatctccatatggcagtgcctgtctgccccatgggagcgaagaatctccagcccagcagaagagacctggatcacatgtgaagatagaataagagtgcgtggaggagacaccgagtgctctgggagagtggagatctggcacgcaggctcctggggcacagtgtgtgatgactcctgggacctggccgaggcggaagtggtgtgtcagcagctgggctgtggctctgctctggctgccctgagggacgcttcgtttggccagggaactggaaccatctggttggatgacatgcggtgcaaaggaaatgagtcatttctatgggactgtcacgccaaaccctggggacagagtgactgtggacacaaggaagatgctggcgtgaggtgctctggacagtcgctgaaatcactgaatgcctcctcaggtcatttagcacttattttatccagtatctttgggctccttctcctggttctgtttattctatttctcacgtggtgccgagttcagaaacaaaaacatctgcccctcagagtttcaaccagaaggaggggttctctcgaggagaatttattccatgagatggagacctgcctcaagagagaggacccacatgggacaagaacctcagatgacacccccaaccatggttgtgaagatgctagcgacacatcgctgttgggagttcttcctgcctctgaagccacaaaatgactttagacttccagggctcaccagatcaacctctaaatatctttgaaggagacaacaacttttaaatgaataaagaggaagtcaagttgccctatggaaaacttgtccaaataacatttcttgaacaataggagaacagctaaattgataaagactggtgataataaaaattgaattatgtatatcactgttaaaaaaaaaaaacaaacccccccacaaatcaaaaatacacacccaaccccacccccaggaaggaaaaacaagg

SEQ ID NO: 625319 - DNA, 246 bp, Homo sapiens
atgcccagacattcccgagctggccgtccacttccaaccccccggaccgcaggcagtgcatatccacttcgcagcaggtgagccctcctcctggtgaccctgctaaccttttccagactgcaccatctctttctagacagagggcatggctgtgtgtgcacctgtgtctatgactgggcgttgacatggagggtatcagtgcgcaaatgggaccgtgcacggggctattgtgacagagcatgcctg

SEQ ID NO: 625320 - DNA, 4868 bp, Homo sapiens
ggactcaggaagagatagacccataatgatgctgcctcaaaactcgtggcatattgattttggaagatgctgctgtcatcagaaccttttctctgctgtggtaacttgcatcctgctcctgaattcctgctttctcatcagcagttttaatggaacagatttggagttgaggctggtcaatggagacggtccctgctctgggacagtggaggtgaaattccagggacagtgggggactgtgtgtgatgatgggtggaacactactgcctcaactgtcgtgtgcaaacagcttggatgtccattttccttcgccatgtttcgttttggacaagccgtgactagacatggaaaaatttggcttgatgatgtttcctgttatggaaatgagtcagctctctgggaatgtcaacaccgggaatggggaagccataactgttatcatggagaagatgttggtgtgaactgttacggtgaagccaatctgggtttgaggctagtggatggaaacaactcctgttcagggagagtggaggtgaaattccaagaaaggtggggaactatatgtgatgatgggtggaacttgaatactgctgccgtggtgtgcaggcaactaggatgtccatcttcttttatttcttctggagttgttaatagccctgctgtattgcgccccatttggctggatgacattttatgccaggggaatgagttggcactctggaattgcagacatcgtggatggggaaatcatgactgcagtcacaatgaggatgtcacattaacttgttatgatagtagtgatcttgaactaaggcttgtaggtggaactaaccgctgtatggggagagtagagctgaaaatccaaggaaggtgggggaccgtatgccaccataagtggaacaatgctgcagctgatgtcgtatgcaagcagttgggatgtggaaccgcacttcacttcgctggcttgcctcatttgcagtcagggtctgatgttgtatggcttgatggtgtctcctgctccggtaatgaatcttttctttgggactgcagacattccggaaccgtcaattttgactgtcttcatcaaaacgatgtgtctgtgatctgctcagatggagcagatttggaactgcgactagcagatggaagtaacaattgttcagggagagtagaggtgagaattcatgaacagtggtggacaatatgtgaccagaactggaagaatgaacaagcccttgtggtttgtaagcagctaggatgtccgttcagcgtctttggcagtcgtcgtgctaaacctagtaatgaagctagagacatttggataaacagcatatcttgcactgggaatgagtcagctctctgggactgcacatatgatggaaaagcaaagcgaacatgcttccgaagatcagatgctggagtaatttgttctgataaggcagatctggacctaaggcttgtcggggctcatagcccctgttatgggagattggaggtgaaataccaaggagagtgggggactgtgtgtcatgacagatggagcacaaggaatgcagctgttgtgtgtaaacaattgggatgtggaaagcctatgcatgtgtttggtatgacctattttaaagaagcatcaggacctatttggctggatgacgtttcttgcattggaaatgagtcaaatatctgggactgtgaacacagtggatggggaaagcataattgtgtacacagagaggatgtgattgtaacctgctcaggtgatgcaacatggggcctgaggctggtgggcggcagcaaccgctgctcgggaagactggaggtgtactttcaaggacggtggggcacagtgtgtgatgacggctggaacagtaaagctgcagctgtggtgtgtagccagctggactgcccatcttctatcattggcatgggtctgggaaacgcttctacaggatatggaaaaatttggctcgatgatgtttcctgtgatggagatgagtcagatctctggtcatgcaggaacagtgggtggggaaataatgactgcagtcacagtgaagatgttggagtgatctgttctgatgcatcggatatggagctgaggcttgtgggtggaagcagcaggtgtgctggaaaagttgaggtgaatgtccagggtgccgtgggaattctgtgtgctaatggctggggaatgaacattgctgaagttgtttgcaggcaacttgaatgtgggtctgcaatcagggtctccagagagcctcatttcacagaaagaacattacacatcttaatgtcgaattctggctgcactggaggggaagcctctctctgggattgtatacgatgggagtggaaacagactgcgtgtcatttaaatatggaagcaagtttgatctgctcagcccacaggcagcccaggctggttggagctgatatgccctgctctggacgtgttgaagtgaaacatgcagacacatggcgctctgtctgtgattctgatttctctcttcatgctgccaatgtgctgtgcagagaattaaactgtggagatgccatatctctttctgtgggagatcactttggaaaagggaatggtctaacttgggccgaaaagttccagtgtgaagggagtgaaactcaccttgcattatgccccattgttcaacatccggaagacacttgtatccacagcagagaagttggagttgtctgttcccgatatacagatgtccgacttgtgaatggcaaatcccagtgtgacgggcaagtggagatcaacgtgcttggacactggggctcactgtgtgacacccactgggacccagaagatgcccgtgttctatgcagacagctcagctgtgggactgctctctcaaccacaggaggaaaatatattggagaaagaagtgttcgtgtgtggggacacaggtttcattgcttagggaatgagtcacttctggataactgtcaaatgacagttcttggagcacctccctgtatccatggaaatactgtctctgtgatctgcacaggaagcctgacccagccactgtttccatgcctcgcaaatgtatctgacccatatttgtctgcagttccagagggcagtgctttgatctgcttagaggacaaacggctccgcctagtggatggggacagccgctgtgccgggagagtagagatctatcacgacggcttctggggcaccatctgtgatgacggctgggacctgagcgatgcccacgtggtgtgtcaaaagctgggctgtggagtggccttcaatgccacggtctctgctcactttggggaggggtcagggcccatctggctggatgacctgaactgcacaggaatggagtcccacttgtggcagtgcccttcccgcggctgggggcagcacgactgcaggcacaaggaggacgcaggggtcatctgctcagaattcacagccttgaggctctacagtgaaactgaaacagagagctgtgctgggagattggaagtcttctataacgggacctggggcagcgtcggcaggaggaacatcaccacagccatagcaggcattgtgtgcaggcagctgggctgtggggagaatggagttgtcagcctcgcccctttatctaagacaggctctggtttcatgtgggtggatgacattcagtgtcctaaaacgcatatctccatatggcagtgcctgtctgccccatgggagcgaagaatctccagcccagcagaagagacctggatcacatgtgaagatagaataagagtgcgtggaggagacaccgagtgctctgggagagtggagatctggcacgcaggctcctggggcacagtgtgtgatgactcctgggacctggccgaggcggaagtggtgtgtcagcagctgggctgtggctctgctctggctgccctgagggacgcttcgtttggccagggaactggaaccatctggttggatgacatgcggtgcaaaggaaatgagtcatttctatgggactgtcacgccaaaccctggggacagagtgactgtggacacaaggaagatgctggcgtgaggtgctctggacagtcgctgaaatcactgaatgcctcctcaggtcatttagcacttattttatccagtatctttgggctccttctcctggttctgtttattctatttctcacgtggtgccgagttcagaaacaaaaacatctgcccctcagagtttcaaccagaaggaggggttctctcgaggagaatttattccatgagatggagacctgcctcaagagagaggacccacatgggacaagaacctcagatgacacccccaaccatggttgtgaagatgctagcgacacatcgctgttgggagttcttcctgcctctgaagccacaaaatgactttagacttccagggctcaccagaatcttgatatgtgggtgatgttaagccctcctgacccagcaagttgaaaactcaccatgaagagcagcggtcaaaggaactagggaaatcctacagtgtgatcagtttttctgctgcaggtaagcagagagcatccctttgcactgaataggccactgagccgcattactgcttattaattcctcatcattcctgcctccttttatgttctccctaaatgactaggtttgcggggccaggaactttatttcccacaatccctaacaggaagaatctgggctcgcttccaccagagagacttgttcatggaagatacggtttcgcagggatcctttgtacttgttcctgaaaactgtaggctaatattacagctgggtgcctttacagtggtttcctggggggtttaaacttccggataagggtttggaacctattattccccgtgttaaccccttg

SEQ ID NO: 625321 - DNA, 493 bp, Homo sapiens
gtctcatgttgtcacgaatacagtctaggtagttggtaaccttgagtgtacacacccggggacatcttctgtccacagcccaggtcccagctgatgatgcccaccaaagtcatgcggccatcgttcagacacaccaggggcctcccgaatcgccctggcaggcgtcgtgcaagtttgcctggggaccgcccgatccaagtgtctccagcacacagcatgtagtcggtgactgtactgttaactaaatcttgtgatgtgcagcggcaggatgggtacagtctgacatgagcctccttacagccgctccgaatagaaaggagactaggcctcatgcttgccggtagccggagagctcacaactccgtccagtaccggcagctgcaggtgtccgccgggggaatggcacacaggtggcgggaccacgctgctctcctgggcacagggtgaacgaatccgatatcaagctgcagcagcggaatgtcatttgtccgta

SEQ ID NO: 625322 - DNA, 1021 bp, Homo sapiens
ccacgcgctcgccctgaatggaggccctaaatgggagcagactgggaaactgggctggaggactcagtgtggcgaggttggatggaccctggggtgtggtctaggaattttggagaggaagtggaagactctgagagcagggcaaggaatcctgggggctgaattgactgggagactttgggggatgggtctggagaccgtcggggtggtcctggaggacctagatggtatgtggctgcagtgaccctggcccctggcccctggtcctagggtggtgcctgtgggaatcctggtggcctggaaggatgggatcctggagcggggcttggaggccaccgggtgggactctgagggtcgacagcgttaagttccagccggctccacccgttcacagaggacctgcgcttttcagcgtagcgcgatctgctgtggctgactgtgccacttgcagggctgtgctcggctggctgccctcaccatcccttgccacgtccactacctgctggccacctgccgagcctgccgggcttgtgctgggctctccgcgggtcacgtggactttcctgtcccgggggccgggacggcagaggtgctggtggcgcggggagtgcgcgtcaaggtgaaccgaggcctaccggtatccgcgtgggcaactgcctgcgtaccccagcgtcggctcaccgacgtctccctggcgctgagctgagctgggcccaacgaatcgggtatctacgctgtgaagccagcacggcaattgagtacagacagccgaccgctatggcagccaagggcacacagggcaaataaacaccaccggagacgggctccgccaggcaaggacatccccacaccccgcgggcccacggaccgcatgtggcccgcatatgcaccccaaaatggccacccgggacacagacacatagcggcccaacctgaggcggaaacgccacgtaaacacccggcaactacaccaccaccaacgaggcaacaacagacacacaagacacggctaacacccgct

SEQ ID NO: 625323 - DNA, 396 bp, Homo sapiens
taatagtcacctcttgctctattatactttcccagctgatcaaacactgcacttaacagctcttccctctgcagagaggttttctactattcaataatacagattttgcctttctttcagatgacacccccaaccatggttgtgaagatgctagcgacacatcgctgttgggagttcttcctgcctctgaagccacaaaatgactttagacttccagggctcaccagatcaacctctaaatatctttgaaggagacaacaacttttaaatgaataaagaggaagtcaagttgccctatggaaaacttgtccaaataacatttcttgaacaataggagaacagctaaattgataaagactggtgataataaaaattgaattatgtatatcactgtta

SEQ ID NO: 625324 - DNA, 451 bp, Homo sapiens
acgaggtcaaaaggatcacatgaggccaagttttcaattcttacactgtggagagtcacaaacttgtgtgggagaggcctgcacagtacacgcctcagacattctcccagatcctgacaacctgtgggcatgatacatctaatgagtcttagcactcatgtgaccatcaccggcaagacaacgatgatgaaacttgcctgcctaaaatcagtgtgtggttcacaacttcgacttggtaagaaacatcctctctcctggggtcatatcaacactgcaaagctggtgggagctcactgctgtgacccccatatactcctctctcggcgtctctatcctgctactttctctgactgcatcttcctctgttccttggtcagtgtttgagaagagaatgttgaataagtcacatccttgtcactctgagtcagaaccctcatttgacttggaagat

SEQ ID NO: 625325 - DNA, 4681 bp, Homo sapiens
ggactcaggaagagatagacccataatgatgctgcctcaaaactcgtggcatattgattttggaagatgctgctgtcatcagaaccttttctctgctgtggtaacttgcatcctgctcctgaattcctgctttctcatcagcagttttaatggaacagatttggagttgaggctggtcaatggagacggtccctgctctgggacagtggaggtgaaattccagggacagtgggggactgtgtgtgatgatgggtggaacactactgcctcaactgtcgtgtgcaaacagcttggatgtccattttccttcgccatgtttcgttttggacaagccgtgactagacatggaaaaatttggcttgatgatgtttcctgttatggaaatgagtcagctctctgggaatgtcaacaccgggaatggggaagccataactgttatcatggagaagatgttggtgtgaactgttacggtgaagccaatctgggtttgaggctagtggatggaaacaactcctgttcagggagagtggaggtgaaattccaagaaaggtggggaactatatgtgatgatgggtggaacttgaatactgctgccgtggtgtgcaggcaactaggatgtccatcttcttttatttcttctggagttgttaatagccctgctgtattgcgccccatttggctggatgacattttatgccaggggaatgagttggcactctggaattgcagacatcgtggatggggaaatcatgactgcagtcacaatgaggatgtcacattaacttgttatgatagtagtgatcttgaactaaggcttgtaggtggaactaaccgctgtatggggagagtagagctgaaaatccaaggaaggtgggggaccgtatgccaccataagtggaacaatgctgcagctgatgtcgtatgcaagcagttgggatgtggaaccgcacttcacttcgctggcttgcctcatttgcagtcagggtctgatgttgtatggcttgatggtgtctcctgctccggtaatgaatcttttctttgggactgcagacattccggaaccgtcaattttgactgtcttcatcaaaacgatgtgtctgtgatctgctcagatggagcagatttggaactgcgactagcagatggaagtaacaattgttcagggagagtagaggtgagaattcatgaacagtggtggacaatatgtgaccagaactggaagaatgaacaagcccttgtggtttgtaagcagctaggatgtccgttcagcgtctttggcagtcgtcgtgctaaacctagtaatgaagctagagacatttggataaacagcatatcttgcactgggaatgagtcagctctctgggactgcacatatgatggaaaagcaaagcgaacatgcttccgaagatcagatgctggagtaatttgttctgataaggcagatctggacctaaggcttgtcggggctcatagcccctgttatgggagattggaggtgaaataccaaggagagtgggggactgtgtgtcatgacagatggagcacaaggaatgcagctgttgtgtgtaaacaattgggatgtggaaagcctatgcatgtgtttggtatgacctattttaaagaagcatcaggacctatttggctggatgacgtttcttgcattggaaatgagtcaaatatctgggactgtgaacacagtggatggggaaagcataattgtgtacacagagaggatgtgattgtaacctgctcaggtgatgcaacatggggcctgaggctggtgggcggcagcaaccgctgctcgggaagactggaggtgtactttcaaggacggtggggcacagtgtgtgatgacggctggaacagtaaagctgcagctgtggtgtgtagccagctggactgcccatcttctatcattggcatgggtctgggaaacgcttctacaggatatggaaaaatttggctcgatgatgtttcctgtgatggagatgagtcagatctctggtcatgcaggaacagtgggtggggaaataatgactgcagtcacagtgaagatgttggagtgatctgttctgatgcatcggatatggagctgaggcttgtgggtggaagcagcaggtgtgctggaaaagttgaggtgaatgtccagggtgccgtgggaattctgtgtgctaatggctggggaatgaacattgctgaagttgtttgcaggcaacttgaatgtgggtctgcaatcagggtctccagagagcctcatttcacagaaagaacattacacatcttaatgtcgaattctggctgcactggaggggaagcctctctctgggattgtatacgatgggagtggaaacagactgcgtgtcatttaaatatggaagcaagtttgatctgctcagcccacaggcagcccaggctggttggagctgatatgccctgctctggacgtgttgaagtgaaacatgcagacacatggcgctctgtctgtgattctgatttctctcttcatgctgccaatgtgctgtgcagagaattaaactgtggagatgccatatctctttctgtgggagatcactttggaaaagggaatggtctaacttgggccgaaaagttccagtgtgaagggagtgaaactcaccttgcattatgccccattgttcaacatccggaagacacttgtatccacagcagagaagttggagttgtctgttcccgatatacagatgtccgacttgtgaatggcaaatcccagtgtgacgggcaagtggagatcaacgtgcttggacactggggctcactgtgtgacacccactgggacccagaagatgcccgtgttctatgcagacagctcagctgtgggactgctctctcaaccacaggaggaaaatatattggagaaagaagtgttcgtgtgtggggacacaggtttcattgcttagggaatgagtcacttctggataactgtcaaatgacagttcttggagcacctccctgtatccatggaaatactgtctctgtgatctgcacaggaagcctgacccagccactgtttccatgcctcgcaaatgtatctgacccatatttgtctgcagttccagagggcagtgctttgatctgcttagaggacaaacggctccgcctagtggatggggacagccgctgtgccgggagagtagagatctatcacgacggcttctggggcaccatctgtgatgacggctgggacctgagcgatgcccacgtggtgtgtcaaaagctgggctgtggagtggccttcaatgccacggtctctgctcactttggggaggggtcagggcccatctggctggatgacctgaactgcacaggaatggagtcccacttgtggcagtgcccttcccgcggctgggggcagcacgactgcaggcacaaggaggacgcaggggtcatctgctcagaattcacagccttgaggctctacagtgaaactgaaacagagagctgtgctgggagattggaagtcttctataacgggacctggggcagcgtcggcaggaggaacatcaccacagccatagcaggcattgtgtgcaggcagctgggctgtggggagaatggagttgtcagcctcgcccctttatctaagacaggctctggtttcatgtgggtggatgacattcagtgtcctaaaacgcatatctccatatggcagtgcctgtctgccccatgggagcgaagaatctccagcccagcagaagagacctggatcacatgtgaagatagaataagagtgcgtggaggagacaccgagtgctctgggagagtggagatctggcacgcaggctcctggggcacagtgtgtgatgactcctgggacctggccgaggcggaagtggtgtgtcagcagctgggctgtggctctgctctggctgccctgagggacgcttcgtttggccagggaactggaaccatctggttggatgacatgcggtgcaaaggaaatgagtcatttctatgggactgtcacgccaaaccctggggacagagtgactgtggacacaaggaagatgctggcgtgaggtgctctggacagtcgctgaaatcactgaatgcctcctcaggtcatttagcacttattttatccagtatctttgggctccttctcctggttctgtttattctatttctcacgtggtgccgagttcagaaacaaaaacatctgcccctcagaggtgagagccccactaggattgtataaaattttcaaccagaaggaggggttctctcgaggagaatttattccatgagatggagacctgcctcaagagagaggacccacatgggacaagaacctcagatgacacccccaaccatggttgtgaagatgctagcgacacatcgctgttgggagttcttcctgcctctgaagccacaaaatgactttagacttccagggctcaccagatcaacctctaaatatctttgaaggagacaacaacttttaaatgaataaagaggaagtcaagttgccctatggaaaacttgtccaaataacatttcttgaacaataggagaacagctaaattgataaagactggtgataataaaaattgaattatgtatatcactgttaaaaaaaaaaaacaaacccccccacaaatcaaaaatacacacccaaccccacccccaggaaggaaaaacaagg

SEQ ID NO: 625326 - DNA, 165 bp, Homo sapiens
  misc_feature (40)..(40): n is a, c, g, or t
  misc_feature (124)..(125): n is a, c, g, or t
ctcactgctggcctgtgcaagcaaggtgctgttcctcctntgcctttccaccatgcattctccagtttcctgcaggcctcccccagccaatgtggcacacggtgcagtccaattcaacaccctnnctttcttgggccagcccaagggggcatccgtctcagcagt

SEQ ID NO: 625327 - DNA, 413 bp, Homo sapiens
  misc_feature (212)..(212): n is a, c, g, or t
  misc_feature (276)..(276): n is a, c, g, or t
  misc_feature (339)..(339): n is a, c, g, or t
  misc_feature (348)..(348): n is a, c, g, or t
gggttagagccccagaccccaggggtgccccagagaggaaaattggggagggggatgggctagggagcctctcgcctgcctctatctctctgtttcttcccattctctttctaagtctctgtctctgtctttctctgtctctaggtctctctgagtccctttttatctctgactacctcttttgatcctattggtcccctttctcttgtttntctctgtctctttgaatctacttttatcctgtctttctttcctctctctctctctctaagtctntttgtctctctctctctctctctcttttttggcggggggaaagtctccctctgtctccaaggntggaagtgnagtggtgaatctcgggtcactgcaacctctgcctcccgggttcaagcgattctcctgcctcagct

SEQ ID NO: 625328 - DNA, 356 bp, Homo sapiens
  misc_feature (258)..(258): n is a, c, g, or t
ggacaaagtagctggtataataaaaaaagaaactaactgatctgaaagcgccaaataacacaatacaagaatttcacaatgcaatcacaagtattaacagcagaaaaaaccaatctgaggaatgaatctcagaacttgaagattggttctctaaaataagatggacaaaaataaaaaagaatgaacaaaaccttcaaggagcatgggattatataaagaagccaattctacaaatcactgggcatctctgaaaggggnggtggagaaatcaaataacttgggaaaacatttcagggtatcatctatggaaagcttccctaaccttgctgggatagggcccacagtccaaatttcag

SEQ ID NO: 625329 - DNA, 202 bp, Homo sapiens
ccaggtgggcatggtgggtctcgaacaccttgacctcaggtgatcactgggcctcccaaagggctgaggtaacaggtgtgagctcctgcgcccagctgttcacaagtataggagacggcttggagatgaagaaaaaatgtcttaatatctatagctaaagttcagggccgtgtgctgtaggatggggacttcgcattcagtg

SEQ ID NO: 625330 - DNA, 231 bp, Homo sapiens
ttaaaaccccccccctaaaaccccacccctttgttgtttttttccccgggggttttcccttttttttgggggtttttttttggggggggggggttttttccccccctaaaccccccctttttttcccccctttttttttttttttgggggtggggggggggggggggttttttttttttttttgggggggggggccccaggggaataaacccgggggggtggcccttttta

SEQ ID NO: 625331 - DNA, 428 bp, Homo sapiens
tttggagagacgggggttcgcgatgtcggttggccaggctggtctcgaactcctgacctcaggtgatccaccaacctcagcctcccaaagtgctgggattacaggcgtgacgactgcccccagcctgcttaaccattcttaaatgtcgggtgcggtggctcacacctataatctcaacactttgggaggctgaaggtgggcagattgcttgagttcaggggttcaagaccagcccgggcaacgtggtgaaaccccatctctataaaaaatacaaaaatgagccgggctgttggcaagcgcctgtagccccagctacttgtggatgctgaggcaggaggcttgagcctgggaggtcgagactgcagtaagccaagtatctgtgccgctgcactccagcctgggtgaccacagcaagaccctgtctcaaa

SEQ ID NO: 625332 - DNA, 108 bp, Homo sapiens
gctcaatttctacacgcttaccatctgcctctacttcaaaggctacaatctcagatgaagagattgaacggcaactcaaggctttaggagtagaggcagatggtaagc

SEQ ID NO: 625333 - DNA, 139 bp, Homo sapiens
tattcggaccgaagtcgcggtcaccgttgggcatgtccccctctcctctcttctccctggaatcttgtaaaggtcctggcactgatgatcagtatgaaaatgtcattgttcttgtgagcctaacggtgaccggcgactt

SEQ ID NO: 625334 - DNA, 171 bp, Homo sapiens
ggtgcttcatgttgaggagctggctttggagcgcgaatctgtattggctggggggctcacagaggatctccattggagggggcagctgttgcatcagtggcggctattgcagcacgaagcggaggacgataatggctttaggtggcgccggggaagtcggactttggattc

SEQ ID NO: 625335 - DNA, 168 bp, Homo sapiens
  misc_feature (5)..(5): n is a, c, g, or t
ggtanatgtcattctttgtggctttcttcttgattctgtgggggtgtataacaaagcctgaaggacatagtaatcatttcttacaaggtgcaaattacagaaagattgtgtatgagagcctatatagttgttttatccacttatcatctcttgatttaagactttaaa

SEQ ID NO: 625336 - DNA, 579 bp, Homo sapiens
gcaaggggaattagagaatatcagaccaaggacaggtgaggcgctggctgtagtggttgccccacagtacattaaagttaccagcagagcctatcacacgtgtggggcgagtattggagtgaggtgacggtaattgggcttgatactgggcgactgcctataactgtcgtgaactttgagaagcccaagaccaaaagatataagtactggttagcccagcaagctgccaaggctatggcccccaccagcccccagatctaaatctactctccctccaaggcagcaaagcagaatcgggagcagtggagcagaaatgtgcaagcaccctgatctcactcccagctctgaccaaatacagaattttagagaacatctgaagacatcagactgcactgcgtatacatgttgaattcttcatttttgccatctttaactgtcatcactggggcagggaagtcctgttccagaagtaccaggctgtagatttgataagctagatgcagtagaccgaaaccatccaaaacctgtttagcttcttcctccattggagtttattgggacaaacaggagagccagcca

SEQ ID NO: 625337 - DNA, 99 bp, Homo sapiens
gcggccgactactactactactgctcgaattcaagcttctaacgatgtacggggacatgtgcacgttttctgtttaaataaatgtaaaaactgcaaaaa

SEQ ID NO: 625338 - DNA, 221 bp, Homo sapiens
tttgagatccccatccggcgaggcagtctcgaactcctgacctcaggtcatctgccctcctcggcctcgcaaagtgctgggattacagggatgagcttctgtgtctagcctattttcccgcttttatttattttttattttttcgagacagggtcttgctctgtcgcccaggctggagtgcagtggcatgatcatggctcactgcagcctcaacctcctta

SEQ ID NO: 625339 - DNA, 295 bp, Homo sapiens
ggaggctaggacagataggtgccgataatacgtattgaattcaacacaccacaatactatgcttggcaaggttagggaggctaggtggtagtttgtgtttaatatttttagttgggtgccgatgaatagcgaggtgccgataaatactattcatcggcacctcgacaccatcccaactcgctattcatcggcacctcgctatacatcggaacctcgctattccaccattagctctagaggtccatgcatacttaatattataattgaattcaataagggtgccgatgaatagcga

SEQ ID NO: 625340 - DNA, 144 bp, Homo sapiens
atgtatttgtgatgtcatgtgcagaaagccgccaatatgatgttgacgtttgtttggttctctccaattttcatgttaagaaaacaacagatgctataaatagtacgaggacacgatgagctgcgaaactacctttactccctc

SEQ ID NO: 625341 - DNA, 125 bp, Homo sapiens
tctttattataagtttagtagcttcatcttgctccctgtgatctgtgctaggtgaggtatcagggtcttctccgattacggaatatattgccactaatgcaaaacacgctggcctacagcacatg

SEQ ID NO: 625342 - DNA, 433 bp, Homo sapiens
  misc_feature (417)..(417): n is a, c, g, or t
  misc_feature (426)..(427): n is a, c, g, or t
tgttgtcctccccatcacgaattcctctccttctcctaactcaagaacaccaatttgggaagctcttgaatagataagctatcttttctggattgccaggaagtggaaaatggggtgggcgtgtgtgtgaggggaattgggcagtgaggagtaagtgagggaaaactttttagcatggttaataggtcaggagagcagcgcaaaggtggaaaccaagcatgcccaatccccagagcaggacaaatgggctcctgggccctggtggagggttcactttggaaatgagtaggagcagtttggtctcagaagcaatcaacatcccctccaccccaatttttttactccgtttcagatgattaattttcaaatactgtacaaattttgatagcttaaattgtgtatacagtcaaataaaancttgcattnncaatta

SEQ ID NO: 625343 - DNA, 148 bp, Homo sapiens
gtatcactaagctcgctttcttgctgtccaatttctattaaaggttcctttgttccctaagtccaactactaaactgggggatattatgaagggccttgagcatctggattctgcctaaataaaaaaacatttatttttcatttgcca

SEQ ID NO: 625344 - DNA, 321 bp, Homo sapiens
tcacttataagtgggagctgaatgataagaacacatggacatttggagggtggaaacacacactggagcctgtcagagggtggggagtgggaggagggagagcatcagaaagaataactgatggatgctgggcttaatacctcggtgatggaatgaatctgtgcagcaaatcaccatggcatacatttacctaataaacctgcacattcctacctatatacccctgaagttaaaatattgcaaacagaaaaaaacaaaacttttttgttgttggttttttggcatttctttttaggttcagtttcattgagttctgctctg

SEQ ID NO: 625345 - DNA, 409 bp, Homo sapiens
ggttggctcttgcacttcctggctctctggacttggttatgtgattgagcctccatggcctccgtgtctttgtctgtcaatgggtttgattaaagcgttgacctcataggttcttaggaggattaatgagaacattttatgtaaagctgcttacatggagccttggtatgtgccggaaagctttagccctttattaaaagtgacagcagacccagcacggtggctcatgcctgtaatcccagcactttgggaggctgaggcgggcagatcacttggggtcaggagttcgagaccagctactcgggaggcagaggcaggagaatcgcttgaacctggggtgcagaggttgcagtaagctgagctcgcaccactgcactccagcctgagtgacagagtgaaactcagtctc

SEQ ID NO: 625346 - DNA, 214 bp, Homo sapiens
ttgcaaactacacaatgctgcaggtgcttcccaggggccacaggctgtcaggaaacgtgttttatgttaagtcacaaacccacttgacttcttggtacttgaattaataccagttggtgagacttagggttagtgtagttagtacatattaatatctctgttgttgagctttcagactatccccgtgcacaagtgtttatgctatagtatgtga

SEQ ID NO: 625347 - DNA, 595 bp, Homo sapiens
attgtcagtcgggagcgttgtacaggctacgataggtgcggaatgagcagacaggtggtaacaagtcagagctcaggagacaggtctgaaccaaaatttgggtagtgatggcaaccatggcactggccggacgagatcaccaggagccttgcatgttcttaattgccatctacaaggcaattaaggtggtgtgcttggagaagtaggaggaaaaccaagagggtgtagcttcccagaagccaagggaaacagcatttccagaaggaaagaatgagggaattatagaccatgatgtcaaaggtcaaagaatgccaggactagaaggtgttttatggacttagcaccatattcactgggttatgggtgctcgaatacacaggctcagatgtctgatggcaagaaggtcagggaaaggagaaagaaggcactttggtgagaccggcaatgaagtaggagaagagcaaatggctgcaggggatgtggcctagaaaactggtagagaactgagcatgtcccaggatggtgccatggaggccacaggccacatgaggctgaagagacagagaggggctcatggcctaagtgctgcccctag

SEQ ID NO: 625348 - DNA, 392 bp, Homo sapiens
gatactatctcctagcctaatgctcactaagacaagtctcctggatgctccgtgcagactcatcattcaaaatatgccggtgctaatcgccagctgctcctagaccaccatttagtactatgagaacagcttcttcacaggttcacgagtcatgtcaacacaaggggtggctaacaaatcaacacagacaatgggttccacgtctgcagctgaagccgctgcagattactcctgctgtccgcaccgttccacagtataaatatgctgcaggagttcgcaatcctcagcaacatcttaatgcacagccacaagttacaatgcaacagcctgctgttcatgtacaaggtcaggaacctttgactgcttccatgttggcatctgcccctcctcag

SEQ ID NO: 625349 - DNA, 392 bp, Homo sapiens
tcagttcctggctcccaaggtgagtggccttgggattttggggaggggtgttgaagactggaaagaggactatggaatgaggtgggtggagtcaagcctggagcctgagggccgggcgtggtggctcatgcctgtaatcccagcactttgggaggccttggcgggtggattacctgaggtcgggagttcgggaccagcctggccggcgtggtggaaccctgtctctactagaaatacggagattggctgagtgtggtggtgggtgcctgtagtcccagctactcgggaggctgaggcaggagagtcgcttggacctggagggcgggggttgcagtgggccgatgtcatgccgctgcactccagcctgggccacacagtgagattccgtctca

SEQ ID NO: 625350 - DNA, 294 bp, Homo sapiens
agcctaattacggaatcgatgaggctgaccttgactacagtaagaaggttcaagataagttgaaaatatgatcagcagatatgcacagaattccctgaaattgtaagatctcagcaaggtcggctatgtgatcaaaatgatggggtttcagagccactccatcccgcggtgtagaccccaaaggattgaaatccgcatgaaccgtcatggcggctttatccgcaatagcccagcgatggcaaccacccaaatgaccatcactgcacagtaaattgttattctgcatggcaaagg

SEQ ID NO: 625351 - DNA, 552 bp, Homo sapiens
  misc_feature (41)..(41): n is a, c, g, or t
  misc_feature (43)..(43): n is a, c, g, or t
  misc_feature (45)..(46): n is a, c, g, or t
  misc_feature (50)..(50): n is a, c, g, or t
agcgcgttattcgtcgtgactgtttaagcatagcgagtctntntnnactnatcgtaagttgcagcacgagcggcttcgccgcccaggggggtgacgagattccgaccgataagtaccagtcccgcgcgagcttgtccatcctggggcgaagcagattcggggacgtcgacttgtcggctggcccacacggctcggactagagtcaactccagctgctagctagaactgtccgcgcttacaacgctgtgagtgataaaccttgtgctggtatatcggtgctgctctgttatacaatccttgggtaaattgcaatcttggcttattcatgtttaaaaattccatgtgtaaaacatacgtttgtaaatacctggggacttttattgggattttcgtttgtgatggcggattattctgtaaagggttgctaagttctactgttgttctattgggtctttttgttatcatatctgttatccttgtttataaagtgggtctttaatacttatctatattatgtccttgtattggttgttgttgtgtctatatcttatg

SEQ ID NO: 625352 - DNA, 1797 bp, Homo sapiens
  misc_feature (453)..(453): n is a, c, g, or t
actcggttcgtggttgttgcaagtgctccttgattgattatatctatcggtggtgtgtctggatcgtggttgttttcgcttccgcgtcggtatctgtgtgctggtgctggaacacagcccaggttgggggactcctgtctctggtaggagtggtgccgcattgtgggctcgctgttgtggatctgcgccggttgcgcccggttgtgcatctgttctggatgaacccgctgggtgttgtgtgtactcacaccgccgtgtagtggggtgcgccctctgtgttgtgttgtaggtcccgcctcacctctcgtggtgcccgctgccgcgatgtctattcgtggtgtgtactcgctggtttctggagctgtgcccgcgggcagttctgatgactatcattgttaggactgtcttatgatgatcgccgaatgttctgtgtcgccgcgaaggtgtgtgaancgaccgcgtggggagggtgaatatatctccgccccgcatggacaactcgcccctgtgaatggctttccacacaacggtgccccaaggtggtgctgatatcgccttgacagtgtgtgagacatcaaagtgggtgggacgaaacagaaagtggttgtcctctgtggtagacaaagtgttagttagaggccccgcgccgcacgttttagggttgaaactcttgggggtgttcgccacactttgtaagtgtgtgtcctgaaccccgcgttttggtttgtggggaccttttttacgcctaatgacgtttttaaagttggtaaacctgtttttgtggggttgagcctgcctgtgttgaacaagaaaggaccgcggtgtgttgtagcattttctctggtttaaagcagttttgttgtaaaatgttgtgacgaacggagtggggaacccttggctctggaaaaaatttgggtaattaagggaaccacccgtggtgtcctcttatatttagaattacgtggcagggtacaaagaaaataagtctcttatggactacggacggccccaccccgcgtgtgagaccccccaactggagacgcacagaagattgtaggaaattgtgggaaataattttcgtcttgtctgaaaaacaactttttattagaaaaaacatgtgtgtatatagctcctctttctccggcactgctttaaatatatattggtactaaaaacactctgttgtgtttacgccacagtgatcttcccacacacattttgttttctccacacctcttatatatagaccatagaaaaaaaataatgtgccgcactcggagaacccactcttgggagacctcgagtcgaggccacccacgggatctttcccacgtgtggagagatgttttgtgtgtgcacgctgctgttttgagggcactgggctcagaataatacgcactttctgcgaggtgtgtacacataggtgtcctcgtgtgtagattgggcccactctcactataatttgccaagcacctatccacctcggtgcacgcttttctgtggtggaatataggaatataaaaaatatggttagcctcgccacagtggtaaagtacacgcaccacctgtgcacaatttctgtgttgcctctataaggggcaccacgtgataatgtaccacgatagttataaggcccctcgttttgtaatgtagtaccacttttctaatctattattcctcaacctacttataacctcgtttcgcacgataagaaaagaattcttttctaataaatctgtaaaattatgcttacttctaaccagtaggcttctaaattaaattttttaaaagacccca

SEQ ID NO: 625353 - DNA, 118 bp, Homo sapiens
ctaacctacttacatttacatggatagaagtgaggtcctactgtacagggaactgtatgcacctcatggatagtacatactgaagatggtataagaaaacgaatgcgtcgagaagctt

SEQ ID NO: 625354 - DNA, 815 bp, Homo sapiens
tcaaccccgtgtcttccccgccgccttgaggaccttttctttagttcagaacgaaccttacgggcacccttgcccgccctttagagtagcccccggggtcaccctccacctcggaccccctctcaatggggagagactcttgtttcaagagaccccctcgagcgtgaccttctgtggctttgttaacagcgtgttccccatttcctctcccggctgttccgcgaaaccctgggaccactcggggagcacccttcacatgcactgctgccttaccccgcagttcccagacccccctttccgccccccctttccaaatatcccggtacacctattccgcgcccgcaggtccccctcggctgccctcccccccttcgggaggagactggcccctgaacgcagatgtgtgaccctggacgtgcctggcacgcggcgcttctagcccccaggaccgtgcgtggggtctgctggctgccagggtctaacagaactgcccccgcgagaagtacacctgacttggcccatctccgccaagagccccacacccagggcgacccacccacccttctgctgtgacccacgacatactgcgcgtggcacacccgaggactggaagaaaggggaaccacccttcttcccgcacaggggggccccgcaggccccgccccgcgccctcaacccccgaagaccctcgacccccttggcggggaacccccccccggccaagggtctgtgtcacaggcggaggtggcgccccccgctactgagaccccccccccggccccccccccggattactccccgctcccccccaaaaa

SEQ ID NO: 625355 - DNA, 672 bp, Homo sapiens
  misc_feature (118)..(118): n is a, c, g, or t
ggcctttgaaaggactaatcagacacacacacacacacacacacacacacacacacactcgctatactcatgcactattttcctatcattctccgaagatccatattatcttcgaagngcgacgccctaatttctcctcgtggttattcatggatgacatacaatgtaccacaacactcgttggcgacgaagatatgtgtcgagcttcaccgtgcgtgcagggcttcgttgtgtagtgaggcgccattcagtgcaagcgggtataatctttcatcaactatacaacatgaggagacagctattgttgtcgacgaacatcagtgccaagacgtggcgtgttcatcagcagagagccagagtcatttaaaagatgtatatcattatcatgtcgtaggaaaattgttgagagcatattaccacaaagagttggaaagttcacgcgcttttgcaatcagaaaagcagtgtgatttgagtgaggtcagggtgggatcacaataatcaatatcatatcatcataatcatacattcaattaaacaaagaagaacaatcggatgtcatgacgagagagataaattgagacaacagtgcgtgctgtggctaggataagcttccatcattacttcaacactgattttataaacagccactaatagagaggattcatcatcat

SEQ ID NO: 625356 - DNA, 99 bp, Homo sapiens
gttttaatagggactaatgtggaggacttgctaatttgtcacagtcttaggtacactgttaatgtgtaacctctgttagagacaactgtggtacaaggt

SEQ ID NO: 625357 - DNA, 861 bp, Homo sapiens
ggccacccagtgtaataagaggccgctctggctgggtgttgtttctccgtgtgacgtgtgtgcctttgagatcaactctcctgtatccagctcgtgatgcctgcatgagtggaggggcgggctcccgcgtgtcctgcatcggcgaaagatggtgacgttaccggatccctgacccgaaccctttccggtcgcgtcgacagccgtcgtagccagctacctctgcacgcctaagaatacgcaggagggttggcccctcgtgagtgtgtgatgtgaaatgagcgattagctttattttccaagtttctctctcaccttcaaaggagcaatacatcaggcgggtgcagtcaggacgcggatgggcagacgcctcgacgagaatctaaatcctgaagtgcatttccccaggtgattgtaaactttccatgagggcatagtatagtgacgggaggatgactccgacataactgcgcatccttgatacaacagagggcacatctaatgcgtccccgttgatacttacaatcgtacttgggaagttgccggggcgcttagacttgcgctatgtttggcacctgtccccggaccctttttatagggtaataggccttcagcgcgcccgggaaaagataagtattgggttagaaacccgagtttgggccgcttcccgttgggaaaaattgcctccttacacaggaacaccccaaagagcaacgtaaaggcgcgaggggacgttacggtgaaactataccctggtgcctatcttgtggcttaagcagagtccctcaagaggggcttccggcactcgttaattacaagacccgtctttggtataacattgtggcgtacgcggaaccggaagcg

SEQ ID NO: 625358 - DNA, 228 bp, Homo sapiens
cgatccttctttgggacggcggtgtagatcaagagatcgcgaagtacggggcgcaggtcaggtggcggggatatgctgcccactccacgagcggcatcacatcgctgcgtccgagtctgtcacgagtgtgtcaagcagatttgcctgtcatgctggagacgctctcccagtctccgcaagggagagtcatgaccattccggtaccagcccacgccgcccaaagcacag

SEQ ID NO: 625359 - DNA, 910 bp, Homo sapiens
  misc_feature (13)..(13): n is a, c, g, or t
  misc_feature (16)..(16): n is a, c, g, or t
  misc_feature (32)..(32): n is a, c, g, or t
  misc_feature (51)..(51): n is a, c, g, or t
  misc_feature (60)..(60): n is a, c, g, or t
  misc_feature (70)..(72): n is a, c, g, or t
  misc_feature (75)..(76): n is a, c, g, or t
  misc_feature (87)..(87): n is a, c, g, or t
  misc_feature (92)..(92): n is a, c, g, or t
  misc_feature (100)..(101): n is a, c, g, or t
  misc_feature (119)..(119): n is a, c, g, or t
  misc_feature (137)..(137): n is a, c, g, or t
  misc_feature (142)..(142): n is a, c, g, or t
  misc_feature (147)..(147): n is a, c, g, or t
  misc_feature (171)..(171): n is a, c, g, or t
  misc_feature (176)..(176): n is a, c, g, or t
  misc_feature (181)..(182): n is a, c, g, or t
  misc_feature (201)..(201): n is a, c, g, or t
  misc_feature (205)..(205): n is a, c, g, or t
  misc_feature (212)..(212): n is a, c, g, or t
  misc_feature (217)..(218): n is a, c, g, or t
  misc_feature (301)..(301): n is a, c, g, or t
  misc_feature (312)..(312): n is a, c, g, or t
  misc_feature (314)..(314): n is a, c, g, or t
  misc_feature (321)..(321): n is a, c, g, or t
  misc_feature (390)..(390): n is a, c, g, or t
  misc_feature (399)..(399): n is a, c, g, or t
  misc_feature (454)..(454): n is a, c, g, or t
  misc_feature (461)..(461): n is a, c, g, or t
  misc_feature (466)..(466): n is a, c, g, or t
  misc_feature (509)..(509): n is a, c, g, or t
  misc_feature (530)..(530): n is a, c, g, or t
  misc_feature (538)..(538): n is a, c, g, or t
  misc_feature (548)..(548): n is a, c, g, or t
  misc_feature (714)..(715): n is a, c, g, or t
  misc_feature (825)..(825): n is a, c, g, or t
  misc_feature (909)..(909): n is a, c, g, or t
ggtgattccgctnctnaagaggggaaggcgcnggtgtggggggtggggccnaggcccatnctgaggggtnnnagnnatgaagggctntgagntgtagatnntggggtggtctagaggcnatggggaggttctggatnatgtnttganaggtctgggctgtgtggggggtcnaggcnatgtnntgggggtctgggctgtgtntgtngggagtnagggnnatccatgtattgggggtctggggcaggggggggtccaggctgtcttggggagtccgggctgtgtggaggggtccaagttatgnctttggggatnangcctgtnggaggctctgggttatgtcttggcgggggtccaggctgtgtcttaggggctgggccatgttctggggangtgtgaatnctggagggtggggccccggtctcgcgggtggctgtgtccctcgaattcaggcagnacctctnggaantttctggatttgcgtgctggcgtctgtaggcctcgatacccanaggctgcgcccctctcagcanaggaagtnctggagaacntgaaggaccgctggtaccaggcggacagcccccctgcagacctgctgctgacggaggaggagttcctgtcgttcctccaccccgagcacagccggggaatgctcaggttcatggtgaaggagatcgtccgggacctgggtgaggctgggtccagcctggccggcanncaggacccaggaccgactggcaggggccgggcatcgtcgggaggtcggggcaggtcctgcgggagccccagcctgggtgtgggctgacccattcccgtctcgcagaccangacggtgacaagcagctctctgtgcccgagttcatctccctgcccgtgggaccgtggagaacagcagggcaagacattgacgana

SEQ ID NO: 625360 - DNA, 369 bp, Homo sapiens
gggtaagccgttgctgggttctgatctgagatgtcctgagtctggctagtgtacttcctctcgaatcgtgggaaatgtccccctccttggtgctctgttgcgttacagaagcagggagctggataagccatagctcgctgccctgaagtattgtcggcgcgtagttgctcgacgtggtatccggtgccactcaaaggctggattgggaatagcagacaaggcgaattgatgcagctggatgatccgtcgagaaggaatgctgtcacggggaagccttcggccgtggtgtccccgaggttcctgtcgaataccaaccgtgtcggctgttatgggggcccagtggtggtggctgagggaaagcgtgctctc

SEQ ID NO: 625361 - DNA, 382 bp, Homo sapiens
caattcgcaaaatgtccgcaccatgtgttccatctattcgcccaagtcatgaaaaaaaaaaagatgctccgtccatggcgcggttgacctttttcagatcatgtccccgtacatccgtgcttcttccatgagagagaagtgcccagatgtgtcatgtccccgtacatcttcgtgttttccatgatttggatctccgggccgagcccatggcccccacacagtagagtatccccatgccactgcggagcgagcagctccccatgctcaacaacttcaacgtcgaaggcatgaaaattctcagatttagttagacatgtctaactaaatgttggctgaagccatgaaccactaatcctcaatagggacatgtccccgtgaatca

SEQ ID NO: 625362 - DNA, 171 bp, Homo sapiens
gacatgtaaggtgtctaagacctgtggacagctgacctgctgaccagtgtgatgtcacatgcctgcagaggtctgcggggaacaaatgccagagcttcctggagccaggatgggaagcgtggtcaaccaaccttgccaggtcgtgccggccccaataacgttgcatgggtg

SEQ ID NO: 625363 - DNA, 123 bp, Homo sapiens
gcgcagccgcaccgtactgtaacatagatccatgatcgatgtctgtaggctcattgaactgtcctctatcatagcagtgaagtccttgcgtatgctcgactattaaattacgccccgcgcctg

SEQ ID NO: 625364 - DNA, 731 bp, Homo sapiens
  misc_feature (57)..(57): n is a, c, g, or t
  misc_feature (59)..(59): n is a, c, g, or t
  misc_feature (62)..(62): n is a, c, g, or t
  misc_feature (69)..(71): n is a, c, g, or t
  misc_feature (75)..(75): n is a, c, g, or t
  misc_feature (79)..(79): n is a, c, g, or t
  misc_feature (84)..(84): n is a, c, g, or t
  misc_feature (88)..(88): n is a, c, g, or t
  misc_feature (145)..(145): n is a, c, g, or t
  misc_feature (169)..(169): n is a, c, g, or t
tccaaagaattatggcaccagaggcaagttagggccaagattgccggccccgacggngnccnaggtagnnngacnggcntagcntgtngcagacctggcttcctaaccacgtcgtgttcttgcggctccgggagggactgaaaanccagagtccaaccgaagctgaganaccagcttcttcgtcgttgccttcgtcgccgccgccgcagttgctgacgagaaacgtggtctttggcctcggcggagagcttttcctgtagggacggagaaagacagctcctttcttagtcgtagcgccttcgagggccccagtcggcggcggcagaaggagcccgccctgtccacagtatccagagattgctttgcataaatccacccctgttctggaaagtctactcaagttcttgtcaaagcccaacacaacattcatggtaagcacgtttattagggatttcacacaggacgtcaatagggtattacgagatttaccttaacagcactggcgggacagaatttcttgacattttgaacgcggtggaaacatcaacgagttgaattgtacgttaccaactccaggttgccgggacagcatcttctcaccagttccacctctctgactctaaagcatgcttgcatggtatccaagtgaaatcctggatccccacgtagatgctgttaaccattcagacaacgtactccgaatttactcactactttagcccgaagacacc

SEQ ID NO: 625365 - DNA, 608 bp, Homo sapiens
  misc_feature (20)..(20): n is a, c, g, or t
atccttcgcctccacccacnccagtggtacatgcacgtacatatgtcagtatacatacacattcacacacagtcctgcgagtggctcagaacttaatctattaataactaaggaatcagaaagctaattcatcaaattcaggcttcatattcgcagcccaaattgagaggaaagtggaggccagaggcgtgaggtatattgcttctcccccagcatccaacaggagatgtgagagggcacccgaggcccactcttcagactctaagaagttcttttggtccatggtctacaccagagccccagcccctagcataattgcatacctgtggtttcaccagggcctaggcagagggaatgatggggaaggcaggaagcctattctggaacccctggaacagggaagcaagggcccctctctaacagggggagaaggatggggctcagccttctcttgtgcaaagtcaagggcagtgggaaatggggagtacagcttcatctcaaaactgggatgaaggagccttccctgtagtccctgcccacggggtttacacacatgcacacgcacaggcacacacagctaagacaccaaacacgggaagtgaggagtc

SEQ ID NO: 625366 - DNA, 504 bp, Homo sapiens
  misc_feature (236)..(236): n is a, c, g, or t
  misc_feature (402)..(402): n is a, c, g, or t
tctaactgatagagtaatgctgacataatagtctgtgactctgggtgtagaacataagactcactgcagcttctactttggttctctctttctctgggatcatgagccctgggggaagccggctgctgtgtcataaggaggcctgtggaaaggcccatgtgactaggagtgaggcttcctgggaacagacaataagaagctgcagcctcttccaacagccatgtgagagattcttntgtcttgtgaatccccaggcccatttgagccctcagaccattaagtcctggatgacaactagactgcaactttgtgagaggccctgagccagaagcactcagagaaacctctcctggattcctgaccactagaaactgtgggagatgataaatatttgttgatttnagctgctaagttttaggtgacctgtcattgagctttttcatttgctctaaattcattataagatattaaacatgtcatttgcttttaatatttaaaaaaaaa

SEQ ID NO: 625367 - DNA, 768 bp, Homo sapiens
tcgccaggggggagcgcctctccgtgactactatcgctgtcatgtctgatcttggcaagcaaggaggcaaggcccgcgccaaggccaagtctcgctcatgccactctggccttcagaccccggtacgacaagtgcataggttgctgctcataggcaactgctctttgcgagtcagagcactcacgcccgtctacatggatagaggcctcgagtatctgaccgtctagatcctggatctggctgacaacgcggatcgtgacaacaagaagacgctcattattcatcgtcacctccagctagtcatccgtaacgaccaggaactgatcaggctgctggtcagagtcaccataatccacagcggcgtgttgcctaacatacaggccgtactgatctctaagaagacggagagctaccacaaggcaaaagggcaagtgaggatgacttacggaccaattgagcccaatccgaacagatataaaaagggcacctgtaaactaaaaaggctcttttcagagccacccacattttcatataaaagagttgttaatggctaaaaaaatgaacacaaactcggcaaatgggatattacttttaaataaaattatctgtcccccatatttttggctaattttccaaatgggacaaaaatcaacttataacatttagtgtccaaagtataaaataaaaactggttgcgtgtcgccccctatttaatccttgacctataattcttttggggctggggccctaagatcccaccctggttcc

SEQ ID NO: 625368 - DNA, 413 bp, Homo sapiens
  misc_feature (52)..(54): n is a, c, g, or t
  misc_feature (177)..(177): n is a, c, g, or t
  misc_feature (260)..(261): n is a, c, g, or t
  misc_feature (285)..(285): n is a, c, g, or t
  misc_feature (300)..(300): n is a, c, g, or t
  misc_feature (321)..(321): n is a, c, g, or t
  misc_feature (360)..(360): n is a, c, g, or t
  misc_feature (399)..(399): n is a, c, g, or t
gccaacacagcatatttggtttatctgtgatgtggttaatcttatctctttnnnatacacaatacttcatgtacctatgaaataaaacaggtagggaatatgtccagtgcaaacagaggactcacacctgtgcatagacagcaccatccactgattgtcgctgcagtccacggcgtnactaagcctgcgccacccacgtgctgcccccaggagcgctaccaggctcttcgggccacaggcctctcctccactgcatgtgnncggagggcgggtaggtcgcagggntccatgatggtgggngagctcaaggggaatgggggnaagccctcgaaggtcccctcctcagtaggggatgtcatnctgatagtactgtatcatgtggtaggtccggctcctgtngctgaggaagcagc

SEQ ID NO: 625369 - DNA, 355 bp, Homo sapiens
gactacagactttcgaagactacagcagattttctaaagtccaaattaactgagctacagaggacacacatcacgcttctacaggagcataataatgctttgaaaccaattgaggaactaacaagaaaagagtcagaaaatgtggccagggcagtgctgaaggaactgagcgaaaaactgttactggcagagaaggctctagcttccaagcagctgcaagtggatgatatgaagcaaaccattgccaagcaggaagagcacctgataaccatgaccatcctcaggcctcagatggaggattatattctgatcctaccaggcttcggaatactcacccatattgtaacttactact

SEQ ID NO: 625370 - DNA, 126 bp, Homo sapiens
tgaccaaaggacacattaggccttaaactccttcctcagttcttgcccctcaggtcccgcaccaggccaatgtgtggtgaaggcatcctgtgggtggcatccccccagcgcatcacaggattgatt

SEQ ID NO: 625371 - DNA, 222 bp, Homo sapiens
  misc_feature (220)..(220): n is a, c, g, or t
cttatgatagatgaggccaaaatagggtattaaagtttttttcttattttttaaaatttctttttaaaaattaatagagacagggactccctattttccccaggctggtctcgaactcctgggctcaagggatcctcatgcctcggactcccaaggtgctgggattacaggcgtgagccactgggcttggcctgaaggtttaaaagtgagttaataaccnga

SEQ ID NO: 625372 - DNA, 1076 bp, Homo sapiens
ttcagctcctccctggagaagagctacgagctgtctgatggccaggtcatcaccattggcaatgagcggatcctgctgatctgaggcactcttccagccttccttcctgggcttggagtcctgtggcatccacgagactacctttcattctccctatcatgaagtgtgagcgttggaatatactcgctatacatgaatctgtaatgcctaatcacaagcagctgtcctgcgtccggcgaacccaccaatgctaacccatgcgacaattgtccggccaacagcgaatgccatcaatggatgaatcatcatgccctatggggacccatggcacaaaagaacgaatcaaagaatcatccgctcccctcctgatcagcatcgctacatccggttgtgcgaatcgggaggccttcatgtcctggccgtcgtgtgtttcactctttccatcagaatgatggaatcacccacagtatgaagtaattaatagacggtccggtccctctaatcgaaccagtgagaaatgcttctaggtggattatgattaagtagcgtagacaggctgttcgtaggatgaatatctaactatgcgcagataagaagatgagatgggtatggctcaattagtcatcataggggtgagtaataggtagtttctaccgtaaagggtaagataaggattttaaatatggctatggtatatggaaagtatagggtggtagctagtattccccatagtttcagtgcgcgacgctactagtaatgcgcgcatcgtgagatcagctaaaatgactaccaccttaaattcgtcggtctccgtgttgctcgaggctgcaaagtaccggttttgccaagggggcggctcgctattccagtcaacagggggtatccatcagttgcgcattatcttctgaaccttataactgctaatattactagggatttcaataggagtgggccacgtcgtgtttccccccatatacgattgctccggagtgggcgggacatcttattgacaaaaggtcaaaggagagaacaaaaagggtgcggcctgcgagaggacagagcacaaaaaatataca

SEQ ID NO: 625373 - DNA, 266 bp, Homo sapiens
tcggcacctgttaaacgtaggcgcccggcatgttcatggtcgagcaacaccaggtcccagtcggatttttcagtcaggcgggcttccagttcggcaatgctggctacttcgaccaaacgtacatcggggccaaggcccaggattacggcctgatgcagtgcgcagcgaaacagcgggtggtcatcggcaatcaggatttcgtatgtggccattggttaaatgatcctgttttttatgggagctctgatgggttcagggttcaccaa

SEQ ID NO: 625374 - DNA, 434 bp, Homo sapiens
tcgatctagaggatcccttgatagcccaatcccaggaggaggttgcggtgagccaagatcgccccactgcaccccagcctgtgcaacaagagtgaaactctgtctcaaaaaaaaaaaaagaaaaagaaaaaaaagagcagagtgagactccatcaaaaaaaaaaaaaaagaaaaaaaatactaaagctgttttacacagaattgtgatagcttatctaacacagacaagtgatataaataagggggaaataaatggctggagcatgtggaacaggtttatagaaaaactggatgcaaaaatttccatagaaagaagaggtgtgtatatactgtggccctttggcagaacacaaactgtattatgattgttttgccccctttaggggcactatcttcttcattgaaattgtttttccggggatggggctatcaag

SEQ ID NO: 625375 - DNA, 146 bp, Homo sapiens
acgtgactcccccaactggtcctgtcgtgttcccgcacgcacgcacgtacgctactggcacgtggcacgacacgactttaccttacgtaccacaccactgcttacgacggacgacggacgacgccacgacgacacgtgaccacgtg

SEQ ID NO: 625376 - DNA, 727 bp, Homo sapiens
cccctccacctcccatatgtccagattctcttgatgatgcttgatgcttttggcaagttatcttaatttgcatggtacatgtagtggctgatcatactggctatttatatgggtttccgacgttaatccacaagacaggaaggtgctcacattccttaaattaaggaggaaatgctggcatagatccagcatctatatgacaccatctgaaagaaccgatgcagacagatctggaatgtgaagcgttatagaacgataactcggcctgcatttcttcaaaatatcaagtgtgtgggtaaagaaaaaaggaagtggaatgggtcactcttcttgacttaaagagttatgtaataacgcaaatgcaatgtgaaatattttactggactctattttgaaaaaccatctgtaataagactggggtgggggtagggaggccagcacggtggtcgagggtcagattgagaacaactttgaatgtggattagatatttgaatgactatctggataattattggtaattttatgagctgtgagaagggtgtatgtagttgttataaaagatcctgtcttaattctgcatacttaagcatttaggaatgaagtgttagagtgtcataaaatgtttcaaatggtttaacaaaatgtatgtgaggcgtatgtggcaaaatgttacagaatctaactggtgacatggctgtcattgtacatatctttcttctatcttca

SEQ ID NO: 625377 - DNA, 612 bp, Homo sapiens
  misc_feature (5)..(5): n is a, c, g, or t
  misc_feature (9)..(9): n is a, c, g, or t
  misc_feature (450)..(450): n is a, c, g, or t
tcgtnctanggattggcgggcagaggtaagctaatcgcggtgattggagacgaggacacggtgactggtttcctgttgggcggcataggggagctaaacaagaaccgccaccctaatttcctggtagtggagaaggataccaccatcaatgagatcgaagacactttcaggcaatttctaaacagggatgacattggcatcattctcatcaaccagtacatcgcagagatggttcggcacgccctggatgcccaccagaggtccattccagctgtcctggagatcccgtccaaggacatccctacgatgcagccaaagactccatcctgcgcagggccaagggcatgttcaccgctgaagacctgcgctagggctgctcagcctcagccctcctcatcaccaggcctctcctggtttgccatgctctatttaagtgtcaagccttggttnccagcccctcccttcctcttcactgagtggctcgtaagctgttggggttcggttgttcaggtctaggctgggtagagaaagaaagcccaactgtttctccactgcctcctccctgtgctgttaatagtatcgttgttgatattaaaggaattattctctcca

SEQ ID NO: 625378 - DNA, 106 bp, Homo sapiens
  misc_feature (53)..(53): n is a, c, g, or t
ctaactttggctacaacattccactaaaacatcttgcagacagagtggccatntatgtgcatgcatatacactctacagtgctgttagaccttttggctgcagttt

SEQ ID NO: 625379 - DNA, 823 bp, Homo sapiens
acaagcgagaggcatggccacgtgtcaaatccgactcgtggactcagatttgtcgtggaccctcttgcgcttttacccgttgaacagtggccgtcaaagccgtgtacatgtgtgtctgggttgtacctccgggggcctcatccaccaccggtgggttccaccatgttgccaggcctggcacgattcgtccccctcgctgatacatgctgcttgccagatcatggtcgttttcggaacatatggccagcggcgccagtttgccttcatggggttcctccgcgcgggtttccagcgcgtgttcatcccacttgagtcatccaagttgatcagagcgcgcaccgtcaccccagagcccagtggagccgcacaattgcctcctctgaagactttcccctcttccggttcgggctcccccctatcctcggaataaccagggcggaactccctgttccccgtcgagtggtggcggctgtcactatccgcaattattcttgctccttcccgcacgtgctgcagctcccggcaggcctcattcttgagtatcccctgcctccgtcgtgagggcgtggaggcccggcacacctgttggtcccaacatccgctcatgcgggcatcacacttttccagctctttgaggcctgcatgagggcccccccctgttcatgaacttcaccccgcccccggcactcaagtgtttttaacccacgcacacgggcttgtggtctccactaccaaacgggagctagaacacgtcaccaccaccatcacggagggggcccccccagccaccctcccccccacttagaatccccccgaccacaag

SEQ ID NO: 625380 - DNA, 643 bp, Homo sapiens
  misc_feature (169)..(169): n is a, c, g, or t
  misc_feature (248)..(248): n is a, c, g, or t
  misc_feature (279)..(279): n is a, c, g, or t
  misc_feature (284)..(284): n is a, c, g, or t
  misc_feature (290)..(290): n is a, c, g, or t
  misc_feature (330)..(330): n is a, c, g, or t
  misc_feature (480)..(480): n is a, c, g, or t
ccgagcccgagccgatgccggatccctgagcgagcggcggatactcgtgcccccgtccttcgtgcccctgtctgccgccgcggcctgtgcccggcatgaggaggagtgcctggtgttctctccatactagagccagctttatccagcgagcttacttggtcaagccggncggccacgttcccgctgcaggttttgggatttgagattgacgcggtgaactctgtccagttttcaaaccacacaggctntgcccactggaagggccaagtctgaattcanatganctccangagttgtacgtaagtgccatgagggctgaacaacatgaantaatatatgacttacgttgcttcacattggttatactgagggactaagtcgttccgtgtgcctagtggttggttgtactttgttcagggagcattgtaagcagcagtaacctccaggctggtgtacgttgtgttgatccagctcttgggntgacaagtgggacggcgaaggcctcgatgtacgtcccggaggagctcctttcctgtctacggatgtaataagtggttgccggcttgcggactttatcacgcccaaccagtttgaggccgagttactgagtgggcggaagatcatcacctaggaggaaggcctt

SEQ ID NO: 625381 - DNA, 1557 bp, Homo sapiens
  misc_feature (146)..(146): n is a, c, g, or t
  misc_feature (1223)..(1223): n is a, c, g, or t
  misc_feature (1326)..(1326): n is a, c, g, or t
  misc_feature (1365)..(1365): n is a, c, g, or t
  misc_feature (1517)..(1517): n is a, c, g, or t
cggcaaataaccttggatgttccccacaatttgtttcctttccttgaaaagaagtagaatctccttattgaggtccatgattatatcagggcctatttaggagatacttctgaggccaaggagtttcccaagcagttccttgagcnccgtgccaaacagaaagccaaccagcagcgtcagcagcagcatctgccacagcagcagcagcagcagccgccacagcagccgccacagcagccacaacagcaggactctgtgtgggggatgaaccacagtacactccattcagtatttcagaccaatcaaagcaacaaccaacaatccaattttgaggctgtgcagagtggcaagaagaagaaaaagcagaagatggtccgagcagatcccagtttattaggattttcagtcaatgcatcatcggagcgactcaacatgggtgaaatcgagacgttggatgactactgagcacctgccagtggactggccatccctctcctgtctgccgactatggagtctccacctttggacacaacacttactcaccatttactctttatcactctgcaacaaatcacagaaccgatcatctcaggctttttcttctggccctttgtgtccaagattctttaatccatttttgttggtgaacatctcagactatagataagtggactggacacaacacttactcaccatttactctttatcactctgcaacaaatcacagaaccgatcatctcaggctttttcttctggccctttgtgtccaagattctttaatccatttttgttggtgaacatctcagactatagataagtggactggaccctgtgtcttgggggtggcagttgggattactccccaacaaggctgattttaggcagcatgtgttcactgtgctgtgatttcatctactgtctcccagaaagtgtgttgggatcggccattagcagcttgctttctcttgtcactttttttcttctattttgttttttcttcttctttttccccccatcagggcaaatggtctaactggtgcaatcatgaagagagttaatggttaacagacattggccaataacaaaacaccccatggactgtgactcgagtatccaacaggcagtcagagctctcggttgaatgcatgcacttaacttggatgcatcagaagcctgagtgggttgagatgaggtggttggttgatgttacacactcctcacntgttcttctgagtgtctttctctgaaaggattatgttttcttcgttagatagtgacttctgagcaagctgatctcccctggcatgctccaacctgattggacnaaggaagctctatggcctgggagagagactattcttaanttttctttcttacaaaaactgattttcccataaatattttacttcagaggactaggaccattttgttttgggcccttctgctgaaaatttgtctcgtttaagaggcagctagaatctttaccatatgtatgaatttgtataatttcattttnggatagggataaacttttgcttctgataaaagcctggaat

SEQ ID NO: 625382 - DNA, 782 bp, Homo sapiens
  misc_feature (169)..(169): n is a, c, g, or t
ccgagcccgagccgatgccggatccctgagcgagcggcggatactcgtgcccccgtccttcgtgcccctgtctgccgccgcggcctgtgcccggcatgaggaggagtgcctggtgttctctccatactagagccagctttatccagcgagcttacttggtcaagccggncggccacgttcccgctgcaggttttgggatttgagattgacgcggtgaactctgtccagttttcaaaccacacagagacaaggtcggtctctgtcgcccaggctggcgtgaatgtggcgcaaccagctcactgcagccttgacctcctgtggctgaatgcaatctttcttgcctccacctcccgatgtggctggtgactatatgttgtgcaccatgcactgcccacctccatgcccatgggtttgttacttggtggtgtgtcactgtgtggcatgcttcttgcctggtgatgtggccacaaatgccatgactccctgtgcatgggacactggagtgttccacacaatgcttgcgtatgtttgtgttccctgacagcccttcagtgctggagcgggtgtggaaatgcctgatcccaccaagatgcctgcaagagcccacctggctgcaggcctcgccgacctcgatggctgctgctcgcacttctagcccctttccccacggaccaggcccccgtatccttgagggccgtaccacaaggtgcgttcatttctaccacaccgtgagctgggcttggcagagcctccaacttgtggccagtattcccagtgggacc

SEQ ID NO: 625383 - DNA, 424 bp, Homo sapiens
  misc_feature (169)..(169): n is a, c, g, or t
  misc_feature (248)..(248): n is a, c, g, or t
  misc_feature (279)..(279): n is a, c, g, or t
  misc_feature (284)..(284): n is a, c, g, or t
  misc_feature (290)..(290): n is a, c, g, or t
ccgagcccgagccgatgccggatccctgagcgagcggcggatactcgtgcccccgtccttcgtgcccctgtctgccgccgcggcctgtgcccggcatgaggaggagtgcctggtgttctctccatactagagccagctttatccagcgagcttacttggtcaagccggncggccacgttcccgctgcaggttttgggatttgagattgacgcggtgaactctgtccagttttcaaaccacacaggctntgcccactggaagggccaagtctgaattcanatganctccangagttgtaccaagggctgaggcttgaccacctgaattaattttacttcctgcttaccaggtattccaaggaccaggcgttcctggccctggtgggggaccttgggccagaacttgaaccacaaaaccccaagct

SEQ ID NO: 625384 - DNA, 666 bp, Homo sapiens
agatgtctgggggcggggggaccggtatggagagcaagacccgagagcctgcagccgctagatcacggtgtgtcgagcagtggccagcgtcgacggtgaccaaggcttctgttccgcaagtgaagggctcactggtgtagcagctaggcttcgccgtctggctgtgatggatccctggagagtatgtggacgagcgagtggacctagcggactgggcaactgcggctgaggggcggcggtgcgccaggtaagtagcctcccgtgacttcggggcttctccgcgggggcgtctccttaggttcccggaccctgtcagatcctccggtgggtttggcagttgaaggacaggatggtctgtgggacgtcctgctgccgtcgaggagccgtctgagcaggtgcagtaccggtgtgcccggctccccggatgacagccgtggtcgacctgggtcgtgacttgtgtacccgtcggagactgcgggtgccctgcccggagtcgtcgcgcgagtccttgccaaggcacgagtctgacctgacgtctgagtccgtatgagcccaggaagcggcagtgtggctgttaggagtaggtttgcagtcgagccagttgcccttcctggggagatctccggcgcctgtgcttctctgcgagtcgtgctctacgctgtgttc

SEQ ID NO: 625385 - DNA, 158 bp, Homo sapiens
tgcttgtaccactagtcacggttggctagttgtgcactttttggtaagtctggaacttggtgctgctggatgaacctgaactgccgtgttaatgtgctgccctgactgcctgactgctcatcatgacccccagaaaatggtgtttggtttgatatatg

SEQ ID NO: 625386 - DNA, 260 bp, Homo sapiens
atgcagtgcttgtgaggttcgtctaatagtgttgtgcgataatgtgcgcttgaacacggtgaatgacaaaagcatgccgtggggcgtgtgtcagttagtgcaaaaattcggatttccccagtgtcatgtggtctgttgtgcgtgctgaaagggcggtagttgtatattgcggtagcacttcaggtgtcttgttatattaaagtgctcaaaagttgttttttatgatgttttcaaaggcaggttaaaaacgttttgtgtta

SEQ ID NO: 625387 - DNA, 178 bp, Homo sapiens
attacatactgggactgaagatagatgtgtcttagagagacgcctgcatgaccaggtacattcaagcatgggctatgcgcaagtacatccaccactgctcgcgtgttgatcctgccagcgccatatcagggtccgaaagcaggtggtgaacatcccgtccccgtagcgggttgttgcg

SEQ ID NO: 625388 - DNA, 194 bp, Homo sapiens
ggcccaattctttgctgttctttgctcaacattttccaaagagaatttctctgccttttgaagtagttcattgcattgttagccagttctcactagaaagtttctccttatttttagccaaaaagctaatttcctaaagtttctatattttgattctaattctgtcctctaaatttataaaaacttaatacaat

SEQ ID NO: 625389 - DNA, 338 bp, Homo sapiens
gcacgagtataaatgagattgtttcaaagggagctcacgacttaaagagtcctggccaggtgcggtgactcccgcctgtaagcccaacactttgggaggccgaggcaggcaggtcacttgaggccgggagttcgagagcagcctggccaacatggttaaaccccgtatctactaaaaatagaaaaattagcggggatggtggcacgcacctggagtcccagctgctttggaggctaagccaggagaattgcttgaacccgggaggcagaggttgcaatgagccaagatctcgctgctgtactccaacctgggcgacagagtgagactccatctcaaga

SEQ ID NO: 625390 - DNA, 2157 bp, Homo sapiens
  misc_feature (1589)..(1589): n is a, c, g, or t
  misc_feature (2038)..(2038): n is a, c, g, or t
ctcagcgagctgctaggggtcatgagcctcccagaagcccctgacagctgagactccagcccgccgcatgcaaaccccaccagaaaccatacatagcaaagcccacggagtccagatgcaaaccccaccagccactgactgcacaacccacaccacgacagcaacgccagcagaacacatctagaacgccaatgaccagcaaacacgacgacggcgcacaatagcatggaatattaaacccaccaagaccacatgcgcagacaacgctggcaagaacacacagagaccaacaatgtacaccaaaacaatgaacagcatacaaccaagacacatgaggaacattcatcgccaccacaaacacgcgacatgaaccagctcgcaacgctcaacaacaacacacccctcacccttgcccacacaacagagcaacacaacacacgacaacagcaaaccacctagaactggggacaccatagccctactacagacacacagaccacacatggacagtgcaaacaccaacaatagcactcacgaccagaaacacgcacgaaccagacgccaacaacacccgtcattcatacacacactacgcgaaccaaacaagcgcgcacttcagcaaccacggcagcacacacccgacagaccgagaaccacatgagagcatacgcagctgatgcattgtccactagaagcacgaccaaccctaccagagaccacacttccactatcgagaccgcaacgcaacacccataggacgacacaaacacacaaactcagtagcgctgacagtcgtaccctcgcacgacccaaagagcaaccacgggacaaagacaagacgtaacaaccaccaacacactaggtagcaacacacgacgccacaccggtcaacaaacactcgacaaacaaccacacaaaacgcagaataacatggctcgcacacactgtaccgagcaagcataagtcacactcgacaatcagccagcgcgtcgcgacacgcgagagtaacttcacacgtaaggcaacatcgaccaacggcacaaacgaagatatcaccccaacccgctgccagaccaacacaccatcgcgaacaccaaccgcaattctcctcggacactacctctcccaactccagtaacaccacccatccatcgacactgacgtggtaacacatcgcatacgtctgagtattggataaagaggatgagctagtaaacagacgcacactgacatgtagaacgcaccctgcacacagtcacccatccactgcattcactatcaccatctcgatgactccagtacgaaaagaccactgctcagcacgaactgcgcatacacggcaggcgaaccgctagaacaagagaccaccatagagcactagctcttaccacagcgtgcaacagactagagatagtggcgagcaaccgagaggcaatggagaccagcactaccagacatagacatgtgacactaacataatggaccagatctagagcacacagcgaccgacagcatctcgactccctcactgatgatcatgtctgctcactagctgaagtatgctagaacacgaaaccatccagatgagnaacttactacctcaagaacaagtacttagtaatgacgcacatcacgtccatactgatcacaaagagtaactcctcagatcagcacacctaagaccacatactgtagtagacaccaacaccgacagcaacacacctaggactacactacactatctacaactcaacactcgatagcagactagctatacagagcacacagcgacgacgacagcacatcatatcgcacacatcaatagcacatagaactcacgaagacaacagatatagaataatacataccagactcaacacacagaagacagacagtagatatcgtagccatcagaagactgacacagcaagccatcaacgatagagcttaacatctcagcacacagaccactagctacatacaactcatcaacaataagacctacacaccacaagcactaccactcgcacacgcagancaacccactacactcctacgacgctcctagtcatcatcacaatcatagcacaatgcaaacagaactacagatccaacagaggcaaggacatacacacagctcaaccagtactaccaaca

SEQ ID NO: 625391 - DNA, 428 bp, Homo sapiens
atgtagggggacaggaacttccatatattgctggcagtaatgaaaatgatagaaaatgatacagctattttggaagacagtttgatagtttctcaaaaagctaaacataaaactaccataaaacccagaaatttcactcatatctgcccaagagaaatgaaaatatatgtccacacaaatgttcatagcagcattattcataatagcccaaacttgaaacaatccaagtattcaactgataaatagatgaaagaagtatgatacagccatataatataatatgatgcagccataaaaaggaatgaagtattgatacatgctacaacatgaatgaactttggaaatattacgctaagtgaaagaagtcagacaaaaaggccacatactgtatgattccatgtatacaagatgctcagaacaggcaaatt

SEQ ID NO: 625392 - DNA, 168 bp, Homo sapiens
catacaacttcctatactcttggcatggcagttcagaagaatattcagaattccttctaaggcttctggaataagtaacttattttccaaagaaataagacctaagcattataagtagttatgttccgaatactatgctaacaaagatgcctagctgaataatctcaa

SEQ ID NO: 625393 - DNA, 644 bp, Homo sapiens
  misc_feature (119)..(119): n is a, c, g, or t
aaggggatctccccccacattgttttagagcccccttcaccccctttagagcggacaatcaatgctgttctgcttgtgggtaatggccctgactcagcctctgggaagggattacgggnattgtaaaaaccagctggggcaccggctggggtgagaatggctacttccggatccccagaggaactgatgagtgtgcaattgagagcatagcagtggcacccaccccaattcctaaattgtagggaacgccttccagtatttcataatgatccgcatcagttgtaaaggggaattggtatattcccagacggtagactttccccagcaatctcagaagcttccaaatagatttccatgaagaaatttgtcttcagaattaaaacggcccttaattttaaaaaccctttcaatcggccccgggccatttttttttaagtattcaattaagcgggaattttttggaaaatggccacctatgaagtaatagagtttggttaatcatttgtaattccaccacgccatattttttaaaatcaatgtgaaaacatagacttatttttaaattggcccaatcccaagaaaaaaagggcaataattatcaaaacttttaaaataaatgcccatatttttaaaaaaaagtttta

SEQ ID NO: 625394 - DNA, 399 bp, Homo sapiens
cacgaggtgaaaaagggtctttgaaaactgaatttcaagtgcacgcaatataaaatgaaagagatggagagacatctgacacgataaagcatggaacaaaaattggtaccctaggttctgcatcaacagaattgttatctgggagcactcgaaatgctgatgacaaagaggaggatgaccgcatcctgaagacttctaaagagctatccacttccccatgtaatcccacagttcgccagaaggaatctgaattacaactgacatctgcagacagtccacaccctgacttattgatagacttgagaacctctctagaaaatgcacaggttgatgactctattaaatctcatggatcttatgaaacagaaggctttgagagtgctagcttgaatgcagagc

SEQ ID NO: 625395 - DNA, 425 bp, Homo sapiens
actctaagtatcccaggcgtggtggtgcgtcctgaataccagctactcaggaggctgaagcaggagaatcacttgaacttgggaggcggaggttgcagtgagccgagattgtgccactgcactccagcctgggtgacggagcgagactccctatcaaaaaaaaaaaaaaaaaaattggttccggggaattaaaaattccttttctttaaaaacttttgtcccagaacttatgaggttgcccccagaagtttttggtgcacttattataaccgcgaaggtcctttcaaggaaattagttaattaattccttaaaaccttaaaaataggcgggccattgagaagctcttgccttttattcccgagcccttcaggaggcttgaggttttagggcccatttgacccgtgggagttaatggacgaggacc

SEQ ID NO: 625396 - DNA, 325 bp, Homo sapiens
  misc_feature (85)..(85): n is a, c, g, or t
  misc_feature (87)..(87): n is a, c, g, or t
  misc_feature (142)..(142): n is a, c, g, or t
tggcccccagggccctgcaggttagttaatgtagcagggacccaaaaaagaccacggggttgggggtttgtgggcttgaccttgncngtgacccccccccccctcaggccacacaataaaaccttttggccacggtggaagntgttggggaaacttttgttgggccttttggccggaggcctggttgatgggttggggccacatccctgctttttggtcctgtttatcctttttccctttcccgttttggacctggacctagcccccagccccttttttttaggtgagtgggtggagtggtcaataaacccccatgtgcctgtta

SEQ ID NO: 625397 - DNA, 438 bp, Homo sapiens
  misc_feature (11)..(11): n is a, c, g, or t
  misc_feature (71)..(71): n is a, c, g, or t
  misc_feature (109)..(109): n is a, c, g, or t
  misc_feature (111)..(111): n is a, c, g, or t
  misc_feature (150)..(150): n is a, c, g, or t
  misc_feature (370)..(370): n is a, c, g, or t
ggaataatcanctggaatgcctccgtagatagtcagcgtaccagtagagttagttgtccgtagtcctcacntatccgcgttttgcttcgtatggttcgaggtcagaaantnttaatggaaattccagaaataagcacttcatagtttaantgcacacattctgagtattgtgatgaattctgccatccattttgtcttatctggtctcactgggacatgattattcctttgttcagtctatccacactatatacaccactgccgttagtcactgtgtagcctctcggttatcagctcgactgctgtggtatcacagtgcttatgttcaagtaaccttattttacttaataatggccccaaaatacaaganttgtgatgctggcaattcaagaagctttaaagtgctccctttaagtgaaaaggtgaaagttcttgacc

SEQ ID NO: 625398 - DNA, 940 bp, Homo sapiens
  misc_feature (686)..(686): n is a, c, g, or t
  misc_feature (732)..(732): n is a, c, g, or t
  misc_feature (742)..(742): n is a, c, g, or t
  misc_feature (751)..(751): n is a, c, g, or t
  misc_feature (868)..(868): n is a, c, g, or t
  misc_feature (878)..(878): n is a, c, g, or t
  misc_feature (884)..(885): n is a, c, g, or t
  misc_feature (887)..(887): n is a, c, g, or t
  misc_feature (889)..(889): n is a, c, g, or t
  misc_feature (894)..(894): n is a, c, g, or t
cgccacattgcccaggctggtttcaaactcctgagcttaagcaatccgcccacctttgcttctcaaagcgctgggatcacaggtgagccactgcacctggccaaatgtaggctttttctatcttgctcctccaaactcttccagccactccccttgagaggacttgatgatatggaaaagtacttatggtatagtaagtaaaaaaatataaaaacttgcatgcatgtttttataaacaaaaataatttttttaaaaaattgcactaaatttttaatagatcaatttctttagaatgaaattgtgaatattttcattgtcatctttttttttcttatagggaaagtacattaagtttaaatgaagtggtgtaaaaatacagaatccaaaagtcatggtgtgattagaatcaagttggagagatactttatttcgaaaataaataaaactatttatttgactaaaatctgatgtaaaacatttaaatctaatgtattgtgcttttaggcatgcactcataaaaaatgctgtaatcctgcagattgtactctagttagatctgcagaatgtggcactggatcatgctgtaacaataaaacttgtacgatccacgaaagaggccatgtctgcagaaaaagtgtagatatgtgtgattttccagaatattgcaatggaacatctgagtttngtgtacctgatgtgaaagctgctgatttagaatactgcagtaatangactagctantgctttaanggagtatgcagagaaagggatagacagtgttcacagttatttggaaaatttgctaagtctgctaatcttctgtgtacagaagaagtgaattttcaaaatgacaaatttggaaactgnggttcccgtngtgatnntntngatancctttgtggaaagattgtgtggacacatggcgaacaatcaaagact

SEQ ID NO: 625399 - DNA, 285 bp, Homo sapiens
ccccccaaaaaaatcccccaaaagccccccgggaaaagcctttttttttgggggccgggggaaaaacggtttggaaatggttcccccttaattttaaagccccttttaaaaacccccggtaaccgggccggggcaaaggggggaaatcccgcctttggcccattttaggggaaggtaaacctggttttttttgggttttgtttccaaggaggggttttccaaattggttttttttgggggtttttggctctggcttttttttaaaatttttaaaaaccccaagga

SEQ ID NO: 625400 - DNA, 614 bp, Homo sapiens
tatcccccacgtaaggttcaactggaatggaatggacacacatggcaccaatatggactggcatggactcgaatggaatacaatggaattaatggaatggactctaatggactggaatggactagaatggaatagaacggaatagactcgaaaggtatggaatgcaatggaatggactcgaatggaatacgcacagaatacgacctacgaactggtatggaactgcaactggacctggaccacgaatgggatggactggaatggaactggaatggaatgcactggaatgccattgaacggattggaatggaatggaatggaacggaacggaacggaacggacacggaacggacccggactggacccggcaacggacccggaagtggaacggaacgagacccggaatggaaacggaacgtcatgtaatgtaatgtcatgtaatgaagtgtactctaatgtaatgtaaatggaatggaatagactcgaatgaaatggtgatggactcgaatggaatggaccggaatggaatcgactcgagtggaatggaatggaatggaatggactagaatagaatagactcaatataaatggaatgaagtggaatgaactcgaat

SEQ ID NO: 625401 - DNA, 155 bp, Homo sapiens
tgggcagattacctgaggtcaggatgtagaagttgcagtgagccaagatcacaccactgcactccagtctgggcgacagagcaagactccgtatgaaaaaaaaaaattagcataaactattctgtataaccgacagcatggtcactattggaagg

SEQ ID NO: 625402 - DNA, 1587 bp, Homo sapiens
gagcaggtaggaacgttatcgtcggtggagcaccgcaagttcgatactgatagactttgttgaggtgaggccctaggccgagtagtagtgtcggcatgtgaccgaaggtgccgtgagaagaggcagaggatgcgcgccgaagcggcgcgcaggtccggggtacagagggcagtgtatccgctgtgccgaggaagcgcggcagctatgggagacgtggaccgcgcagggtggaaacgggcggaagtggggggataaccacgacggggcgttgtgaagcccgccggcgccgtgacccgtataggcgccgccgggacatgtggggggtgccgagggtcgctacgcgacccgaacggtacgggtttccagaagcgcggcctaaaaggccggtcgagtgcgacggtgtgcgtggggtaaagatggcgcctaaaaggttgtgattgggcccaaacgtgtagtagattggtctagtggggagcggcgctttcagcggctagtaattggcgacctttggagggtgtctctacctcgttgggaataatgctgttggtaacgtgccgtgtgtgggaccgcttgtctgcctaaagggggttggccaatgaggcgttcccaggaccctcgctgcgtaggttgattgattggccaaagggctggtgggtcaaggcatttactggcgaagggttaacatgtgtgggagatgcgcaggtgactggtgcagcctgtcaactgggcaatatgtggacaaggtggtgggatgcgcggcaatttggcgtaacgcgtggtcgcgctagtagaaatcgctcgccgcggtggtgtcgcgaggatgtctgcgctataggtccttggcgtgtatcttggcgaatataatcgcggatagtatatgatgtcggtgggagtgtttgccgccacatcatggggagcatgcacaatgcacgatctttgtgaaactaggtctttaggccctagggagatagacgttggagaaggcgtgcagtcgcacgacacggggtcttgcgcatttgtgtagcacagataggctgcaaaagagcgcgcagcctttggcaacgcaatatggcaagctggctctggtactggtctcgctggtagatatgtgcgctgccctgtgagagacctctgcactacgcgcgagatagagagtggtacacgggcttccgcataatctacagggccctattcacgacatgtgcgtgttgttgtcagaaatgggctatgccctagagggcccatgcccagttgttatcatgctagacaggagccgtgacgcaagagaggagttcgccttactaatgctgagaggtgcagtttgaatctcagtgggttcagaactcaagatgccaagcatcggtcgtgtgactatcaggaacaatggggcattgttgcttgttgggtaaaaagtgtaagcagaagccgccacaagttcagcatgtaactcaggcatttcatgttattttttcctttgtcttcttggtctggttctttgttctgtcccccatgctgctgatgcagtgacctctagaacggggaaagaattaatgctctaacaaactcacctgctcaaggcagtgaaga

SEQ ID NO: 625403 - DNA, 918 bp, Homo sapiens
gctcgcctacggtctggtgtttgccccgccgcctctgcgaaggaattctgttttatgtgggcgcgacaccgttgtgcacctgtttacaacgaatgtgtctcttcttgttgccagacatggtgcgtctcagaacgtaccccctggtttagaagacactgcaatgcgtttgagactctggggttcgagagagagttttgtcccaccaaccgctgctgggtccttgggggatacttccttgctaacgagcgagctttgtgtctggaacactccgccctcctcatattggttgtgtgttgttgcgcgcaaccgcgccgtgattcatgggcgtccggagccgcacactcgtcgtcgaccgccagagtagtttgcttcggaagtagggtttagtttgccgcagtgcctgactcaaagagtgaccagcacatttgcgagaagatggacagttcgggcgccccgctgtcttccaacagtagaactagtgatagaattgcgtgagatcactcgtcttggagggaacaacaagcatagtttttccacccgcctcatatgcggggcgagcaataaataaagcacccctcgtcatttctccaagaaggctgctctatggtctacaaaagcatgattctttcaaacgcaggaagtcaccaacgcatagtgaataggcacaatgctactagatgcgatcgtgtttgtatatatggtacaagataaccccactaaagacttgcgctttaagagtaggccggatactatgtgtatggctactgctgtttaaaagctagcccccactactctacagggacagtgcacgtgtgccccctggcgtaccaccagcgcacgccggttattataattctgtatcagaataaagttctgattttgcaaatggggaaaacaattctttctcgccaacaaaac

SEQ ID NO: 625404 - DNA, 154 bp, Homo sapiens
gtgatcacttaggagggacccttctggtgcagcaattttatcttggcttgtactcaccacttaaaaaatcataaaagactgagatgttggagaggggcaagcctgaggtcttgagagaagaagataccagaatagaaaagcagcaaggaaagcg

SEQ ID NO: 625405 - DNA, 558 bp, Homo sapiens
  misc_feature (2)..(2): n is a, c, g, or t
gntcacttgagcccaggattttgagattaataatattatttattactattattcaagctttgttaaatcaaacctaaagctcttggaactttaagttattctgagccttgacaggaattggtctctgcagcctgagtcatggggcatgcagctgcaacttccacctatttttttttttttctgtaattacttaggaagaccaaatggcaccagagataagactcccttagatccccacttagatcaccaccctttctcagggggtaataaagtcatcttccttggaatgtagcaatctataaccaatcaaagcactgtaacatatgcactggtcttgtatggaaaatgttgtaatcctgctaaaattcctctctctttgcctgtggaagtgaaaccttaacttctccagtttggaatgctcaccccattcctttggagtcaatgcttactgggtggctattctcaaactttgcactcaaagaaactctatacttagtcttattttctgaatctcattatttaggttgacataataaacaactattagtaagtaaagtg

SEQ ID NO: 625406 - DNA, 198 bp, Homo sapiens
catctactgtccggagatttcaccggcagcagtagatgtacttaatgccacagaaccgcacacttaaaatcggttaaaatggtcaattttatactgtgtatattttacgataatgaaaacatttttttaaagagctataccaagagtcctgtgcacaggttgtaagggaaagcctggcctgcctctgggaggaccatt

SEQ ID NO: 625407 - DNA, 111 bp, Homo sapiens
ttgaacaggcacttttagtttagacctaaagggttaggaaagcattagataggtattgtggatctccttagaaaaaagataagtttgcttaaattaaaacattccatggga

SEQ ID NO: 625408 - DNA, 285 bp, Homo sapiens
ggatcctaatgaattgtgctggtgctaaaacgggacattccctactggaggagcagagcaagcagcagatccaacgagcacctgcgccgccagttcgccagccaggccaatgttgtggggccctggataccagaccaatgatggcaggagatctgggcgcactctccatatgatgctgaactgggaccctggacggaccagcatgagccacctagaagcagtatgaactgcagcatctgtggactacaatgcccaagcgtggaccttgctggagcagcagcacca

SEQ ID NO: 625409 - DNA, 256 bp, Homo sapiens
cactccaggaaagtgagtcagatagcagatgagtaataaaggagaatcatgtaaagcatgttacaaccaatataatgaacagtacagtgatatactctgggtcccagatactacatctctgcaaattccaacaaaagaaaaccaagatagatcagtttctagagtctgtagccaacatgttagcagctgctcagcaaatctcgcagaacatcagttcagaaactgcacaactcctcctggtagtctctgatgggcg

SEQ ID NO: 625410 - DNA, 266 bp, Homo sapiens
tcacaatataatggccacagacacataatacctttaagtttaacctgtcttattaacactctgtacatcactttcttaaatccagacaatcaacaaaatgatcaaaccctgatttgcagcactggccattatccctggtgtaaatattcccattgtggcttatttcaagctaccagtgtgacgtcattgaatgtggagttggggagagatgcatagataccattatatgtgtttcaaccatataggtaccaattccatgctaataa

SEQ ID NO: 625411 - DNA, 299 bp, Homo sapiens
catcattatatatcactccaggattgatggagggttcgttctactattatgactattcgctgcgaacgcgacggcttctcaactcatgataattattaattattattgctgttggaaaaatgattgatcctccaaatgataagatgttgcctgtggtgtatgcatcgtggtagtccgcgtaatgtcggggagttctggataggccgagaaaatgttgtgggagggaaagttaggacttaatcgccgctgaatattatagtgatatggattttggcgtcggtagggtgcaggagggtatg

SEQ ID NO: 625412 - DNA, 236 bp, Homo sapiens
gtttctccgtgttggtcaggctggtctcgaactcctgacctcaggtgatccgcctgcctcggcctcccaaagtgctgggattacaggcatgagccaccacacccagccagatgcaaataattttcttggaaaattatttcaaagttattttaggccagaaatcaaggattgttccaaccatgaaaatgggtaagcacctgccttaaggaaatctaacctgctattactgccaaatt

SEQ ID NO: 625413 - DNA, 499 bp, Homo sapiens
  misc_feature (41)..(41): n is a, c, g, or t
  misc_feature (69)..(69): n is a, c, g, or t
  misc_feature (100)..(100): n is a, c, g, or t
  misc_feature (166)..(166): n is a, c, g, or t
  misc_feature (411)..(411): n is a, c, g, or t
  misc_feature (454)..(454): n is a, c, g, or t
  misc_feature (468)..(468): n is a, c, g, or t
  misc_feature (496)..(496): n is a, c, g, or t
ttcgtcattaaggtttactattgcggctattaatagaattngtctggttttgtattcccgcacggcagncttatacgatcacctctgccttaatctccanccgacacgctccctctccagttccgcgtgcgcctatcgctccgtcagcgacgcttaccgcaggcgncactactagtattgtacatgcacttattagaatagcaagtcccgcaggaaatcatccttgtgaaagtggtatccgggggttccgttcggtgggtcaaattcccgttccaactgcaacaggtttatccgcagcgtcaagtgattttccttgttaccgtcgccatcatcgttgtcgtcaccatcattattgccgtcccccgccacgtcgtcgtcgccatcgtatttataataaatgttaatcaaatnaataataagcctatttatgccgtagtagtacagtttcgggttncgggggtacgaacngcggggagaacagtggaagaaaaatgtncgg

SEQ ID NO: 625414 - DNA, 645 bp, Homo sapiens
  misc_feature (5)..(5): n is a, c, g, or t
  misc_feature (23)..(23): n is a, c, g, or t
  misc_feature (38)..(38): n is a, c, g, or t
  misc_feature (51)..(51): n is a, c, g, or t
ttttnttggtaccccggaattcngccattatgcccggnggctttatctttnttccattccggcaagggtccgcaatacaatctctcataacacttacttattctcatcatgcacttttatctatttttcattacaaactaaaactaattttaaattttcaccttaataaattttcactttttcctcaaaaattttctttaccattactcttcaaattggatgctattaaccaacccctctacctcttatactaaaaacaaacctattacccatctattctcactcctataacttaactccaccccttaaaaatgaaactccaactctacaatacattccacattccacaactacctacccaaacaccctccctttcctaccctcatcattaacaaccacataccccctttatctatccaattcttccataccacacccacatcatccaccaccccccaaacctttctctttacctttacaacccctccccccttttaccctccactctttctcttcaaaacaaacaacccaaaaaaccttctcccaccttccctcccctcctccttccttcccctcttaccctcatccccaaactacaccttcccctccaaaaacacaatccccccctttcttaccccctctcct

SEQ ID NO: 625415 - DNA, 569 bp, Homo sapiens
agctgtgaatattttcattcatccacactctttttaaagcatgagtgagttattttagtctgttgcaaaggctgcctgtagtaaatgaattactgctgatcagacaagtgtaaaggtttcatttgctttgccggtaaaattgaacgactgaagtggcaaccgttttgaattaccctccctaatgggtcagcaaggatttggcccttaggaacttgactctcatgtgcatcatctgctcggtaattctgtaaatgaggcggccattttagaacgtccaccattttaaagtggttaatgcactttgtttacagatcaataatctgctaatgaccacatgccagtctgcatgtctgccaccccgaaaagcaaacctcccacatattagagagtctgaccggtgagttgcttaggaatagagcaagtagacttttaaatactaatgtttttaccacaagggctgaacggtttgccaacactaagcgctgatgatgaataagctatttgtcttcaacgatttgtttgtacaaatttactgcaacaataaaactgatgtgtcaactgaaaaaaaa

SEQ ID NO: 625416 - DNA, 268 bp, Homo sapiens
  misc_feature (11)..(11): n is a, c, g, or t
  misc_feature (19)..(20): n is a, c, g, or t
  misc_feature (29)..(29): n is a, c, g, or t
  misc_feature (31)..(31): n is a, c, g, or t
  misc_feature (109)..(109): n is a, c, g, or t
tagccaggtgnataggtanngagacaggnanacaggcagggatggaacgaggcagctcacaatctttttgtttccgtcttttttcatttcaatcaaagcgatgtcattntggtaagtgcctgcattgtagttttcatggaaaataattctatcacgtatcatactatacgttagtcggggtatcagtctactactgtgtcatattgtaacgatgagtttactgttgagacatgtgcagcagtcagatcacagcacatatatcccaaga

SEQ ID NO: 625417 - DNA, 1031 bp, Homo sapiens
tggggttctctgaccagcacctgggcggtgggcaaaaacaagcgccttacaaaagggggcaaaaagggacgccaaagaacgaaacgtgggttggactccaatttcctaaaaaaagattgggttatagatggtagaaacgccccttggctatggtctcacattataagagacacttattgggaaaagaccgctctgtcacgcaggacccaagggacaccaaagagtggcactatctgtgagagtgggctcctccagaagggctcgcgtggtgtttgtgaaagtgtgacagactcgtgtgccgtgatattgcggcacaaacagtgagatgacaagtgtgtgcatatttgagacaaaatatctcaaaacgcgtgaaatacacgtgcaaagaatgtctccagggggattacacaaagagtgtgccaggacaccataacgtttctcagaagtggcccgtgtgggaaatctatataacccccgtgtgaaacgaaaaacagtgggtgttctcaccagtgggtctccagaagaagagagtgggacaacacacaaacagtgaatttgtgaaaggcccttccagcgtgtgagagatgtggctacagaagaaaactttatccgcggcagttcggttatcaccttgtgaacaactctgccaacctgcgtgtgtcaacgtggtggagggggggagattataacacacatcaagaacaaacagcgccaaaacacaacatctcgacgaatcatcagcgcgaaaaagaaacccttacaatatgaagtgcgccttcaacgggccaccacaaacgcagggggctcccgcgcgcaaaaaacatcccgggggacaaaacaaagacgtagcaggtggggaacaacaactccatgtgagacccccccaggaagaccaggggcgcggcccaacaagacaagacgaggggcacctttctgaacccagacaaacaagggtggggcaccaaaaatcagagacgggggaaagtccccagaaaagaccccgccaacgtggggggaaaacaaaacagcac

SEQ ID NO: 625418 - DNA, 696 bp, Homo sapiens
  misc_feature (648)..(648): n is a, c, g, or t
atagcctttctgtatttaagaaacttaagcagccgggcatggtggctcacgcctgtaatcccagcactttgggaggccgaggcggatcataaggtcaggagatcaagaccatcctggctaacacggtgaaaccccgtctctactaaaagtacaaaaaattagctgggtgtggtggtgggcgcctgtagtcccagctactcgggaggctgaggcaggagaatcgcttgaacctgagaggcggaggttgcagtgagccaaaattgcaccactgcacactgcactccatcctgggcgacagtctgagactctgtctcaaaaaaaaaaaaacaaaaaaacgagaaacttcagttaaccacgcctcctcgggggcttagaagcgcatttcagcgtttccttcagggctgggtactcttatataattccctgaaacggggctccagggtcaaaccctttaagacaatctgacgctggcaaccctgggccttgggtcgtcgacagatacggacgggttcaacgggaagaatctaagcttttaaacacttttctttaataaattagacttatttcgccttggtaatggtatggggcctttaagtggagtaagggctggggcagaagggttgcttaacaagctttgattcccttttnctcccgtggactggatctggcttgtccagaggcaaggtggtcctgggc

SEQ ID NO: 625419 - DNA, 107 bp, Homo sapiens
accctaatacaagaatgacaattataatggaaaaggacaaataatataccagcgggttggttattatagtccgtgtattaaaatgctatgaaacttctaaaactagg

SEQ ID NO: 625420 - DNA, 909 bp, Homo sapiens
gtggcttggccgtccctcaatcacggaagctctatgactgtcgggtagataaccttatgtcctgacgtatggcggcgccaagcctgttccacccagtacactgcagagaggcaatcgcattgatctggggctgccacgaacttatggtagccggcgcggcatcactggtaagcacacaatgcccctcacgcaaggccagacgcagtcactctcccattcctgcgtgtgtacaggcagttctagcgaatcctcagggtaaccctcagcagtccatcgagatgcctgtgcctctggatgcgaagagaggagcctcactacttgccatcgggcactgacgacttatgcttcagtcacagggctcatggaggcctctccactgtggtcgaatagtacgtcgaatgaagcgctgtgcagctggtcttccgcaaggagggtctgggctttggagatggagggcagtagcggtgtgaggtcgaggggcgctagagcctaggacctgtgggcgcagtcccattggcctgggctctggccagatcactgggctcaggatcagggcttggttcccttgccacccagtattgctgcccacatgagtagtaggcaattacatgagtcacttggaagaagacagtgactctttttccactgcatgggtaagtcatattatgtatggatcggttggaattttctgaggcgccagttcccacgtgcctttcgaggcagtctaacctcaggccacttatcttcacctgggtgcctcagggtccttctcatctcagtagggacttctgaaatgggggaggcagtgtggaatactgtcgatgtctgtgcagagccttgccggcactgaaggcatgcagcctgtcggcagagtgtcataacaccagatgctactttttactgtattac

SEQ ID NO: 625421 - DNA, 833 bp, Homo sapiens
  misc_feature (727)..(727): n is a, c, g, or t
agctgagtggcagggtggacgcgtctcgtactaacggttaccgcgttgtggatggctgaccattggagtggacagaatagaattgcaagggattacgagagtaagcatgtttttcactagtatttgtactaagagaatgtgtgattggaaactatacactaaataaatggaaattggggagacctgtaaatgagcatcattattgtgggcatgaatcaccattatgaagacagcagtggactgtggacaactgcattgaatgaatgtgaaatgctggctggtaatggctgaattgactttcctgaatactgacgaagatggctacggtaacatgaatagacatacgacgccgtgaagtacagagaataaagataggccattgcgcgtgtatgagaaggatctggcccgggtgatatcagtgtagaatcaagtagcgggaatgtgcatgagtgaaccgttgtgagaagaaggtgagccgcgatggtgaagtctgatgcaaatggtcagggcatctggcgttcgactggcgcgtggtcacaggtacacgctcgagcgatgtcttaggtcacaaatctggatgacgagcgatgagatgaaagcatgttggcttcacgaaattgtgttacactctcctttgtgaccacaatgggctcttgtactggccatcacctttgttagggtcaccttattcttgtcacaataagtcatcataccctacctgtccaanacacccatcatgcatgttatcagtcagtacaggacctcactcccctccatgtcttgtcacccctatcgtcactggcacggggccacaacacctattgtgacgcacg

SEQ ID NO: 625422 - DNA, 264 bp, Homo sapiens
gacttcgtgtttttatattgactttggggtaccggccctttaataaaacgagggggggcactcctttggtgcccctcaaaaaaaaaaaaaaaatgattttcagcggcccacattagagtagaaatttcctggtgggagaatctatacctcgttcctttataggcccaggacccaagtccttcaatcacaccagcgtaaaagcttgaggaaaacttgtgtatcttcacagcatctgccttctaatacctctggccattcttaata

SEQ ID NO: 625423 - DNA, 139 bp, Homo sapiens
tttctttcgccaggctggagctttttactcgcggcggtgatctttttgtggaactttagcagcagcagcagcagcagcagcagcagcagcagcagcagtagccgtagtacccttgagcatcaggtggcgatgaagcggg

SEQ ID NO: 625424 - DNA, 105 bp, Homo sapiens
tgcttcacccagtgtgtgcttacatacacacacacacacacacacacacacacacacacacacacacagtgggttaagtaagcacacagtgggttaataagcagt

SEQ ID NO: 625425 - DNA, 1057 bp, Homo sapiens
  misc_feature (400)..(400): n is a, c, g, or t
gcagtctatttattagctatcatcccatctactcatttattataaccagaatcgaactaacaagcttttatcctcgctaattacttaactacctggactcctatcccctctacgaatctatggcaaggccaatccccactttatccagtgaatccgactaatcatcgcaacagagaaagctcctatccgtcatctaatactaatcgtcgccgtaccaagaatctcccttagaattactaatcagttcatctatgtccacgagtaagctaactcatgtacttgtgtatattgcttcttatcggcaaacctacatctctattccaccgatccgtatggtactatcgatcaacgctcagatatgagtggatacgcatgccctatgtagcacgctcatgatacngtcaatgcgcaatcagtacgtctcgcttattttcgtaccaatccacttaggtaaggggcttcccacttctcacctcgtaattactcactccgtcaatcttcatcactaatgtgacctaacataccaaccattaagaacccccataaggcgcctttccagcctcataaaaccatttcccatatatcttcaacttcaatcctacttacctatcctggttcccgcgaaggtaaacctttctctccaaacaactttcccatgggcgagacacacagacaccaaaccgttttctaccattcagttgccaacttagttctctgtggaccaaatttgaaactcaagcgcactactggttcaattacagtcttgagaacagctattacgcccctggtaattgtcaactgtggacaccgttcaacaaacacgttgtacttggaaccacttcgcccctaataataacaaaggtcccctcggagtaatgggtgtcccgtacacaaaggttcctcccaaccatctaaatcttcctgccctttacggggcgcgaggtcccaaacagctaacaggctttacacttttgtctgcccctcacgccctacgcgttctacaccgtccgcacattggaagacgacaccgataaacggggcccggctgttctgtaac

SEQ ID NO: 625426 - DNA, 408 bp, Homo sapiens
  misc_feature (72)..(72): n is a, c, g, or t
  misc_feature (301)..(301): n is a, c, g, or t
  misc_feature (314)..(314): n is a, c, g, or t
  misc_feature (330)..(330): n is a, c, g, or t
aaaagaaaacctttggtatatattatataatatcctcatgttttatctcaaagatattgaggtcactatttnattgtaaaggtatttcacttgtctagtaatgggattgctgatttttaaaactactcctttgctatctctgcagtggctgctgagtgaaaaaggcagagtgctacctgggaaataaacttgttgtgcaaccacttgaaagaaaattttatcctctaacaattttttcccgtatccagcttggttattcctgtggcaaccacagatcatataacttggatgttttatctcnacagtgcattctnggcattgcttactcangagtgaaactcatgatatgttaactatgcttccttaagttctactttattttgatttgacctcataagggacaaggaa

SEQ ID NO: 625427 - DNA, 859 bp, Homo sapiens
  misc_feature (435)..(435): n is a, c, g, or t
  misc_feature (465)..(465): n is a, c, g, or t
atgctgctttcatttgagtgatgactatgtacacacagcttctatcatcggctcgcctttgggtggaacacagctgagagatcgacatgagtgcaggccggtagagatcctcttccaatccgttccatgcggacttagatgcatcagctaccaccatggttggccctgggcattagctgtcaggagcaaccagtagctagtggggactggtatgtgatgttatccagactgaaagaataatatctcagacaacaaatacttctaatcgagggtgcatggattgaatgcagaaggggtaaagagatcgagaattcatgtatgagtacaactaggaatgaaggtctgtagttgtgtctcatattgataatggtgagaggtagattggacggagagcttgttagatacatggtcattctaacgatggatcatgggtgntcctctgtaaggggagcataggacttatgnaagttggtgcgaggataaggagaaaaggcttgtcaacgcaaatgacacgtcattgatacaattagaatcaagtttagaatagtagataaaagctagaattgtaatgagtccagaaagatggttctgctagtgaaggagttaatagaaaggaattattaggtaggtgtcactgcttgtcctctctggaaatataagggaatcctaaaagcctttctgtcgtcacgttctcctgcaatccgagggagacctccgaaatatcggatgccaaaaccggggtcctttctttttaggaccccgaagagggtttacgatactgggtttgtggggtggaccacatgtctggatgaatcctttggttaggggtgtccccatggggtgggttccctgtgggggg

SEQ ID NO: 625428 - DNA, 106 bp, Homo sapiens
cccttcacgattacctcaaagtgactgatgcatttgcaagactcatgtctacagtagagaagacaagcacatctaccagtaggaaacccgaaaagagaaagagcac

SEQ ID NO: 625429 - DNA, 215 bp, Homo sapiens
ctagaacgactctggacggtagtagaaagaaagatcagtggttggctgggtgcagtggctcatgtctgtaatcccaagcactttgggaagccaaggcaggtggatctcctgagcccaggagttcaagaccaccctggtcaacagaacagaacccccatctcttttttttttgtttattttggggaaacaatcgccggggcaaccccgggtttccc

SEQ ID NO: 625430 - DNA, 372 bp, Homo sapiens
gggagccgtatataaaagtagctagtctaaatgctatcgattgcttttagagctacgtatatattttcctttctacaaggtcccctttcatgtttaggggaaatttcactgaagtgtatacaccttcgacatcgctaatatgtcccacactatttcataccccttttgcacgcttctagctattcgcactcacacagcatgtcacaaacacagtccaatcatgcatttcctattaagaagcacaatacacaacatcattcaatttcattacaccataacttcaaaatgtagatacaatcccctttaggaagaaaagctatttctgtagttcactctgtcagtcaacacactaagttgacacgctgcagcaga

SEQ ID NO: 625431 - DNA, 441 bp, Homo sapiens
tcgacgacgatcagatccgtcgttgtcccgaccattagcgatgcccaccggtcgatgcggcggtctttattcccactcacccgccggtgccagcttccgggtacaccaaagttctccgcgtctccggggggagtatggttgccacgctgaaccttatcaggaattgaccggcatggcaccaccaggatctggagcctgtcggcttccttttgacccaatcacgggaaacctcacccggcccggacacggcacagtgattgacagattgatagctctttctccattccgtgcggtagtggttgcatggcccgcttcttagtttggtcgtagctgcatatgtctgcgcttattccgattccgaacgatactctggcatgctaactagttccgccacccccgagcggtcggcgtcccccaacttcttagagggactagtggcgt

SEQ ID NO: 625432 - DNA, 119 bp, Homo sapiens
ccatgtgaggacctccgactccaactctcttcgagccaccacgcggtgcaaatgtttgtatttttggtggagacaaggtttcgccatgttgcccaggctggtcttgaactcctgggctc

SEQ ID NO: 625433 - DNA, 269 bp, Homo sapiens
aacctcttcacaaacagtcccatctcggtaggtctgccccatgcaacaaagacctccagtccaaaccaggtaccgtaggtaaaacaaactccccagaaaccttcccaggaaccatcggcctcatactaccgccagcaaaactctcaaccctgcgtaagggtctccctggaacacgagattggtccagtgaacattctggtataacagcagtttacctatcccaattccatcctttccagggtctcaaaagaatgagaatggtctccctt

SEQ ID NO: 625434 - DNA, 497 bp, Homo sapiens
gtcccgcgccagagacgcagccgcgctcccacatccacgcccatcgcgccctcgttcgcctcttctcagggagccatgtccgcgcctaccgtcgtgcgcccatgcccatcgccatccctccgcagccatgtccaccaggtccgtgtcctcgtcctcctaccgcaggatgttcggcggcccgggcaccgcgatgccggtccgagtctccagccggagctacgtgactacggtccatcccgcaccatacatgcctttgggccagcgcgcttgcagccccgcagcgacccatgccggccaggcctcgtacgcctcggtccccgcgtctggcgttgtatgccacgcgctccatctgcctgtgcgcctgcggagcatcgtggcccggggtgcggtcctgcaggattcggtgggacttctcgtctggccgacgccatcaacaccgagttcaatgaatcacccggaccacacgagccggtggagctgccgggcagctggcttga

SEQ ID NO: 625435 - DNA, 646 bp, Homo sapiens
  misc_feature (2)..(2): n is a, c, g, or t
  misc_feature (20)..(21): n is a, c, g, or t
  misc_feature (31)..(31): n is a, c, g, or t
  misc_feature (34)..(34): n is a, c, g, or t
  misc_feature (59)..(59): n is a, c, g, or t
  misc_feature (70)..(70): n is a, c, g, or t
  misc_feature (76)..(76): n is a, c, g, or t
  misc_feature (86)..(86): n is a, c, g, or t
  misc_feature (103)..(103): n is a, c, g, or t
  misc_feature (450)..(451): n is a, c, g, or t
cnatgtgatgcggagcagcnngcagatccgntantgccagctaccgtcccgcggctggnggtcccttctncagttnttgattcccnaccagatccttttgccnatggaactcaaccgatgccaattttgcaaccctttaccgaattttttaagaaaaaaccttggtcccgatactggccattcaccgggccacccttgaaaattttctttaaatcttttaagggaaaaaaaaaatttcccccggggttttttaaaaatttgggaaaaaacccccgaaaattttttttaaaaaatttgggcgtttggaaactttaaaaaattttttttaaagaacccgcgaaatttttgaaaaaaaaaaaaacaatatttttgtccccccccccgggggggttaaaaaaaacaaaaaaggatgttggtttttgttcccccccccccattttttaaacgggnnggggtgggggccaccatttttttttgtggggaaaaattttttttcaaaaaaagttcctccttttttccaaaaaaagaaagagctttccttataaggaggttttactctttttttttagagaagcgccccccacccacaaactttttttttttaaaaacacccccttttttaaaataaaccaacaaggggtgggcg

SEQ ID NO: 625436 - DNA, 377 bp, Homo sapiens
  misc_feature (331)..(331): n is a, c, g, or t
  misc_feature (367)..(367): n is a, c, g, or t
acagtagtggcatatatccataatcccaacattttggaaggccaaggtgggaggatcacttcagcccaggagttcgagaccagcatgggcaacataacaagacctcaaagtacaaaataaaaactagctggggctgggcacggtggctcacacttgtaatccgagcactttgggaggccaagacgggtggatcatgaggtcaggagatcaagaccatcctggctaacacggcgaaaccccgtctctacaaaaaatacaaaaaaattatctgggcgtggtggagggcacctgttagtcccagctacttgggggaggctgaggcaggtgaatngccttgaaaccaggggatgttggagctttgcagttnagccgagatc

SEQ ID NO: 625437 - DNA, 977 bp, Homo sapiens
acgagctctatgcctttccggcttctcatcccgctcggcctcctgtgcgcgctgctgcctcagcaccatggtgcgccaggtcccgaggtccgcgccagatcccgcccactacagggagcgagtcaaggccatgttctaccacgcctacgaagctacctggagaatgcctttcccttcgatgagctggactctcagctgtgacgggcagaacgctggggcagtttttctctgactctaattgatgcactggacaccttgctgatttaggggaatgtctcagaattccaaagagtggttgaagtgctccaggacaggtggactttgatattgatgtgaacgcctctgtgttttgaaaaaaaattcgagtggtaggaggactcctgtttgtcatctgtctccaaagaaggctggggtggaacgtagaggcttggatgggcctgttcacgggctctcatgagaatggctgaggaggggaccgaagaatacctcacagggctattcagaccccactggatggccatatggaacagtgaacttatttcatggcgtgaacccaggagagaaccctgtaacctgtacggcagggttgggaccttaattgttgattggcacctgagcagctccactggtggaccccggagtccgaaagatgggggccaagagtggattgatgagcatctgggaggagccggatcagatatcgggtggcggaaccaaatcgatgtcttccatggaagggggtggcccaggacgaagatcgggatggtgaaccacttgatgatggggaaggcgcaccagtcgaaaaacactagctgcatgtccaaataaagagaggaaaccggtataacgacagggacaagacggctggcaaccaaacttaggaggcgaaaccagacgagagggggacaccacaggagggcggcagaagagaagaaacgcagaagagacggacaagcataagaacagtgtgctgaggc

SEQ ID NO: 625438 - DNA, 491 bp, Homo sapiens
  misc_feature (2)..(2): n is a, c, g, or t
cnctccgtgggcgggcttctgccttcacggcgttccgtcctcctccccccgctgtgtcgcttcgcccccttggctcctccgccccgcccctcccccccctgtctgcccctgcggttcctctcgtcctgcgccggcttcccctggcccccccccctcctccgtcgggtccccctcccctgtctcccgcacggtctccacaccccagctccacgttccctcattcagtgggtgcacacccatcccccgcttggtgcacattctgcttcacctgcatcggccagcagccgcaccatcgcacgtgcatccccccagcggcgtcgctcatcacgcttggccgcccccacgcccagttcatccctgtggtcaacttttctgcacactcctgcttcccaccccaccagtcccaaggcatcgtgcaggccccgctttcacggtctgtcattcgtcctgcaacatccacatccgcgcacttttgcccttctgctcccggg

SEQ ID NO: 625439 - DNA, 991 bp, Homo sapiens
gagcgggcatgcagccgccgccaccacttccccctctccctccctccttgcgggccctcctccccttccctgcctactacatccccaaactcacagactattccgccacacatgcccgaatcctcaccttcataaccaactcaccacaatcaacatatacatgacaactgctgacacacgagcgacaacacaagttcacactacacatcaacatagcaaccaacacgcacccaacgcgaaccaatgcaacacaacaacctccacaatatctggagaacacaatatctgaccactcccagtacctgcgtcgcggaatgaagccacatcccaaacacatcataatccaccagagagagaacacacaaaccaccgcaacgaaaaccgcgggccccacatgtgcggcgagcccacacacttcagcgcgaaacactcacgaaaaggtgtatcgcgagcactgaacacgaacgagcccacatacacccagccagcacaccgacgcaccagtcccaccgtgcggagtcgcgacaatgccccaccaacagcaacactcctctcccataccacaccccagcgcaccagccccctcaccaccccaccatcattcaccttcacaacaaaaccaactagcaccagacaacagcgactcaccctctcccaacacactaaaagaaccaccacgcccactgacacacctcccccaaaacacaatccgcatctttccaaccaccactactccaaacacacatgaccatcaaactccaactgtctgacaaaaaatcacacacttcacaaacactcgcaacttacacacatcaatatcaatttatcctgaaccatatcatcaacaaccaaacttccatcccaaccctcaactacatgcgtaccataacataacaaatacaccttactcaccctaaaacatacaccaccacctactaacatcacaccccatctcccaaaaccacccaacaacaatgtacccaccatatac

SEQ ID NO: 625440 - DNA, 117 bp, Homo sapiens
  misc_feature (61)..(62): n is a, c, g, or t
  misc_feature (104)..(104): n is a, c, g, or t
gttcttttcccagcttcatgttcattcccgctgtgaacttttaggctttgctcctgctgtnnttaggaacaaagctgtcatggccatcacacacaacgtacctnaggcagcgctcgg

SEQ ID NO: 625441 - DNA, 629 bp, Homo sapiens
ataccctgtcctttgttgaaaactacaacatatttattactgacatttaggctcttctcccacctgctcccctcttgcaaacatttctgcaaaaagtctatttcagagactgaggaatcctcatttgcatctaatgctcccccgaccacactctgtggaggagtgctaggaaaggttagggcaggggagacatgactgaggaccacagagccaggtgagcacagagcttccgtcaggaatgcctcagcaggaagagaggtaaaggaatcagaggcctgctttagcactcagcaaagaactatccccgtgactggtgacaaagaaaacggtttttagtctgggactccagatccatggacacaaaccaagtccaaaaagtagtcaagtggctcctgaaccggtgagcatgcaatgacactcatcaaccagccagaaaccagaggcctggggcatttccaactcatctgggaaggctcaccttcctctcactgagcaccgctccagaataaagtgggtctaaagcacctgctggaataagtggcattgcctgtgagtctaataaataatagtacccaatagggagcaattgtcattagggtccattggaaagcctgactcaacccaagtat

SEQ ID NO: 625442 - DNA, 109 bp, Homo sapiens
cgtctgatcgaatcgagccggtaccagttactgagtgtgtaagctttatcttctgtccacatggacttgtggtttgttataaaactctccagtaaataattgttagaga

SEQ ID NO: 625443 - DNA, 106 bp, Homo sapiens
gagggtagtcatctagcgtgttctgaggtcatgaaatacatatgagtgaggtatcattacaacataggtgtaaaagcaaaagattagaagcaaggctggtatccat

SEQ ID NO: 625444 - DNA, 223 bp, Homo sapiens
gcgcactccgtccaagacatcccagaatcgggtcacaacctcctttatatctccacttatcctttccttaaggcacattaacccgggtctcgggggtttcccagtcgggcagccccttaagggggtcagggcttccggacctatcagggtcaaaagggctcgtaggggaatttctcagattctcgttttttgttcttccagcggccgcttttcatattcccca

SEQ ID NO: 625445 - DNA, 301 bp, Homo sapiens
gaccctagacagcggacccggcttcgctctgagtgaggcatggcccaacctgcgcggcataaatatatacagattcctgggcatcagcgcaccaggaccgacgcagagttggggtcctgtccctaagcctgtggcacaggcgactcctatgacatgcggagccacgggagctcgggacctgccgcaccccttcccctgcctccctctctggggtcaccacccatcaggcggctgccagctggcctaaggacgcggcggaactgctgggtgctgtggcccagctccttgaccctctccacca

SEQ ID NO: 625446 - DNA, 649 bp, Homo sapiens
aaagtcacaggtggagctgccaagacatgggaacccacctcttttatcagcataacctggatgagagacatgggataaaagaagatcattggggagctttaaagttgccctgctggattctggacttgcatgggcgctgtaacccctttgttttggccaatttctcccatttgaaatggctgtattacctaatacctgtaccctcattgtatctaggaagtaactaacttgctttggattttataggctcataggtggaagggacttgccttgtctcagatgagactttggactgtggacttttgggttaatgctgaaatgagttatgactttgggggacaattgggaaggcatagttggttttgaaatgtgaggacacgaatttggaggggccagggatggaatgacatggtttggctgtgcccccatcaaatctcaacttgaatggtatctcccagaattcccacatgttgtgggagggagccaggggaggtaattgaatcctgggagcccgtctttcccatactattctcatgatagtgaataagtctcatgagatctgatgcatttatcaggggtttccgctttggctttttcctcattttctctggctgctggcatgttaagtagtgccttcaccaccatcatc

SEQ ID NO: 625447 - DNA, 1379 bp, Homo sapiens
  misc_feature (1071)..(1071): n is a, c, g, or t
gatgacttggctcctcacactatcggaaccatgccttccagggagggagcccatgctcttctggccgtgccattgatcgtaactgggccacattgagagtgtgtgataaatcagtcaagcatgttgaagtctcaggcagctcctcatggtcatgaccgtgcaggaaggtaagtcctcgagtccatcacgagctcattttgctcaaaaactggagtcccgaagtgtacatctaggtatatcgtcttgaatgacgagccacatacatgaaccccatctgacgttgaaagcgtctgagaaagtaagggtcttggcacccagagtctaggccatcttgatatagcatctgtgcactctaggagcccttcagccacttagatggaaaggctcaggaatccaagagtaggggtgtaatggacgcgatcattgcacaactcagggtcgcgacacgtctactgtgtagccatactgaacataagccaatcctttaaatgcgcgttcattgaccatctcacagggcagtgtaaatgactccctccaacaatgtagattgcgtaaattcacctggtgggctaatgggcgtcacattaacgcgtgctctaaagcactattggggagagcaaaatcccctaaaccttgtgacgtaatatcgggctgtatcctacaaaggcctttaaggcacaacttattgcatgtgaagtgaagagtcggattcgaggaggcccagtaattggaaatacgagacgtggttcagtaaccttctatctattgggtggtaagcgttatttagaaccatgtgcgtgttccgtgtgcccatcacacacgtttagaaacataccgaagagggaggtgggtacaccaataattgattagtttgtcccccaacatggcaaattgaaggccaacacggcgctaaagcttgcgaactaattgaagagcaatcaacttagcgaccccttaaaaggacgccaagggacgtgggtttacacaacacggggggggtcaagtgacactcgtggaacagtttccctaaatttggactcgggagaatgaagagtgaacacacctgggggntttgggggggaaccacccatagagcgagttatcaccctgcacaaacgaggaagatcataaagagattttcacacgctcatggaggcaacacacacaaaggaggacttgccccgacggaacgtacacaaaaagagcgagcaaaaagacacaggaaacagattgcagcacttaaggaaacgcacaacggggcgtccaccaaactgagagggagaccgagaacagggcaagcaataagttgtccacaccacacacttcagatcaccgccagacagaccgtgcgagccgaggcaccgtacacccccgcaggg

SEQ ID NO: 625448 - DNA, 398 bp, Homo sapiens
tggggtttaaattcccaaataataataataatggtaataattttttgggcccggttgaagtgaatggttattgaaagcattcccgggtaaaccaaggttttttgtaacccccgttcccccataggggtaggaattaactttggtttaaaggccccaaaattaactgggcaggttgatggtttgaggtttatgaaagaaaaggttttagccaaatttttaaaaaagcccgtttgggtcaggaaagtagggggtttcaatgttgttgggacccggaagggtgggccaccgggcgggtagggccattgggtcccccagttgggtcaaaggtgagcaagcccgggttgcccttgtaatgtaaattgttttgttcagctggttttaaaaaggttggtccttta

SEQ ID NO: 625449 - DNA, 306 bp, Homo sapiens
cacgatggcgcgtcctagtgtagagagagacaaaaatatcttcatgaggaagagaagatcgtcaacgaagttgtagcgagtatggaagactttgtctgaatgacttgaagaaggactaccacggcagccaggccgattggttacgtctgaaaaacgtggaagtacgggactttcctacctgcgtctaagtgggagcaggctgtagttaccctgataaggagaatttccaacctatacaaaacaagatgcgagccatcctgcgcatagaagtggaggccgtggggtttcctgaagtggggagccaca

SEQ ID NO: 625450 - DNA, 100 bp, Homo sapiens
aatactcaagaaatacgatagacccgcatttacagcaggcggaacatctcacacccttgcataagttaaaataaatattacgtacacatctccatcacct

SEQ ID NO: 625451 - DNA, 1500 bp, Homo sapiens
ccctgctggtataggagccatgctgaaacctgttatactagatacttacctgataaacatataggtgctatcaaactcgctagtatatgctggcattctactgtactctaccacgctgggatcagactcatcatggcaagaccagctagttgggcccaagcactccaagatgggaagaaagactgggatgattgatcataatgtacttgattattgatcttaattattgtactcgtaggtgaaggctgcctttgtgcgtattactcatagaatcacgctgtatgtattcttattctcctttatagattgaatgaggttggatatgaaagttgtgtgaacttcgttgaggctgcgatgattaatacattagactatactttgtgtcccttggtcacactaagagagagatataatatacaaaagatagtagtagatagtaaataagcatacttataaaagagagaagagagagatagatatagtgtgggcgtatctttgttataataacagcacatgcaagaaacataccacataagcatgagaaaggacccagaaaacatgcgtagatactacgcacagaacggaaggagcgagcatcacaaaaagacggtgggtcgaacacgtcacataggatccatgaggggaccaacccttataccaaggtacacgcgacttccttacgtacacggcacagtgatcacttgaggccacacacacaccagactcggctgtgcacacgaagcacgagacacacagaagcccctggaaaaccgacaaaagatcgcacgaatagtgctggggccgaaagcatcacgcacgtaggctgcatgaaatggcggagaggtgtgtagcaaccaacgcaagtaaaatgcatgaggaccctacgcatgacccacaaagcacaacagatgcaccagaacaaaaaatatatatcgcaggaaaaacgtgaccgccaagatgtggtatcacaaccaaggaataacacggaccgaaagtaacagagcgagagcaatcagcacgtcaacgtgtgccgttccaaatgaccactagagcgacgaacgacccaaggcacacatcagcaaagcacaggtgccatgaccacaaggaaaaccatttgacacgattcgacaccatgctgtcaagacagaactattgccaaaggacaaacaaaccattaaaaggcgcgacagggaccagaaaagacccaccatatatgcaaacagtgcaaaccactaggagaagcgcaaacaaccagaaggccgaggagccaagggaactacgggtagcaaccaagggaaacaacagagcagacaagagatcaactagacacacagaaggagatgaaacaacgcgagaccacagaagcagggacatacaaacgcgcagaaacagccagggacaccacacgggaagcactagaaacagacagaagcaaaaggagacgaggagacgaagaacagcagatagcgagatgcagagcaacaacacacacacaaagta

SEQ ID NO: 625452 - DNA, 420 bp, Homo sapiens
ttaccacacaaccagatattcacaacactcgaatatacctggaatactacaagtagaggtagaaatgaacaaagctgccaatttccaatatgattgtgagagaactacttatactacatgtgttctcatgtatgagttttccttgatggcttccttccaattcactgttagcctttgccactataccaaaggatatgatcatatggaatcggcagagttaagatctacgtctgagaggaactgccatatgaacaggtagcaacttcagacacctggacctagtttgctcatcccacgttgtgctggtccagatggccagaacacatggataggtaaaatttctaatggaaatttctgttgctagcggaagcaaaaagccatataacaagtaattgagaaaaagattttgctagctacttg

SEQ ID NO: 625453 - DNA, 178 bp, Homo sapiens
taaactcctttgtctatgaagacagattatttcttattaatggaaagttattaacctgaaaatctgcaccatatctaccagatcatttagacacaaattttattttattttcatttatttatttatttttttattttttgagacagagtttcactcttgttgcccagtgtggagagag

SEQ ID NO: 625454 - DNA, 156 bp, Homo sapiens
ggatagttgtgcagtgactcctgcacatcaagaatgcaattaactgataaggatactgtggcaagctatatccgctgttcccaggaattcgcccggttaatatgcacccagagcccctgccgtttgtgtccggttgataacgcccaaagcccggcc

SEQ ID NO: 625455 - DNA, 132 bp, Homo sapiens
tagcccgcaccttttcgacggtgtctggacggaatggggcgctcttaaaaattagctaagaaaactagagtatattatttggtatatgaggagagaataatggtaatctggaagtgttttgagagataggta

SEQ ID NO: 625456 - DNA, 320 bp, Homo sapiens
  misc_feature (31)..(31): n is a, c, g, or t
  misc_feature (36)..(36): n is a, c, g, or t
  misc_feature (40)..(40): n is a, c, g, or t
  misc_feature (48)..(48): n is a, c, g, or t
  misc_feature (52)..(52): n is a, c, g, or t
  misc_feature (60)..(61): n is a, c, g, or t
  misc_feature (69)..(69): n is a, c, g, or t
  misc_feature (74)..(74): n is a, c, g, or t
  misc_feature (76)..(76): n is a, c, g, or t
  misc_feature (90)..(90): n is a, c, g, or t
  misc_feature (97)..(97): n is a, c, g, or t
  misc_feature (99)..(99): n is a, c, g, or t
  misc_feature (106)..(106): n is a, c, g, or t
  misc_feature (111)..(111): n is a, c, g, or t
  misc_feature (116)..(116): n is a, c, g, or t
  misc_feature (118)..(118): n is a, c, g, or t
  misc_feature (132)..(132): n is a, c, g, or t
  misc_feature (136)..(136): n is a, c, g, or t
  misc_feature (138)..(138): n is a, c, g, or t
  misc_feature (142)..(142): n is a, c, g, or t
  misc_feature (145)..(145): n is a, c, g, or t
  misc_feature (147)..(147): n is a, c, g, or t
  misc_feature (154)..(154): n is a, c, g, or t
  misc_feature (164)..(166): n is a, c, g, or t
  misc_feature (183)..(184): n is a, c, g, or t
  misc_feature (188)..(188): n is a, c, g, or t
  misc_feature (193)..(193): n is a, c, g, or t
  misc_feature (202)..(203): n is a, c, g, or t
ggagcaatgctgtaacgagttataggaagangtagnccancccacatnagcngatcatgnngtgcatcngatcntntctataccaacganaggagcntnttgactntctcnacaangnactcatctacttgntaangnggcngtngnactttgngggagccacnnnacctcctttcctaaaanncagngagancaccctgtnnacggccacactagctctgaaattaatttccaaaatctttgtagtagttcatacccactcagagttataatggcaaacaaacagaaagcattagtacaagcccctcccaacaccctta

SEQ ID NO: 625457 - DNA, 230 bp, Homo sapiens
  misc_feature (223)..(223): n is a, c, g, or t
gctcccagacctagagaggaacctcctctcctcctcccagcctactgattcacttcatgcctccacttggaccaaccctccaactctttactcactcatctttgggggcctatcctctctaatatccctggtcaggctgcagctgcttaactggaggtcaccttctccaggtaagactgaccacactggtctgagtgtatacctctgtcccgcccttctccanctgttta

SEQ ID NO: 625458 - DNA, 469 bp, Homo sapiens
  misc_feature (32)..(32): n is a, c, g, or t
  misc_feature (49)..(49): n is a, c, g, or t
aagaacccgcatggtttggaattacctgtggncctttaaaagtaaaatncctaaaagtcaggaggaaataacattttcccaacttggctccttccttttcctaaaattttcctagctattcctagattgtttgcatttcccagataagtccttagaagcagtatgtcaatttctttaaaaatacctgctggggccgggtgcagtgaagtgcacgcctgcaatcccagcactttaggaggctgaggctggtgattgcttgggctcaggagttggagtccagcctgggcaacgtggtgaaaccccctctctacaaaaaatataaaaattagcttggtgtggtggcacacttttggtcccagctactagggaggctgaggcgggaggattgcttgagcccaggaggaggctgcagtgagcggcgattgtgtcactgcaccccagcttgggtgacagagcaacaacctgtcca

SEQ ID NO: 625459 - DNA, 631 bp, Homo sapiens
  misc_feature (91)..(91): n is a, c, g, or t
  misc_feature (96)..(96): n is a, c, g, or t
  misc_feature (100)..(100): n is a, c, g, or t
  misc_feature (102)..(102): n is a, c, g, or t
  misc_feature (110)..(110): n is a, c, g, or t
  misc_feature (127)..(129): n is a, c, g, or t
  misc_feature (133)..(133): n is a, c, g, or t
  misc_feature (162)..(163): n is a, c, g, or t
  misc_feature (174)..(174): n is a, c, g, or t
  misc_feature (282)..(282): n is a, c, g, or t
  misc_feature (284)..(284): n is a, c, g, or t
  misc_feature (308)..(308): n is a, c, g, or t
  misc_feature (336)..(336): n is a, c, g, or t
  misc_feature (383)..(383): n is a, c, g, or t
  misc_feature (425)..(425): n is a, c, g, or t
  misc_feature (467)..(468): n is a, c, g, or t
  misc_feature (491)..(492): n is a, c, g, or t
  misc_feature (498)..(498): n is a, c, g, or t
  misc_feature (507)..(507): n is a, c, g, or t
  misc_feature (510)..(510): n is a, c, g, or t
  misc_feature (548)..(548): n is a, c, g, or t
ggaccgggccggaaggcccgggagggccatcgaggtcggggggcggccggcggggggcaggaggacccgaggggcagccaggaaaggcgancgcgncacngngaaaaggngcccgggggcagcgccnnntccngcgaccaggggaaaggcaggcggggcccnnggggggagccngcggggcgcgggggcgggccccgacccccaccaccaccagaaggcaggcccagcgtaggaagccacaaacaagccacccaggaggaacaaaacaccgccagcggggangngccaaagggcccgggaaaggaagncgcgcgcgggccaaagaaaaggcgggcntggagaggcgcgggagcccaggaggccagcaggggccaaagacgggnaccggcagcgcggcaaaagaaaagccagagccgaggacgggnccgcgacccccggggacggcggcgagggcaggggaggcggannataagggcgcagcccagccaagnnggccgngtcgccggncanttacgtccgcggggggcccgtcaaagggggtagaagtnggacggaacttcaaaatgtgtcccgttctccccagaccactctagccacagtatattgcaataaaattacttcttatatttgc

SEQ ID NO: 625460 - DNA, 390 bp, Homo sapiens
tggtagcttagagcaggaatgggtccaggaatgggttctcaagtaagaaggaaaatgggaggggaagaactcgttattctccaatcagtctcggataagatagttataaggaaaaactcctggcttatgtcttggtatggcacatttttatatatgtatatatgtgtaaatagagatatttatatattcacagacaaacacgtgtatgcacattttcccaagggaggaagaagggatatggtgtgcactgaggtaaagtgagcagggatacagaagagagcgggagcctcacagtcggactctctcatggtacataaccttcagggatctggtttccctgagcttctcgggctatggagcacggggctcgggccggggctaccgagctcg

SEQ ID NO: 625461 - DNA, 440 bp, Homo sapiens
  misc_feature (427)..(427): n is a, c, g, or t
atcataaaggtaatcagaatcctccggcggtagtcacgcttacccttctaagcaggttccccaggattcagagagccccggatttctccgggactccaggtgcagatgcctagtatttccattctgaccgtggccctcctggttcttctggcctccctagttctccggtgcctccggtgggctctcttggcatctggcctcatccaccgagtcggtgtcaccaccgggtatgttctggacagcggggtaaggggtgtagcattccgtgtttgggcatgggatcttacggtgagggtgccagagtttttccttccaaacctacctctctctcggttctccctcccggttttcctaaactggaactgggattctttcctggaggctagggtcttccctaggaggcaccaggtgggcagatgcccacggntgccatgaccttt

SEQ ID NO: 625462 - DNA, 875 bp, Homo sapiens
ttcttcgcgctttccttagtcctgggttgttaaatatctcgcctcattgcttagcgtttctctattgtgaagagttgccatccattatcggcggtgtgtaaggaccccatgtgctgtcctggatgatgccgcggcggtcccctcgttacacccccctgctgcccagggagacacccacgaccctggtttttaacggtcacactctccagactatcgattttggtacaggtcttgctcagagacgcgccaatttcttccgggtattttcacatatgtccccctctctatgctgagacactgctcagagggaggctgttctggggatgttctctccacacacaccacgacctgttctggcgctccccggttcaccacaatttggtgacagtcgggggccgcactgcagtgcacagtcgtctctggttgctccgcgacaaggaaaatgcgtctatgttgttgtcgtcgctctgtgccttgttgctgctgtgtgtgtctgtgtgagtgtgtgtcgtagtgctggttgtttcttcccatgttgttatcatcttacgtaacagtggatgagaagtcgtgaagcgcggagagccctaagtgatataccgctgaggagctgaagcccgtggggaagcaggtgcacctgaatgcgccgttcaatctctccttcccgttccgttcctccttgcatagcccacttgactatggcaagcagcgccagatagtagcatattttgtgtttacggcggtgacagacgccctgtaatcccagcactttgggaggccgaggtgggtggatcacttgaggtcaggggtttgagaccagcctggccaacatggtgaaaccccgtctctgctgggaataccaaaattggcccgga

SEQ ID NO: 625463 - DNA, 1126 bp, Homo sapiens
agaatcttcagataatctgtgagcgtccgcttcgtctgggcacttccggtactcccattcagttaccggtccctgatcttttacgtttaccggcaaaacatcagtgtctgtgggtagttggaatcttcagttacctgtgagcgtacggcgtcttctgggcctagtggagtttctatggacaggggccgcggggctaccagagacggcgcccttaagcgacaccatggcccgaaatgccagaaaaggccatagacggcctatagcaagatatatcgccaggctccagctaggcaagcagggcacacacagtgcaaggacacgcgagcaccctttcttggcctcgagcacatgtcactgcaactagcctcaacagctgcagcaagtgcgagcacgcaccagcatccataggcagcagatctctcacaaacaagtggcctccagcattccagcacatgcctcggtttcaggtgcaatttcagcaatcctgtgcacctaggaatgcatgcacacattcaacacagctgctacagggcagccacaggacactaggcgaggtcctggatcaaaggagctagggcaggtccatgatacatggaaaacgtacggacccgtaccactgctagagatcatgcaaggcacaaggaaggtcccaaggcaacaccgcaggtaaacgaacgtaactaagggaaggcagcacaccggatttggccctgggtggaacgaagagctagcataagcaccaaggaaagcatcattgcctacctcccaggaaccagacacagccgttgacagggagccacccatggacagggccaaatcagaagacgacggacgactacctactgggctaaccgtaggacaggcacgacatgacatgggcagctaacatcggaagcccccttgcagtggaaacccagggaacgtactgtcacccacagcacacaacgaacccagcaacgcaccgacagcatacggcggcgccacacacgggtggacacagccccaaccagacaacacctggctctcacgacctggtgcacacagcaagagacagacaccaaacagtgaccacagcgcacacaccgcaacacaccgatcgcgcaaagaaaccacaaccaacgaaaag

SEQ ID NO: 625464 - DNA, 118 bp, Homo sapiens
gatggttaatatagaaatctggatctggatcaatattctagaggaggcggaggttgccgtgagttgagatcatgccattttactccagcctgggcaacaagagtgaaactccatccca

SEQ ID NO: 625465 - DNA, 140 bp, Homo sapiens
gagaggggtctagttctagcatctgctcaaagaacttgtaggttggatttatcgtagccagtactgctgcatcttgagacaggtggcgctccatctggggtgacagcgagcgtcaacctaccaccaccaccatgatgaat

SEQ ID NO: 625466 - DNA, 551 bp, Homo sapiens
  misc_feature (199)..(200): n is a, c, g, or t
gtgtcccgcaacaccccccagggcctgggcaaggtggcctgatttggggaatggcttcccgctcgtgtacccttttttttggccgcggggggcagaaagggccccattcccgccctgagatccacaaaaaaatttataagattggccgggggtcccttttcaaggggggcaaggtgttcaagaacaatgcctcccctgnntttgccctttttgacaagggcatcacccctttgggggggtttgtcccctatggggaagggccccaacactttgtcatgctgaaagggtggggggggggaaccaaaaaggggggggtccccccccccaagtcctttttggggcaaaaaaaaggggggggtttggaaaaaattgcccttaagttttttgacccccccccccagtgtgggccagggcggtttccagcccatgggggggaaaaaagcatttttggggcccctgaaaaaaggccgaattgcaaaggaagaggggggttaatgcccgggacagattttgcggggggggggggttcaaaaaaagtttttttcccctga

SEQ ID NO: 625467 - DNA, 674 bp, Homo sapiens
agcaggtctataaagggaacggggtagcagaaagtcatgggctaggagagtagagttcgctgacgcttctaatctctgggacacatctgtggccatcgctgggtccatgttgttctgacctcgagaagtaaggacgagacgtcgtcagtacccagggcctcttcagctctatatgtagcattctgggtctggagttgtgggggaccggaggagactgggctctaccatccctcgccattagtagctttatccagccccgtttttgctgcttcctagggcctctgccttaaaaggcccaccatggggctgtccatcccatggctctgcctacggaaggggcttaagtgccatgtgcggtgcccctcaccaccagctgttttttaatgaaactgaaaaaatagacattgatcccggcaggactgtgatagcagagccctagcctgcccagccagccccaagatctcaggagctgttagggagaagacttggtggggctggagcacacccttgggcctacagtggtgttcctgtgtccctgtggtgccagtgcttctgggcagtgacaggcggctgccaggcccagccctagacttccactctggctcagcaacctggttatttatgtggggccgtgcaggcatgggcccactgcctgtccatcctgtttctcgtta

SEQ ID NO: 625468 - DNA, 637 bp, Homo sapiens
gccgttcgcggtggctcaggcctgtaatcccagcactttgggaggccgagacgggtggatatcctgacctcgtgaaccgccgacctagcagtgcgactatgcgaacgtctgtactaaaggaatacccaatgttatgcaccggattcggtaggctttctttcgcgtagtgccgcagtttgtagtgttttatcttatcctacacatgggggactgaataagtaaaagagatccaagatgaagaattcaactgcctatgaaaacgacatatgagcaacgcattcggatgacggatacctgtctcttaaagacctttttctgtaagaggaatctgcattgtaatgtctcaatgacacaatatactttctatgctctgcaaagatacaattctaaaactttcttttccaatatcatgtcgccctattgtcccaataactttatatttaataattttattaagcagtcctatttttgctacttggccaattcacctaaatagatcgtattacaattaatttcccgtgtttacaacgttttgacttgcccttggcgttactcaactaaattggttttactaaatcccccttttcaaactgccttattactataagctcttacctattgcctttctatttggtct

SEQ ID NO: 625469 - DNA, 167 bp, Homo sapiens
atgtatataaatggctgttacctaaattggctgttatgctgttacctaaatggctgttacctaacagccatttaggtaacagccatttaggtaacagccatttaggtaacagccatttaggtaacagccatttaggtaacagccatttgggtaccagtcatctaggt

SEQ ID NO: 625470 - DNA, 135 bp, Homo sapiens
acacgcacctgtggtccaagctgcttgacagcagaggcaggaagatcccttgaacccgggaggcagaggctgcagtgagctctgactctgccactacacttcagcctgggcacacattatggaggggtaccgagc

SEQ ID NO: 625471 - DNA, 187 bp, Homo sapiens
gccttcatctggctcgctgctgcgacggttcaagcagatggttcctcaatcaagctcaggccaggttcgaggtcactatgtagactgagagattgtggccgcattgtaagagaacgaaaaattggcccttgaaatacccagttagagaggctaccgttttaattacactaaggagggattccccttt

SEQ ID NO: 625472 - DNA, 312 bp, Homo sapiens
  misc_feature (21)..(21): n is a, c, g, or t
  misc_feature (61)..(61): n is a, c, g, or t
  misc_feature (177)..(177): n is a, c, g, or t
  misc_feature (185)..(185): n is a, c, g, or t
  misc_feature (190)..(190): n is a, c, g, or t
  misc_feature (203)..(203): n is a, c, g, or t
  misc_feature (212)..(212): n is a, c, g, or t
  misc_feature (214)..(214): n is a, c, g, or t
  misc_feature (309)..(309): n is a, c, g, or t
aaccaccttagcatggctttncatcggatgcttcagttttccaaaaagccagagacctgtnttccttgaagcttttggggacttcgatagtcccatctataccctgagcttcctctgtttagctacacttcttttccttatttttgcagaagaaagaaactttatcaccatgtggcnttccattnttaantttttcctgattntttactctntntccttggtacaccacagtggcttttttcacaggtaatttacaagatgctttacaacttggcatggcagaccagtttcccagtttggtacattctnttt

SEQ ID NO: 625473 - DNA, 367 bp, Homo sapiens
gtcgacctctgacggctccccggtatgtgtccgagggatcagcagtccaacgatggagcacctgacggagaaaatgaagaccaccatccagagaggacttgtgctcagaaatgagagctgcagtgaaaactacaccaccgacttcattataccagctgtattcaagaagagggccaaggcgtgtttgactgcaggaagaacgtgctgagtcacatgcagcagggtgaggcaccctctccatttgctagaaactttggaaccagaaatctctgccagagctatggagtggatcacctgcaaaactccaggaggcccggagcagaggaaaaaaatttaacaacgatgactccatatgtgtgctggggaa

SEQ ID NO: 625474 - DNA, 380 bp, Homo sapiens
aagagaatacacatggtatgtagccttccgctatcatacaccttgctttcaagagtgataaaacagtcagcacctaattattggaaagtctttttttgagatggagtcaccctgtcgctcaggctagagtacagtggtgcgatctcggctcactgcaccctccccctcctgcgtccaagtgattctcctgcctcagcctcctgagtacttgggattacaggcttacaccaccacctgcagctaattttggtatttttagtacagacgggtttcaccatgttggccaggctagtcttgaactcctgacctcaagtgatgtgcccacctcggcctcccaaagtgctgggattacaggcttgagccgctgcacctagcccagt

SEQ ID NO: 625475 - DNA, 916 bp, Homo sapiens
aacaagacctaaagcttaatcctgtacattctggtgttaagaatgaacacagcattgatatttcacttatccaggctgttagaatttgcagttcacatcattactctgtgcttaaatttaaaaagcttttcaaaacatcgtgacatgtgtagcatttaaattccattttattctttgtcctaaagcaggcagtggtatagttcaggattaataacttattgggagtctctcagtcatatagaatattaaatttaatatagtcacatgcattaagaaaaacttacgcaaacagtttttcactgttaattttgttgtgcttgaagcataatttattcatcccttctgtcactgataattaattattggaattatatactttaggaggctaatccatgcccaggaagcacgaacatactgttcagaatgtgcaagttgatgtagggaaaggaagattcagaaatgtacaaaatcctgtgattgtttagtaagaaaagagttgtaaccaaaatttcttctggtccggatgtaattagtccagtcacaaatcttgtgttgttaatggattattcaagatatatatatatattcttactactgatagttcctctcatagtcttaaattattaaagggggaggtaaacaagcagtctgtgtttcactggtcactaagggccttatgagacagtaggtgtctcatttccagaagaatttcctgtaatacttattacaatgtgaactaaatatttgatcagtatcaggcaggcaaattctttttttggaaacaatgacgttgtactcaaataatttacgcgcaagcagagagtacaagaacgagtaggctttccccagggaaactgcaatgtaaacaacataaacagaggtagctttgaaaacaacccctctgagtttttttctg

SEQ ID NO: 625476 - DNA, 1039 bp, Homo sapiens
agcggagtgccgcgcgggttctcgcgcggagaaggggtgcgagcggtggcggcggcggaggctgccatggacagacgaggaggagacgtaccggctctggaaaattccgtaagaccaatcaatgcaggcttgttgccacggaccagtggcttatcttggtgacccaatggacgaagtgttgaccatgacctctgggaggagtttctaagaagcccgaattgggggacgaagcgcgagtgaggggcgtgcctgcggtcgcactgggtacgctcactcgtgctggtggctccacaaaatgcatgtgaaccccaacgcagatccagtatgatttgatgcttacattatccaatgaggaagcctcaaaaggttgggggacaatccaaggactctcatcgaagagctgattacttgtcccagacaggctatcgctggcagggcagacacaatctgacttggtgcctctccattcgtggatgcagagcagggccaatgaacaaacctctacgcgggcctatagacaagtccctccttgtggttctgaaccatttggacactccggataggcttagcaatcacttgtgcacggcatgtttttcttaggactatggcgaagtgaggacttgctcaattcatatcaatacatcgggatgtcaagctggaagcttaggttctcgcttggtaaatccaacggtacagatcattgaatccgaacgggacaggacggacgaccaggatgcttgcttgggtcccccgatagtaaaagtctcccggaagaagaaaccaagtcttgcactctggtggaatctccatagtccagggaaggcgaactcgcgttgatggtgctggctggcatacgatgtatggcggaattatacagcagttggggccaggaggttgcgttgtaaaggaagtccaaccctgggcccccgagtttgaagtaactgggcttgtgcaaggggttccgattcgaagccttacccgggggtggggttgtcaagataagacattcgccagtcctggtacaaggcccctatagaga

SEQ ID NO: 625477 - DNA, 140 bp, Homo sapiens
cctgtaacggtacaaacgaacgactaaacacgatcactgaacaaacatcagtgctcaacaaatgcagacaactcaggcacagtaaaataccacagtgcactgctcctagccatgggcacctcactcaaaatccttttcat

SEQ ID NO: 625478 - DNA, 148 bp, Homo sapiens
  misc_feature (20)..(20): n is a, c, g, or t
tgactgatctcctttaaccncactgccctgggccagggatcaaacctgcttcctggtgctgcagagacacaaatgatcccgttgtggcacagtgggaactacttaatattgtttttcacagcagatgggatcagtccgttcgcatgtt

SEQ ID NO: 625479 - DNA, 315 bp, Homo sapiens
  misc_feature (11)..(11): n is a, c, g, or t
  misc_feature (23)..(23): n is a, c, g, or t
  misc_feature (37)..(37): n is a, c, g, or t
  misc_feature (39)..(39): n is a, c, g, or t
  misc_feature (59)..(59): n is a, c, g, or t
  misc_feature (69)..(69): n is a, c, g, or t
  misc_feature (94)..(94): n is a, c, g, or t
  misc_feature (108)..(108): n is a, c, g, or t
  misc_feature (115)..(115): n is a, c, g, or t
  misc_feature (118)..(118): n is a, c, g, or t
  misc_feature (143)..(143): n is a, c, g, or t
  misc_feature (146)..(146): n is a, c, g, or t
  misc_feature (165)..(165): n is a, c, g, or t
  misc_feature (182)..(182): n is a, c, g, or t
  misc_feature (244)..(244): n is a, c, g, or t
  misc_feature (249)..(249): n is a, c, g, or t
  misc_feature (253)..(253): n is a, c, g, or t
  misc_feature (278)..(279): n is a, c, g, or t
  misc_feature (288)..(288): n is a, c, g, or t
  misc_feature (293)..(293): n is a, c, g, or t
  misc_feature (304)..(304): n is a, c, g, or t
atgacgtacgntatttccatggnagatagccgctgtngnagctgtcacatcaccacagntccctagggnctgccgagaaggcaggcagtctttnggttctgttctttntcacgtnccntacaagtaaattttgtttctttgancgntattaaaatgccaagaccnaaccatttcttccaccngcttgattgtgccagtgtttgctcaggcctctttcttagtgttgctttcaaatccttctctntcctngggntgggaaggccaggcagggcagagcnntgacacttntcttnctcttgccctncctgcctcttt

SEQ ID NO: 625480 - DNA, 363 bp, Homo sapiens
  misc_feature (94)..(94): n is a, c, g, or t
  misc_feature (97)..(97): n is a, c, g, or t
  misc_feature (109)..(109): n is a, c, g, or t
  misc_feature (111)..(111): n is a, c, g, or t
  misc_feature (114)..(114): n is a, c, g, or t
  misc_feature (273)..(273): n is a, c, g, or t
gtgcacaaaaggctgtctgcaagctgaggagccaggaagccagtccgaatcccaacaactcaaaagttgggaagccgatagtgcagtcttcagnctntggccaaaggcnantgnagcccctggcaaagcactggggtaagtccaagagtccaacagctgaagaacttagagtctgatgttcccagcccttgaacataggactccaagttcctcagttttatatgtatctatatatcatattagttctgtccctttagagaactcttactaatncaaagctctacagggatgccaaagcagctcgtaaattagaggctagctgtatgcccagggtgaaaagactggcaatgcttacttagacaa

SEQ ID NO: 625481 - DNA, 426 bp, Homo sapiens
acatagcatggacccagtgcgtagcccatactccctaagtcttgcatcacaaattgatcaggatggcagcatgcatggctgttcttctagtctgggtgtgcctccgtttacattggctgcaaaaggtaactctagctacgctcattgtcctcatccatcgaccccatgcacatggtatgacatatggtcctcgaccttgtagggacacccgaatttttgcatatacctttctgattgatcctgggcggtagccccaagatcagtatatcatacttggctgtaactacctctcagcaattcttaaaaacattcagaacaatccaggtgattccatcccaatggtgggaagcaatgtatcacaggccgaaagcccacacacagacacgtgtacgtccacacatacaatgcgtgtgcacccacaagtat

SEQ ID NO: 625482 - DNA, 696 bp, Homo sapiens
aaggattagagtgatgagtaagagaaagtacctcatttagagcttccttaggtaaacctatatataagctcatttcacagaatcatgtatgccaggtagaaaataaagctgagtaatgtggagggagtaatgtcaggagtagaggaggggagggtcacagcttcaggtagtagacagtaagggcctccctgaggacattccaggaacttcacaggaacaagccctctaaagatttacagtaagagcatacaaggcataagaagccagaagtgtaaaggtcttcaaaaaaacaaaagaaactagaaatccggtggtgacaatcctggtgagtaaaaaaaaaaaaaaaaaaaaaaaaaaaaatttggggggggcttgggcttggaaaaggtttttaagaacatttgtggtgggggggggggcccaggtagggtagagggaccctggggcaaaaaggggggcccccccaaagggagagccccgggcgccccagcgagaacaagggcggcgggggagtctctcccaaccagatagaaaaaacacggccggggggggaaccacggggaggctgtcctcgggacacaaaactcccaagaagggagatgtccgagagaggggcacaaacacgggaatacacataaaaaggggatgcccacagggaagacggcgggaatttcaaattaacccgcaccgcgggtg

SEQ ID NO: 625483 - DNA, 126 bp, Homo sapiens
tctagccgcgcagtggctgggataaggcgtgcgcaccgctctggctaattttgtgtttttattggagaccgtgtttgctgtgtggccaggctgaccttgaactcctgacatcaggtgatccacccg

SEQ ID NO: 625484 - DNA, 123 bp, Homo sapiens
  misc_feature (32)..(32): n is a, c, g, or t
ccaccccgccaaaagcccccgcccacgggagnccccggggcgcgccaccacctccccggcgcaggccatcggatacgtccccgccctcaggagccggcgccgctgcctcgctctgacctccgc

SEQ ID NO: 625485 - DNA, 948 bp, Homo sapiens
  misc_feature (16)..(16): n is a, c, g, or t
  misc_feature (18)..(18): n is a, c, g, or t
  misc_feature (23)..(23): n is a, c, g, or t
  misc_feature (60)..(60): n is a, c, g, or t
  misc_feature (62)..(62): n is a, c, g, or t
  misc_feature (67)..(67): n is a, c, g, or t
  misc_feature (112)..(112): n is a, c, g, or t
  misc_feature (114)..(114): n is a, c, g, or t
  misc_feature (119)..(119): n is a, c, g, or t
  misc_feature (129)..(129): n is a, c, g, or t
  misc_feature (149)..(149): n is a, c, g, or t
  misc_feature (153)..(153): n is a, c, g, or t
  misc_feature (161)..(161): n is a, c, g, or t
  misc_feature (163)..(163): n is a, c, g, or t
  misc_feature (195)..(195): n is a, c, g, or t
  misc_feature (205)..(205): n is a, c, g, or t
  misc_feature (211)..(211): n is a, c, g, or t
  misc_feature (214)..(214): n is a, c, g, or t
  misc_feature (216)..(217): n is a, c, g, or t
  misc_feature (223)..(223): n is a, c, g, or t
  misc_feature (244)..(244): n is a, c, g, or t
  misc_feature (256)..(256): n is a, c, g, or t
  misc_feature (262)..(263): n is a, c, g, or t
  misc_feature (266)..(266): n is a, c, g, or t
  misc_feature (268)..(268): n is a, c, g, or t
  misc_feature (271)..(271): n is a, c, g, or t
  misc_feature (277)..(278): n is a, c, g, or t
  misc_feature (280)..(280): n is a, c, g, or t
  misc_feature (291)..(292): n is a, c, g, or t
  misc_feature (302)..(302): n is a, c, g, or t
  misc_feature (309)..(309): n is a, c, g, or t
  misc_feature (336)..(336): n is a, c, g, or t
  misc_feature (338)..(338): n is a, c, g, or t
  misc_feature (342)..(342): n is a, c, g, or t
  misc_feature (350)..(350): n is a, c, g, or t
  misc_feature (352)..(352): n is a, c, g, or t
  misc_feature (362)..(362): n is a, c, g, or t
  misc_feature (364)..(364): n is a, c, g, or t
  misc_feature (368)..(368): n is a, c, g, or t
  misc_feature (370)..(370): n is a, c, g, or t
  misc_feature (372)..(372): n is a, c, g, or t
  misc_feature (383)..(383): n is a, c, g, or t
  misc_feature (385)..(385): n is a, c, g, or t
  misc_feature (397)..(397): n is a, c, g, or t
  misc_feature (401)..(401): n is a, c, g, or t
  misc_feature (419)..(419): n is a, c, g, or t
  misc_feature (433)..(434): n is a, c, g, or t
  misc_feature (442)..(442): n is a, c, g, or t
  misc_feature (457)..(457): n is a, c, g, or t
  misc_feature (478)..(478): n is a, c, g, or t
  misc_feature (484)..(485): n is a, c, g, or t
  misc_feature (487)..(487): n is a, c, g, or t
  misc_feature (502)..(502): n is a, c, g, or t
  misc_feature (534)..(534): n is a, c, g, or t
  misc_feature (546)..(546): n is a, c, g, or t
  misc_feature (922)..(922): n is a, c, g, or t
ccttcggcgccgccancnccgcnatggctgcgccctgcgggaggaaacctcgctggaaangnatttnaagggccaccgagatgcagttacctgtgtggacttcagtatcaananaaagnagctggccantggctccatggactcatgcntcanggtctggnanatgaagccgcagtcacgcgcctaccgcttcantggccaaaangatgcngtnanntgtgtnaacttctctccttcgggacanctgcttgcttcnggctcnngananaanaatgtnngnatctgggtaannaatgtaaaangtgagtncactgtgtttcgtgcacacacagccanantgangagtgtcnanttctgaagtnanggcnantncttcgtgaaancntctgaagaaaanaaantaaaagtgtgggaaaatnatcgcaaaaaattnntgttctcnctgagcaagcatatnaaatgggtccgctgtgcaaanttctcnncngaagggcggctcatngtgtctgcaagtgatgacaagactgttaagangtgggacaagancagcagggaatgtgtacactcgtattgtgagcatggcggctttgtcacctatgtggacttccaccccagtgggacgtgcattgccgctgccggcatggacaacacagtgaaggtgtgggacgtgcggactcaccggctgctgcagcattatcagttgcacagtgcagcagtgaacgggctctctttccacccgtcgggaaactacctgatcacagcctccagtgactcaaccctgaagatcctggacctgatggagggccggctgctctacacactccacgggcatcagggaccagccaccactggttgccttttcaagaacgggggagtattttgcttctggaagctctgatgaacaagtgatggtttggaagantaactttgatattgtggatatggaga

SEQ ID NO: 625486 - DNA, 411 bp, Homo sapiens
  misc_feature (79)..(79): n is a, c, g, or t
tagtggttgtgggtagcatctagaccgagtatagaagatcaagggtagagtttcttaatctctgttcctggtacaggantgtgaatgaggttctttgtcccaggagcaggaagtagcaaggtgggagcaacttgaaaaacttttgaaaaactctctattctgcattttcaggctgcataactactgaaggtggacaaatgtccagggcagatgctcctgcttatggaggcttacaggggtcatcacccttttatcaaagccaccagtctccagtggctcagcaagaggctcttagccacccctcacacaagttccagtctccagcagtgtgctcctcatctgtgtgctgctcccgctgctccccagtctcgccttccctcaaaggccaggtccccccacccagcatacacc

SEQ ID NO: 625487 - DNA, 168 bp, Homo sapiens
tagaggatccccccgactagcccgacagggcggcggggcatgagtgtgctccacatctcagacgatgggcggccgggcagagacgctcctcacttcctagatgggatggcggctgggaagaggcgctcctcgcttcctacgatgggatggctgtcgggctagtcgggg

SEQ ID NO: 625488 - DNA, 309 bp, Homo sapiens
  misc_feature (257)..(257): n is a, c, g, or t
ctggaaatttaactgcttgcagcttctacactttcttcattaaatgctgtctggctaataaacaagtgccatgttgcagctttattttattttcattttttggagatagaccctcgctgtgtcacccaggctggagtgcagtggtacaatctctgctcactgcagcctccacctcctgggctcaggtgattgtcctgcctcagcttcctgagtagctggggttacgggcgtccaccagcacaacccagctagttttngtatttttagtagagggggtttttgcccatgtttggccaggcttgggcattg

SEQ ID NO: 625489 - DNA, 382 bp, Homo sapiens
gatccggagcgaatgcagagcaccgcttaactcgaacgtgcgacgtaggaagctgcagattccggtcaggacgagccgctccatctgcgtagcgccccgcccgcagcggcttcatcccccgacgagtgatgggatggctcgtctgtgagctgtagtagcaatagttggtggcttgcttgcgcccgctctcgatgcgcatccggcgtccaacttcatcatagaggtagtcgagcagcacatgctcgtacttggtttgagccacctgcttccgtctcgtacggcgaagcgcctgagcgcgctcccacacccctcggtcgacgatcggctcatgaagcgtcttgtagacggccccgttgacgtggaactccccgatgtaaacagg

SEQ ID NO: 625490 - DNA, 379 bp, Homo sapiens
aggggggggttggtaaggctttgggggcccccgcccgtggggtggtgggttaaaggaccatttttttcattggggagggccccggcccttaacccccaccccggggtattgaaaaaaaaaagggggggggggggggggattagtttgtccccgctaaagggagataaaaaggggtagttagtttttggggccgccgccttttaggggaaaaaaataaagccttgggcccgggggagatttagaaaattatccttggcccaattaaggggtattttttttttttgggtttcccgaaaagcctcttaattttagggtttttcctcgaaggaaggggccccttttttttggaactggattaaaaaccccttttttttttgga

SEQ ID NO: 625491 - DNA, 101 bp, Homo sapiens
tggagagggagtctggctctggtcacctaaggctgggagtgcaggggcatgatctgcggctcatggcatcctcctgcctcccggggttcacaccaattctc

SEQ ID NO: 625492 - DNA, 987 bp, Homo sapiens
  misc_feature (528)..(528): n is a, c, g, or t
agcgtagaggcggatgcaggaagcctctgtgcatgctctatctttatccctcggggtcaccggaggggagatggtcccctagcgtgggcgtagaggaggagctcagatgggagccgccagatgaggaaaccaagatgatgcctaataagctctgcatcagacgtcacatgctacgctctgacaggcgtcatactcatgcgtgttccagtgaccatcgcttctgtcatagcaaccgttgtaatagtgctagcatctccagagctgttgggaggcgataaagatgatattggtgccccgacccgcttggacagacggggcgtcaaacgcttaggtatagcgattacctcggtgcctagctggacctagagcttttcatgaatagctggtggttagcgcaattggggcccaatagcatggtattgtctcacggcagctgtcgcaggaggagctcagagtgcagcttctgtctctgtctccatatagcttagggccgaatggttgcagggtcgatagagaaaaccctacagntggggttcgtgtttgaacgcccctcgatctctgtcggttcctctatcgcgacacccttaacgtgtaaccgacttcaggggcatatgtgtaaccgacattctaagggtctcacagaacgtgacacaacaaggagatcgcgaattggcttaaaatgctttttagcgaaacaccgctgtattataatcgacgcccacaaattttgggtgggagacacccaaatctattttcttaacgtttgtgggtcgggggccccattaatttgcctctaagtaacgcggcccaacggcgcgtggatcacagggggagtccgcgcgtgcgaacggtttgtatcgcactttaggatataccaccctattgtatccctaaacctaaatacaatatggggttccaacacggtgtatggccccccccctggtaggagaggcctccgtagtggggacatcgccattggggagtacg

SEQ ID NO: 625493 - DNA, 96 bp, Homo sapiens
  misc_feature (17)..(18): n is a, c, g, or t
ccatggatttgctggtnngcaggtacaactaggcttaataggggctcgaattcgagattcaagcttctaacgttagaagcttgaattcgagcagta

SEQ ID NO: 625494 - DNA, 85 bp, Homo sapiens
acttagctgtcatattgtcttctcgaacccagatgtaaggacatgcttctttaagaagccatataggcccttctgtcgtcttctc

SEQ ID NO: 625495 - DNA, 395 bp, Homo sapiens
tcaggcatgcaagcttggtcaggcatgcaagcttggtcaggcatgcaagcttggtcaggcatgcaagcttggtcaggcatgcaagcttggtcaggcatgcaagcttggtcaggcatgcaagcttggtcaggcatgcaagcttggtcaggcatgcaagcttggtcaggcatgcaagcttggtcaggcatgcaagcttggtcaggcatgcaagcttggtcaggcatgcaagcttggtcaggcatgcaagcttggcttggcaacttctagataatttaaatccagccagaaagcatcagtaaaaattgttcctgaagaaggtctcttttgtcttactacatgtagtccactactgcagatgcattgttcatcgtgattatctttatccacacaacatc

SEQ ID NO: 625496 - DNA, 360 bp, Homo sapiens
  misc_feature (360)..(360): n is a, c, g, or t
ggcacgagctggtatcccttcctcttttaataagggcactaatcccaccaagggctccatcctcataatctcgctaaacctaattacttccccaaagcctcacctcctaataccatcacatgggggattagggcttctttaactttttaacttttaagttcagaagtacatgtgcaagtttcttatgtaggtcttgtgttgtggggtttgttgtacagattatttcattacacactcttaagcccagtacccattcgttattcttcctgatcctctttctctaccctccaataggccccagtgtctcttgttcccctctatgtgtccatgcgttctcatcatttagctcaccttgtgtgn

SEQ ID NO: 625497 - DNA, 1672 bp, Homo sapiens
  misc_feature (4)..(5): n is a, c, g, or t
  misc_feature (8)..(8): n is a, c, g, or t
  misc_feature (12)..(12): n is a, c, g, or t
cagnngangacngtggaagatcgaatgctgctcccaggaggggtaggccgagcattggtttaccagcactccccctcaacttacattgacctggctgtggatgagcatgggctctgggccatccactctgggccaggcacccatagccatttggttctcacaaagattgagccgggcacactgggagtggagcattcatgggataccccatgcagaagccaggatgctgaagcctcattcctcttgtgtggggttctctatgtggtctacagtactgggggccagggccctcatcgcatcacctgcatctatgatccactgggcactatcagtgaggaggacttgcccaacttgttcttccccaagagaccaagaagtcactccatgatccattacaaccccagagataagcagctctatgcctggaatgaaggaaaccagatcatttacaaactccagacaaagagaaagctgcctctgaagtaatgcattacagctgtgagaaagagcactgtggctttggcagctgttctacaggacagtgaggctatagccccttcacaatatagtatccctctaatcacacacaggaagagtgtgtagaagtggaaatacgtatgcctcctttcccaaatgtcactgccttaggtatcttccaagagcttagatgagagcatatcatcaggaaagtttcaacaatgtccattactcccccaaacctcctggctctcaaggatgaccacattctgatacagcctacttcaagccttttgttttactgctccccagcatttactgtaactctgccatcttccctcccacaattagagttgtatgccagcccctaatattcaccactggcttttctctcccctggcctttgctgaagctcttccctctttttcaaatgtctattgatattctcccattttcactgcccaactaaaatactattaatatttctttcttttcttttcttttttttgagacaaggtctcactatgttgcccaggctggtctcaaactccagagctcaagagatcctcctgcctcagcctcctaagtacctgggattacaggcatgtgccaccacacctggcttaaaatactatttcttattgaggtttaacctctatttcccctagccctgtccttccactaagcttggtagatgtaataataaagtgaaaatattaacatttgaatatcgctttccaggtgtggagtgtttgcacatcatttaattctcgtttcacctttgtgaaacatgcacaagtctttacagctgtcattctagagtttaggtgagtaacacaattacaaagtgaaagatacagctagaaaatactacaaatcccatagtttttccattgcccaaggaagcatcaaatacgtatgtttgttcacctactcttatagtcaatgcgttcatcgtttcagcctaaaaataatagtctgtccctttagccagttttcatgtctgcacaagacctttcaataggcctttcaaatgataattcctccagaaaaccagtctaagggtgaggaccccaactctagcctcctcttgtcttgctgtcctctgtttctctctttctgctttaaattcaataaaagtgacactgagcaaataacctcatcaggttatatttgcccacataccctaagcaca

SEQ ID NO: 625498 - DNA, 541 bp, Homo sapiens
atccgcaaagtttgtttcccatctgggttgggagatggagaacaattttatcgcccccccagggtgttggggcggctccccgggaaaccccctggtttttccaaaggtaaaaacctggtaaggtccttgggcatccggagaaattaaaaaatttttttcccccgccccgtttggggggcccagccaaaagaatttttggaaaggggtttaagggggggggggtttaagttaagaaaaaccccctttcccaaactgggaaactttggttttgggctcccggaacccatcgttttgggtttcaaatttccccccccccttggtttccccggccgggcattttttttggtgcggggtgggcccggtttcttcctctcggccaaaaaggccgggacggggtgctttggggccaaccccaaattctccaaaagggggccccggggggggttcccccaaaagtataagggggtttccctttttggcgaataaattcccttttttttcccaaagacccataaaaatttttcatggaaatggcccaaca

SEQ ID NO: 625499 - DNA, 639 bp, Homo sapiens
  misc_feature (4)..(5): n is a, c, g, or t
  misc_feature (8)..(8): n is a, c, g, or t
  misc_feature (12)..(12): n is a, c, g, or t
cagnngangacngtggaagatcgaatgctgctcccaggaggggtaggccgagcattggtttaccagcactccccctcaacttacattgacctggctgtggatgagcatgggctctgggccatccactctgggccaggcacccatagccatttggttctcacaaagattgagccgggcacactgggagtggagcattcatgggataccccatgcagaagccaggatgctgaagcctcattcctcttgtgtggggttctctatgtggtctacagtactgggggccagggccctcatcgcatcacctgcatctatgatccactgggcactatcagtgaggaggacttgcccaacttgttcttccccaagagaccaagaagtcactccatgatccattacaaccccagagataagcagctctatgcctggaatgaaggaaaccagatcatttacaaactccagacaaagagaaagctgcctctgaagtaatgcattacagctgtgagaaagagcactgtggctttggcagctgttctacaggacagtgaggctatagccccttcacaatattagtgataactaatttactacaggaaagagggtagtgagacaagtggattaagagtatcgcgtctcggtacc

SEQ ID NO: 625500 - DNA, 120 bp, Homo sapiens
ggctactcttgaggatcccaactcagtgtgctgagctgctaactcagtgtgctgatgctgctaactcagtgtgctgatgctgctaactcatgtgttacctgagctctgaattctgtaatc

SEQ ID NO: 625501 - DNA, 224 bp, Homo sapiens
gcatcacatagagcaactcagcatgcacatcacagactgccgcctgatcaagacggtcgtccaggtaccccaacctgtgcataccggaccagcccgaaggagagacatcatcattgtggcctgtgacgggatgcccatatctgccagtccactttgatgcttctgtggacggactcctaccttaggtcacagcagtgagatatgtgacatccctcaacctatga

SEQ ID NO: 625502 - DNA, 255 bp, Homo sapiens
tgtgtcatctagaggatccggtcgcgagagatacgcgacctgacaggtatgaggcaggctcccaggctgtcgggaaagacaggactgtctgagctctggcgtcttgggcgtctctgtcacccgtgaaagcaagaccttctgatgcagaatgtccaggagcccgcggcaggaaggaagaaccatgttttagagatccatctttttcccactcaaccgggggggacttgtggccttcagtttcacacacgtattcct

SEQ ID NO: 625503 - DNA, 512 bp, Homo sapiens
  misc_feature (35)..(35): n is a, c, g, or t
cttgattccttagttctaatctcacgttttgtttntaagagatggagtctctcactctgtggcccaggctggagtgcagtggcatgatcatagctcattgcatccttgaaatcctgggctcaggtgatcctcccgcctgagcctcctgagtatctgggactacagatgcgtgccaccaagcctggctaattttgtctcatgtcttctaaaaattattttgtgaagccccttcacaaaaaaccttaagggaaatctgatggtgctcaggaatctaactctccctaaaccatcctcttaaactgcttctaaaaatatctctgttggcctttctagccctttttctgttcccatccagtgccccaagcgcttttggtttttaagtgaggggctgggggtttaccaggaagtcccgggtaatttccccctgtaacctcgtaaaaccaagtcaaaggttgggagtgaagaagctaaaaagatggtaagccttggtccaattaaagttaaggtaaaaa

SEQ ID NO: 625504 - DNA, 260 bp, Homo sapiens
  misc_feature (80)..(80): n is a, c, g, or t
  misc_feature (173)..(173): n is a, c, g, or t
ctctaaggatcccatcgcacgacagagcagtagtcgaacttgctttgccttattctacatccctcgatgctcagctgaancgacaaaactcctcaggacagcttggtctcagaagacagtggatcttcagggcttcccattagactccattcttgatgctgtgttgactgtantcccaaagagacagtaacggggcatcttcagtcccaccactccagcacacacaggtcctgtgtggatgccaatgcgcaagcgcagct

SEQ ID NO: 625505 - DNA, 124 bp, Homo sapiens
tcctcctcactgttagatggaatcatgtggcattagttatttcgtgagtcacttatgttagtttagcatagactgtcctagaagttcatccagtctagtatgcaatcacaaggattttggaaga

SEQ ID NO: 625506 - DNA, 316 bp, Homo sapiens
caaaaaggggaaaaaaactttttatcccccccggggggggggtttccttagccctttggggcccccccaagttttaaacttcccgggttttggcaaggggggtattttttaaggggggcccccggttaactatgccggttttttttggggggcttaaagcccccgggcccccaaggggtttttatttttttttttttggggttaaggggaaaaaaagaaattggggattccccccggattccggggggggttccccccccccctttttttcccctttggtttttccccggccaaaaaatttttttttttttcccca

SEQ ID NO: 625507 - DNA, 822 bp, Homo sapiens
ctaccctggaagaaagggatggataggaagtagacctctgtttcttaccagtctcctcccctactctgtccctaagctgattgtacctgtgcctcccccataaaatagatcctgccatgtctaatgtgatgtgtgaagcttggcacgagctagtttatgctactctagtctccacttgctcaatgcttaggagagagatcagctccgtgagaggctggggatggtaggatagctggggattaagtgtcgtttacaaacggggttcgcagctctgtggtgcctagagtctacaactcgctaaggcggagcaattcattccggttcaccttgtgggctttgcaaagtcggccccggtgttacagaggataaatcccttctagattcagccttgcctggggtatgtctatacttacaatgtgacgatgcgtcgcaacggtatggccccttatcttgtttgttattaaaggactgtggacccatgggttgtttgcgtcccaggtggctggcattccggatacccggggtgcacacaggtgagcgcctgcgattaccttgtgcggcgtcgcccataagggcggggattttatatgtttgtgaaagcctatttagggagtcttgagtcagaaattggttgtggtttttaaagaagagaaagaggggcatacgctctagatgtggggctcaaggtggaaatatgtaggttcgtggcacctggatgagatgagcttaggaggaatcagcgataagtgaaccttggtggttgagccaccaagtcggttgtgaccaggttttcaaataagcccggcttgttttgtttaaagg

SEQ ID NO: 625508 - DNA, 155 bp, Homo sapiens
atcccgacacatagatataactgtggctttaaaaatgcatgaacacctttaattatcccgaatgaattagatttgtcttttcctcacccaccttccctccaaaacatgacataaacaatattttttggcacttgtgatccttgtggccctttccc

SEQ ID NO: 625509 - DNA, 448 bp, Homo sapiens
cgttctgcacatgtatctcagaacttaaactataatttaaaaaaaaattatcttcatctatagaaattagaagtataagttgatcaggttaatcaaaaaattctgtttataacttggagctaatgttaactgtcttgtttcttagaattgtacaatgaggtgccgggcacggtggttcatgcctgtagtcccagcactttgggaggctgaggcgggtggattacctgaagttgggagtttgagaccagcctgaccaacatggagaaaccccgtctctactaaaaatacaaaattagctgggcgtggtggcacatgcctgtaatcccaactactcgggaagctgaggcaggagaatcacttgaacccgggaggtggagcttgcggtgagccgagatcgcgccattgcactccagcctgggcaacaagagtgaaactccatctcaaaaaa

SEQ ID NO: 625510 - DNA, 1325 bp, Homo sapiens
  misc_feature (46)..(46): n is a, c, g, or t
  misc_feature (74)..(74): n is a, c, g, or t
  misc_feature (103)..(103): n is a, c, g, or t
  misc_feature (108)..(108): n is a, c, g, or t
  misc_feature (115)..(115): n is a, c, g, or t
  misc_feature (117)..(117): n is a, c, g, or t
  misc_feature (119)..(119): n is a, c, g, or t
acttcacttcttcaaccagtctactccacagccagcacactacacnactgccatcaccttcagttcccactacnttgggtaccatggtgacttctacatccangatcncatctantntnagtacagatatccctacctcacaaccaacaaccatcactccctcatctgtgggcatcactggttcattacctatgatgacagacctcacctcagtgtacacagtctccagcatgtctgcaaggccaacaagtgtcattccttcatctcccactgtccagaatacagaaacctcaatctttgttagcatgatgtctgctaccactcccagtggaggatcaactttcacaagtactgagaacactccaacaaggtccctcctgacaagctttccagtgacacattcattttcctcttccatgtctgccagcagtgtagggaccactcacacccagagtatctcctcacccccagccatcaccagtacactccacacaacagctgaatccaccccatcacctacaaccaccatgtcattcacaacatttacaaagatggaaacaccttcatccactgtagcaactacaggcacaggtcagactacattcaccagttcaacagccacatcccctaagaccaccacactgactcctacctctgacatttccacaggatctttcaaaacagccgtgagttctactccccccatcacttcttcaatcacctccacatatacggtgacttcgatgacaactaccacccctctagggcccacagccactaatacgttaccatcatttaccagtagcgtttcatcttctacgcctgtcccaagtacagaagcgatcaccagtggtaccacaaacaccacccctctatctacattggtgaccacattctccaattccgacaccagttctacacctacatctgagaccacctaccctacttctcttactagtgctctcacagattccacgaccagaaccacctattccaccaatatgacaggtacattgtccactgtgacctctcttcgacccacctcttcctctctcctcaccacagtaacagccacagttccaacaacaaacttggtaaccacgaccaccaagatcacctcacacagtactcctagcttcacttcttcaatcgcaaccaccgagaccccctcacacagtactcccagattcacttcttcaatcaccactaccgagaccccctcacacagtactcccagattcacttcttcaatcaccaataccaagaccacctcacacagctctcccagcttcacttcttcgatcaccaccaccgactcgatcgtc

SEQ ID NO: 625511 - DNA, 434 bp, Homo sapiens
tcagacgggagggctgatgagaggtagagcagcatgcatcgaggcctgagggtgcagggcgccctctctgggccgggaggaattgctcctagctagagtaagtgtgccacgagggtcccaggcagagctggagagctgggaaccaggaggctccacagtccttgccggctcatggacctccttcagagcacctttctacagactggacggcccagctccgtggggtggcatctggtttctggtgctattcgtgccagagttagtcgagtctcctcctcagtggtgtcaacagtgtccatgcttcccggtttctatcctcgtactccaagagtaagcctttctttagctcctaatcaagggatcgaggggctctaaccttcttcttgtccttcaaagcaggccaaagcgcagttgccatcagggtgatccttcta

SEQ ID NO: 625512 - DNA, 146 bp, Homo sapiens
tgttccatagacagcccgacacagccaacacagaaagaaagggaaacgattccagagacgttccagcataagggcctatgctagggccgtgctggcgctcgtgggcagtgtgctgcctgacctctgacgctgcgtctgctgcagga

SEQ ID NO: 625513 - DNA, 165 bp, Homo sapiens
tgggtttgtttttttgggcccaggggggctgccaaccccctccctcctgcctgggggggcctggccctcctggttgttgcaacgggggcttttggagcttgtccccattggacagtttccctgagggacccccagttttttcataaataaattccttccccgcca

SEQ ID NO: 625514 - DNA, 141 bp, Homo sapiens
gtatagtcggtgcaggaatgtagagaaagttagttggcatgttggactaagagctcacgatggaagccagccgctgttgtcacttcaggatctgatagagggaagttgtcgtcctgcgaaaagctgggcaactcgctcgag

SEQ ID NO: 625515 - DNA, 110 bp, Homo sapiens
gtgtgcacggtaatgaccaacctctgagatgtaccttcacaccagtgtcttctgggctctttgatactaaacacgtttctcattcaagtgaactgaaatgcttcaggtgg

SEQ ID NO: 625516 - DNA, 1130 bp, Homo sapiens
gactgaagtgcacttgaaacaaataaaatagagcaaatagggtccattggccaacgctctgggaaggaaggaagaatagggagatcatttgacgccggcctcacgctaacagggaagccaccagtaaatgaggaataaattttgatggttaaattaccttgccttgtcagttctctccaggaccttccttgacagccaggcattttccttcagttattggcatatttgagagaaagaaggtgtttttgtaaattgtcttcattttattctgacttcctggagtcttcaaaggctctcgtggggaccactggctttctgggccctgagagcgtctgcaactaggaggtgttgtaactgtggagccaccagccaccagcctggaatttgggtgacagcagcaaccaggaaatgttttagaccaattctgagcctcagtcctgtgcacctttgagtctggtccatcgtgggtgatccaagctatgattatccactgaagacttaggttttccttgtcctttatggtatctatctgaagcacagatgctcaccacctccgcagctgtgagcagcctgcctcgctggggacaaaggagatggagaagcatctctttgtaggggagagctggataattccagcctgttagctactcacaggaacatgcagaattattggctccaggcagtttgggagaaagaagggtttacgtttttcaaacttacagataacagttgacatcaatgcttctctttcccagaacaatctggagtttgccagaaaactctgtaacacaggagtcgtgctgtgtgttgaactgtaactcttctctccaggcgtcgaggtggaccttggcgttactatgggcaggttggcgcctgccatccagaacgctgggtgccatttggcaaaacgcataaaccttcctttaacaggggaacaacgaaaagtcgcccaggtacctcccaaacataggcatgagcacgtggacactatattggccccaagaaattcaacaccgaggcaaacgcatctggaaacacaccggtacacatgggagggataccaacgggcccggtgctacacgaccacaacggctataaacacaacagccacgactcacccacacatatgg

SEQ ID NO: 625517 - DNA, 215 bp, Homo sapiens
gcgtgacctgagccccggtcccagtccctagtagtctgctgcggccgcggcctctcagccatgggcgccgtctggtccccccctgctggttggagggggtatcgccggagcacttttcgtttcggctagctgcggggccggccctggcgacaccgggcaaggccggggaatccgaccaggagcaaaggcgcccctccttggggacctccaattcc

SEQ ID NO: 625518 - DNA, 380 bp, Homo sapiens
  misc_feature (131)..(131): n is a, c, g, or t
  misc_feature (139)..(139): n is a, c, g, or t
  misc_feature (149)..(149): n is a, c, g, or t
  misc_feature (151)..(151): n is a, c, g, or t
  misc_feature (170)..(170): n is a, c, g, or t
  misc_feature (368)..(368): n is a, c, g, or t
  misc_feature (379)..(379): n is a, c, g, or t
cggctcactgcaacctgcattcaggtgattctcatgcctcagctactcgggaggctgaggaggagaatctcttgaacccaggagtcagaggctgcagtgagccgagacctgggcaacagagcaagacattntctcaaanaaaataatanantaaagaagtaaattgccgncgctgggaaacccaccaaaaccaagatggcgatgagagtgacctctggtatcctcacagctcattacatgctaattataatgcattaacatgccaaaagacactcccatcagcgccatgacagttttcagatgccatggcaacgtctgaaagctaccctgtatgttctaaaaagaggaggaactctcagttctgggantcggcccaccnc

SEQ ID NO: 625519 - DNA, 1148 bp, Homo sapiens
tgcgccgccgcgggggtgcgttatttattcctttgtcgtccctctgctcgttttctttggtgtgtgtgtggtgcggctggccccccccccccgcgtttttctctctctctcatatgttactcttctgttcggctacgcgtagcgtcattttctttttttgtctgcgcggcgttggtctccctcactctttgtgctggtgttgtcgcacctctctggccgggcgtcccttctctgctcgttggcgtccgccctcagcggggggggggtcgtcgcgcctctctttgtcgcttcctccccacccttccctcccgcttcttgcgcctcctcgccctctcgcgttcgtgtgttgccgcctctctctctcgcgcggtggtttccgctcactccttcgttttttgtgtgtggtgggctcgctcctctctctctccccccgtcgtgcgctcgctctcttgtaccactcgctctctctctgttgggtgggtattctctctcggcgcggctctctcttgttcgctcccctctcgcgggcgcgggcgcccccgcgcggcgcgcgcatggctctcctcgtagcgcgcacgcccgctccctctctttttctgtctatataatttctttctctctcctctcctcatttcttttttcgctccgcccccccgcctcctctctctctgtgggttcgtttcttcctcctctttgtttgctccccccgcccgcgcgcgaaagaggggtggttattacagtgagagatatatatattgtgtgtgggggcgcgcgcgcccccctctccccctttttcttttttctggcgttttctctcttctgtgttccccgccgcgcgaggctgtctctctctcctctcctctcctcctctcacagaaggtgtgtttgtttctcccggcgcccctctctcttcccacccctcctctctctctctgtgcggttgtttatttgtgtgggccccgcctcctcccccccgccggttctctctctctctcccgcgggcgcccgccctctcttttttctctttgccttcttttccgcgccgccgcccgccgtcccccccccccccccccccccccctctcttctctcttctttttgtgtttgtgtacacccgctgtgtgttttgtttgtgtgtggctcgccaca

SEQ ID NO: 625520 - DNA, 993 bp, Homo sapiens
  misc_feature (224)..(224): n is a, c, g, or t
  misc_feature (236)..(236): n is a, c, g, or t
  misc_feature (239)..(239): n is a, c, g, or t
  misc_feature (243)..(243): n is a, c, g, or t
  misc_feature (263)..(263): n is a, c, g, or t
  misc_feature (271)..(271): n is a, c, g, or t
  misc_feature (288)..(288): n is a, c, g, or t
  misc_feature (302)..(302): n is a, c, g, or t
  misc_feature (311)..(311): n is a, c, g, or t
  misc_feature (313)..(313): n is a, c, g, or t
  misc_feature (319)..(319): n is a, c, g, or t
  misc_feature (344)..(344): n is a, c, g, or t
  misc_feature (353)..(353): n is a, c, g, or t
  misc_feature (364)..(365): n is a, c, g, or t
  misc_feature (368)..(368): n is a, c, g, or t
  misc_feature (384)..(384): n is a, c, g, or t
  misc_feature (386)..(387): n is a, c, g, or t
  misc_feature (393)..(394): n is a, c, g, or t
aatatctggattgaagacctcaatggctgataggcgacgaggaaggacagccctggaaatggtccaggcagctggaacagatagacactgtgtgacatttggtattgcacgaggtaagaccataccctaggtaaattctcgtacgttacatgatcatgaagaacccggaagtggaattttgtggttacactacgacccatccttcagagagcaaaattaatttncgaattcagacncgnggtncccttccagctgttgagccntttcaganaggcctgaatgagctcntgaatgtctgccancatgtgctngncaagtntgaggccagcataaaggactataangctaaaaangcaagcaaaanngancccacattctagtccntnntgcagnntacaaggagaactgtcctgctcaggatacttctcttcctgcatggtgccagcaacccagaattagcacacgcttcgtggtcaaccgcatactctgtccttcagacccggcgtgattctagctgcccgaccccttgccagctgctcgccatctctgccaacgaaccctcatgtatcaccttcctaatccaatttcccatacacaaatctcacacaaaacacacaccacaacaacacacaccaacaactcaaacctaacaaacgacccacacccataaaactactgtctatacatgggaaacacacggaaccacggcacaacaagaagacaaacccgccacaacatcagcaaacaccaacccacagaaactaaatgaagccagacacacggcaatttctcacaagactcccaccagacacaaaccctcacacggagacccccaccacccacacaccatccctgcgtctcgcacacaacaccaccccccatctaaccccaaaaaaaaaaccacccgaaccacacaaacaacaccacacggcaacacccgcgccacaccaatgacgaccaccggccccccccccgcacaagcattctacagac

SEQ ID NO: 625521 - DNA, 564 bp, Homo sapiens
  misc_feature (224)..(224): n is a, c, g, or t
  misc_feature (236)..(236): n is a, c, g, or t
  misc_feature (239)..(239): n is a, c, g, or t
  misc_feature (243)..(243): n is a, c, g, or t
  misc_feature (263)..(263): n is a, c, g, or t
  misc_feature (271)..(271): n is a, c, g, or t
  misc_feature (288)..(288): n is a, c, g, or t
  misc_feature (302)..(302): n is a, c, g, or t
  misc_feature (311)..(311): n is a, c, g, or t
  misc_feature (313)..(313): n is a, c, g, or t
  misc_feature (319)..(319): n is a, c, g, or t
  misc_feature (344)..(344): n is a, c, g, or t
  misc_feature (353)..(353): n is a, c, g, or t
  misc_feature (364)..(365): n is a, c, g, or t
  misc_feature (368)..(368): n is a, c, g, or t
  misc_feature (384)..(384): n is a, c, g, or t
  misc_feature (386)..(387): n is a, c, g, or t
  misc_feature (393)..(394): n is a, c, g, or t
  misc_feature (557)..(557): n is a, c, g, or t
  misc_feature (563)..(563): n is a, c, g, or t
aatatctggattgaagacctcaatggctgataggcgacgaggaaggacagccctggaaatggtccaggcagctggaacagatagacactgtgtgacatttggtattgcacgaggtaagaccataccctaggtaaattctcgtacgttacatgatcatgaagaacccggaagtggaattttgtggttacactacgacccatccttcagagagcaaaattaatttncgaattcagacncgnggtncccttccagctgttgagccntttcaganaggcctgaatgagctcntgaatgtctgccancatgtgctngncaagtntgaggccagcataaaggactataangctaaaaangcaagcaaaanngancccacattctagtccntnntgcagnntacaagcaggaccaccctcaggatggtgcagaacccagaattgtgattgcagcatgtactgtcctgtaggaaagaaaatgtggctctagctattgacccatacagctgttggaatctctgcaagtatatttgcctaataaattctctcttttgtttaacaaanaaaaana

SEQ ID NO: 625522 - DNA, 567 bp, Homo sapiens
tgctgatgagtacaagtgtgacatctcattcacatgttagttgtgatgatgcagatggatattggtttcaattagaaggcggatccttagtacggcattttctgaattctgtattaatattggtgttaaagtagacatagctgaggctcagatggaatcctggagtttagttatcagcagcttggcagtttgggaaacaaagaaaccaaagctgagtgttttaaagaatgaacatatctggaaatccttgctctcaaaacaaaacaatataatctatcaaaggtgttttactcagtgttctaatttttaaaaaattttatctgcatatttgcatcaaatatttatgtgtaaaatgtatgttttacctccttaaaatgcctaaaagttagttaatagttacttcggtttaacctatacacaatgattaagtgcatttaatatgggtaatttaatgaaaaccattccttgcccaatggatgtataaatttttgaaagaataagcagaattatataatatgaaatgctatgtaaagttttctatgtaaaaatattatgtataatactata

SEQ ID NO: 625523 - DNA, 229 bp, Homo sapiens
  misc_feature (158)..(158): n is a, c, g, or t
  misc_feature (190)..(190): n is a, c, g, or t
gaatttaggagttgtaggaagctaatttagacaggaggctcagggaaagttttgctgaggaagtagaaacagaatcctcaagatttagctagcttcacaaagaaagcaggagatacacaggacaggaagtggcccgaggtaggcaggagctgactggntcaagaaactgaagcgtagtgaggggcaagtntgctggaaggctaaatagggtgatgttgctaaagcaagg

SEQ ID NO: 625524 - DNA, 1735 bp, Homo sapiens
  misc_feature (1103)..(1103): n is a, c, g, or t
agcaggcgtctgtcatctgtgcttcaacaagtgtgattggacaggagacaagatccggtggactctactatccatgcctccggaacgacccatgccgagtatataccatcattccgactctgacaaagcataccgtgagaaccagtcgtatactcagtgctcattctacacgttggcgttaccttggggaccccattgacccacgccaacccagacacccaccatgctcggatataatgtgtacacattcataatgtcccataaccacaaagactcaatatgaaggcacatccctccaagcatctcttcagacttcgagcgacaagtgttccatagttcccaaccacgtaccctgcctgtgcaagagagcacgcctccgcattccaaacctaacggcctccattgggcttcaaacgtaatcttgaataagctccttgcacaacgctgcgcacattctccgataaatcaaacagctttaatcccccattccatacccattactactctgctggaggaccttactacactgaagttactatccgaggatgcctccttggcgcgcaacgcagaatcgtggcctacggcgagccattccctgtcggcggaacaccgctgccaaggcttgggaagaggccccaaacacacttctatccatattatcctacctcggaccgagagactacttacacggaggccccctgtacagcgagccatgcgaaaacaaggtgctggcccagtgaatcgagtgctgcccaataactagggcaagctacacgacataccatccccctcttctgaacaactggaaacttagggccataagtacagactcgcccagaggaccgcgcactatgcgggagcaacgctagctctccggctccgatgcccttacacttctctgcttcttccccccagcaggaggaaagctacagtgtccgacactaagcagatagcagcgccccactagtgcgccgtctgccaaacgacagcaagcttgacaaagcctatggagcgcgcggaactaaacatagcgacccccaccgccaaacataaaacgcgaaccccccaaacccgcgcgatacgaacagcgctccgcatcgcgnccaccaacataggacgcacaccacccgactggacacacactgctacaaacacacaacaagaggcactcgcggagcgacacgctccccaacgtcgcggacccccacgcataatccacgtcggtgcgacaccttaggcgactcctccatacattgacaccacaaaccccactcgcgacgacagcactacacgagataatgggccccccatgaggccacaccccctaagtgtcgaaaccacccaactcccccgcaacgacacccctctctcgacgagcatagaagacgacagtactaccccccaattcagcgacacagaagcatatccctagccgctactaccccacctcaacgccgacatttcggccacgcgacaccaacggtctgacaaaaggcgccccaacaaccttccacagcatccacacacccgaaccgctcgcacgctcggaagaccaaacccctaagacaaacccccacacacgaccttctcccaccaaggagcgacatgcgcgaactatggggcgcccccagcgaactagagacccactgtggcgcgctcagcgcgaacaacgcaggagcaaccagacatgccaaagacacgagacgaatgggcgcccgcctctcacaaccccaag

SEQ ID NO: 625525 - DNA, 215 bp, Homo sapiens
aggagttagtttcaggagagtgagaggtgcattttgtgagtcaggcgagtagaagtttctatgagagattcgtgcgtgtgtagttagcggtcgtagattcatagtagtagagtctgcagcagtcagagagatgatgggaggataccctcgtaattgcacagtttgtagccgtcacggagtcatcacgatgcattggccagggggtacgagctcga

SEQ ID NO: 625526 - DNA, 856 bp, Homo sapiens
cttcaaggtctgaagtaggacttttaccttaaaaaacaacaacaaacaaaactgtttaaccaatcttcttatctatcctgtgtgatagttaagaagattggttaaacagttttgtgtagatctttttggtgctgaactatgacatgagccttatagattgtaaaatagggatagttggaactaatgtacagaactaaattttttaaactttatttgctgttaaattctgtgaagtttcagttatctaaaataaatatacacaaatatgaaatataatgtttcagattgcaaggtaatatgtaatagtagtgtttgtaagatactcttgtctaatattaactagtagtattttgatttgtacagtcataatttgttaaaatgacttcatttaacattcactgatgtatattaataatgtaagttctgatttaacagaatggtgggaaaactggtgcatgtaatacttttgcaagtgttggggagatcggtatgttttgaaaagagtaatttaacttttgggtgccaggaaatgggttttctcaaagtccattgccggcaatgggcaggcctgcaaatactggcacagagcattaatcatacaccttattaacggtgaggtgaataactttgacaataaagttttagagaaatgttcaccacacacaccccgcctccccccccccccaccacacctccccaccccccccccgcccgccacacaacacacaccacagagggcgcccccacaaaactacacagcgggcaccccctctacccccccccgtctccagcacacgccactacaacagcccacacaaacacacggcgcgcgccgcacccaaccgccccggacaaa

SEQ ID NO: 625527 - DNA, 356 bp, Homo sapiens
  misc_feature (23)..(23): n is a, c, g, or t
  misc_feature (253)..(253): n is a, c, g, or t
tagctacaaatgagattacatcnaactaaaaagctactacacaacaaagaagacaataagcagagtgaaaagttagcctattaaatggaagaaagtatttgtaaaccatatatctggtaaaggattagtctccaaagtatttttttaattcctacaagggaataacagaaaactaataatctaatttaaaaatgggctagagatttgagcgaacattccccaaagaagatatacaaatggtctcaagtatatnaacaatgctcaatgtcactaatcatcagggaaatgcaagtcaaaatcacaatgagagggaagaggcagagcaaggtgaccaaatagaagcctgcagcaatcgt

SEQ ID NO: 625528 - DNA, 135 bp, Homo sapiens
ggctcggtacctactttccacaggactgatataagaggtatgatgtagggctaagtggtttgtgctcaatttagctttcaggagaaaataattgacttaacatttgatactaaaacccaaagcctaacagttaat

SEQ ID NO: 625529 - DNA, 820 bp, Homo sapiens
gctttacggaggaagtagaggtgatgcttcagatacatctgtgaatgtgaatgccagagcgaaggcatacctgaaagtgccaagtgtcagtgaaggcacggggacattcgagtgtggcgctgtgctagagtgcgaatgaagggcgtgtaggtaggacattgtgaagtgcagcacagatgagacgttatactagttgaagacatggatgcttgactgcacggaagagaaaccctttcagaatatctgcagtaacaatggtcagtgcgtcttgcggacatgtgtgtgtgtacggaagaggggatactaccagatgaaattcatgctggcaaatgacggggagtggtagatagttgcaactgtgatagatccaaatggtgttaattggtggaggaaatggtgtttgcagtgtgtcgggtgtgttgagtggagatcctaaaataaattgaggagtgcactgtgaatgttctttgtgatacctatgtactcgtggaagcctagcaacggacgagatctgcaagtggacggggcgtctgcaacggtgtgttgtctggttagggtgtaccagaattctgagggatatcaacgtgggaaatcgtggtgtcgcatgtggctagatcatgccattaagtggtttgggctgaccattaacggattgtgttgcggagtcgaggcttaacacaggagaattagcctcctcctttgcacccagtaagtgtcctacttcaaagttaccaggtacaaagttggactaaattaggcagggggcaactcgatctgtcgcccgtagcaaacgatttccatggggatattaacagaagag

SEQ ID NO: 625530 - DNA, 397 bp, Homo sapiens
gctgtgttatacccttaagcttgatatcttttctgtttcctggtttcttccattgtttatcaaccttataatgtcttttattcagagctcccaaaagcctatattggagtgatatacaattactttttaaataaatagaatgttttatataataaatggtatttttggaaagtactggattatgcaatatgaactgtaaatgtctccagagtatattacatgattgtcctaacaaaaaaaaaaaccctttagtactttattaagtatttctcgtattcaaaattatctcacctgtgtgctgaactagactgtaatccctttggtggaaggaaatttggtttggtatgtggttttaaatctcttgcagtttctctcgatcagtgccaggacttcagac

SEQ ID NO: 625531 - DNA, 620 bp, Homo sapiens
  misc_feature (8)..(9): n is a, c, g, or t
  misc_feature (320)..(320): n is a, c, g, or t
  misc_feature (342)..(342): n is a, c, g, or t
  misc_feature (379)..(379): n is a, c, g, or t
  misc_feature (383)..(383): n is a, c, g, or t
  misc_feature (395)..(395): n is a, c, g, or t
  misc_feature (415)..(415): n is a, c, g, or t
  misc_feature (423)..(423): n is a, c, g, or t
  misc_feature (433)..(433): n is a, c, g, or t
  misc_feature (462)..(462): n is a, c, g, or t
  misc_feature (470)..(470): n is a, c, g, or t
  misc_feature (480)..(480): n is a, c, g, or t
  misc_feature (495)..(495): n is a, c, g, or t
  misc_feature (499)..(499): n is a, c, g, or t
  misc_feature (514)..(514): n is a, c, g, or t
  misc_feature (609)..(609): n is a, c, g, or t
caggcggnnagaggcgcaggcggcggaggcggctggggggtccggaagtcaacaccatgtcaagtctgcacaagagccgaattgcagatttccaggatgtcctgaaggagccctcaattgcattggaaaagctgcgggaactcagctttagtggcatcccctgtgagggcggactgcggtgcctctgctggaagattctcttgaactaccttcccagagtgggactgtgtcttgcttcatgattcctctctccattactctccctgcccttctctgttggggtgccttatcctgagccacctcctctccccgcttgcctntgctcccctgaacctgggaganagatgaggagactggctcagcaaggcccctggaggtnaagnttggcctttgcntcctgttcccatcccccagncctggctnctaggtactnccaaatgggagggagtataccgtgacacncacttaanagcggtctcnaccccgttcccctanacangaaatccttggaaancaaaatgctgcctgagtaagggatgaagctttgagcctcctgcccctgcttttctgcccagggagggagaaggaagagggggagctggttttttntggaggttacc

SEQ ID NO: 625532 - DNA, 237 bp, Homo sapiens
gaacagctgtgtcgtgttccctgtgaaactgagcaggtgtgtgttggcgcgctaagtgccacatgctcgtgcgtagaggaggatgtggcctctccggctccgcgctagtgcgcctgtgatcccaacctgctccccgctcctgttgccagcagcactcgctgcactcctttgtcatatgctctgcatcactgtcatactcccaccttcgtgaacaaagttgtgtgctttattcgtaac

SEQ ID NO: 625533 - DNA, 138 bp, Homo sapiens
gctcggacctgtttcttttttctctcaatatattgatcacatggactccatccttaaaatgagcttcatgaagcttcttaaagtttggagtagtgatcgcagttcttttattttttccaggtttggatgactcatctg

SEQ ID NO: 625534 - DNA, 543 bp, Homo sapiens
ccccaccaggcttgtgaggaagcgcctgcagacagtttctgagccatatccacccctgggaaacacataattaccagtctcaagccctggtggaattggggctgtcttatatgtgcgtataccccttactggactggggaaggaggcggtgagggctcctttctacctacagagcgctgagcctccagtctcgatgcccctgcatgccccatgtggtaggtgctgagctgcaaaccagcatcacaccaactgtgacacagggatgtacctatcttggtgaagggtgggggccaagaattgagcatgacatcttgcccagtaggcaccttctgtgagatacctcaccttgtacaaaccatatgcaatctaacctcagcccgaggcatgctccccaacgcgctcttctgtgcttatgggttggacccctgctgaggggacaggagagggagtgtcgaggacctgggcctccagaggctggatctgcttatgctgtggcttatactgagggacctgggctggtgaggtgggcctttcacggtgtct

SEQ ID NO: 625535 - DNA, 301 bp, Homo sapiens
cttcgcctcctgggctcaagcgattctcctgcctcagccccccaagtagctgggattacaggtgtgcaccatcacacccagctaatttttgtatttttagtagagatggggtttcgccacactggccaggctggtcttgaactcctgaccccaggtgacctgcccaccttggccttccaaagtgttgggattacaggcgtgagtcaccgcgtacggccctaaataacattttttatttgacagcaccttgcatgaaattctgtagggtccagccctacagggtctgtgggtttttctcccc

SEQ ID NO: 625536 - DNA, 93 bp, Homo sapiens
tctgaggacacggccgtgtattactgtgccctcaggccgtattacgatttttggagtgggataaactacaatatggacgtctggggccgaggg

SEQ ID NO: 625537 - DNA, 287 bp, Homo sapiens
aataaaaaggaataaactctcgatacatgtcaaaacctaggatagatctcaaagggattgtgctgaatgaatacaatcaaatctgattccattcagcacaatccctttgagttctttccattcttttgacatgtatcgagagtttattcctttttattgctgaatagtattaatattctatagtatggatgtaacatagtgtgtttaaacattcgcctgttgaaggacacttgggttgtttccagtttcaggttcttacaaataaagctactctgtgtgttcatgta

SEQ ID NO: 625538 - DNA, 389 bp, Homo sapiens
  misc_feature (161)..(161): n is a, c, g, or t
gatcctcctattggatccttctgagttaagtatcaatcactgcatctgaatatactacgatactactttgagaagagagatcatcttcacataacttttaatacactgtatttttataactgttctgttttattatagttgttgttactctcttcctgtgnctaatttataaattaaactttatcgcaagtatgcatgtataggaaaaaacatagcatatatagggtttggtactatctgtgatttcaggcatccattggggggtctgggctcatatcccctgaggataagggggggactactctgacatacaaccaagtctggtctctgaaggaagtaaagccaaacagttctcaccagctggtcacaatctcctttgtaagtgagaa

SEQ ID NO: 625539 - DNA, 368 bp, Homo sapiens
cgcggtctaccgcctttgtccagtgcgtgcctagacgcggtgttcttgctacgctgagtgccagtcccgcttgctcaagccacgttcaaagtaaggctgatctgatctgtccttcgtccgacctttgcccttgtatggcagtctcgcattgtacggggtctttggtactgctctgggtgcttcgcctcaggctcatcctgcagtgtctcctctcgtgggttgtcgtgtgacagccgtgtgccctctattggtacagtctggatggtcctcactggtcacctctctcgtggtagccgccatggttcgcaggtgtatcgtcagagatagtgtgagagcgtgtagagagatagagagagagagagagagcg

SEQ ID NO: 625540 - DNA, 547 bp, Homo sapiens
aagataacaaccagtgcctagaagcacgacattgttgctagaatctaaaatctataccttacaaattacccaagttctaagcttcgtgtatttcttttttattgtttttgtttttttgtttttagaaggagtctcactcactctgtcacccaggctgtagtacagtggcacaatctcggctcactgcaacctccaccctccgagttcaagcaattctcctgcctcagcctcccaagcagcctggactacaggcacaggccaccacacccctgactaatttttatatttttagtagaggcggggccccaccatgttgcccaggctgttctcaaactcctgacctcaggtgatccgcccaccttggactcccaaagtgctgggattacaggcatgagccaccgcgcccagctgcttcttgtattttctgagtttatttatttctctgatgctcatattagtatatttgtatgccttattcagcatgccaaggaaaccaagggacggtgattgtaatctgtttggttatacacaccagcggaggctacca

SEQ ID NO: 625541 - DNA, 285 bp, Homo sapiens
  misc_feature (9)..(9): n is a, c, g, or t
  misc_feature (85)..(85): n is a, c, g, or t
  misc_feature (92)..(92): n is a, c, g, or t
  misc_feature (217)..(217): n is a, c, g, or t
cggagtggnacacagatggggatggggcgttgtcagaagcggaagctcaggccctcctcagtggggacacacagacagacgccanctctttntacgaccgcttctgggccgccatcagggacaagtaccggtccgaggcactgcccaccgaccttccaacaccttctgcccctgatttgacggagcccaaggaggagcagccgccagtgccctcgtngcccacagaggaggaggaggaggaggaggaggaggaagaagaggttgaagaagaggaggaggaaggag

SEQ ID NO: 625542 - DNA, 387 bp, Homo sapiens
  misc_feature (14)..(14): n is a, c, g, or t
  misc_feature (36)..(36): n is a, c, g, or t
  misc_feature (42)..(42): n is a, c, g, or t
tttttggataaacntggaattgaatccttttgaaangcttgnaaccctacatttgtccctcaagtcttctccaaaaaaacgtatcaaagaactgaagctcaccaaatcatggcatgcaatgagatgccagaccggtcattcctcatgattgcttccttacccctctctagttctgttttcttacacattgttacatttatttcttactatataaacctctaattttagttggtaagagagatggatttgagactgatcaaagccttcttctacggcaataatcattgtctccgtgattggctttctgtgcagcaagcagcaggacctagactaaacccctggtgatttggtaacaatcatatagtcttgactcctaaatctgacttc

SEQ ID NO: 625543 - DNA, 507 bp, Homo sapiens
  misc_feature (35)..(35): n is a, c, g, or t
  misc_feature (72)..(72): n is a, c, g, or t
  misc_feature (74)..(74): n is a, c, g, or t
  misc_feature (76)..(77): n is a, c, g, or t
  misc_feature (96)..(96): n is a, c, g, or t
  misc_feature (120)..(120): n is a, c, g, or t
  misc_feature (246)..(246): n is a, c, g, or t
  misc_feature (485)..(485): n is a, c, g, or t
atcataccacatctggcctctgctcagaatcctcncgtgactcccatctcattcagaggaaaaagttctcgncncnncctccctgatctgacctcnccacctttctgacctcacctgccnccacattcccctgactcactgtgttccacccacagtggcttccttgctcttcctcaaatatgccatgtagagtcccacctcagggcctttgctctggccgttccccctgcctggacttctcttccncgagatatccgcatgactcactctctcacctcccttaggtctgtgctcagatgacacttcctccgtgaagcctcccctgtccacctcatctaaaactgcagcatcttccccacccctagcacttcctatcttccttccctcctttatgtttattcttaggaacttgtcatcatctgacatactatacttcacccgtgtctcttctttgttatctagaatgtcggttccacaagggccgngatctttatctgtgtagttcac

SEQ ID NO: 625544 - DNA, 564 bp, Homo sapiens
acggtggctccccacactttgggagcctaaggtgggcggatcacctgaggtcaggctttcgagatcagcctggccaacatgatgaaacccaatctccaccaaaaataaaaaaaattagccaggtgtggtgccgcacacctgtaaccccagctacctggaggagacaggagaattgcttgagcccgggaggcagaggtttcggtgagccgagaactgccactgcactccagcctgggtgacagaatgagactataaaagaaagaaagagagaaagagagagagaaaggaaggagagaagggaagggaagacaattagagattacttcaggagattcaacatccgcctaatagaaattctagacagaggaagtagagaatagagaggccaggtgcagtggctcacacctataatctcagcaccctgggaggctgaagtaggaggattgcttaaggccaggagtttgaggctgcagtgagctatgattgacgccactgcactccagcctggaaaacaaagcaagacctcgtctctaaaagtaataatacgccgggacggtggtccca

SEQ ID NO: 625545 - DNA, 155 bp, Homo sapiens
ctgaaatcccatgaagtgcttggttcggcctatgtattggtggcaggctggacacagctgaatcgtctttctgggtcaccctgtaactcactgtcccctttcccgttctctacccaacgctacttatccgcagatattggatgccggctgccccc

SEQ ID NO: 625546 - DNA, 199 bp, Homo sapiens
agcgactcttatgagaagaagatctgctgagtcagagcgagtgcatgagatcttcaaacgcatctcagatgaggagtgtttatgtgctgggcattggagcccctgttatgcacgtgcagagtgtgatgattgtcacaggtgcttgcctgtgccccctgatctccgttgcggccttgctgtatgtgcatgcattggctct

SEQ ID NO: 625547 - DNA, 763 bp, Homo sapiens
ggagagagaactagtctcgagtttgatttttttttttgggttctaaagggggtaaagggggtgctatagggtaaatacgggccctatttcaaagatttaggggaatatttctaggacgatgggcatgaaactgtggttggctccacagatttcagagcatggaccgtagtataccccgggtcgtgtagcggtgaaagtggttgggttttagacgtccgggaatggcttctgttttaagcctaatgtggggacagctcatgagttgcaagacgtctgtgatgtaattattatacgaattgggggcttcaactcgggagtactactcgatggtcaacgctcaaggacggttcgcaggttcgccgtggcttcctaggaacttaaggggggacagttaatgatcgggcacgttcaggaagacatcaacctcccgacgattacactccgcatgaacctcctcgacggttgcacgctacaccaatgtcggggcgccacaaccagattctccgaccgggccacgggcacgggacacgcccagcccccccgcaccacgacacatcctacaaaacgaacaagaccatacgcacaaggcacgagagagccaaggaaccgtccttacgaaacagatgacggacccctgccatacgtaccccacgggccccgactccaccccgcagccgtcgagcaaaagatagcaacctaaacgctcacgtccgaacggtcaaccacaccgaccatcccggaacaagaacccgccctgcaccgc

SEQ ID NO: 625548 - DNA, 917 bp, Homo sapiens
gaggggcggttggctctgtagggtgagcttgtatgtgtccctgtggctggacgtggttggttgattggcaggatcctgctatccgctagcaggtcaagatgcagatcttcgtgaaaacccttactcggcatgaccgtctacccttgaggtgagagcccagtgtacaccatctatgaatgttgaaggccatgatccaggataaggaaggcattccccccgtaccagcagaggctcatctttgcaggccatgcagactgaataagatggctcgtactctttctgactactgatattccatgtagggacttctgactccgtgcctcgctggtctttgccgattctgaagagagtgcgttatgcacgatcttcaggagaagaccctgggcgtcaaagagcagtcagcctggaagctggcagcccagggactgcagtcgaaagctgttgataggcctgcgatcctggttaaagtgggcattcgtcccgaactagtagaggctcggtctttgtctggccaagccagcgtgcaagatgtccgcatgtcttgtctgaacttagaacttttccagaccggtggtcagtcccgtgactaactgtgattcttggggtctgcagaagtggaggagtgcctatctgtcgttgattcactgtgactgtatactgcatctccctgagagagtggagtcccatatgggcaccacccatatatcttttaaggactcggcaccttgtgttaagggaaggtttccctccccgaccaaacgggagggatacttttcgggaggccagcggcggtaaaaagtggcgtgcacactgtctcctttactattctggagtgagggcacgtgctcggaacttggcacatagttcggtgtgctctctacctttttttttggccgattgatggttttgggcgaaca

SEQ ID NO: 625549 - DNA, 546 bp, Homo sapiens
  misc_feature (385)..(385): n is a, c, g, or t
ggatggtctgcccagaacggggatgagcactggcgagacctatctcgtgctatacgctgacgctgacaagccctacaggagtgtgggctatctccctagctccgtggaatcactacagaaggtgccagaggacccttacactctgctcagtgaggaacaagcccacgccgaacaagttcatcctcaagacttcctggacaagacttttttctatagcggcactgtgagcctcagttacccaagtggaagcggtctttctaatgcttgagactgatgacgacacgtttgttgcttactctgtcaaacaagaatcccactagaactgtcttgctgtaggcactggattactagatgacctgaagaatgaacgcgtaaagtcagttgngaaagcaggtaatattgacgacacggtatcaatcaaactagtgtgtacagctcggctctcgagttcgacttgtcatgaccaatgagttagtgtgaccactcttacaacccaggcattgtctatataccgcccaactaacttaatttccatgtctctctggg

SEQ ID NO: 625550 - DNA, 184 bp, Homo sapiens
ggctcggacagtaaacgcgcatgtcgcacgcccgctcaggtgactggctgcaacatgaacacaagtcattgattcgtaataagcacaggctatatttaacgagtatttcactcaatgacagtggcacctcccgatactctggtttcgctgatcccagcctatcgagccgccatgttcaatcgcg

SEQ ID NO: 625551 - DNA, 708 bp, Homo sapiens
ggagagaactagtctcgagtaatcagagggtagtctctttattttaaaaatatatatttataaattggtttacatatcgtctcctcaaataaaaggttcaaaatcaccttataaggtaacgcagctggaaggaacaggggggaaaaacaagggggacaaagggaccgtcgggtggtatccctccaacccaggagcccctggaaggtccacggggcagccggcaaggcaggccaggcggccccaggaatctgcccagtgcacaggcccaagctactacaggagccttcacggggaggaacaggacagccatgagttgtgaggaaaaaaaaagccccctcagacataccccccaggagtgtgctcgcctcgtggaagtggggacaaacaacacacaaggggggtcgtcttagttgggaccctccaggacctgggggagacacgacggcaaccaagacggggactagacccgcgagggcgggcaccgagcgccacacggggagtgctcctagggcataagcaaaagaggggcacccccagaacacgagaggactacacgccttacgaaaaagaggaaggcgcacacgctgggtggcccccaagtacgcccccaacacaggcaacggggctcctcgatcgctggcgaggcgcaaaagtggtcgggcgcgcaacggggtgcaccactagggagaggcaaaaacgtctgccaaa

SEQ ID NO: 625552 - DNA, 255 bp, Homo sapiens
acctagaggatccctctgctgactattatttgtaatgtggtgggtgagtagccccattgtgttgtggtaatatgtagagggagtatagggctgtaactagtatgttgagtcctgtaagtaggagagtgatatatgatcagggagaacgtggtatctagcacagagagttctcccagtaggttaatagtggggggtaaagcgaggttagcgaggcttgctagaatgtcatcaaacaagctatatagtgggagatag

SEQ ID NO: 625553 - DNA, 100 bp, Homo sapiens
agcacagaggaggctaatggcagagcccccatcacctcaggcttctcagttcccttagcctgtcttactcaactgcccctttcctcccctcctctgtgct

SEQ ID NO: 625554 - DNA, 131 bp, Homo sapiens
tctacgagagcatcactgaaggcgctcacgctgaggactctgagcttgtgaagaagctcactagtggacacagagtgacacggttgattgacagagccagctgcctccttgttctgtaattccaggagggg

SEQ ID NO: 625555 - DNA, 130 bp, Homo sapiens
gtgaaggatcgctatcgatccatgcaacgccattatgatgttcttgcgacctaacataataacataatgaagagaggagctaagtagttagcttgcacgcgagctatgcccgtggatcaccatcgatcca

SEQ ID NO: 625556 - DNA, 282 bp, Homo sapiens
ggaatgagaaagagtactaatctgtcaatcctgtcgtgtcgggcgggtgaggtttcccgtgttggccaggctggtcttgaactcctcacctcaggtgatctgcccgccttggtctcccacaagtgactgggacttacaaggcgtgacgctgcttgcttttgacacggctcctacacatgttggactggcctaccccttacttttctgaccctacccactactgtaccaacttaattcggttctgacaacctttcgaaaaactcatctgaccttaaaactcta

SEQ ID NO: 625557 - DNA, 1036 bp, Homo sapiens
  misc_feature (395)..(395): n is a, c, g, or t
  misc_feature (811)..(811): n is a, c, g, or t
  misc_feature (1036)..(1036): n is a, c, g, or t
agcggagggagctgattggagcccggttgcccggtggcaacctctatgattcactggcagtctcgctgcgtgtccctcgcggctgacacatgcggacagacgtacaatggctacatccagtatgccggtggaagactcgcgctgcacggctccgctagtctgcctggcacatagctggggactccccatcttcacgccccgctggagtagacatgtcacgatcggctacggcgcctcatcgcggatctctcatctctcactcgcgtgtcgtgatgccgagttcgcggcggttggcgccaagggaatccctgcgtcagcggcttgactctcctgtgtcgtgcctagcttgacgacgcatggagaacatattgtggctctcgagaggacaacggtcncccatgcgttccgttcctcatggccacgggtagttgcttggatgaagcacttggcgccttgacccacttcctgcatttctagcaaggaaagcaggcgatggtctgaaaggggggcgattggcctagcaccgcatgacccgatcccacagcaggagtagggtaccatctcctttatcgctcctggcaaactcctcatgactagtcgacgcatgggcgcgagctaaagcgtagtggatccgcgcaacgcttccgttcactcataccgcgtggaacgagattcaatcagatcgctcatcgaactctagaagtttcccaagagccattagtcgccatgcttccttagccatggccccattgggccacgacgaaatcggcttatgaaagtagccttgctacccaagaattcgcctaccaangacgttcgctttgcgatgagagtcggcagtatcaatgctggggaggcccgggtttgcgttgggcgtcgttcttaggcgcctttcccggctaaccgggtccttggccccatactactgtgctaagcgatggatcgggccctgaattgtgctttccttagtgccagtggtggcccccgcgaccttggcgccgactttccattgctagttgcagttgcgttagcccgn

SEQ ID NO: 625558 - DNA, 252 bp, Homo sapiens
tgggcttgactcaggatttaaaaaggggaacggtaaaggtaacagcagtcggtgtggagcgagcactcccccaaagtttcacaagtggtggccgaggactttgatggcacattgtgtgttttttaattagctcatcccaaattatgagagtgcgttgtcacagagaagctcccttgccactcctaaaagccaccccactttctctctaaggagaatggcccagtcctctcccacgtccacacaggggaggtg

SEQ ID NO: 625559 - DNA, 375 bp, Homo sapiens
  misc_feature (64)..(64): n is a, c, g, or t
  misc_feature (93)..(93): n is a, c, g, or t
  misc_feature (100)..(100): n is a, c, g, or t
  misc_feature (137)..(137): n is a, c, g, or t
  misc_feature (147)..(147): n is a, c, g, or t
ggccaaggtttttgcctctttaatgcccatctctgccctggttcccccggccaaattgcctgcnagtgcccttcgttcagaaatcacatgagnccaggcntggtggctcacccctgtaatcccagcactttgggagnccaaggtggncggatcacctgaggtcaggagttcgagaccagcctggccaacatggtgaaaccacgtctctactaaaaatacaaaaattagccgggtgtggtggcgcacctggggtcccagctattagggaggctgaggcgggaggattgcttgaatccaggaggcggaggttgcagtgagctgagactgagccactgcactccatccagcctgggcaacagagcgagactacatctc

SEQ ID NO: 625560 - DNA, 397 bp, Homo sapiens
ttttggtattccgtgtacaccatccttggtgttttttgcctttgtgccttcaacctgttgttcctggcctggggaaccctttaatttcttttaattcttctcccccttttttttttttttttttttttaacctacaaatagctttcagttcaggcactgtttaaagccccagggtgggttaggtggtttaggataccaactccccctcaacatttttccttaatccaacagtaccgtaatttgccgaaacttgcctggtttttcctaatggactttaagccctttaggggcagggacagtgttttattcatttttgtgtttttagtgcagagcctggcccgcttttggtgtttaataaagtgtgttgatttgaaatgcccccggcccaaaaaaaaaa

SEQ ID NO: 625561 - DNA, 330 bp, Homo sapiens
agattggacagccgtctgaccacgttgtgactgtcatgcctgtgccgaaaaatacaaaatttagccaagtatggtggcgctcacttgtaatctcaactactcgggaggctgaggtgggaggatggcttgagcccaggaggcagaggttgcggtgagccgtgatcacaccactgcactccagcctggttgacagagccagaccttgtctcaaaaaaaaaaaaaaaaaaaatttgtgagggagttaagaaagaggaaacgtagcgatggtatttaatagacaacttgcttattaatcctaaaagttccatagatggcatagatggttacggg

SEQ ID NO: 625562 - DNA, 259 bp, Homo sapiens
tcccttgctctttcagcggattcgttcgctacttgaacgcacgccctggatgggggactgacagctaactcctatagcgcagagggaggggtggtggcacacgggcggagggcggtggtgtgggcagcgcgaggacctattctttagttgagaagcaaggggcagtcatgggtgtggagagggcagtgccaaaagaaaacctagacagcatctacgagaagttcttgaagacgtccaggtcgaaggcggtgttcaagga

SEQ ID NO: 625563 - DNA, 793 bp, Homo sapiens
gactggtaatagtaagtacacagaaaaacacagaatattataacactgtaattgtgctgtgtaaaccactcatatcttaagtagaaaggctaaaagataaaccaataaaaaataatatctacaacaacttttcaagacgtagtacaaaaatagaaacaacaaaaagttaaaaagtgacaggacgaatttaaagtgtagagtttttattagtttttcctctgctttcttgtttatgcaatctgtattaagttgttatcagtttaaaataatggcttataagatattatatgcaagcctcatggtaacctcaaataaaaaaataacaaatatacaataaataaaaagcaagaaatgaaaacataccaccagacaaaatcaccttcattaaaatgaagataggaaggaaggaaagaagaaagagaagattacaaaacaaccagaaaacaaataataaaatggctggagtaagttcttacttatcaataataacattgaatgtaagtggactaaactctccaattaaaagacagactggcaaaatgcataagaaaacaagacctaatgtctcgtttgttgcctgcaagaaacacagtttcacctataacagacacacatagacttgacaagtaacagagacgggcgaaaggattatcccattgcaaatgggaattgacacatcaaaacaggagtagctataatttatcagacaaaattagatttccgggacaaacactatgcaacgacacaatcagggcttaatagtgaatacagggtccatctgcagaggcctacc

SEQ ID NO: 625564 - DNA, 595 bp, Homo sapiens
ataatctgatagttctataaaggagcttcccccttcactcagctctcattcttctccttcctgccactatgtatgaacagatgtgtttgttgcccctctggtcatgatggtaagtatccgtgtagaccttgtcgcctagcacatgcgaaaactgtagatcaagtaaaatccctctttatccttattatatagaggctaacataaaaataagatacaacacataacaaaacacatggaatccagtatggcgggtgcgcggcgcgtccgaatcacatgcttcttgaaaaccaatctatggggtgacctggcactcgctgggttgtgactaggataaagcgggccatggtgtctccttcggcatgtctgcggtggggtctggggtcggctaggcgctccagaattaaaatcggtccgttgtgggccaccccgggtcgttgtttcctgacgttcactcgattgggttgcgggtccctggggctctatctcctgcagttctgcgggtgatcttatgttatattctggcccgctggtggaggttgatgtgtttggtcttgcttctctagttctttaatgtgatgtagggtgtccatcagat

SEQ ID NO: 625565 - DNA, 182 bp, Homo sapiens
  misc_feature (12)..(12): n is a, c, g, or t
  misc_feature (21)..(21): n is a, c, g, or t
  misc_feature (37)..(37): n is a, c, g, or t
  misc_feature (128)..(128): n is a, c, g, or t
gaggcgccgggngttgcctgnaactccttggagtggnagattccacccacccagctctgcccatgcctctccttctgaaccttgggagagggctgaactctacgccgtgtttacagaatgtttgcgcnttccgcttctttgcctctccccgggggaccaaaccgtcccagcgttaatgtcgt

SEQ ID NO: 625566 - DNA, 332 bp, Homo sapiens
  misc_feature (134)..(134): n is a, c, g, or t
ttagcgtggtcgcggccgaagtacggatgctacttgtccaatgattttaaaagggtaggttgcgggtagtcgttcgattgagggtaagatggagaggtgtgcggctaggaatcaatagagtgatggggttattntgcgaaatattatgcgtttttggtggtatagtatggatgatttgtagtagtgctatgatgattatggatagtaatatggcaaggacgcctcctagtttgttagggacggatcggagaattgtgtaggcgaataggaaatatcattcgggcttgatgtggggaggggtgtttaaagggttggctagggtataattgtct

SEQ ID NO: 625567 - DNA, 357 bp, Homo sapiens
tcttgctcccaaagtgctgggattatgggcgtgagcctccgcaccctgcttttcagttcttattaatatcatttacttggaaaaatgatacagatctgtctgtgctgacaattcattcttcctaatgtagcgccggcgatggaaaactttaaaaatcaaagcttaatcacctccctgggaaatacaaagaggaagaaaggagcacagaaattgtgcagagattagggtaccttgtagggttaggatttcaaagaaaaatcgaagcaccatgccagggtatgcctttcacaatggggctgggatgtgtcatctgaagctgcccatggctaaggcactcacaacagggagagggaatct

SEQ ID NO: 625568 - DNA, 138 bp, Homo sapiens
ggcaactctactctcattgtaccattctatcgcatggcattctaatgttaccgaacgaaaattctaggtatatacactacggaaaggcccaaccgtgtaggccctacgggtactacaaccttcggtgacggcataaac

SEQ ID NO: 625569 - DNA, 332 bp, Homo sapiens
ccttcccaccacaactatctgtaagagagcatgctgcatggttgctggtaaaacaggaaatgggaaagcagagtctgtcgctgggaagagatgatatagttcagctgaagcctacaaatggataactcaccccctgttttcagaggaactgggtgttcccattgatggaaagagcttgtttgaagtgagtgtggtctttgctcacccagaaacagttgaggattgccacttcctagctgcgatatgcccagattgttttaagccagccataaaggaagaggatttccttaagcagtttccttgtcctccactcaccggctgttgcgctgttc

SEQ ID NO: 625570 - DNA, 632 bp, Homo sapiens
cgagtggttcccctttgtttacttcttgttcggttgggaaaaagccggccggggtttccctgtgcctgagcggacctttcccgctaggattcactcccccttggacactgggccccagataccctgatgctgagcccgggactccaacatcctgtgggacctgggccctagtccttctgcctggcctggaagtccccgatctagcctgcctccatccgtattcatatttatagcccggtaccttctcgacgccgtgagacccaattgagctatggggggtcacacccgccctcttctgacactaacacctcagctgcctcccccgctctatccccacctctccccactagtggaaactaggtgctgcacgcccctgggacccggcaccccccggatgagcctggccgcccgtgaggcggacttgagaaggagctccccgcgaggggcttttgggccgactctggtccagaagcatcgtgttctggccttttggggatgaactttttgttttgtttcttccctttttagtttttccaagatagggaggtaaggggggacatgagcctttgttgctatccatcccagaacttatttgtaccttttttttttccataaaacctttcccatgacca

SEQ ID NO: 625571 - DNA, 89 bp, Homo sapiens
  misc_feature (60)..(60): n is a, c, g, or t
taagatggagtctcgctcggggggtatagcggggtaccgaggctccgaattcggaaatcnatgggtctataagctggtttcctggggtg

SEQ ID NO: 625572 - DNA, 911 bp, Homo sapiens
ggcatggtgggtgcttgtacccagctgttcaggaggctgaggcaggagaatcaattgaacccaggaggtggaggttgcagtgatctgagatgtgccactatacttcagcctgggcgacagagggagactcccatttcaaaaaaaaaaaagggttaggttgaaaggaggagtggtgattggggttaaaaagaaggctttaaattggttaagccattcagcatgtgtgaaccttcgttaaaattgccctttttgttaaattaaattaggtccaagagcgcgtgaattcttggcagaaagattaggaaaacgtttccccgtgttttggaatacattgcataggtttccccttggtttttatggtaaggggggggtttgtggtcatggtccacccaggtgatagttatattttgtgaccttttaaattggttttaaatggttaaaatttctaatccttaaagtgtgacagaacttgatttattgtcctcctctcccagttctcttcaattcatgagagtgcctccttaaaactgttacttcgggagagcggttgtcgagaagactcttgtactttgtaacaaggcttgttttgtttggctaaactattggtactgtcggcatgggtaattagaattaaatttcccccatagtagttaatttttattagtggtgtgtcaaacctggtgtgttattactttttttaaccatggcttaaagtctatactttctatggagtaggagtgggttcctactccctggttacctggagaacagggccggacggtacccaatgtccagtacaggcaggttttcctaacaatttttttttaccaccgtttataatccaccgaaggtggggactttggtgccatagagaaccggcggggaaacgcgtgtgtaataagtcttctcaa

SEQ ID NO: 625573 - DNA, 1234 bp, Homo sapiens
agcggcgtgtggcgaatgggaccagcgttgcgacacctgatgcctcggcatggagccaagtgtctgacggaggagcatgcccgatatgcagtagcaatgagaggctaccgcacagcagatttggaatgcccaggctcgagaatgtcagtcggggccctcggatccaagacgcataggaatgttgacggagatcgggaggattcgtccactcgaagatgccatgggacctctggtagggatcagctcaggcgacctgctgggagctatgtagtaaggtagcatcgttctgagctatcacagctcaatagaattggagtctcactggtagggcgagcaaacagattcatccagagaggtcgcgtcatcttcgacgagaagcgacacctaatagtactaacctatggaaggctccacctccgtgtgatggtgctggagagccaagtctgctcaccacgcgatctgccaggcacctcaattcgaaatgaggagtaagatgcaacaccctacggaatcctttgagccctggtgcatgctcggtaggggccgttcggactagggagtcaagacttaactgaaggttccggggaccctccttgtcagaggctacttttgaacgcaggatatgaaagacaggcaagtgtagtgtgaccacgggggactggcattcgttccgggcgacacttgccattggactccttctcatgcgtgctttatccaagcggtgtgcgcacgatagtccgggtaattcttgtcctcggtctatttcacctgcaaggccactttgatggcgagccccccttaacctcggcgcattggagcgagtgcttagcatggagccaattctcgccggaggccccgtgtccttgtggacccctttcccttgcttccccccgttagaagggaaccatgcccggttccttccatgtacgtttccagggcgatggaacccaaaagcgttgcggttggcccttttcgcatttcgcgaagggaattcatcttggggcgtgggtcggggaacaatagaaacacctacatgtttatgcccaattgggaaccggaatgcctggacgtccctgcgaagtcgttgtgccaccccggtagccaaggggctttgaggataactgggacattcgacggccggaaatgggtccccccctttacaaaccgggggcacacggaagcttcctctgtgcccagggtgtccttcctgggagctaacattgtcgctcgttcc

SEQ ID NO: 625574 - DNA, 148 bp, Homo sapiens
cggtcagctgtctcctggaccatgggatgatgctgtgtctactgccagggaccatgttcgtgtctgtggggcctgggctgctgtgggaagctgttcgattcctgatctgaggcctggcatgcgtggtactgccagtggaatgctgttg

SEQ ID NO: 625575 - DNA, 121 bp, Homo sapiens
ctggtactgtacgtgcgctatgcctgatcgagtgtcgcactaagttcggcatcaatatggtgacctcccgggaagcagggagaccacaggttgcctaaggaggggtgaaccggcccaggtc

SEQ ID NO: 625576 - DNA, 172 bp, Homo sapiens
  misc_feature (39)..(39): n is a, c, g, or t
gacccgtattcagctcgaccggcggccgatacagcatgnagccgggcgggcaggcgacgtcctcttcgacctgttggcgggggatgcgccagccgggcagcatttcatggctgggggtgatcacgctgttggggatcggcagatggctcagcaggccggactgctggatcag

SEQ ID NO: 625577 - DNA, 738 bp, Homo sapiens
  misc_feature (559)..(559): n is a, c, g, or t
  misc_feature (686)..(686): n is a, c, g, or t
aggaggaagatgaggaagatgaagaggatgaggaggaggaggaagatgaagaagatgaagatgaagaagaagatgatgatgatgaataagttggttctagcagcagcttttttttttcttgtctatcaagaatttaacccccctgtacacaactcactccttttaaagaaaaaattcgcactcgactgctgagtaagcttagcttttaaactgcacagggaatttttttgtatagttaacacactatccgaatgagtctttagatagccctgacctggcagtattacacaatagccactaaccttgcctggtacagtacgccaactgaaaatagagcttctcaatttaaagcagtttcttcttgttgcacagcacaatttacctttacattgggatgctccttttctatcttccgcaacttctagcacgttttacaaataagtgataccccgccactgaacacgcctctgactttccaatgacccttctggcggcaattctttacagggcccagaatgtgattatataggaactccttccttttaattaaattagaagnctttacataggaccaaaatattaatcctttgataatctgccccttttcaaacctcacatcccgaaaaagcccaacaacccctcccctgcaatcccagagcggctaacaatttctgtttttatccaangttaattcttgcagtaagtaagtgtattatgtgggacgcaagatgtggccac

SEQ ID NO: 625578 - DNA, 363 bp, Homo sapiens
taaggataactcatttattaaagggataaaggacggaattaactggacaaggtcacatttaatacaggattctggacacagaataatagttaaacttgggttgggcgtgggggttcaggcctctaatcccaacatttgggagaggccagggcagacagataaccggaggtcgggagtgcaagaccagccggaccaacatagagaaacccggtctctactaaaaatacaaaattagcccggggggagggcacgggcctgtaatcccagctactcaggaggctgaggcaggagaatggctggaaccggggagggggaggtggcagggagccaacatcacaccatggcactccagccaaggcaacg

SEQ ID NO: 625579 - DNA, 436 bp, Homo sapiens
catttttactccagcagccagctctgggcaggtgtagtcttgacaaaaaccttgtcataactacaccatgtatctttcactttatgccccatgacttcactgataccactgcgtgggatgcttgtagaagcctgttctaccattctgatacatgcacaaacctggaagcacaagggataacactacgggatgggaagcattatatacatgctcctttcttctattcttgggttaaaaaatgaggtgtaattgataccttttctcagacaatccctagtggcactgaggtttacttacccacagggtaaccagctcagtaacttggttttgcattgactttccattcttccttggtcactcttctcattcgggtcactcttgagtcctgagatcgctgctccaaacaagcgacctttccttaactcaaggagtctag

SEQ ID NO: 625580 - DNA, 161 bp, Homo sapiens
catcggaaccagctgaggttagcgtgcgtcggacagatccatcaatcaaatgctcacccgcgcatacctggattcctgtcgagactgacgctgaaggtcacattgacgtctacgtctgaggctgctcgaagcccatcttgctagcccagccacccttccaa

SEQ ID NO: 625581 - DNA, 142 bp, Homo sapiens
cctagttctagaagtttaatagccaaacaggatattgacattgatgtagtcaagatatagacaatcctaccactacaaggatccctcctcttgtgcttttataactatacccgcttccctcctgccccacctctgccctcta

SEQ ID NO: 625582 - DNA, 408 bp, Homo sapiens
  misc_feature (120)..(120): n is a, c, g, or t
  misc_feature (175)..(175): n is a, c, g, or t
  misc_feature (225)..(225): n is a, c, g, or t
  misc_feature (234)..(234): n is a, c, g, or t
  misc_feature (247)..(247): n is a, c, g, or t
  misc_feature (252)..(252): n is a, c, g, or t
  misc_feature (254)..(254): n is a, c, g, or t
  misc_feature (258)..(258): n is a, c, g, or t
actgtggtgagatacttgccaaatgagaggtttaaggagtacataagatcaacatgtacacttaatgtgttaccgagatctgcagtgcgagcgcagacagcaatcatcacctaccatganaggaaaaacagaccaagaaatggtggcatctgtgtggacaatcatacctcaccgntcgatgtgatcatcttggccagcgatggctattatgccatggtgggtcangtgcacggnggactcatgggtntgatncngagngccatggtgaaggcctgcccacacgtctggtttgagcgcctcggaagtgacaggatcgacacctggtgaataagagactgactgaacatgtgcaagataaaagcaagctgactatcctcatcttccaagaaggaacctgaatcaataata

SEQ ID NO: 625583 - DNA, 240 bp, Homo sapiens
cgaaaagccacgagtattctgaaagatgtcactctacagagcacagtgtgtaccattccgacgttacactggtgggagtttggcaaggtgttgcgcaggccaaagcaatggggctggacacaaggttcggttggcccacaaagagtgctgaattttcgcttgcacatgcttaaaaaccgcagagagtaattgctgaactcaagggtttagatgtagattctctggtcattgagcatatcc

SEQ ID NO: 625584 - DNA, 469 bp, Homo sapiens
catgagagaagaaataaaaactttcccagcaacagctaatggagttcatcagcagtcggcctgcctattgaaattgctaaatggagttctctaagctgatataaaaggctgctaatttaataaaatatatgaaaacacaaaaatcaatgctataaataatatagagtcatactcagaaaaacctagaagtgtaatagtggtctgtaaaataattttatctctaatacaaggttaaaaactattaaaattagagctcaaggccaggcacagtgactcatgcctataatcccagtactttcaaaggctgaggtgggcggatcactttgggccagaagtcccagaccagcctggtcaacatggcaaaaccctgtctttaccaaaagtacaaaaattagccaggcatggtggtgtacacctgtggtcccagctacttaggaggctgaatcatgagggataacacgttcgcgag

SEQ ID NO: 625585 - DNA, 477 bp, Homo sapiens
ggcgtcatgagccttctctgtgactagaggataacgctccatccaatccaagatagaaactcagctcgtggtgggggcttgctggcaatgtacctgtcattaccccccgcctcgactcgagaattaagttgtacctcgtttactaggttggtggcagcaggctgtgatcggtatcctacagccttaccctcgtgtcctggatcttttccttccatttcctgtgtacagccttttgggggacactgccgttaccccactctagctagcatagctctgtctgtaggtgctccataaaggtgataggactgaccacaccgtcacctttcccggaaacccaagagggagcgttccacagagggagcgtgtagtggggggaactgttttataaattaatccgtttattgaaaggttcacaaggacaaagaggccacagcaagagtcaggcacagaaattaaggacgcccatcgtgccgcttc

SEQ ID NO: 625586 - DNA, 103 bp, Homo sapiens
cgtctgcatattagatggtgttgggttaggttacatctggttactgtcctgggaaaatcatttttatagagatggccttccaagtgcgtgccacgttgcgtgt

SEQ ID NO: 625587 - DNA, 490 bp, Homo sapiens
tatatcagctcggtaccggggtccagagtactggacacgccagcatggagtattgacatgctgtggatcagaatatgagcgcgtccaagcagcgtggcaacattctctttggtgtggtggctgctgtggttggccgtgggcttgttacatctggccctggcgggttcttgcttgctgctagctgcagcacgagcgggatggccaaaatgtggttaccacgctggtaagaaggagaccaaggacctgtatgcccccgagcccagtggcaaggcctccaagggaaacaaaagcaaaggcaagaagagcaagtccccaaagcccgtgaagccagtggaggacgaggatgaggccgggctgcagaagttcctcaagttcaacctgatgagcgatgcccctggggacagtccccgcatccacctgcccctcaactacccaccaggcagccctgacctgggccgccactatcgctctaactccccactgccttcca

SEQ ID NO: 625588 - DNA, 613 bp, Homo sapiens
  misc_feature (125)..(125): n is a, c, g, or t
ttccgagttaatcagaacaaagagagaggggtgttgggtgtatatgtatatgcccttgatgtatacacttatcaaagcgtatcaacattcagtgaaagacgtcgcactctccataccatcagtanactcagtcccagaagtggtatcatcttattgggagcggtgtataggtggaataaaaagtgccttgcatatcgttattgtacacaaaggtaaagagtatcctcaaagatcgtatatatatgtaaacaagtaatgcaaccatcttgtgcctctcttgaacagtccgttgctggaccacagaggctacgatagactgtaccaaagtaaacgggcggtcgtttaaaaatatggaacattaatttacaaggacccgttaggggcttcaatgatgctgagtctggaaaaggggaggagaccctagggaggactccaggcagctgtgctccagggctccatgtcctctactggattagggataggcacctctgaaatctccaccctgatgataggaatgaaacggagtgaacatgagcccagctgagagaggagcaggaatgtgtgacacacagctgctctccttgtaccagctttgtgattgagccctctgtct

SEQ ID NO: 625589 - DNA, 375 bp, Homo sapiens
aaagggggttttatttgtttccccagcccccccccggggtttcttttttttgaaaaaaacttttttggccccgggcccccttttttattttttaggcccccccccacctggggggcagggggggggaaaaaccccaggccttaaattttattttctttcctttctggagccccaaggagggcaacaaaaagggggggggtttcccccccccccccccttaggaaaaaagggggtttttttattttccccccccctttttcccccgccccccggggtgggccccttttggggggggcaggggggccccaattggcccccccttaaaaagtaaaaacccccaaccaaatttttttttaatttaattttgggttccca

SEQ ID NO: 625590 - DNA, 565 bp, Homo sapiens
tcacatatgtcagctagctaaaaaactaatcgcaagcattattggctctgaatgctaaatgtgcctatattataatttggatgccgaaggaaatatccaaaataactgcaaaggatggttagtgaatctttaagatttgtaacttgaaatatctgtttattacaggggaaacactagaaattcccgatacagcaatgggcctgactttattagcagcaggaacaagcataccagacacaattgcaagtgtgttggttgcaagaaaaggtaagaactaggtccctcaagctgcaatggtcattctacaaggctagaatgagtaaaagtagctttaaaaatgtttacttccagccgggtgtggtggctcgcgccatgtaatcccaggattttgggaggccgaggcgggtggatcacgaggtcaggagtttgagaccagactgaccaacatggtgaaacccagtctctactaaaaatacaaaaattagccgggcgtggtggcatgtgcctgtaatcccagctcatcaggaggctgaggcaggagaattgtatgaatccaggaggcgga

SEQ ID NO: 625591 - DNA, 139 bp, Homo sapiens
cgtcccgtcttgtgagagggtcttggtgacgggcagaagcaggagcaggctcttggtgaggggcagaagcaggaagcaggctcttggtgaggggcagaagcaggaagcagggccttgtgtgaggggcagaagcaggaag

SEQ ID NO: 625592 - DNA, 281 bp, Homo sapiens
ctgagtatgacggagatcagcacattttctggggaaagatctgtgaagggcgaatccaaccgattttctgaattgcccttcagtgcacttggagactgtgtgtggtgctatgatattcaagcagcggcagccggaacgcagtgtggcctagttaaggcagatgattgttagagcagctcaggaccttgagtcctgagctgttagacccaaagtggcaggaaatcatggaagagggtacggctcgatcgtatcaggtcatgtgttctgtatttccccaaaaa

SEQ ID NO: 625593 - DNA, 100 bp, Homo sapiens
caaggatgaggaattgagaacgaaggaaataagggaaatggggtgaatagcaggtggatcagagagatacagtaatgggggtcaggtgtggtatcagttt

SEQ ID NO: 625594 - DNA, 964 bp, Homo sapiens
cgtggtggctcatgcccgtaatcccagcacttgggaggccgaggcaggtggatcacaaggtcaggagatcaagaccatcctggctaacacggtgaaacacccccctctactaaaaaatacaaaaaaattagctgggcatggtggcgtgcacctgtagtcccagctgctggggaggctaaggcaggagaatggcgtgaacctgggaggcggagcttgcagtgagccaagatcgtgccactgcactccagcctggaagacagagcaagactccatctcaaaaaaaaaataaataaagaaattccttttggaattgcaaggggttacaaaagaaacccatagaaaaggttttggcaaacaggttttgtaaaaggttgggaaagacacctgagctttatagagaagtatgagagggtgctaaagtgggcaacatcttatgagttcgagaaaacgggtgttggccatgggtaacaaccgagatttttggcagaataggatcaccatgtgcacatgttagaatatataaagagtggtggcaaaaaaagtggatagttcccgagttaaattagatacatgtgagtctgtccagacatgtgtgttgagaacaaaaggtgtgtggacgtttgggggtatataacgcaggaggaagataaaagggggcatgagaagtcgttttagacaatgaataattagggggttgttgaggggccaaaacgggtagagattgtgttccccaatgagaggggggacatagggggatgaatgttgtgtaaacagttgccacagtagttggttggagaggtgttaaataagttagaaggagtattctccgcgagggtgggtctgtacaaaaggatatttataaacatgtaggggggtgctcagacaagagtatgaactgtttgtttcgagagatggtacgtgatggaatattttgtgtgaagaagtggtgggggtttgaatataa

SEQ ID NO: 625595 - DNA, 448 bp, Homo sapiens
agggggaaacagtgagattcagaatatgagcgcaagacgcctgtttaaaaggtcgtaaactgactagcatgctggcgaataccattgtgtacggtagagcggacatcatgtcggaagatcaggtaaaaggccatcatagacaatcaggacatacatagtggggcacagatcagatttacggagacggaagatgaaaaatgtggtcaggttgggaaacaagtaataactagtattacatactagatgagaatgatcccagtaggaaaaggggagaaaataggtagttcaggagagataaggaaatagctggaaaatgtacttgctaaataaaagctgctggaatgtagtgcacgtgggaagaaactgactttagattagtagttcagatagttcacccggggtcaacaagatgggcagcaggcagtgtgggtttgtaaacggtgttgcg

SEQ ID NO: 625596 - DNA, 314 bp, Homo sapiens
cgggcagtacggacgtgggagggagtggcagagaatgtgtgcacagcacagagcggcgcatatcctggaactaaagcccattcactctgagtgtgtgtggctctgacccacgtgaggcggggagtactatatagacgatgagtacggagacctgatgactgccatacttgttaaacgatgacattatcgtgattcctagacaatggccttaggacgggggcctgcaaagagaattttgggggtccctccatctctagattctctataaaggcctgatcttcctgatgaggaaaaagttcacattctttattttt

SEQ ID NO: 625597 - DNA, 405 bp, Homo sapiens
gaccacacccatccgaaaatatttattatcgatagtttacagttcaagcgaagcttttctttatatttaactaccaggatggttggccttgtgttttatgttaaactagccaaagtatgagagaatttacaagctcacgcctgtaatcccagcgttttgagaccaagctggtctcgaactcctgacctcagctcctgaactcagcctcccaaggtgctggggttacaggcctgagccaccacacccatccgaaaatcagccgggcgtggtggcgggcgcctgtggtcccagactgctggggaggctgaggcaggagaatggcgtgaacccgggaggcggagcttgcagtgagccgagatcgtaccactgcactctagcctgggcgacagagtgagaatccctctc

SEQ ID NO: 625598 - DNA, 106 bp, Homo sapiens
agcgcggcctcaatggcctggacgcgaatggcaggtacacggccgacggccaagaggagcaggagtatctagggtaaccctactaataacccggtgtccattcgat

SEQ ID NO: 625599 - DNA, 388 bp, Homo sapiens
taaaatgtaactatgtaagtatcagcatgtgtatatcccagctgatacctcacacagtgtggcttccaaagtagcgcatagacgaactataggaccttggggctaagctcaaaccttccattaagggtgtacgtgtggaactcacagcgtatagattctaaagctacgaaggtagcacatctcatagtacaggccttactccaactttaaatatagagcacattcacaatataagacaggctatcatctggccttacatacagaccagagaatgcaattaaaacctcttcccgctctcaaggcaccacatttggtgtggacagtgacgctgtgagtatgtatgaaaaacatagcacatgcgcgatatatatgataggcaaaatcacac

SEQ ID NO: 625600 - DNA, 144 bp, Homo sapiens
tttctatacatgggcaagatcgggttgtaagagctcgtgagatttaaggccatgccctgtatcatggtgaacttaccaaagcaaacaactcctgtgagatggtcctgcaccagccaaccagagaactcttttggtgacactcct

SEQ ID NO: 625601 - DNA, 818 bp, Homo sapiens
gaggatcacgaggtcaagagattgagaccatcctggccaacatggtgaaaccccatctctactaaaattacaaaaattagctgggcgtgatggcacacgcctgttgtcccagctactcgggagactgaggcaggagcattgcctgaacccaggaggcagaggttgcagtgagatcgcgccactgtactccagccaggcaagagcgagactccgtcacaaaaaaaaaaaaaaaaaaaaaaaaaaaaaacattgggggggggcccggaccccggagaaaaagttttaggaaaacattggggggggggggggggcccagtgggaggggaacagggggcacaaaggtggttacccacaggaaaaaaccggggccaggcacaaaggggcgggaggatcttccacccaagtaaaaacaggcgcccggggggacaacgcgagtgcgtgtctggaaacaactccaagaaggggagttcgggcaggacatacggggattattataaaagcggggcgtccaaagcgacagctgcagaatttcaaattaacgccccgggcaggggggggaaaagacacaggcagaagggacaaacggaaaagggaatagaacatacagaaccaaaagaaacacagagagacgaaaccaacaaaaaagagtacgaaaaacacgagagaaggcaaaaccaaagacagcgaaccgagaagcacaccagtaaaacaacaaagaaggagaaaaggaagacaaacggacgaaagacaaaacaacgaacaggaaagaaggagacagaacgaacaagactagaaggacacaacgacaacaacgacac

SEQ ID NO: 625602 - DNA, 510 bp, Homo sapiens
  misc_feature (24)..(24): n is a, c, g, or t
  misc_feature (55)..(55): n is a, c, g, or t
  misc_feature (62)..(62): n is a, c, g, or t
  misc_feature (115)..(115): n is a, c, g, or t
  misc_feature (156)..(156): n is a, c, g, or t
  misc_feature (489)..(489): n is a, c, g, or t
ttcattcccaacccctcatgatgnccttgagggattccgaacctccagtggaggnaagtccnctgtagatgtgggtggaaaccagccaagagaaccaagaattaagaagaggganccctgacgatcctgacctgaattgcctgccaatcctcatgntccaaaccttgaatgaatgagaagttgccttccttatggaagatccaaagaatgtggtttgttgagatggaatcctactccctggttaacatgctgtgaacattgttgaaatggcaacaaaggatttagaatattacataaccttagttgatagcagcgtcagggtttgagaggattgactcaattttgaaagaagttctgtggataaaatctgtcaaacagcatcacatgctacagagaaatctgtgaaaggaaaagccagttgatgtggcagacattcttgtcttattttgagaaattcctcagcctggatcttgcagtgagccaaagaantccactgcactccaacctggg

SEQ ID NO: 625603 - DNA, 812 bp, Homo sapiens
  misc_feature (1)..(1): n is a, c, g, or t
  misc_feature (194)..(194): n is a, c, g, or t
  misc_feature (497)..(497): n is a, c, g, or t
nacggaagtattcctcttcctgctcttctgagaatcagggggcgccctcttctctacgacgcacactacttctgttggcctcccggcacaacacacacgaggagacctctggtcgacacccccctctgtggggccaacacaggtggggccactagtggagtttctcgaacctcacagcggcacacactctcacnacagagagagatactcggcggcgccccacacttttcgcgcacacacgcagctttgtttttgtgtatcaaccctctcgcggggagaacctcgcgcttgggagagagcacctcgcccaacatctgtttccacgggcccctctttcttgggggacaaagcccccgtcgggagatgaagaacacaccactcggagactctctctctgtgagaaagggatatatataatctcgggtctctcttgtagaagagactctctcgttcccgcagagaaatttttatatctcgtcacacatgttttgttgtgngtatatcacaccttataccacgccaccacatttgagaccgcgctgtgctggtctgtgcccgcaagaatgtctccgcgggagattctgttcgcgaccacagcccacgcttacaaagggtgttggagatgagcacacaatatcgcggctggagagtgcccgaacgaaggtcggggcagattttcatctgtagacccagaagagagccattataaccccagaaccttgtggagaagattgactttgaccgtgtgtcccagcatcatggcctcctccccagtaacttccggtgtttaataaagaagtgttgactccaga

SEQ ID NO: 625604 - DNA, 768 bp, Homo sapiens
gatttgttatagagatgaggtcttgctgtgtttcccaggctggtctcaaattattagcttcaagtgatcctcctgcttgggcctcccaaagtgctggtgattataggcatgagccacgtgcactccagccctcatatttatgcttgtgttgtagaagcttaggtaaacgagctaattgtggagaaaaatccacaaggaatctacagtatgtaatagaaatacatgtttttctctgctctctttcccattcctcaggggtaatcatccttccaaattttttctcttcatatacaagctgtaagttgtgtgcaagtacaggtatacgtcttatgcctacacatatatatgtttagtatattgttgaacaaaagcacgaatcttaactatgattatgggatggtggtggtggtgattgcacaagagacagggatctcaactccagacgcgtgggcgacaagagcgaagaactccgtgctcaagagaacaataaacagagcagagaaaaacacgctgccgagaggtacaatcctaactctcccggggaggacagggaaaaaaacagaaacagagataaaccaagcaacaacggggacccacatgtgagcacacatgaaaccagcgcgacacccaaggacacccaaagcacgacagactacagatgcacaaacaggggggcaaagcagcacaacggggcgagaattgccacgaagtaagaggaaaagctccgaaattaaacaacactaagtcaacgaacacgccacaggacac

SEQ ID NO: 625605 - DNA, 126 bp, Homo sapiens
gtaaatatttctggctcatttcatcttgcatgtacttgtgtaaaaagagcagctgtgaatttgtctttagctgcatgggccatactagtcttacgaaatcttttcctactgggcccacagtcttcg

SEQ ID NO: 625606 - DNA, 291 bp, Homo sapiens
ctgagaattgctactccacaaacagagtgctactccacaaacagagtgtactccacaaacagagtgctacctccacaaacagagtgctactccacaaacagagtgctacctccacaaacatagtgctacctccacaaacagagtgctacctccacattccactggctatacactgtttgtggaggtagcactttgtttgtggaggtagcactctgtttgtggaggtagcactctgtttgtggaggtagcactctgtttgtggaggtagcacactgtttgtgaggtagcact

SEQ ID NO: 625607 - DNA, 958 bp, Homo sapiens
ctcctcacacccaatggaccaatctatcaccctaaaaaaaaaaaaagaaaaaaaaaaaaaaaaaaaaaaaaaaaaaatttgggggggccggggccccacggaaaaaccttttcagaaacactatcggttgggggggccgggggccccaagtgggtgtatagggcacacagtcggtcctacgcgggttccctagaggagaaccggggcacgacacacaggcgcgtgggatctctctacaccaagataaaaacacgccgcggggggacacacgagagcgtttgagcaacaactccagagagcggagctcagggagagacaacacaggggctctttcacaccaaggggtcttccaacggagacgctcggaaataatccaataatatagcgcgccccggcgcgaggggcataaacaaaacagagcagcaccaaaaagacagacagaagacaagcacaacacgaagaagaagcagaaggaacagaagaacagaacgacggagcagacaagcaacgaagacgacgaacgagcgaagtcgacacgcagacgaccagagacagagcgcaagcgaaccaacgcagcacgaaagaacagacgagaagccgaagaagcggagaaaagcagaagaacagaagcaaggaggaacagaagaactaactaggacaagagaggagagaagaagaggaagagagagcggaggggagggggaggcaggagaggggagagagaaactgagaggagacggagagagagcatgaactaagaaggagacagagatgagaaagaggagtaagaaacaagaacggagagaaaagatgagacgcaggaaaaggcaccaaagcaggaaggagagcagcgagagagagaagaggaggagagagagacgagggacacgaggagaggagcgagaggagtggggaggaagcgctacggagacgaagacggacgacgcgcagacgaccg

SEQ ID NO: 625608 - DNA, 796 bp, Homo sapiens
actcgtggagaccagttttctgggctgttgagtgatgctgactcccaaagggtccattgttgttgtgagggttgccgtcattgttaatgaatgcttattgaacacatgctgcgtgtgcaatatctgattggcactggaaacatagagatgagtcaaatatcacatctgcctcagggattacagccttgtggtccttaacagcgacttggcgatgtaaaggaggcgtgttgagatggaaacgaggtcataacaagaccttcgtgatgaacttggtgaattccagactgatagaaaatcatgtagataaataaatgaggaatgaacattcaaatgcattttgtacatgtttaatattaaaatagtatccatagttgatataattgttagtatatggttaataataaataataaatacagttcttctcacttgtgaaaaccctgtagcacctccacagagccctagagtttctcaagacagagcgagaaacctctggcttagatgcttttgaggactggaccatctctgatactctgtacaactgatgggttattctgtgaaaagtgtcgtttggaatattgcatcttattacagaagccatgatctttaggatctctagggatcctggaagggagtgataaagttacagaatgtaaatataggggaaagttcctttcagctatagtcaagatagcagttgtgtcaccactggagactgagccagggttctgcagtcaggtaaaccttaggcaagtcacttgcttggcatccccatgtggatactggagctaatacccc

SEQ ID NO: 625609 - DNA, 400 bp, Homo sapiens
ggattacaggcatgagccatcgagcctggcccaaagattgttttttgttttgttttgttttttgagatggagtctcgctgtgtcacccaggctggagtggcacgatcttggctcactgcagcctccgcctcccaggttcaagtgattctcttgcctcagcctcccgggtagctggcattacaggcaggccctactgcgcctggctagtttttgtattagagacgaagtttcaccgtgtttgtcaggctggactcaaactcctgacctcaagtgatcctgagcctcagcctcctaaagtccttcgattacaggcatgagccaccacgcccggcccagattggttttattgcatttgttctgtgggataggtacttgggtatttcattttgttctttttttt

SEQ ID NO: 625610 - DNA, 228 bp, Homo sapiens
cggtccgccttgcttcacatcgatctctactataacccctcccatagccaccaatggcacctaaacatggcctctattatcttgcaccctagcctagccgattactaatccctatagggaagcataaactaaactcccctatcggaactggggcgggtgccaaacattttattttgggcccctgccctattttctttaacatactataggggctcttaccttcccctt

SEQ ID NO: 625611 - DNA, 1086 bp, Homo sapiens
ttacgcttccagatggttcactactatttttctgcttattgtggttccattccaccagaggggtctcccaaaaccaggactttcccagcgcgttaccggcctccttttattatcgccccttggccctttacaaaagacgggaacctaactggcccctgaggtatttttagcgccccccttttttttttttaatttaaatgtttattattaagaggtgtttacacaaatatgagacatttcaacataaaatataatcattaattctccatccatataaccatgatgaaactcaagtccattaatgttaagattcattttcacggtaacaatatggaacatgtcatcatcatataaaacatcctagagacctgcccaaagtgaaatttacaaagtagttattactgttactgtaaagatgaggtatagcatttgcctgttacatttattctaaactaaaaatatatacaacctcaagactttcactagcataatttcttttatgagtgagaaagtaggagtgcagaccagatttaaaagtttgaccagaaagaaatcacgaggtttttggttcttctgtcttttctttcattgccaagtccccgtatttgtccatcaacatatagcagaagagtcactagttattaaccattgtcaaaccaatgaaacaagttctttaagaaaaaaaatgggttttatactttcaacgggtgtaataatttacaaataatcatccaccaacaccacttataaataaactgaattgtttcatgtttgatatgcatgcatttgaccctagatatttattaggagttttctgtctttaagataataataaatgtataagaagagcatattttagctggtaagttcaggaatcatcaggtcttttatttctcagatttttataagcaaatacatttttaaagtgtaattttagaaagaaatgagacatacataaaattaatgtattaaaatagatttctgcactggaagctccctctgtttgctgtactgtttcccatacttttcacagttttttttcccctaacttctatgttaaatgccaccatttcagaaaaaaagaaa

SEQ ID NO: 625612 - DNA, 362 bp, Homo sapiens
ataataagtaagctctttttatgaaatggtcttctcacacagtttaccgacatgacagatttcctactggtctggcactgatacatctgattcaaatcggtcctgataccttcaccatcctatgattttcaacaagctactatatttcattaattcatattcagttctattttaacatcaaaatcataatgtttcctactgttgagagtgtcttacagttcagctgcagtctggacacagctgttattgcctgttcccgagtttacatggttgtcatgtctgtcatcgtgactgaacaaatacaaccctgaacaaataaatcaagggccattttaaggagaaacatgaatttcagtagttgt

SEQ ID NO: 625613 - DNA, 783 bp, Homo sapiens
gaggatcatatattttctagctatcaagtcacctgtatgccctactcgtcttcaagcagaagaagagcaaaaacagtagcctcagctctctgaagtgacatgaaaagagcctctggatgcatttccatttctcttttattctccagcagacggggccaactatatccaaaataaagatcacagagcagcaagttcatacaacatgcatgttctcctctatcttagaggggtattcttcttgaaaataaaaaatattgaaatgctgtatttttttttctactctaacctatgataattatttacaaaattttaacacgtgaccaaacaatgcagatcttagggatgattaaaaacaacatttgatgatagcagacattgttacaaggacatggtgagtctatttttaatgcaccaatcttgtttatagcaaaaatgttttccaatatttcaataaagtagttatcttataggggatacttgaaaccagtatttaagctttaaatgacaggaatattggcatagaaaaaagtagcacagcgctactggatcaatccctaatgttcactatatcaaatgtcctggcagcgcagcacatactttttcatgaagacggagttatgcagtatcgggttggtactgccccctctgcgtgtagtccacccctcccttggcgatacagcgcccctttaacctgaacataaaaattcgcactaattgcgctatccgcggaactctgcccgcggcctctatatcgagggatatccgtcacccccacgtactcgg

SEQ ID NO: 625614 - DNA, 717 bp, Homo sapiens
  misc_feature (216)..(216): n is a, c, g, or t
aaaacatggttacagtcaagcttcacaaacattacagactcacttggagttatggaacaagtaagccatgaagtcttctaccttttagtaaaaggtcctccggagaaggaagtttccaggcctgcggaagtggtggagccaccgtccggctccagagcgctaagtgtgtgcgttatgatacagcagggcacaaaacttctgtctcccacgaagacnacggcgggggggacctttttcgcggaaccggggggtgagacttttaaagaagaaaggcattggttgggtttgtgtgttgtgtccttttaaaaaaccgggttttccccaaccaagaagtcggggttatattaccccaatttcataagttccaagcaggttctggacatcttgtggagatctcaccggtccagaagattcataacggcgtggatacgaaataacgtgtggacttcgcgtgtgagcaagtgttcggcatgtttacacgtaaatacttccctgtccttgttttactgtttctggtggccgctcttcgagctctgctgcttctccttcatgagcgtggcgttgctcagggcggagttgctgatgtagttccgcgtctcgtccacttgatagggaccctaggtccggtcccggacttggacctggggaccgaggaccaaatcgaagggggaggaccaatggggaacacccggttggtcaacccagacactgcgggac

SEQ ID NO: 625615 - DNA, 105 bp, Homo sapiens
cacagttcgtttgatctccagcttggtcccctggccaaaagttccaggccacttattatactgctgacaggaataaactgcaaaatctgtcgacgcggccgcgaa

SEQ ID NO: 625616 - DNA, 149 bp, Homo sapiens
  misc_feature (29)..(29): n is a, c, g, or t
ggcacgaggtggaacccatctctactaanatacctccaaatattttgccgggcatggtcgcaggtgctgttagtcccagcttttcaaggaggcttgaggcaaggagattttcatgaatccaggaggccggaggttgcagaagggttaga

SEQ ID NO: 625617 - DNA, 1373 bp, Homo sapiens
  misc_feature (32)..(32): n is a, c, g, or t
  misc_feature (105)..(105): n is a, c, g, or t
  misc_feature (148)..(148): n is a, c, g, or t
  misc_feature (200)..(200): n is a, c, g, or t
  misc_feature (264)..(264): n is a, c, g, or t
  misc_feature (331)..(331): n is a, c, g, or t
  misc_feature (380)..(380): n is a, c, g, or t
  misc_feature (626)..(626): n is a, c, g, or t
  misc_feature (628)..(628): n is a, c, g, or t
  misc_feature (638)..(638): n is a, c, g, or t
ttttttttttaaaaaaaatttttttgagatanagtctgactctgttgcccaggctaaagtgcagtgggcaacagagcaagaccctgtcaaaaaaaaaaaaaaggntatgtaacatgcccaaagtcacataattggcaaggagcagcanatctgggacttgaacataggcagattagctccaagcctatttgcttaacctntataccacaatgccttcttgctatggtaaaacatctgaaaagacctattaccctataggtcctntaaggaggcatgtcgccttcctcttagcaatactagattggctccaacagaaggctgtgggcttctntggcacatgcacctgggtaggacccgagaatatctgtggagtctgaatnaacccaaaagccaatatccatccgttcataaggaaccccagcctacaacgcaaaagaggaaattttcctaagttgaaataaactgtaataaattgcagaggttccctcgtcctggttttcacttcatgttttggatgctgcatgctgggtgagcggagattccaggcactggccaggcagctgccctgactccaagggctgccatgaacaacttccaggccatcctgactcaggtgagaatgctgntntccagccatnagcccagcctggtgcaggccctcttggacaacctgctgaaggaggacctcctctccagggaataccactgcactctgctccatgagcctgatagtgaggctctggccaggaagatctctttgaccctactagagaaaggagacctggatttggccctcctggggtgggcccggagtaggctgcagcccccagcagccgagaggggccccggccacagtgaccatggtggcagctcacagtgtgccaccatggagttggggcccctagaaggtggctacctggagcttcttaacagcgatgctgaccccctgtgcctctaccacttctatgaccagatggacctggctggagaagaagagcattgagctctactcagaacccgacacagacaccatcaactgcgaccagttcagcaggctgttgtgtgacatggaaggtgatgaagagaccaggcaggcttatgccaatatcgcggaactggaccagtatgtcttccaggactcccagcctggagggcctgagcaaggacatttttcatagagcacataggaccagatgaagtgatcggtgagagtaatggagatgccagcagaagtggggcagaaaagtcagaaaagacccttcccagaggagcttccggcagaacctgaagcactggaagccagctgagcccccactgtgggtgactggcagtctcctagtgggaccagtgagcgactggtccaacctgcctga

SEQ ID NO: 625618 - DNA, 511 bp, Homo sapiens
ggagagggggtctcacaggtgggctaggctgtctggaatggctggactcaggtgatctggccggcctttacctcccaaagggctggggattacagggggccaccactcccggccccacagtagtaagtacatctttaaatgggagtccatctcctcaaacccggcggcggcttaattcactaagtttatgtaatattctgaatctctggtggtcatttaaacaaggtccagagcatctgggtgggggggattggtctcaaaaaaccattttctttcctcatccataagaagcaactcctcgtcggttaaagttttatcatgagatggcagcaattcagtcacatctttaggttccacttctattgctaggtctctttctatttccaccacatcggcagggacttcttccacggaaggttggaacccctcgggcatctatgaggatggatatcagattcttccaaatggctgttaaggttgatattttgatcttgtcccaggaatcagaaat

SEQ ID NO: 625619 - DNA, 109 bp, Homo sapiens
tcatctgcgtccatctgaacagcgtcattgtttacacgtcgttgactgctgttttgataaccaacaagaggtcaatgtatagaaatcccgctgattggacgaagactgg

SEQ ID NO: 625620 - DNA, 500 bp, Homo sapiens
  misc_feature (426)..(426): n is a, c, g, or t
  misc_feature (438)..(438): n is a, c, g, or t
  misc_feature (470)..(470): n is a, c, g, or t
tctcagccaggaacagggaagataatctcagtttgccttgtcttattcatcttttctggtgggtctagccctctctctcctcgccagtcccagatcattctttgtctttgtggtagctggaaatacagctcagatcccacattaaaaaaatatatatattatactttgagttctgggatacatgtgcatgagttctgggatacatgtgcagaatgtgcaggtttgttacacaggtacatacatgccatagtggtttgctgcacccatcaacccgtcatctacattaggtatttctcctaatgctatcccgcccctagccccccacccctcaacaggccccggtgtgtgatgttcccctccctgtgttcatgcgttctcattgttcatctcccacttatggagtgaggaacatgcgggtgttttggntttctctttccngtgttaggtttgctgaggaatggatgggtttncagctttcatccctgtttctggtttccaat

SEQ ID NO: 625621 - DNA, 737 bp, Homo sapiens
  misc_feature (97)..(97): n is a, c, g, or t
ccgggaatcggtcttatggccgggggaggtggtgtggggacccctggccaagagggctgaggtctgaccctgctttaaagggttgtttgactaggtntcgctaccccacttccccttattttgacccatcacaggttcttgaccctggatgtcagagttgatctaagacgttttctacaataggttgggagatgctgatcccttgcaagtggggacagcaaaaagacaagcaaaactgaagtgcactttatggcttgggactgatttggcggacattgtacagcgagtgaagtatagcctttatgccacactctgtggccctaaaatggggaatccagagcatatctaggtgcctcaccccttggagtcaaatgttttataaactcatagatcagaagtgcattgggatgtgacgaacgtagcacaatcgccccttttcgagcttcttgagaaatggacgctattttatcagattatagcccatcaatatttgcgactcttggatggaccttgtcttctaaaaatttgatccttcgggaattcttttctgcgaactgtggtccatgtcatatgcgtgatgaagggtctttggagcccttgtgtgaagtagacatgttttcaaggttctcttccgacagtgcggtatctaatttggcgacaacccgtcttctgtggttttatagaggggatatgagtcgcgccgcgccccacaactcttccacatgatctttttccct

SEQ ID NO: 625622 - DNA, 121 bp, Homo sapiens
  misc_feature (46)..(46): n is a, c, g, or t
taaaggacgagtccgaggtagtgaaaggggatcaggccttgtgagnggatgcccctacaactccagcagcgtcgagtatagacagatgagcagagtcaggtatgggagaggtaggggctcc

SEQ ID NO: 625623 - DNA, 444 bp, Homo sapiens
cggttttccccccggggttttcccatttcccccccccttcccgcccaggggggttttttttggcccccaaaaccccgggtctttcccaaatttttttacaccccccccccctttccccaaatggggggggggggtttccgggggggggtttttttaacccaaccttttttttttacccccccatttccctggggccccccccccccttttttttcccccctttaaaaaccccggggccgttcccccccccgggttttttttttggcccggggggggttttcttttttcccccggaacaccttttttcccttttgcccttttttggggccccttttaacccgttttttcccaaaaacccgggtgggcccggcccggatttccccggttttttttccccccccgccccccgggggggtgggggggcgggtgggggggggggtggga

SEQ ID NO: 625624 - DNA, 135 bp, Homo sapiens
atcctattgctcacagggaaacaccgttgcttcccatcctcggcatctgactttagcctggattgaaagtgttagacctgaagaattcgcagcttaccgcttttatgctgaggaaggcagagaacaggattgatc

SEQ ID NO: 625625 - DNA, 622 bp, Homo sapiens
  misc_feature (184)..(184): n is a, c, g, or t
  misc_feature (362)..(362): n is a, c, g, or t
ggtcttgaacttctggcttcaagcccttcctcctcagcctccaaaaacgctgggattacaggcatgtaatctgcgtgtgcctgggcctcagcacatttttgaaaacgaagctttccaagataattcagatcgttgctaccagtcactttaatgctggagcataattagcactattcctttacanatgtgtgcctctttgaaggataaacgcaaacttttaagctaatatttgctttaaagtcactatactgaagcatatcagaaaactcgtagtgtacaagacctcattcatggtgtaccttaagtattagctagcacgcaatacgagatactagattatggacccaggaaactagaaaccnttagtcccgctacttataaataatgactaattcaactctcttcctgagatagaatgctttcgatatcacgcttgatcttacgcttgaacaataattatcaattaccattttgcacgaccaacgttgtgataccctttgaaggatgttaaggtttcttattacgtgttttacttcgtcctatgttaacactaagggaaccgagaatagttgacatcacatacgctgaaggatgtggtatcccagacgaaactggcgagatc

SEQ ID NO: 625626 - DNA, 402 bp, Homo sapiens
tctagagcaggatctagctgactctaagattgcagatttggtagcccagcacaatgagagctcagaggggactcatcttactcctgctgcttctggctgtgttctgttccacagctgttagcctcacatgctaccactgtttccaaccggtggtttcttcatgcaatatgaacagcacttgctctcctgaccaggattcctgtctctatgctgtagccggaatgcaagtgtatcaaaggtgttggaaacaatcagattgtcatggtgagatcattatggaccaattagaagagacaaaattaaaattcagatgctgccagtttaacttgtgtaacaaaagtgacggatccttggggaagacaccattgctggggacctcggttctggtggccattttgaatc

SEQ ID NO: 625627 - DNA, 369 bp, Homo sapiens
  misc_feature (60)..(60): n is a, c, g, or t
ccccccggtttcccttaagggacaaacatcccttaagttcaaaaagagagaaagaggccncccacctaaaagatcgcagttttcccctggtgcagtggcctcacaccctgtaatccccaacattttgggaaaccccaaggtgggtagatcacgagatcaagagatcaagacccatagtgacccaacatagtgaaaccccatctctactgaaagtgcaaaaattagctgggtgtgttggcacatgcctgtagtcccagctacttgagaggctgaggcaggagaatcgtttgaacccgggaggcagaggttgcagtgtggtgagatcatgccactacactccagcctggcgacagagcgagacttggtttc

SEQ ID NO: 625628 - DNA, 417 bp, Homo sapiens
taacaatgccatctcttcatattgttccatttaacaaaactgcagcccttcatctatccttaagtcccttggccaatggtacagagccagagtatgctactccctagcaggaaatcaacaggatgacctattaaacaccattcagaagatgctaagacccatgaattgcaacaggaaagaaaagacagagaattagtcagacaggaatcaaggttcctagagaaatggctgactccatgcatggtgcagtatattgatcctggaacatctgttttgccagaaagcaaggaagccatcaaagtccaacaggatcacgtcaaaaagacatgaaagtcaacttgaagagataattattaacctagatgagacaatgtaagcatccaaaccaataaagactgcaatggcctgaaatacaaa

SEQ ID NO: 625629 - DNA, 748 bp, Homo sapiens
  misc_feature (44)..(44): n is a, c, g, or t
  misc_feature (70)..(70): n is a, c, g, or t
  misc_feature (105)..(105): n is a, c, g, or t
  misc_feature (107)..(107): n is a, c, g, or t
  misc_feature (111)..(111): n is a, c, g, or t
  misc_feature (120)..(120): n is a, c, g, or t
  misc_feature (129)..(129): n is a, c, g, or t
  misc_feature (198)..(198): n is a, c, g, or t
  misc_feature (206)..(206): n is a, c, g, or t
  misc_feature (248)..(248): n is a, c, g, or t
  misc_feature (276)..(276): n is a, c, g, or t
  misc_feature (290)..(290): n is a, c, g, or t
  misc_feature (309)..(309): n is a, c, g, or t
  misc_feature (343)..(343): n is a, c, g, or t
  misc_feature (399)..(399): n is a, c, g, or t
  misc_feature (454)..(454): n is a, c, g, or t
  misc_feature (502)..(502): n is a, c, g, or t
  misc_feature (507)..(507): n is a, c, g, or t
  misc_feature (518)..(518): n is a, c, g, or t
  misc_feature (520)..(520): n is a, c, g, or t
  misc_feature (555)..(555): n is a, c, g, or t
  misc_feature (561)..(561): n is a, c, g, or t
  misc_feature (565)..(565): n is a, c, g, or t
  misc_feature (581)..(581): n is a, c, g, or t
  misc_feature (589)..(589): n is a, c, g, or t
  misc_feature (597)..(598): n is a, c, g, or t
  misc_feature (602)..(602): n is a, c, g, or t
  misc_feature (608)..(608): n is a, c, g, or t
  misc_feature (619)..(619): n is a, c, g, or t
  misc_feature (634)..(634): n is a, c, g, or t
  misc_feature (713)..(713): n is a, c, g, or t
acaaacacaattttgtacacttaattaaatagaatggaatgacncgctcctccgcattcctccccgagtnaatggtttggaagccggccactccatccccgagtngnaatngaccacggncctggctgntgccacttattttggcgcctgcaccccacgtccctatgcccgaggcgcaagctctgctctcccggggancccaagcntggcgcacacgcggggagggcggggccatggagaaggcactncagggagcaccaggcagagccggtgctnaggccggccggcantagggcgcgaggtccccancccaagccggcctctcctccacacctccgccttnctcagagacctgcaccatgggaccccactccatcctcaggacggttcactgtaganctaccaagacccctccagaaccttccggggaatcccaccccctctcctttctgancagctcaaacacctcactagcgggtacaagcctcgggcgcgacctcanaccanggggaggaaancngccttccgggcaaaccccacgaaaccctgaaagcncccganacangctgggcattccagangaaggagngtgtgctnngctnccccanccccacggggntcgggaaggtcaggnccagccagcaggggtcagaggcggctcagctgtccggctcaggaccccacctccgagggcgcctccgttggggccatgnaggccgggctaggcccgcctaccgcagcccccagg

SEQ ID NO: 625630 - DNA, 530 bp, Homo sapiens
gtccataggcgagcggggacaagcgtcttagctcatgaaaagtaagggagacaaacgtagcaagcagaaagcaaacacagattgggcaattttgactaggaacgagacttttcagcatagcaatatcacacgaacagtactaccttatttcccttacgtggaaataatatgaaaaacacttattagatatactggacaacaagagaactaagtactccaactctactgcagcattacaaaaaaaaacatcccttcaccacagtgtaagatttaagggcaacctgcccaaggatgcatgttatatcaaacacagcaagatggctgctgccctgccaagtacttccaatccctacccaggtcctactgaaatacgggtggtcccaattagttttatggaaataaatctttaaagaaaaagataaagcatttaaaaagacaagtcaaaatgcatcaggaaccacatatccaacacaaactttatcctcaaatgagttatgttggcctcgcactaatatcgcacttagacagga

SEQ ID NO: 625631 - DNA, 110 bp, Homo sapiens
agtcttcgtgcagatatagtctttggagagacagatcatggcctaccactgccctgatagaaactgaacatttgactatcaagttatcatgcattggcaccaagttatca

SEQ ID NO: 625632 - DNA, 203 bp, Homo sapiens
ccatgaaatgatcacaccaggccatgcaaaactgtacaatattacaacgagaaaaaccctacaaaatttataaaagtgaactgatattacactatcaaactaaaaagacaagtcatttcgttttcatgacgatttcaaggcttgatttgatgtcagcttcccccggtaactgcacggtgtccatgtggagggggccgcgcgga

SEQ ID NO: 625633 - DNA, 730 bp, Homo sapiens
caggttcaagcaattcttgtgcctgggaggtagaggttgcagagatcatgccactgaagctctactcccaggttcaagcaatttcttgtgcctcagcacacccaaggtaactgcggacatacgaggtgtcacgctactcacacctatggctgcatttattaggatagctattacggaacagacagggcttgcagaacacaagtgtaaagcccaagagattaggctctcagaagatcactagcagactacacgggcaaagcccagccacagcacattgagcactcccacaaaaaaggtagcataagagactaaacaaagaggttatagcacgccgaacacgacgaaacacacaaagcgcgaagtatcacaaagacgtatactccaagaaaggagaaccaagcgatgacaacagcaacgtatcggcaggaacacgaggagaaggtcactcctacaaataccgtaggggggaaaaaccccccccttgggagacaccttgacacataccgagacgggcagaaccaaataccccactggaggaaacccaatagtaaaaacagcaccagcaaaaatcaccgtggcatatggggggacggcatacaccgaaagctgaacccacactatgcaattaaggcaccacaagacgattcccattcccacagcggactagtagagcgccatatgtaaaccggtgaaggaaatgaagggacgtatcccaccacaatcaacaccc

SEQ ID NO: 625634 - DNA, 124 bp, Homo sapiens
tggacacaagctggtcactaggtggcagatgcttgaagcaacttctgaaatatttctgatatattcaagaaggaatctggtcaattgtcagctactacagcccatacaccatgcgatcgaccta

SEQ ID NO: 625635 - DNA, 161 bp, Homo sapiens
ctacatatcaactcgagcctgtaccaggaagaatgctatggcttagagctgtgcctgtgtaaagttgtttaccaaaatggctgctggaaaagcctccccaccaccacagcaggcacattggaggcctggagcagggtgactacagtcaagggcgtcagagg

SEQ ID NO: 625636 - DNA, 128 bp, Homo sapiens
tgagcggagctgcttcctgcttctgccttcctgcttctgctgcttcctgcttctgcctgactgtcctctcactggctgcgtgctctctactgttcccaaatccaattcacagtggtcttgtgtgagtg

SEQ ID NO: 625637 - DNA, 1161 bp, Homo sapiens
ggcgtcctgcaagtgggcgtggacgatcattggcatgtgcgcggtgccaggccttccgcacgcgggaaggccgcctgaagtgctgctatgcaaccttgctgcatgcgctgtgcatcaccaaacctgtgtgtgatctgtgcgggtgaccggtgagcctcacctggggccaacctcttcctggaacggacgttgtgacgtgtgtgcttgctggagtgagctggccagtgaactgtgccagatcgataaggaggccgtgcagaagtacgcctacctcaacgtggtgggcatggtgggctccatcgacaatgatttctgcggcaccgacatgaccatctggcactggactccgacctgcacaggatcatcgaggtcgtcgacgccatcatgaccacggcccagagccaccagaggaccttcgttctggaggtgatgggacgacactgtgggtacctggccctggtgagtgccttggcctgcggtgcggactgggtgtccttccagaatctccacagaggaaggctggcaggagccggatgtgtgtcaaactctcgggagaaacgtgcccggaacaaccaggctgaatatcatcatcggtcggctgacgcgagcaattgatacccaaaataaacccatcacctctgacgacaatcacaccagctcgagacacgcaccttgcgctcatagacaacgttgtaacaacaatacagcacgatcgagagcagaaggagccccttgtgagatcagacaggacacagaccaagcagacattgggacttgagtcaccactcgactgactcgacgggccccatggaaacccaccagtgaagtacgaggacgacgcacgcgggacaccaagccggagacgcatggccgggaactgcacgtgcggagcgcgactaacctcaaggaagtggacacagcggtcgcgccgacagagcgacgagaactcagaagatgcgcactaacacgagtctcgacaaagaaagggcagcgttggaccctaggcagtaataatacggaagggaagagaaaacgaacaaggaagactaccaacacagagagaccgggtaagaataacccacaagaaacgagcgaccgaaagcagcaaaagtggggatcacaacacaaaagagaaggttacagccagcaagacgaaagaac

SEQ ID NO: 625638 - DNA, 296 bp, Homo sapiens
gtatgtgtccttagctcgccagtggagaaaggaatgccaaaaatagctcttctagctttctgctacaagctgaaaacattatgggctttcattcaaagcctcaggatggagtctggcgacagctgcaacatgtttgttccatgccctggcgtggcaggttgctatatgcttgttgtgaggcagcagtgtatttcaagctggggtgttaaaggttagaagggggcgcatgggtagggttgtgcgttatgccgtattatcccatgcactggacgaggtgggtacctgagctcgaagtt

SEQ ID NO: 625639 - DNA, 371 bp, Homo sapiens
cagattctgtcagaagatgatgttggctgagatgtgggccagctgtacttcactgcttcattacaagggtaaggctggccaggtgcgatggctcacgcctgtcatcccagcactttgggaggccaagatgggtggatcacgaggtcaggagattgagaccatcctggctaacaaggtgaaaccccgtctctactaaaaatacaaaaaattagccgcgcgtggtggcgggcgcctgtagtcccagctactcgggaggctgaggcaggagaatggcgtgaacccgggaggcggagcttgcagtgagctgagatcgcgccactgcactcactctggcctgagcgacaaagcgagactccatctcaaaaaaaaaa

SEQ ID NO: 625640 - DNA, 557 bp, Homo sapiens
ggtatcgaatatgccgccgaagcccgggccaaaattgtctatgagcggttgatgaacgtcactgatgacgcgggtgtaaaagatgcgctggggtttgggatgacgcgggaaatcgctcaccagatatccttcgaaaaagcgctgcatgcgatccagccgaattttccccagggcaagttgccgggcaaaccggagttcacgcaggtgtacttcaacatgtcccaaggcgcggagaacctgcgcgggccctggaaccagggtgacggttgggagtttgtggaaaacccacaaccggcggtcgatggcggtgacggcaccgccagcgtgcagttggacgccgacgatgaagcggtgctgagcgcgatgaaaatccgcacgctctcggaccccaacagcgacccccaccaccggcgctgacctgggggcgggcctcaagcccaagcccgaccttggattgagaacagccgcacgctgaaggggcgtgcggtgctttcgacttttctggacgaggacaacgacagtggaaacccacggggaaacctgctcgaatgcctacg

SEQ ID NO: 625641 - DNA, 429 bp, Homo sapiens
tgggaaacaggttgagatgggataggactagcaccattataagtccctgtcagctctacacgactcgttactgagtgcctacagtggggactccggacagtgctgtggagcaatacttgaagctatacctcttttaccatgctggttctcccaaaatctgcctgggtatagttccctataagtctctcctgtgttccctcacaccctccttcatatgaaaggtgccatggaagaggctacagggccaaacgctgagccagctgccctttattctgactcctttagtacaactccgagtgaactggatattcctataaggttattacttacctgtttcaaagccaagagctcacacacacaaaaaatgcacaaacaatgcgatcaacagaaaagctgtacatgtgtgtactgtagaccacggtgcatggg

SEQ ID NO: 625642 - DNA, 141 bp, Homo sapiens
atgtgcctgtagtcccagctacttgggtgggagcgggggctgtggcaggagaatcgcttgagcccaggaggttcaggctgtactgagccatgtctgagtcactgcagtccagcctaggcgggcagagtgagactttaaccc

SEQ ID NO: 625643 - DNA, 136 bp, Homo sapiens
ccctgtgggcttttccacaaagagaacctgtgaaaggtctccgagggtccctttccttggcgagctggggccccccaggaggggagggcaaatacttctccagcaaccccaatcatccccagcacagtcggcagct

SEQ ID NO: 625644 - DNA, 113 bp, Homo sapiens
agagtagatctgtcaacacccgcatcattgaatggtctttgcactgtgcgcagtcgcgaaggtctctccacgacagagtccaccttggggaccggtcgtgtactttgccagca

SEQ ID NO: 625645 - DNA, 246 bp, Homo sapiens
atggcgtgccagttgaccaccatgtgccatcttgatgtctcgctggctccgctttctctctggatgttggcaagtgtgggctggttgcgccggtcagcagagaggtgccggtgtcaatgagtggcctgggagccctcagcgcaggcgacgtggcctcgtccgttcgtggtgatgctgtacacggtgatctgccagtaaccctcgacggtaacaggcacccagttcagacttccagtgtggagagag

SEQ ID NO: 625646 - DNA, 179 bp, Homo sapiens
tgaatgttggtttctacattatcaagcagtagatgtaagaggcagagaaatctaaatccaaattgttaggtgtcacttccattgaagaagaaagaagttctgttttcatatgttcaacttgaacaccatgttttcaggaacagatctatcatgaaaaataaaatgtgtttctccgaata

SEQ ID NO: 625647 - DNA, 499 bp, Homo sapiens
caccctcatcccgggagaaacagtgaggaggaaggaagttggccttcatttataggatgaagaacacaaagataccaaaggaccagtgaacgtgggatcttccacacgagggtgtggaggagaaggggaagagaggggaaccaggaatgagtgtacttggcctctgaccctcaggcacccggcacagcacccagcgcacaatctgagatcaacaagggcagatccccagaaccaggcctgccctcctagactcagctagggaacccctcacagaatgggagttcccagaatacacagtcagggtgacccaagggtgggggctgggatacagaggaggggaagctcaccctagagccctcggactcacatggtttagaaggcaggggatgaaggcagtcagctgacaaatgtttcaatccctactgtgtgcaacaccctatgcctgaatgcacagctgctcatcctgtgtaatggggaacatggaaggcatacaggaggc

SEQ ID NO: 625648 - DNA, 334 bp, Homo sapiens
atctcaagaataaatcacttaggagtgtcatctacctctgattttatgacagaccagagtgttcataatacttcagggcactggagaactcatccatttatcctctttcgggtttaggaaaatatatctagcgactgacacagattgcatatcctagaaagtgagcttatactggctgcaagggcacaagcaatgtttcagcaagcagtggaaatagtaatgggccactcatgacatcaaacctacatgggcactgagcaccctggccattaagagtcagtcagcagtttctttacctgcaagattgcttgacctgcaagcattattagtaggg

SEQ ID NO: 625649 - DNA, 303 bp, Homo sapiens
tattgtacaacatactaggtgcaagtaaaggtaaggagcaagattatcaagcaaatggaaaacaaaaaagaacaaaggtggctagtcttatattagatacaacagactataacaatggtcaaaaaggacaaagaagggcattacataatgataaagggttcaattcatccagaagacttaactatcctaaagatacatgcacccaacattggagcatctagattaggaaaacaagttcttagagacctacaaagagacttagataactacataatggaagacttcaacaccccactgatagtg

SEQ ID NO: 625650 - DNA, 205 bp, Homo sapiens
tccggatttgaacgtcactatgtaacccaaaccaaacagaacagtggctgagtcagaagggttgttgcagaagtggtaaatggtcagactggagataaattttgaagggagcaccaacaggactttgtctaaaaacaaagtttaggccgggcatggtggctcatgcctgtaatcctagcactttgggaggcccaggcaggcaaat

SEQ ID NO: 625651 - DNA, 462 bp, Homo sapiens
  misc_feature (161)..(161): n is a, c, g, or t
ccaaaaaaaaagaaaaatataaatgcaaacataataaaataaaaggaatatttcccagcttctggaaagaaagccaagccaatgatctctcttataggtgacatgggatagaggatcccattccagattcccccaggtgctccatgaaacagcacagactntggttttccatcatctcagctccggggccttaaggcctcccccttacctctcctctgagttcctgtggaatccacactccagaggtggccgccccacagcctggggcctccccagggagctctcatttgggactgccccagctctgatgtgtcaggagaggcatttgcctttagccacctgttcatttgggggaattctcctataggctccctgtgttcccagttctacattcaaatcattctgggtcttttggtccttgtgataaaacatgaaacagcagaaataaacgtttaactatta

SEQ ID NO: 625652 - DNA, 706 bp, Homo sapiens
tttgtctccagccagagacagttgcatcctgggagcagtactattccttactcatctctgttgtttctacaacagccaaaatgatgctaacacctagtaagcatccagtcctttgcatatagtagatgcacacactataggtataataataataatcgttcaaattcacatagcactttctatgtgctagacactcagcactttacaaatattgactttatgtctcacaacaaccctgtgaagtaaatggtattatcatcaaccccatttgacagatgaggaaactgaggcaaaaaagattgggtcggccgggcgcagtggctcaggcctgtaatcccagcactttgggaggccgaggcgggcagatcacttgaggtcaggagttcaaaactagcctggcgaacatggtgaaaccccatctctactaaaaataaaaaaagttagtcaggcatggtggcaggcatctgtagtcccagctactcaggaggctaaggtaggaggatcgcttgagcctgggagacggaggttgcagtgagcctagatcatgccactgcactccagcctgggtgacagagcgagatcctgtttcaaaataaagaaatggcaagatctgtgcgctggtgggtgacccatggaaagggtcagggtgtggcaggagagaaggacttctgccttgagggtcggcaatgtcagacaagggaaacac

SEQ ID NO: 625653 - DNA, 1049 bp, Homo sapiens
  misc_feature (1034)..(1034): n is a, c, g, or t
aggtcctatcactgaagtagattatcggctagtcaaatgggttcctaacagcacctccctcatgggttaaaacaagagggttaatgtgatgtgtatttgcttaatttggcttgttatacagtaaacacacagcaaacgttagctattgttatcttcatttcctttggagaagttatcttatttctcaccttattaaaaataaaccctaactcatacagggaccctccttaccttggtcctttcacccatgaataccataataacctatactgcaaaaaggaggctcaggaggaggatgaggtatcaataggcctccgggtcatttttatgatttaggtattttttgaaaagggtaggctctcttgaaacttccaaggtagttgttgtagtattttattttcctttcataagaaatgctttctgaaatgtattgcagtgaacaaataacaaaattgacaaatgctgtaagccttttacagttatctgaacacacagaataaagtgtaatcaaatttgtgcacattaggtttgctttttcctgtacctagctgtctcttatgtgttcagaaccatttcttccaatcacctttttttgtcttctggctataatttatcattatctacaaattcaataaatggagcatgcatatttcatagttgagattcaataattcaggacaacagtactagaaaagaaaaaatacccaacaaaatattaagcctcatatatttttgtttataaatctaagcatcatttccaactcagaaatatgtttttaaagtatccctttaaaatacatacttgaagctgtctaattacacaaagctagatacttggctactcagatttgagggaggggttgtacaggttggagggaatttacaaaattaaaatgtatctttttaaaaccaaaagaaacatatacattcatttctaatccacagagcctacttgcctttacagtctgctgataaacactgattttttaaacattgtatataaaattaaataacatgaaaaaataaatatgctntattatataacacat

SEQ ID NO: 625654 - DNA, 284 bp, Homo sapiens
ttcttaattggaaaaaccctggggcaaataggtgcatgagtaggtggcctgcagtaatgtatacgcggttattgctgtacggccagggctattggttgaatagagtaagctgatgatttagataataactagtatggagataaggggtgtagataagccttgtggtaaagaagtagactaaggcatttttaatcttagagcgaaagcctataatcactgcgcccgctcataacgggatggccatggctaggtatataaatagtaagggtgattgagcacattct

SEQ ID NO: 625655 - DNA, 1350 bp, Homo sapiens
catctctgtttgtcgaacttgcatgaagaagaggtgaaagcagcaacaactgaacctacatgaagtggaggaggtggtccccgacactggcaacccacagcaacacgctgctgcagctgcagcaaggagcatcaacacgcaagggcacagagcagccgttgtggcacgcagctgtccccatgccagcgcagcaagaagcccgtgccagccgtctgcagggcaagctctagactgtcccccgccggatgagatgaagccacatgaccgctgatctgagggcaagatctataactgctgtataggagcgggcatgcatgctgcttagccatcactggcagatggaccatcggcggtcagcccatggcatctgcagcacacagcacacatcaggcaggcctattcccagcaagcagcaacagaccagcaaggcatgctacaggctctggcagtaagtaatcacggcctgggcaattgcggaaccatcccagacaagacgtgctacctaggaacaactcaaggctgcgagacaacatactgaggcaataactacgggcggcacctaacatggcatcaacaccctgggcccatatgggccatatggtaaaagcgcacactgatttaagcgagcctagtagagatagagcgagccaattcacaacgattttcaaaatactagaacgctaggtagaaatcccccaaagggggcccctcccgcaataccattggcttaacgcacttgcacgacattctaaacgagagggttcacaacgcaataccccccaatcacaagggaatccgcaaaatctaacctcacacacacatattggaccactaactctggcctagcatccattggcacaccaattccatcatgggtaagttataggggagacatcggaacctggatagtgcttaagctaagagatcacaaacccacgctaaagaatttgccaatctaggagcaaaccaccccatcccacacgaacaacattgtacacacgctgaaacaaatacgataactacgacacatttgcacacagtgtatccagtggttgaacacagtaccccataaatgtgacgaacgccagagggcagaaaccggcacaaacgggctaaacacagcggagcgcagtgtccagcacaaacacgtatcaccacgcgtggagcacgagctgaccaagtggggagccaacgcagcgaagagggaaacgcacagcaccgcacgcacccctagaacgacacgatgtcagaacaaaaggcggcacgagacaccacacgtcgtaggccccgccgcacacgcgaaaggggagccacaacgacacgaaacatgcaagacgcagcaacaaacag

SEQ ID NO: 625656 - DNA, 182 bp, Homo sapiens
tgtatcagcgcgtaggctgacagacaccaacacaggacgtcatggcaaacgacgaactgaccacttccgcgccgccgccatgcccaaggtagcggttgagggatcgggccgaggataaaacccatgaaaccgggtcaaggcaaacgccgacaccaggccccagggccgaggtcacgcaggct

SEQ ID NO: 625657 - DNA, 431 bp, Homo sapiens
  misc_feature (1)..(1): n is a, c, g, or t
  misc_feature (3)..(3): n is a, c, g, or t
  misc_feature (14)..(14): n is a, c, g, or t
  misc_feature (321)..(321): n is a, c, g, or t
  misc_feature (403)..(403): n is a, c, g, or t
ntntcggcacagantcctgcctcagcctcctgagtagctgggattacaggcatgcgcagctatgcccagataatttttttgtatttttagtagagacagggtttcaccatgttggccaggctggtctggaactcctaacctcaggttatccacccaccttggcctcccaaagtgctgggattataggcatgaaccaccgtgcctgggccaaagatgtaatttaaaatagttagaagggacttgggcatgggcaggcttccgtgcatggcattttcacccccagagcttcctgaatcctgtttttcacacagggaagttttntagggtcttttctaggaacagctaggaaatagtaggctggactccccgcccaagggccccaacctttcaaaaccctggaggntttttcagggctggcattcctttgggtg

SEQ ID NO: 625658 - DNA, 740 bp, Homo sapiens
gtaagaggcgtcgttgtgttttggaggccgtgaaatcagccgtttgatttgggctgcgggtggacgcaacgtttgtcatggagcgccgtctacacaaagtgagttgcccgccctgttgacgatgtgtgtccatgcatgatttcgagagacggaaccgactagtgagccggttctacagtcacccggtgctggcggttgttgccattgttcggcaccgggatgaatcatcctgggtacctggttacatgagatcatgtaaacctatgtgatggcaagttatgcatgactgtgcgcaattgactctaggtccaagctccatgccagctgtcacacatgcagttatgaagtcatctgtcattactattcgtcctgagagcaagtggcttgtattaatgccttgctgctacgtgtaatgcgcgtcttcatgtacttaatgtggatatagtcagttcaaggctgctcttatggagccatatgtcttcatcgaaggtggggtagccatgataccattcttctgttaccgacttttggacttcgtctctcaagttcgccgtggcttgctacttagttctcgtcacctgttttgcctggagatcaagatgtgtctgggatcaactacctgattgttcgctatcaggatgatcctccttggccttggtgctcccagcttgcctcctgttcattggcttgtgtctttgggcttattcatcattttacggattgtctaattaccgttgttt

SEQ ID NO: 625659 - DNA, 630 bp, Homo sapiens
ctctttccttgcctaacgcagccatggctcgaggtcccaagaagcatatgaagccgctggcagctccaaagcattggatgctgtataaattgaccggtgtgtttgatcctcgtatcatccaccggtccacacatgatgagagagtgtctccccctcatcattttcctgaggaacatacttaagtatgccttgacaggatatgaacgaaagaagatttgcatgcagcggttcattgtcatcagcattgacaagacgggagagaatttccgtctgatctatgacaccaagggatcgtctgctgtacatcgtattacacctgaggaggccaagtacaagctgagcaaagtgagaaagatctttgtgggcacataaggaattcctcatctggcgactcatgatgcccgcaccatccgttaccacgatcccctcatcaaggtgaatgataccattcagattgatttagagactggcaagatactgtttcatcaagttcgacactggtacctgtgactgtgactggagtgctacctaggatgatttgtgtgacatcaccgagagaggcaccatgatctttagactggtcacgtgaagatgccaatggcacagctttgccctcaagttcgacatttt

SEQ ID NO: 625660 - DNA, 327 bp, Homo sapiens
  misc_feature (20)..(20): n is a, c, g, or t
  misc_feature (26)..(26): n is a, c, g, or t
  misc_feature (68)..(68): n is a, c, g, or t
  misc_feature (181)..(181): n is a, c, g, or t
cccctgggcaacatagcaancccctntctcaaaaaaaaaaaaaaaattaggcaggcatcgtggttcanacctgtagtccccaattactcaggaggctgaggtggagggattgcctgagccccagggttcaagactggcctgtgcaatatagcaagaccccatccctaaaaaataaaaaacncctatcagggtgggtgcatgccagtagcctcagctactcaggaggctgaagagagaggatcacttgagtccagcaggttgggacagcagtgagctatgattgtgtctctgtacttcagcctgagtgacagagcaagaccctgtctc

SEQ ID NO: 625661 - DNA, 185 bp, Homo sapiens
aggactccggacgaggcgaagatcccagtcccacgagacgctttagaaagatgaaagccggtgatcactcaccggctacagcagggcctttgaaagccgtataaactctccttacaagttcccccattttacctgtcctaaaaccagacaagccttacgagttagttcaggatctgggcctcgtg

SEQ ID NO: 625662 - DNA, 595 bp, Homo sapiens
gcggatgacaaggatactctgccttaagcttaaggacctggcattctcaagaaccagatggaaagcctgcagcggcgtgttttaagacgaagtcaacagtggagtgggccaggatggactcgctgtgtcctccccgatcctcaagggatacctggctggctatgtggtaggccaaactgagggcatcagcagtattttggctctgctgagggcacctgcacctgggcatctatgcggctcaggcatatgctgtgcccaacgtggagaagacattaagggactattatgcagttgcatacgcaaggggcccgaatagctctaggtgccatggaaagagagcaggaatgacgcaagcatcagaccattcaggtgagagaaaaacaattaactcatggaattcacccagaatgatcaatccaaatattgactaatcatcacaaactttatccatggcaacaccatatcagtccttggcaatacccattccatggcaaaaatagatggaacaagatacgtacccttcagacatgacaaaccatggaatagcctaacaatatccccctttcctaaggctcacatgggaactcgacaccaa

SEQ ID NO: 625663 - DNA, 1524 bp, Homo sapiens
  misc_feature (99)..(99): n is a, c, g, or t
ggctgccggcgtctctgtccgactagcgccaccgagacgtaggaaacagcgctgcttccctgcgtgccctatccagtctacctcgttaggcagagctcnagcagctcttcacgatcccatgttccaattgatggacacagagcagacacacgccaagcgagtgagtgccgatgtgaggtgcgccctgtgaattgggctagcaagaatggcatgcggctagctgatatgaccgcctagaatgaactcgtctgcacttccgtgacgtacacgtggcagtgtatcgagtcagagtgcgatcaccgagatgatgaagttgaagagtcacgggcttcgtagccacggcacaggatgtttgcccgcgactgactcacatggcctcgtgaaaagctattagctgtgaaccgagggacctggggacattcattaccttacgagctatgaccgattccaatcaccattgcaccgaaaagatggggaactagaccaaatggggaaagattagatcccagtcaagtgtcgacagggggacgacgcttgagcacatttctctcaaatttgtcccatgaaaccaattctaggacagtcgaagacaactcgacaagtccgcagcgtagtgggctgtcgattgaactcaaccttaaggtccaatgcccagtaacaaagtttggcttcgacgggccaccatattcttgagggaacgcattgagcgttggtgaaatcccgtggaaaggcttcccggcagcactttttatcgaccgggggacaatttagccccttctattagggccccttgaagctttttgcagccagagggttctgtccatggccaacaagttcggttgggtgaccgattcgttgacgctcaagtttccattggcacccacaccacggtgaagcctttgcgagtcccaaatcgctttggaaaagggacttaacgcaaaggttaagcaaatggtgccgaactagcaagtatgttcttaaacatccttttaagaccgttctaaattcgcaatatggcgattaaccttgcgagacgactccccgtgggacagcccatttctgcgcggtaccaattggagcatactttgacatttttccaattgcgtcccacggaagacccgctggtatcattggtgcccggacactgtgggctgtataccatccaccacatgtagacgcggtaagaaaacccgtgaaccacgggtagtatacactcccagtgtttgaaacgtttgcgagccgtaagcgtctcaacacagagataatctctacgacagggggcataaattttccctatagaagaccaatcacctcgtgggagtcggcccaaaaacacccgcggacatagacgacatacatcatttgggacacgtctacaacgattagataaacccatcaaaagattctatccacagaaagcaggcgatatcatcactgtctatttactatacacagcagttggtaggttcagtgtgatcttcacaacatagaacaatgtacgtctcccagtaaccaacaccttat

SEQ ID NO: 625664 - DNA, 182 bp, Homo sapiens
ccgggaggtgctatatgcgggatcgctgtgtctttcggcgcgctcatttcacccggtgggtgctctgcgtcgcgcccatcttggctgtgcgcgggtggtgctcctggcgtgtccgggtctgctcttggctggggcctgactcctgcggcacttgggtcaggtagggaatcagccggttcaag

SEQ ID NO: 625665 - DNA, 828 bp, Homo sapiens
ttgggtgatccccctaacggcgggtttcccagcccacgagggaggctccaccactgagtatccccacttgtcccccgcctatgaggttttttttttcttgtgcggtaccccccgactggtgtgaatgttcatgactacctatccctttccacgcccctctttgtctacccactcttctggaccactggtctcgtacccacgcttggtttttacagacttttctctctacagggtggtgttaccccacgcagttggctgtaagggcgtccaaagtgggcgagcgggagcccacgatacgtcaccctttaaatcgtgtttacccggactgttgtctgttaacactctgcttagtggaggacgtcacgcctccttgtggaagattccccccacttggggtgtgtttgtctcttttgaccctcgctctcgtacccctcttttcacgcggtatattctattttttggccaccacacaaccgattcatgcacttgtcccaacgctctttatgatgtttttttggagattctctcgccgccctctctctcgacacgctgaggcccctcgaggcgatttatttctaacgcacgtgtttgcacacagcgtgcctcgtgtggtgctctctctggtgttttctttggttactttgggtggccacaagcaaatttccctagccccgcggcagttcccttcttttcattttgttgtaaagatttttcacctttttttttgagggctgggggttgggggagtccccctgattatattttaaagtagaaatttgacatttggatattaaactgtaaattaatgtttaattaatggccccttta

SEQ ID NO: 625666 - DNA, 116 bp, Homo sapiens
agctccttgcactgtgagctccttagatcagtcaccaagacaggaaaatgggttttcctaactcagtggttctcaaacttggtttgtgtcaagagcaccactgtttgcctgggact

SEQ ID NO: 625667 - DNA, 260 bp, Homo sapiens
gcttctctctcccggccagtagagtttccactgtaaagtctgctgccagacatgttggagctcccagtagggttaattggttcctttccccattctggctaaagaacttttatctttgacttttggaagactattgaatgcttcgaagtagtgttttttgggttaaatctgcttaatgttctataacatttttgtagttggatatggatgtctttctctaggtttggaaagttctctgttattatccctgtgaataaatt

SEQ ID NO: 625668 - DNA, 358 bp, Homo sapiens
ggggtttcactatgtggcccaggctgtggcccttatattaggtgttccgttcgatcaaatagccttagctggccgggctcggtggctcacgcctgtggtcccagcactttgggaggctgaggtaggtggatcatgaggtcaggagatccagcccatcctggataacaaaatgaaactgtctctactacaaataccaaaaattagctgggtgtggtggcgggcgcctgtagtcccagctactcgggaggctgaggtgggagtatggcgtgaacccgagaggtggagattgcggtgagccgagatcacgcccccgcactccagcctgggcaacagagcgagactccttctcaggaaaaaa

SEQ ID NO: 625669 - DNA, 203 bp, Homo sapiens
caatcaagactcagtataagatcaactttgggttaatgattttgcgcattgtaggccaatatgagtatctcgtatcatgtgtaaatgcacgcttaggtgtgctatgatgctcggtaggttacttgtacctctattaactgcatctttgacctaggatattttcaatttctgataggttttttggggtgtaatactactgcaag

SEQ ID NO: 625670 - DNA, 773 bp, Homo sapiens
agtggggctgccttggacaacacccacacgtgtgtgttccaggacatgaaccagccccttgcccactacttcatctcttcctcccacaacacctatctgactgactcccagatcggggggcccagcagcaccgaggcctatgttagggcctttgcccagggcatgccgactgcgctgcgagctggtactgctggagacggggccagcgaggcgcgagcccagtcatctatcactggccatacccatcaccatccaagcattctccttccgcggacgtgcgtccaacgccgctgcgctgaccactgccgttcacgacatgtccccgttaccactgtacatccgtatccgctggcacgaacctacgtgcgcggccctggagctagccagggctggccatgagcccagaccaccctactgcgaccgagtcctggcggcgaacatggctggctgtacacagcgcgcctggcactccgccaaactcccgcaggcagctgcctatcccctagagccacgctgcaacgggccgggctcctggctgacagggaacagcaacgtcgccccgctgcctcggacgccgaggcatggccgaggctctgtcggatcggcgacgacggaggaggaggatgaccgaggaggacagacgaggacggcgcgaggctgccgcgcaccaggcggacggcccccccgatctccccggagcctgtcggccctggctgcgtctgccacgccaccgcctgcggacctgcacctgccgccacgccccccccctgcag

SEQ ID NO: 625671 - DNA, 225 bp, Homo sapiens
  misc_feature (77)..(77): n is a, c, g, or t
  misc_feature (101)..(101): n is a, c, g, or t
  misc_feature (122)..(122): n is a, c, g, or t
  misc_feature (145)..(145): n is a, c, g, or t
agttcggcacaggcgacgcagccattgctcaggattatggggtcttaaaggctgatgaaggcatctcgtctcagggngccttctttactcattcgatgacnaaggcgtattcttccggcccnatcactgtaaatgacctccctgnttggccgctctgtggatcgagactttgagactagttcaggccttccagttcactgacaaacatgcgggaagtgtcgccca

SEQ ID NO: 625672 - DNA, 684 bp, Homo sapiens
tctgcctaagcttaaggacctggcatttctcaagaaccagctggaatgcctgcagcggcgtgtagaagactgaaggtcaacagtggagtgggccaggatggctcgcatgtcgtcctctcccgttcctcaatgggatttcgtggctggttatgtggatggccaaactgagggcatacagcaggtagtcggcgccttaagctagtgcgacaaccattgcactggccatctatgcggctcaggcatatgctgtgcccaacgtggacgaagacattaacgggactatttgcagttgctacgcagggggcccgactaagctctaggtgccagtggaagaggcaggatgagcagctcagccttcaggtggagacacttaatctggattccccagcggtcatccattatgctatctccaatttcctgccaccttcatcctatgcctcccttcctgcagatgttggacagtagttcctcagctgcaaccgtggattccttcttccccttcctagctccatgggactcgccccaagactggtggcttcaaggaccacaagccccttactcttcaagccctgaggtgtggagtaggagatgcctctgatcgtcagtattctctctggcaatgtccccacggttctccttcctgggagctggctccataacttgattttccccaaacgtgttgca

SEQ ID NO: 625673 - DNA, 238 bp, Homo sapiens
attgttcagtgctgtgtgcactccgtttatgtttgcctttctgggcctgattcctcaactagcacatcgatgcagaacggttgttactaaatctccaaggcagaaatggctacagtgccaggctcgtgctaggaacggagaggtgctattactatttttttaattgtatttgatttagtctatttgatgtgattcttttcactcccgttgccttccttcttccttctccccctgcttg

SEQ ID NO: 625674 - DNA, 180 bp, Homo sapiens
ggtgcctagaggatccccaggcaaagctcctacctgacattgtattatgtctttatttgctcattgctgtgtccacactaggacgtaaagcttcacagggagcaggtacttgctctgtttttctaactgcgggtacaaagcggaagctcaatagatatgtatccaaaggtaccgagctcg

SEQ ID NO: 625675 - DNA, 1311 bp, Homo sapiens
  misc_feature (401)..(401): n is a, c, g, or t
ggccgcccttttttttttttatttctcatttaactttatgaaaggggtctcaaaattctgtgacaaattttgggctcaagttgtggtttccattaaaaagtacgtgattattaaaaacataataacttaaaacgtgccacagcgcaaaaaagaaaaccaaaggtggtccacaaaacattctcctttccttcgtgagaggttttcacgagtgcatgtgttactcattaaccgagctcttttacttactaaacttaatgtggccaatgtgaaacaaacgagttcgtgagaacgcgttcttccaccaacgtggattaagaaggtgggggtggcaggttattgagggaaataatatctcatttatagcctctcgtggagccttatcggtgggccagaacgtgtgnggtgcaccttgtggcccgagcctccgagcaagccgtctcttgtggtccaactgtgcttttggtgagtgaccagcccacgcgaaaatgtggtacgtggtctacatattcagcgaaacagacaagaggcgaacccaagagggtggactagttcgtgagaaagggttctcaaccacacatgtgggcctggcccgagggaacccatttcaacacaaacgggccagctatcacgcgagatctctcagagaaattctgagggcctatctgtccgaggcgttattacaccagaaacagcggggaatcaatccttattcctatcaagctcagccaacacttggctatgccaaggtggagccggtgtgcgcaaactcccaataccagggcggacatacgccgggcgcaaatatgggcctaggactgggctccagggaataatcaccctagagccagtggaagaccaggtaggcataccatagggggggccacaaatggggtagtcacccaggcaggcgtgcaccgaagaaacaactcggaggaacagacacccagttgcgtgcacacttggtaagccccacattgggctccgccgaaagagagctcgacgccaagcaccagcggggcagcatcgcaaacgaaatgataacaccccagggttaccacagtaaccggggcgccacaccaggggtacgcccaccacagggggctgatagaaacacacgccattcgactgcggcaacacagaagagaagcccaaacacccagttgtgaaaccccgacagaagggaccacgggcaaccacaacacaccgcggaggtggctgcacacaaaaaacaccacgtcagcgtcaagtcgcaccagcaagaccctacacaagacagatgctcgacgagcgagcgcaacgaatggtcgtcga

SEQ ID NO: 625676 - DNA, 237 bp, Homo sapiens
cccgggttcttgggacacgtgcttcttacaaaagtgccgctgcaatatacagagtacctctgcaacaattatggtgtttttcttaaagtgaaagactgggtgggatccaaggaatcacagcagtagatggacaaaccaggagcatccccgagttatttacaggaaacggagcaacaacacacacgaaaggtacactttccaatcaaggaattcttcccaacaacttcaactttagct

SEQ ID NO: 625677 - DNA, 141 bp, Homo sapiens
ccctcaccaccacccacgatttctgggtcgaaggtcagacggaccggagtaccaatggtgtcacagcgggccacatactgatcccgcaccgttccggtctccaaccacactgttaatagctcgtcaaggtggatgagaagg

SEQ ID NO: 625678 - DNA, 916 bp, Homo sapiens
tggttgggttggttggtttttccttttacttttgggtataaagttcctctactgagttaaatttgtggaaatagccagggcctctagaaagcgtgggggggtgtgttcccatttgggcgggggggtcatcacggtccgtttcaggatgagggggccaaactgcgggcgtgtgtaaccacctcggtatataccgctcgccacacaggtggcacaactctccaatatgactgaggcgggcgacggggccaaggggcatgtggatagggggctcggggtgtgtgttacaccccgtggccatataacgcggtcaccgtggtaaggcggggttgtcggcgcgggggttgggagcacacgggtgggcgcgtggcggggttgcgcgccgtacacgcagagcgcgtgtggcgcttatatcttgtgtgggcggtggggtatttttcccacccccgtgggagtagagcgcggggggaatgggcggtgtgggagaggtgtaccccgcgtccagagatctgtgtgcccacatatatcaatgtgggtgcgcggcgctctctctgggggcctctcacaaaagtgggggggcgtcaccctctctgagagacaagcgagcgtttacgcccctgtgtgtgtcgcggcttgcgcgaaaagacagggtgtaaaaggggagagaagcacaggagatattggtatctaaaaagaggcgagtatgtgctgacagtgatgtgtgcagagtaaacccgccctcttgttgtaccctgggtaataaggggggggacccctggggctaagggctaatctcatatttggggcccctaacggggggcagccacctattcttttgagcggttttgacacaaaacggtcgtgggagactacgcctggagctattaataaaaaaactcgcggggggggaacactctta

SEQ ID NO: 625679 - DNA, 528 bp, Homo sapiens
gctgaatgaccgtatggagaacagctgtcctcaccaatcaggaatactaccatggacttcagtgcaagggagaaatcaagttctgtgtatttatctaggataggtccatggacagggcatgttgaggtccatctgtggcagcagtgaacattacccacatctatctatacccttatctggcaatccagtgctacttcaatttggcaactgatgggcacttagtatttgtacacagaagtcctaaattctaacaagatacagagccagcttatcaactagtcaggaaagcaggcaggtgggcaactaccgagaatactaggaaactgtgactgaaggacaagcaaagaactgttaagaggacaattaaaagtgcaattaatatttatctgtgaaggtgccacagagtgggtagcaactgaattgggtcttgaaggaggaggaactgttcaagagaaagaggaaggtagaaaagttcaatccagactgaacatgagtttgccaacttttatccattgtgctgtgatacta

SEQ ID NO: 625680 - DNA, 127 bp, Homo sapiens
caggctttgacgaagcacaagaccctccaacacgatcggtgctgtaatgagcatagacagacggactcacgagccatttcctgagccccagggctgaatcccccctccttgaccccgaacaccgata

SEQ ID NO: 625681 - DNA, 124 bp, Homo sapiens
ggcggacctctctgctcccagattctagaaacttctgttctactttatacttctatgagatccacttttaaaaaacacatagtgttatggctgggcgcggtggctcacgcttgtaatcccagca

SEQ ID NO: 625682 - DNA, 538 bp, Homo sapiens
  misc_feature (357)..(357): n is a, c, g, or t
tctgtccctggtcaactggatttggctttcccgtgctttcccgggaaacccctgtttggggttttgtgggtttggggggaaaagggccctcttcctaaatgtaacccgcaagctctcccaaggcccccggggcctggcttttgttagggtgtggaaaatggtggcccccctttccccgcttgtgttgcccacaagtccccgggtgttgagggggtggttcaacccgccccccccccctgttttaaaaaaggcccctttgcccctttcaaaaaaaaaaggagggcaagcccctaggcctttgggtttttggtaaaggggggccaccccaaaggttttttgggttttgatttgaaaccnggggggggggggtgaaaaactttttttggcccccttggggccccccccttttttccccttttgggttcccggggacaccaaacaaaaccccccggacaaaaagttgtttttaaaagggctttggggttttttttttgccccaaagtttttgtgtttttcccaaaaaattttttttgcccca

SEQ ID NO: 625683 - DNA, 509 bp, Homo sapiens
gggcaattcaaattctacagccatcagactggaaactgaggaaagagccaatgttgcagttcaaatcaaaatgccatctgctgcagaattcctttctgcttgggagaggtcagcttttttttctctatttaggcctaaaactgattggaccacccatattatgaaggacaatctgctttcctcaaagtccatcaatttaaatgttaatcttatccaaaatcaccttcacagaaacatccagaataacatataatctaatatctgtgcaccatggcccagagggttgacacataaagttaaccttcacacagtccttaatgacacaatgcttagcagtgttttctgcgtcttgatagaagtagcgaaactcctgtaaaagatgttttggcactctctaaaaagacttgaagtctttaagccctaagatgtggtttaagagaaagattttttccaaagggggctacttagcagtagattcagtgtctaatgtcttctggcttgcaaatgtg

SEQ ID NO: 625684 - DNA, 114 bp, Homo sapiens
tgcggcgatgaggggccactgtgggagtgagcattattgagatccggtgagggagcttgagacgaagacgggtctcgccgacggtgcctcaagacaagttcggctactgcagtg

SEQ ID NO: 625685 - DNA, 481 bp, Homo sapiens
  misc_feature (129)..(129): n is a, c, g, or t
  misc_feature (133)..(133): n is a, c, g, or t
  misc_feature (136)..(136): n is a, c, g, or t
  misc_feature (147)..(147): n is a, c, g, or t
  misc_feature (154)..(154): n is a, c, g, or t
cgagaactcttggcacacatcaaagagcagacaaaggctaagctctttgcaaagcatcaagctcgagcccatctcttccagacctctaaagagacccgggtttgttttgggggccccccttcccccctncccnggncttcaaagggntcttttnccccaaaaaaaaaggaagggggcctccaaacttagaagtctcttctacccctgaaacaaaaatggaaggttcgactggtgtcattattgtcaatccaaactgtagatctcctagcaacaagtctgcccacctccgggagaccaccactgtactacagcagtctcttaacccaagtaaacttccagaaactgccactgacttatctgtgcatagttctgatgaaaacatacctgtgtcacatttatctgagaaaattgtttcatctacctcttctgaaaatagcagtgtgcccatgctttttaataaaaattctgtccctgtaaaaaa

SEQ ID NO: 625686 - DNA, 623 bp, Homo sapiens
  misc_feature (560)..(560): n is a, c, g, or t
gtcgcgggcacggcgccgccgcgagcagcgcgtcgcgcatatagctttcagccctttctgaccaaagaaccacgctttcctactgagcgctacactcattttcaggctgcctggtcacgacacccaccgcaccattcggccaactcaaggaggcttgatgaacgatgagctgcaacacctgaaaaaccttggcaagacgtcagcgcagtggctgcatgcggtgggcatccacagcgcgtccgacttgcgtcggctaggggcggtcgatgcctaccgagccgtgcgcacgcgcgggtttcgagcttcgcaggttctgctgtatgccattgaaggggcattgatggatgtgcactggaacgacatacccacggagcgcaaggaggccttgaaccgtcagttggaagcgatctcagtacatcagaagaactagagcggcactcaaacccagtgttgatgggcattgcaaacgagcgtttgagaaaactggatgaagcaggaaaacaaatgttgactctcaaatgagaatcgttatgattatcacagctggtcgcgagatcagncgataactgaaagaccattggttcggactctcagattatctcctcagcagggcaccactcggg

SEQ ID NO: 625687 - DNA, 338 bp, Homo sapiens
  misc_feature (254)..(254): n is a, c, g, or t
  misc_feature (285)..(285): n is a, c, g, or t
tcacgaccactaaaagttgacatttgcattggcaataacccccccccccccgcttttttttttaatggcagagtttcgctcttgtcacccaaaccgaagtgcagtggtgtgatatcggctccttgcaacctccacctcccgggttcaagcgattctcctgcctcagcctcccaagtacctgggattacaggcatgcaccaccatgcctaattttatattttttttagtagagacagggtttcaccatgttggtncaggttggtcatgaactcctgacctcaggtngatccacccaccttcaggcctcccaaagtgctggggattatagggcgggacat

SEQ ID NO: 625688 - DNA, 187 bp, Homo sapiens
agtagctagaatacggtgcttgccacacactcggcttattgttaagtttttattttgtagagatggggctcaccatgttgctcaggctggtctcaaactcctgggctcaagtaatccttctgccgtggcctcccaaagtgttgggattacttggcaagagccaccacgtctgtctcgtgcccaccct

SEQ ID NO: 625689 - DNA, 797 bp, Homo sapiens
gccaggtatctcaggttgcaatggtcagaagtcccagtgagggagctagaaacagagctatctgttcctcatagtgccagtgtgtttacatttataggaccacatatccctggtttctgggggagggtttcactgttacatcaccaagaggcccctgaaaagaggaaaaaaaaaaaaaaagaggccaggcattggtgtggcctcacgcctttgttaattctcagcactttgtgggaggcttgaggcgggcggattcacagggcctccagagtttcaagaagcagcctgttggccaacatgtggttgaaaccccgttcctctacttaaagattacaaaaaatttagccgggcgttgggtggttgcattgccttgttaatctccaagaattactcaggaggcttgaggcaggagaaattcgctttgacccttgggaaggcggaggtttgcagttgagccgagaattcattgccatttgcacttccagcctgtgggcgacagaagtgtgagacttcgtgttcttcaaaaaaaaaaaacaaaattaaagtgtgtggtttgctgcttatattgggggggtgataatatgctataatatgggggggtgaatgccaaatgttctctattctatttggacacttccccacgggaggtttttggcgtttaagagtttcggtgtacccccagaaaaaaaattgtgccctatacccttgaagtccttacttgggtactccttgacacctcaaggggaaactccaataccgggtctggagggtgtgttacaaaccacctggaatgtggt

SEQ ID NO: 625690 - DNA, 289 bp, Homo sapiens
gtgtatcttttaccagcatgtcatgtgatgcatgtgagagacgggctcatggacttcctgatccttaagctatactcaatgacttgagtttccttctagtagaggtcttatgcttatcatttgcataaatcacatttctacagtggtaggtttcgtaatgcctggtgcataagatcaggctttttaattagaagttcgttttcattaccaatttaatatttgtattaagagtgttagaaaagtataacatataaaaccataagccctaaagtaaggctgcctgggcttc

SEQ ID NO: 625691 - DNA, 458 bp, Homo sapiens
  misc_feature (6)..(6): n is a, c, g, or t
  misc_feature (13)..(13): n is a, c, g, or t
  misc_feature (136)..(136): n is a, c, g, or t
  misc_feature (175)..(175): n is a, c, g, or t
  misc_feature (193)..(193): n is a, c, g, or t
  misc_feature (231)..(232): n is a, c, g, or t
  misc_feature (269)..(269): n is a, c, g, or t
  misc_feature (322)..(322): n is a, c, g, or t
  misc_feature (396)..(396): n is a, c, g, or t
ccattnacattgnattagcccttataggtaatctagagccgatttaaagtgtatggtccggatgtgcataggttatccgcaaatactacaccatttccctataagggacttgaaccccatggactttagtatcccngggggttcttggaaccacccacccatagggtcaccatcnggacaactatagtaccgngtttatttcctattaattcaggttccatttagagtctnnaactaaaacctaatcatttagtcacagtgtaaaaacnaatggaaataacagctcaaatcttcaaaatattactatagcattatgtttaanataatctacaacaaaaatgtaccattttccaagcagtactacatttaggagcccttttatagaaaataatttcntgctttgacccccgttcccagtgtggaatctagtatttcggttaacatttgtgtgggcatgt

SEQ ID NO: 625692 - DNA, 88 bp, Homo sapiens
ggaggacaccgagttccccgtgttggcctccagtgtcctgtgcttgcgtgagcctgtcctggctggctggtgatctgatgcccctgac

SEQ ID NO: 625693 - DNA, 197 bp, Homo sapiens
tgtttatcgatgccaccacttggcttcccaaggtgctagcattacaggcatgagccaccacgcccagcctgttctattaaaaacatcttgaccttttttttttttaaggtttatgatataaaaacagtcggggggctttccctcaggtgggatatctgaagtggtgggagcagatgtagctccattttccatttaaa

SEQ ID NO: 625694 - DNA, 284 bp, Homo sapiens
accccatgcacttgtcaacagtaatttatcacacttggtcatgctagaaagatttgcctccaaagtatctgatttgtaattaattcttcttggttttagaaactaaaatgtacgctatgcaaatgtgttagattcaggagatagagcaccaatgaaacacaaaacaaattagggcttaataacgatgcatgtgctatatgattatggtaaaatataaaataagtatatcaaaagggcacgcatgaagaattgaaagaattcatccttggtatattaggctacgt

SEQ ID NO: 625695 - DNA, 347 bp, Homo sapiens
acttcaaaagaaccttggtctccacagtcttttatcttaacctgaacattccctttctatcattcccgggtcttgaatcaaactcaaccaattatcaaccagaaaatgtttaaattcacctatagcctggaaccaaccaccaaaccccaataccctcccatcccccaacccccctgccagccccaacccctgccacccccactccctctgctttgagttgtcccacctttctggatcaaactgatgtatttcttaagtgtagttaattgatgtctcatgcctctctaaaatgtataaaagcaagctgcatcccaaccaccttgggcacatgttctcaggacctcctg

SEQ ID NO: 625696 - DNA, 239 bp, Homo sapiens
  misc_feature (80)..(81): n is a, c, g, or t
  misc_feature (223)..(223): n is a, c, g, or t
aggaaaaattgacattacttgttagaagagcaactctgaaagaaaacaagcaaattccaaaacagaaaagattcacaatnnaaaggtgcatacattaaagggccacactgtgtaatactgtgccaacttatgcgagtctcattgttcaggatgaaatgtgagattgtagtttgaatgctataagcaggttccaagataccccaaatgactgtaagccagactngaagcatgtcaaaaag

SEQ ID NO: 625697 - DNA, 365 bp, Homo sapiens
  misc_feature (309)..(309): n is a, c, g, or t
cactcattttgcagcaaacctgacccacaccgaggccaggccagccccgcggtcctggtgggtgagtgtgtctgggtgctattgctgtggaaacgtcggcgtgtttggtcatggctgccagatgccgtccctaacactttcccatgcttatttgacttatgtcattaccttacttctctgaaacagtctgaattccaaaccctgtgtggccctaaggattttggataagggactatgtacctataatataaataagccatattatttacaatcatgagtttctgaatgttcactttttttatttttggngacagagtcttgttctgtcacccaggctttagagtaccacagtgtgatctcggctc

SEQ ID NO: 625698 - DNA, 359 bp, Homo sapiens
  misc_feature (171)..(171): n is a, c, g, or t
  misc_feature (195)..(195): n is a, c, g, or t
  misc_feature (247)..(247): n is a, c, g, or t
gagaatatggaacaccacaggagcaactgaatctggcattattaactttaaattttttgagcctgcccaaaggccagatgttatcagcagctgaacagcatctacagaaaccagctgcaaagacagaagcagaagaatgatttggcagagagatccaataacaaaaatttnggaaataggtaaaataataacttngggtagaggttatgcttgtgtttctccagggccaaaatcatcagtcagtttnggataccatcaagacacctggaaatcttgtcatggggccagatgccaagggaaggaggttccggggaggttcctggagggacccccccggtttgcagccatgttccaaggct

SEQ ID NO: 625699 - DNA, 313 bp, Homo sapiens
  misc_feature (64)..(64): n is a, c, g, or t
  misc_feature (108)..(108): n is a, c, g, or t
  misc_feature (112)..(112): n is a, c, g, or t
  misc_feature (116)..(116): n is a, c, g, or t
  misc_feature (120)..(120): n is a, c, g, or t
  misc_feature (125)..(125): n is a, c, g, or t
  misc_feature (146)..(146): n is a, c, g, or t
  misc_feature (148)..(148): n is a, c, g, or t
  misc_feature (150)..(150): n is a, c, g, or t
  misc_feature (160)..(160): n is a, c, g, or t
  misc_feature (186)..(186): n is a, c, g, or t
tattccgggtttggtttttttggtttggtttttttcttttggaaaggcaatgagctagtcccanaaaggatccttcagttacataccatttgtttaatgaaatgtcanggcnctgntcanatttntgtcttgttcttcccattggnananacactttcanagcctcttgtatttggaaggctggangggccccgactttggaaaagggttttgggttccctggttttgttttgatttttttttttgttttgattttttttaaactaaagctaaataaagcttgtggattaaacagaataaatttttaaattta

SEQ ID NO: 625700 - DNA, 798 bp, Homo sapiens
  misc_feature (626)..(626): n is a, c, g, or t
cgcagggctcatgcctgtaatcccaacacttgggtggtgaggcgggcagatcacctgaggtcaagagttcgagaccagcctggcaacatgggaaactcggtctctactaaaaatacaaaaattagccaggtgcggtggtgtgcacctgtaatcccagctacttgggaggctgaggcaggagaatcgtgtgaactggggaggtggaggttgcagtgagccgagatcacaccactgcactccatcctgggtgacagagcaaaagtctatcttaaaaaaaaaaacggaaagtcatggtcataagtcatcggtggtacctctggtggcattgggtcaccaggttgggagagaaacacagaaggtgccgacataatttctgggcaagtctcttttcgggacacggcaacatattctcagtggcaacaaatatcaccgagggaacgaaggtctggggacggcaaaatccaggcgttttcacctttgcggggattgcgccgcagacagaaaccttatgccggctcatttcttgttaccaggctgcgtgcgtgggtagctttaaccagtcttcatggccaggctatacggcacgaaagaaaccgagggcgaaagggaaactggaggcccattcngtcccctaatgggcacagcgctcacatccaacacacatcgggccgaattctgcgcgacagcggactcgccggcgggggctcaccccaacgccgggcggttcaagaggcagccgcagatcaaccccaaattggagctccaaactcggcggcgcaaagaagcaaaaagggctag

SEQ ID NO: 625701 - DNA, 275 bp, Homo sapiens
agggggggcccccaaaaggccccccccccccgggggttttttttacccttttttggggggggaggggtttttaatttttcccccctcccccaaaaccgaagggccaaaaaccggtttttggttttaaaaaaacgtttttttttttcccgggggaaaaaatttaaaaagggggtttttttcccccccccccccaaacccgggccagggggggggttttttttttaaaaaaaaaagggtttcccccacccttttccgggggtttcccccccccccca

SEQ ID NO: 625702 - DNA, 147 bp, Homo sapiens
tacctatactgtatgcggcgggagctcgacgaatccctccaggtcgctgaaggttgaccaggatatactactgagctgctaaagtcctaccagtggaagatgctcaggacttccctcctttgctggagcagctgaacgagcagtttt

SEQ ID NO: 625703 - DNA, 538 bp, Homo sapiens
ccgctcgcgtcttgtctgtgtgcctgcgtccctctctcctccgccgcgcgcgcggtgggggcgcgcgcgcgcacgctctcttctctctcgtgtgtgttgtgcgctcctctcgcgcctcgcccgccgcgcacacgcgtggtcttctctcccgctcccctctcgctgcgccctcgcccctctccttctgggtgtggctcgccgccctctccttgctcccacgacctttgtcttttttcttgttgtgcatgtctctccgttgtcggctcctcacctctctcttgtggtggcgcccctccctcctgggtgggggggcgtgccccctcccctccccctccacactcctccccctctctcatcttttcttctccccctctctttgttgtttatctcccctctcacttctgctcctctctctcttctttgttgatttttttttatgatatatttttttttttttactaaataaaatgattgttgtttctcttccactcttttgttagaaaaaaaaaaaagaaagaaaaaaaagggggttgggaga

SEQ ID NO: 625704 - DNA, 506 bp, Homo sapiens
tgtgtgaatgggatcattacaaacacactcatgccttccaacagttcccaagcatactcattccagcattacccaaaagtccaagtccaatgtctcatctgagacaagttatgtaccttctgcctatgagcctgtaaaatcaaaagctagtcacttcctagatgcaatggggataccggcatagggtaaatacacccattacaaatgggaaaaattggccaaaacaaagggactgcaggccccatacaagtctaaaatccaatagggcagacattaaacctcagagttccgaaatgatctcctttgactccatgtctcatatccaagacatgctgatgcaagaggtgggttaccacaaacttgggcagctttgcccctgtggctttgcagggtgcagcctccctgctgatagcttacacaagttggtgttgcgtgtttgtggctatatccaggatgcatggtgcaaagccatcagtagatctgtcattcaggggtcaggaggatgg

SEQ ID NO: 625705 - DNA, 139 bp, Homo sapiens
taggaaggactcatcttctaaggtggtacttgattagaaactaattcttagagaagaaaaaagaggcaaatagttcatttaattcttatttaagcagctgagagggccgggggctggtattccaggccgggccgggcgg

SEQ ID NO: 625706 - DNA, 495 bp, Homo sapiens
ggccagcgcgtctattcaggacactttgcgaggccgaggcaggcggatcattgagccaaggagctcaagaccagcctaggagttcgagaccagcatggacaacaaagtgagaccccatctctataaaaaaaaagtaacaaaattagccaggctcggtagcatatgcccgtagtcgcagctactctggaaggaggctgaggcaggaggatgacttgagcccaggaggttgggatgcagtgaactagtattgtgccactgcactccagccagggccacagagcgagactctgtctcaattaaaaaaaaaaaaaaaaaaaaaaaaaaaaaaaaagggggtaaccggaaggaccccccccgggaaaacagggggggaaaggagaccagagagccggggagagagaccacctcagagagacgagacagacccccctgtgattaaaacggggcggggggccccccaagagtctcaacccggcagggctttaaaggctgtgg

SEQ ID NO: 625707 - DNA, 206 bp, Homo sapiens
tattcctgtcccaggctaaggaatctctggcaatttattactgtgcttgcccaagagaacgaggtatgcgagcgagaaaggtggaatcccaaatgttgacggtgctgccaagactgctgtggtctgagtggacaggtgcctcattagcttactatagccatccccctacatcttgagactcctcctccatatttaacatgcgagtc

SEQ ID NO: 625708 - DNA, 683 bp, Homo sapiens
gattgcggagcttgtctgcggtggcggggcgcctctcgtctcccgcggcccaggctcgaccaccgttctccctccctgtcgcagccgagccgcggcagcaagagccccaagccacacgcgggcgggcaaaggaagccggcccgggtctccggaaaaggttgatcccaggcattccaattagaacgtgggagcaattttgcacaggcacgggtcccaaaaagggagcaaggaaattggccggaaccccaattcacaggggttaggaagtacacttaccaaggggactgctgtgcggctgggatttgggccatttcgaggcccacattacatcttgggcacaccaactttgtgggacccaggttggtgaacacacaggtgggtatgggcgtagacgctcagggaatgcggggcctggcagatttgtacgaccaggaaagcggttaattaaaaggtgggataacgcctaaataggcggggtaaccacaagcggggagtgttaaaaagggagaactcgttttaagaggttacagggttaagaagaataaagttgttgcccgtgtgaggttgttttctgggggaagttaagtgcaaggaaaatatagccgcggaagcagtcttatattgtgtgggcgaggttaaagcggaagggcaattttaaaatgtggagggagattatattgggc

SEQ ID NO: 625709 - DNA, 210 bp, Homo sapiens
  misc_feature (7)..(7): n is a, c, g, or t
gcctctngggccagaggaaggaaggggccccctttccaggggaaaaaaaacccatgggcccttccctaatattggaaagggttcaaattccttcccccgcccctttttttaaaaaccaaaaaaaaaaagggaagccgggcatttggggccccaaagggtttccgggttttggggggaggggccccccaggcccaggggttttttttttta

SEQ ID NO: 625710 - DNA, 150 bp, Homo sapiens
gctgctgttatccactcataccactcgaacatgacttactccagtatccttcgagttctggacggcgatcgatacgaaggccccttcaagccccctcacctggacaccaccaatcccacctgtcacaccctccgcagtcacgaggttgtc

SEQ ID NO: 625711 - DNA, 281 bp, Homo sapiens
tttcggacggcacaagctgaccaggcagtaatgtaatactttgcaggtaggtcaggcctataccatatcaaggacagtatgccattccacagccagatttgaccaagctagcaacagttaggcaatgcaaacaggtctcataattcccatgaacgcatggacaacaccggattcagtggtatgggatacctacagtgtttatttctagtaagagttgtagtgcaaagagacgaggccaggtccccaaggttctctagcttgaccatctagtttaaaagcaa

SEQ ID NO: 625712 - DNA, 200 bp, Homo sapiens
ttggcctctgtggtttccttgcagtatttggcattccttggattatagatctcttccttcatcttcacatggcattctccctagggttatgtctttgtgtccaaatttccctttttgggaagaatattaatcatattgaattagatgcccactgtactgttgaatgagttcgtgctgtgtgaatggaatgtgctctgtct

SEQ ID NO: 625713 - DNA, 968 bp, Homo sapiens
gctgcactgaccagacgcccctagggggccaggcgagggcgggtcccaggtgcagcggatgcagaggagagaggcccgggcgcggcgcgggggatggtgctgatcccgggccctgagtggcagtcagacggcggctgattagctccggtttgcatcacccggaccggggtattagctccggtttgcatcacccggatcgggggattagctccggtttgcatcacccggaccgggggcctgggcgcgcacgagactcgcagctggaatgtgggagtgcggctccgagcgcgttcgctgctaggacccgggtcagggctggatgctgtggctgggatcccgatctcgtgcagcagcgccagcgggccggcccacctgctgttgccctggtaaggctctgatgccccggtggtcgcccggtggccactcggaacgacggggcgagatgcgagccatccctctggcttgctcctgccgggttccctgttcaggtaaagaagcggttggagttggtattgacaaattttagcattccgcagcgtcccgtccagcaaaatcgaacgctcgagttgggtctcagtccagactgacaccctggctgttgtccctggaggccgtctactgctccagatcgtgcaactgctgttggcactgctccgtcttggggccgttgtgctctggatgtccgatgaggggggcgggctagcggtgactgctcttgtctacaggagtgagtattcctggcaagtgtccccgtccggaagccttgccgttgtgaagcctagtgcggttggcccgacagcatgtgggcggccctgaggtctgttggaccaggcctagctttcatcgacctggatccagcttgtgaccgccgtctacgggggcggccccaaggcgacggactgcaatagctgcaagaacacggttcgccgaaagtggaacaccgtggagccaacggagagacgccaggg

SEQ ID NO: 625714 - DNA, 275 bp, Homo sapiens
ctgagccctgcggaacctcggcgcccggacccaccccgcccgtacctgcacttatttattgttgttatttcttaccgcggacgccccgcatgtcgggtcctcccgcccgtctcccgcgcagcgctagcattctccagtccctcagtcccttcccgcgtcggtgcgcctgcagcctgacggcgactgcgcctcacttcagaatcactgtgcaccatcgccggatgtaccccgtcgcctgggcaactgcctgggcctccgactgctgtgtgggcgcc

SEQ ID NO: 625715 - DNA, 765 bp, Homo sapiens
taaagaaacgggaatcactctgttgcccaggttggagtgcggggacgattatgggctcactggtagccttgacctcccagggcttaaagaatgtcctccacactttagccacctgagggagtgggagactacggggcttgtaccattggtacccagctaatctttaaagataggggttcactatatttggcccaaattgggtctgggaactcctgagctcatggtaatccggcctgcctcgggttttcccaaagcacggggactatatagggagtgagccagcaacacacaagccagatggattttggattacacggaggggtgtgggggggcggagaaccctgctgtcaggacgcctcggtactcatatcccctcaatgaggggggacctggtacatatccgggatcctgaggaggtaggcaccgggggcttcaaggccctatccggcacctttgggtttaggaattggtccagtctttgggagtcaaaccttttttgggtgttaggtcatcttattcgcgaaatgggaggtctgggctccttgtcggcccaggttggctcggaaagcggggtagatcttccacgatcacttggaaacctttttgcccccggggttcaagggcattttcgtgcgttaaacctcccgagggagcgttggggctcacagggtttcaccgcggcattccaggttttcacgacgagagtgcgtttcacacgttgtgcagggggctcacacctttgactcagtgtttgccccggggcta

SEQ ID NO: 625716 - DNA, 178 bp, Homo sapiens
ttacaacagctcctattcaccctggggcagggcacctggaaggcctggagggccagcagaccaccacctgttttggtaaaaaaaaaaatttattgggaacacagacatacctatgaatttaagtatggtctatggctgctaacatgctacaacagcacagctgagcgcgggtatccgg

SEQ ID NO: 625717 - DNA, 483 bp, Homo sapiens
cagttattatacaatgcatcataccagtcatccaaaggtggaataccatagtcatcctaatatcaaaaaagtatttgacaaaggtcaaccttcattctcaattatttaacaatttcaagttagtaaactaagaatgttattcattgccatttgccctcattctcaattatttaacaatttcgagtaaactaagaatgttattcattgccattaggaggcctaatggatatcatagatctccctagctgagatcaaaacaaataaaaatgtagatgtaaagcaggtatagataaaaatagacatacaatgtagaatagcataaatataaatatctaatgtgcgtatacatgtaagtagtgtggataaaagtgccacctttgcctgtaataccagcactttgggaagccaagggggcaggaggattacttgagtccaggaattcaggaccagcctgggcaacatagtgaggatccccatctctac

SEQ ID NO: 625718 - DNA, 146 bp, Homo sapiens
ctcccacaactaaactgcctgctgaccatctgcctaggcagtggagctgtggatgcttaatggctttcctcagcaccttcctaatgtcttagttcgcactgtcaccattgtactccagcctgggcacgaagagcaaaactccatct

SEQ ID NO: 625719 - DNA, 106 bp, Homo sapiens
tagccacctgaaccccaaggcagcgcgagaagatgacccagatcatgtttgagagcttcaacaccccagacatgtacgttgctatgcaggctgtgtattgagtacg

SEQ ID NO: 625720 - DNA, 617 bp, Homo sapiens
  misc_feature (329)..(329): n is a, c, g, or t
  misc_feature (462)..(463): n is a, c, g, or t
  misc_feature (496)..(496): n is a, c, g, or t
ggtggtgtgcgagagggccagactgttgcgccaggtacgtgcgtcgagactgcccggctgtcccttccccgaatacagtttaatggcgatgagtcgtcccggtctccccggagtttatcgtgcagacggtgtcttacagtgctcgctgaacgagaacctgattctgcaatggatcgacctactgaatggtggcattccctaagtcagccatccgtcatccgtgtggcaaggtccgcaggcagtgtggtgtgtggcctcgtcacatcagatggatgatgatagcctccactccatagcgttggattatccggaggacaccttcgcgtcgnatgtgaagactgaccaaccagctgcttctctggcgtcggtgattgagcgacgaatacgaccgtacggcacagaccgcaacgtaacgtaggtagcgatggcatgcatgtcacgagtcgcgtcagaaccgcttcnngggccgttcgcgggtgggcagggtgctcgtgcnactggcctgccaacctcccgttccgcctgcatgccccgtcaaagccgctgccgatgggagcacaagctggcttctgccgccacttttgctccgtaccagtgtcccacgtttaccttagcca

SEQ ID NO: 625721 - DNA, 169 bp, Homo sapiens
acgcatgctacatactctatataacactgtagagtacacgttcacgtttagcctgcccacttttgtattcaaattcatgaaactgaaggtttattctgatcataatctgtgtacgtgctacatttgataatttattatttacagcttagaatattgatttcttgaatac

SEQ ID NO: 625722 - DNA, 258 bp, Homo sapiens
tgcataatatgcaggtctaacccctataccttctgcattatgaatttactagaaataactttgcaaggagagccaaagctaagacccccgaaaccagacgagctaccttagaacagctaaaagagcacacccgtctatttagcagaatattggtaagatttatacggtgaggcgacgaacctaccgagccttgtgtattgctggttgtcctcgtatagaatcttagttcatctttcatattttgccctttctggttgt

SEQ ID NO: 625723 - DNA, 221 bp, Homo sapiens
cacccaccgccagtgtgtactacagatggcttatagctgtccacggggttggaagacgaggcaaagggaaggtttctaggccagaatgttcctatttagaggggactcaggttacagtctgtgttatgtatgtataccatttattcaatgctactgtgtatataatggaaaacttaagtccagtttgaaacatctagtctttctaggtgtttaaaagtgta

SEQ ID NO: 625724 - DNA, 136 bp, Homo sapiens
ggtcgttctagaggatccctgctgcttctcctcctcggagacactgggatggccagacgtgctttctgcttccttgtgaagggctactttcaacagctatgaggagagtgaaaacagaggctgttggagagagacc

SEQ ID NO: 625725 - DNA, 419 bp, Homo sapiens
gtgtacccttctagtgaaatgtagaggaaggctcaaaggagtcaacatttagatctggaaggtcacaagtcatgccttgggacttaagaataccctgatagagaaaagagaagaggaagggaggccatatactacaacacagcctctcggaattagctagctccttatttgaactttgtcttgcattgtcctgtatttatcacagtttctgtagaacagctaatcaagtatatggggagtatatctatgccatcctccccttactggttctctgcacccacctgtcccactgcagtaccttccgtgctctgtgacttcaagagaagaaggggggaggagacccggattttatgttggtaagttatctctccttagcagaaggacttgatatttacaagttaaggaagaactgaaatgag

SEQ ID NO: 625726 - DNA, 778 bp, Homo sapiens
gaggcattgaggcagccagcgcaagggtctctgctgagggggtagagaggagcttgaggaaacctgcagatgagctgtaattgtctcttatgtaatagatagaggattagtactaactacattaacaaaatatagtcaaattaggttactaagatattgcttagcgttaagtataattagagcgataaatgtatagagtgagctaaagatattctatgagaaaatatgatcgacttgatgaagaggtactcgatgagggaaagggaaatacgatctgaacggtttgctaaagaacatgaacggaacggtcgagattagaacgccttctttcatgcgtggttacacaaaatgttattcaagacagtacaaatattgtaggagcacagagggatctagcaggagtccccgatcattaatatccaattagaaccgtgccatactgctttcaagcacttacaccatagaacggttgacgttaataacctagctgtaaagtatgagtggaaaggtggtaggtgattacaaataatttgaatggtgaatcttttaataatatgagattactcgcgaacggtgtattgaaattaccttgaaatctcatgaccgcaaggggtgattttgccgtgatttaaacgcctagtgaagcgcatttactaaaagagcagatgatccatgtgatgattttaattgggaagtggtaggttggaaacaattggcagaagatagatagtttgaggtgcgactttggatacagaaggtaggggaggggagaaacgat

SEQ ID NO: 625727 - DNA, 259 bp, Homo sapiens
cacgagtaccgactgcctcgagagccaggacagccatgcgcagagtgttgtgaagaaatacactcagcgctaggagccgctgggctcagggccatcccctccatgtacacactgccgagccatggagagcctcacaccatgccgaccaccgtgcccagtgctgcttgcacgcagacggtcagaaggctcacagggtccccgaacagagatcggaagctgcaggacagcaggtgcgccctcatcgtcggtgatcccagac

SEQ ID NO: 625728 - DNA, 150 bp, Homo sapiens
ccaagataaatcaatgttgttttgcatgctattgttaagctccacaggttcactgtgtttctgccgctgtcctcgagttgtaaccactgactggcaaggcttcttggcatcgatgtagaactgttgtcctttccactacagtatctgact

SEQ ID NO: 625729 - DNA, 241 bp, Homo sapiens
tgatgagctgggccgaaatctaattacgggagattctgctaatacatcaccatgacactaatgtgcaagaaacagatccgtcaggcagtggcaaccattactttttaatagaccactccatttccagcaatcacactaacaaaatcaggacagaggccagtctgcttggcggagatgcaaactcaagaacacttgacaaatgctcccctacacacacatatacacacacacacatggtttg

SEQ ID NO: 625730 - DNA, 108 bp, Homo sapiens
tacgaaccgagctttgtacccgagcgtggcaggtcgtcatcgatcgggcggtggaggccgtgggcgacaccggatgtggtcgcaggcggcaaagcgctcggcactgat

SEQ ID NO: 625731 - DNA, 1022 bp, Homo sapiens
ggggaacattggcgaggtcgaggctggtgttaatcggccgaggcggagatctcagcttccccaggagcagactctgagcccgcaagcgcggcgacggccctcggagcgatggcactgaaggactacgcgctagagaaggaaaggttcagaagttcttacaagagttctaccaggatgatgaactcgggaagaagcagttcagttttggaacccagtttggttcgggttgggtccatccgggaaccagggtgggctccttgtatgttggacctgggacgacgtgagccgaaggatgaccccggaaggttggggtggactcaattttgtgagaaatgccaggcgctacgcggaagctcttttggctgatgcccgtacaaggagcttgctgcctcaagtacaagggagagggagagtgggtaaataaaggattgtccttggacgtttacaatttgagcatcggctaaatgatggagcagcggagtcgggaccctggggatggtccgaagcccccagaaccagtaccctgctgaactcatgcgcagatttgagctgtattttcaagggccctagcagcaacaagcctcgtgttgatccgggaagtgcgggctgactcttgtggggaagttggtaactgtgcgtgaatcgtcactcgtgtctctgaagtcaaacccaagatggtggtggccacttacactttgtgaccagtgtggggcagagacctaccagccgatccagtctcccactttcatgcgctctgatcatgttccccagccagggagtgccaacaccaaccggtcagggagggccggctgtatctgcagacacgggggtcccggattcctccacgttccggggattttagatttgccgaccttgtggtcgggccgtggggaaattccgccgtggtataccgggctggttaacgggggagcccctgttgtccccctggggccagcctcggccgtgtgtttttcgcctgccgggggctccggggcgggtgctctcaacaccttgccgcgtct

SEQ ID NO: 625732 - DNA, 391 bp, Homo sapiens
aatagccacatttcagaggacagctctccttacggaaggggagtatatcagtaaatagtacatatggactacttctggcagaatactgtttagaaacatcgaattatcagcctccaggtcaatataaagtagtgggtttgaggaactgaaatgtggcttgtgtaccaagattgtggcgtgtgttaggcttgcctctcacatggctatgatcttgaataattggccggcaatcacgcctttcgtcaggctttatcttacattttaccgtaattgcgatttcttcttttttttcttatttttgttctgcgctcagtggttcttctgcaggtttgtctgatagactcctcgtgtctcagggattgggtgtctcagggatgcggggtccgcgttt

SEQ ID NO: 625733 - DNA, 535 bp, Homo sapiens
  misc_feature (464)..(464): n is a, c, g, or t
  misc_feature (517)..(517): n is a, c, g, or t
tacatcagctcggtaccatgagaccaggctgaggcaggagaatcgcttcaacgggaggcggaggttgcagtgagccaagatcatgccactgcactctagcttgggcaacagagcaagactccgtctcaaaacaaaacaaaacaaaaaaacaaaaacaaaaaacaaaacagaaaccttggaagtagaacacaggatgttaaggcattgtgggtaaaaagccagaatcagggtcataattttgccaagggtgtgtgttggggtaggggtcactacaggcaacaactgagcttccagcagcctgtaccctttccacagtcccctctccaaacccacaggtgaccctccacaccccaaagggtaagggataggtcatcaatgggaactcttcctgaaaaaaagaaacctttgtgctttgggacacagagccatgaggctggtcttgtcgtttcagcagcacatacaancctgagcttgggtctggtgttcccttctcctggagcctgctaagactactcangctgggtcggggatctcc

SEQ ID NO: 625734 - DNA, 207 bp, Homo sapiens
agccaatgggcccccggagtccggatgcccaccatccggggctgtttatgtttgagcccatcttggaagaaaaatgtgagaacgcctgttcagaacatggtggccaagccgggtccatccggtgccagggagccaaacacaatgggaaaggaggcgcagacgcggcggaaggatagggccgggcatggcccgccgagggagaccgct

SEQ ID NO: 625735 - DNA, 502 bp, Homo sapiens
  misc_feature (101)..(101): n is a, c, g, or t
gtttgtttgtttgttgagatggaatctcgccttgtcacccaggctgtctcaaaaaaataaataaaaatgtgcctgggcgcagtggctcatgcctgtaatcncaacactttgggaggccagggcgcgcggatcacctgagatagggagttggagaccagcctgaccaatacggagaaaccccgtctctactaaaaatacaaaattagctaggcatggtggcgcatgcctgtaatcccagctactcgggaggctgaggttgcgctaagctgagatagcgccattgcactccagcctgcgcaacaagagcaaaactccatctcaaataaataaataaataaataaaacaaaaaaatttgctgggcttggtggcgcacgcctgtaatccctgctatttgggaggctgaaacaagagaatcacttgaacccgggaggtggaggttgcagtaaaccaagatcgcaccactgcactctagcttgggcaacaaagtgagaccctgtctca

SEQ ID NO: 625736 - DNA, 169 bp, Homo sapiens
tctctacatctttgcaggcacactcatcacagcgctagctcgcactgattttttacctgaggtagggcctaggaaataaacatgctaggcttttattccaggttctaaccaaaaaaattaaaccctggttccgcagaaggctgccatcaggtatttcctcacgcaggca

SEQ ID NO: 625737 - DNA, 389 bp, Homo sapiens
cagggtttagcatcctccctgaaaagtaagaatttacagaaatgggcagataaaatccccagggagctgtttgattccatgaagtttgccctccccctttttggcaatgctgatggcagtgttgggaaataattgactgatttcacttcccctccgattcaagcaccagtttcagtgggacgggagatttccagtgaaatagtttggttttccctgaagcatttgcatattaaaaaaacccttccccaactatgtgtttttgcctccccctgttttttcccctcttttcaggaaaaaaagttcccaaagggtggagctgacaaaccccaaaccccttatttaacccccactttgtttttccccagaaattaaagaagggtcagccggga

SEQ ID NO: 625738 - DNA, 258 bp, Homo sapiens
gggtcaagccgagagctgattgagaatagtcgcgatgacaccacttgggtcacaaggacagctccaggaacatgatcactcgctgggacactgtctgtacactctctgtttccaaactaagccggattgcgcaggccttacaacaagcggaagtgtatcgagacacagtccacatgctgttggagtggcttactgaagcagagcaaacgcttcgcttacggggagcacttcctgatgacacagaggccctgcagtctc

SEQ ID NO: 625739 - DNA, 851 bp, Homo sapiens
ggccggccccatcccctgatatcaaagcagggccggtgtggggtccaccacgccttccacctgccccagtgctttcttcggttctctctggaaaagtccagtctctcctcggttgcaatggaccccaaatgtcctgcgaccgtggtgtctcctgcaactgcgctggtcctgcaagtggaaagattgcaactgcaacctcttgcaagaagagctgttgctcctgttgccccgtgggttggtacgcaggtgtgccccgggggttgtgttcgcaagggggcgtcagcgatgtgcagtgatgccgatgatgccaggacaacctttactcacccagatgtaaacagaggagaattggtgcaaacccgtggattttatatgatttataattaccccacttggacccattgcgcaaacatcacctattccttggtgaacattctggtgcacttgtaatacgttcaaccaagttgtagcaccgtcaagaagagcaacatctacatgatcgaacaaactcctgtcatggcgaccatgcgccgccggcaaacgatgtttagacaccaaacgaatggggcgcgggcacccaacgtaagaacaaacggcaaactggccaccagctggtgcaccagacgaacagcctggcggagacagcacaaaggtgatggactactcgaccataataaaaacgcgccgtgggcacacccagcggtgttggaaacacaacacacaggggatagctgaggcacaagacgtgcatcaacgacgcggcgatccagcgaagcgataaaaaccccgccagcgggtgcagagacgacacgcagcgccacgagcgaagaagccgccagccgggacagcac

SEQ ID NO: 625740 - DNA, 693 bp, Homo sapiens
  misc_feature (530)..(530): n is a, c, g, or t
ttttttcttctcacttgcccgcgattttattttgcccctcctcccgagcccccctctttaattttcccccctcttctttttgataatgaccccaccacgtgggttcccaccccctcccttttgttttcccccccccggcggggtattttattaaggatgttttatccccccccctggtggaggctctctgttgcccccgccgcttggcccttggccccaaaaagggtggtgtatacacccccaaaggagactctctttgtttttttcttttcgggggagttctccctctcggaggatatggcgcccctcttttcacgcccccgctttttccttatccccctcacacgtgtatatatcccccccctatcacacatgtggcacaccaccgagttctttctctcccgcgcttgagagagacccctggagaactggagtagcttacacttccgggaatacccaccactgtgttccccgcccaaggcccgctggagactccactatgagacccacaaatgtgtcccacacttctncacattatgccacggtgatatatgaaaggttttgtggtagccaaagcatgatttctctgtgacccaaattaagcctgaaaaaaatgtttccccttcccctatttgattcactagtggaagatagtgttctgccttataattataaactgagatgttagagtaa

SEQ ID NO: 625741 - DNA, 197 bp, Homo sapiens
tttctcttcatgtgtctccataccttgcgctgctgtgttcatctcatctccctgtaatttaccccgtgaggtcacccagagcgtacacccttcatgccacccctgctgtcacttacctctattactaggtcctaccgtttgggtgggccgccacgattatcctaattggctgtgccattcgtgtcttctgctgcctc

SEQ ID NO: 625742 - DNA, 506 bp, Homo sapiens
  misc_feature (12)..(13): n is a, c, g, or t
  misc_feature (35)..(35): n is a, c, g, or t
  misc_feature (82)..(82): n is a, c, g, or t
  misc_feature (100)..(100): n is a, c, g, or t
  misc_feature (220)..(220): n is a, c, g, or t
  misc_feature (233)..(233): n is a, c, g, or t
ttcccgaaccgnngtaacccggggaaccataattngcccccggggcaaatttccggggccccaatttttaaccggggggggncctccgcgcggggggggncctttgtccaatagtagcccttgtgctgagactcagattctgcacctgagttcatctctactgagacatctcttcctttctttccccttcttttacttagaatgtctttgtattttcaanttttttcttgggncccttttaagggggggcccttcccatagcaaagcatcatagattgctgatttaaactgtaattgtattgccgtactgtgggcctggaaaaaattttccccccaaaaattcctagattcccagcagagttggttctttctgaggtctgcaaggaagggctctgttccatgcctctctccttggcttgtagaaggcatcttgttcccttaattgaaaacttttccccttttttttttcccaaaaacccaaattttgggatccttttaatggttac

SEQ ID NO: 625743 - DNA, 795 bp, Homo sapiens
ttccgcgcacgtggctgtttcggtgggtcgctcccctcctcgctgtggttccgtgtccaaccgctccatggggtccgcccccccacgtttcgtgcctcgtggggatattcgtaacggggaggtatacctgccgctcgttataatcgtactctgcttagcgtaataatttggttcgcgacgttgctgctgcccgagacatatgggtttcctcccccgccgcttaatcgttcctctttaggggtgtccacgctagccgcgcgcttggtgtgggcgcccgcctctgagctcggtgagctcgcaccaactgtgggattgtggtatatctcgctctgaccgatgttggggtgtcccctcgccccaccgttttgctcagtggaattgctcaagattagcgcggctccgctccaaacacgccttggttttgcgccgcacgctcatgtggagtgcgatttgtcccccccccacctgggatggcgcttctagacccgcgctgcatccgcagctttgtcccccggggcacgtccttgtaggcactcgcgttcaccctcactcttctctctcacgcgctctctcgctcgtgctcgccggcgggtattggatattcactcggcgcacaacatgttcgtaatactcttctggatcacaaacacaccacagattcctagacgcccatttcttctctgaaaatttgattcccctcttcaattatttatagcattaagggcgccgtctttgtcacgcacctacccacccccctctatcaccccctttttcgagacccacatagtcaaaaca

SEQ ID NO: 625744 - DNA, 444 bp, Homo sapiens
  misc_feature (8)..(8): n is a, c, g, or t
gagcctgnaccgggagtggagagagaaagaagacgggttacagaaagggccatactagccatgagtcggggtgtcacaactgaggccctggggaccttttagtcccttatctccaaatctgaccaattgtgagagtcacctgggtagcctgttaaaaactgatgctggtttaatgggtctgaggcctgggcatctgcattttcacaagcttcccagaggattctgataccagccaggttggaaagtgtcaatctagtcctattttttcacattttagtgagggagacaggcccagaggagaagggcagagcatacagacaggaggtaagagaccaaaatcttgagttgaaagactatatggagactagatctgtggttaggttataaagacataaacttcgtcttaattttcataatcaacaccctcctagccttactactaat

SEQ ID NO: 625745 - DNA, 183 bp, Homo sapiens
  misc_feature (62)..(62): n is a, c, g, or t
gatccctataagacgacagaagggactaattcagaagtttaagtctttcatccagcttctanttgtgctttgcctgtgtacatctgcatgcatagccctgtggcggaaaacgacaccctttgctggaatggacaaggactcgtgggagagatacagcccaaaaggcagcaagggaatgggatt

SEQ ID NO: 625746 - DNA, 137 bp, Homo sapiens
tgctgctcacatacattcggctgtgggtggttgtgttgcttccacacattcatgtgtgtcgggccacgtccatgtccagatggtcagtccatcatccatgggtcgggcacgcattcagcttttcagccatatggcag

SEQ ID NO: 625747 - DNA, 215 bp, Homo sapiens
  misc_feature (114)..(114): n is a, c, g, or t
  misc_feature (209)..(209): n is a, c, g, or t
gcaggggtcagttcccacccccacccgtcccaggcccaggccaaaaccagcgcccagctttcctcactgttcctgtggagaatgtttacgcccaggcgagctcctcgacctttnagggaccatttccccgaccactgcccagccctttgctccctccccaaagaaggggggagggtgggctttatattttcattccaaataaaattttnttttta

SEQ ID NO: 625748 - DNA, 419 bp, Homo sapiens
  misc_feature (103)..(103): n is a, c, g, or t
gctggagagctccctggtgtatggtatgtgtcccaaaagaatgggacaggtgacacacggtccagaaatctgctttctgaaaccccagccctggccctcctgncctcagacgtgtgtaaactttattttttcttcttttttctatttttttttttttggggagggagttcggctcttgtggcccaggttagatgtgaatggggcgatctgggctcaccgaaacctcgtgcctcccgaggtcaaacgaatctccggcctaaacctcccgaatagctgggataacgggcatgcgccaccacactgtggcaaatttggaatctccagtggaggcagcggttctccgtgtaggtcaggcgggtctcgaactcccgacctcgggtgatctgccagttgtgcacagccggggaaccggagctcag

SEQ ID NO: 625749 - DNA, 675 bp, Homo sapiens
gaggcccagcccccatggatctagtgatcctgagctcacgtagcaccccctcttaagaccacggtggaaatgtaccatcttgggctcaatgagtgactggcgagatgagaaaagggccctgggctctgctttgttgcccagtgaatgccatgggacatggtgtgcatgtggtggcgatgtgccatggagctggggtgctcccaggagaggtgtgggaagcagccaagggtttcatgtatatgccccagagtgtcaaggcacatcccccacagagcttcctcagggcccagccctgtgctgtgttcagggcctccacccacctgcccatgggcccctccccaggtgtagatggcatagtggcatatgtgccggctacctgtgcatggccacctctggagagctggtgccagtgcgcggggccctgaggctcactgtccatctcgtcccctgatgcagtgccagcctgcagggccaatgcgtcactgcagggagcacacacagtgagtcgggtgtggctgtgcctgtggatggccacatgcacctggacccacccagccaacggattgtgtgcacgctgggagtggcccagaggatactgagatggttgtcagatttggggcaggcagtgagtgggcctccctggtatccctcctccggctccacttggattcagag

SEQ ID NO: 625750 - DNA, 551 bp, Homo sapiens
gtgccagataaaactggccgcagatgtttgtagtagctttattcataactgccaaaactggaagcaaccaagatgtccttcagtaggcaagtggacaaattgtggtacacccagataacagactattattcagtgctaaaaagaaatgagctatcaagccataaaaagacatagagaaaacttaaatgtatcttactaagtgaaagatgtcaatcagaaaaggctacatgctgtatgattcctaccataagacattctggaaaaggtaaaattatggagataataaaagattagtacccgcctgccaggagttagggagaagggagacatgaatagatagagcacagaggatttttagggtggcgaaactcctctgtgtgatactataacagtggatacatgtcatatgtacatttgcccaaaacccataggatgtaaaacaccaagcgtaaaccctaacgaaaattatggacttggggttgtaatgatgcgtcaatgcaggctcatcagttacaacaaatgtatccctctcatggggagactatgcaagg

SEQ ID NO: 625751 - DNA, 651 bp, Homo sapiens
tctgtccagccggcagcaccccaggccggatggacgcttgttcctggttctgtgccccggtgagcgctcaacgccctgcctgatcctgcctgaagatggtgccactggtggctgatgtgtatcatgtggaccccagatgcccaagctcatttgcctgcctgctcagtgcttgtggcactcatgcagtgtctgtgcccccattcatgcttgcacacctgtggtgccaagccatgctggccagtgaaccattatgagtgtgctaggtgcttgtggtagtggtggcatgtgtgctggaatcaccactgggcttgcaccgcattgcaagatggacaagtgtggttgcagatgaaatgttggcaccatttgtatagatgccccagttgcatgcagacaattatctaaccgaagagcacaaatacttgggcacaactgggctggtgtgttgctttggggttgacgcagataacaaaattttgggttacacttacgattacttggcgtatccgtacactctacggagaaccacaaggttgtaggattcttcaccaataccttgggcttggttcagcaacttggtgaattccaccaaagacatcaagaagttaggactcggaagtttgggaaacacccaaagaaacaaaaggaaacttg

SEQ ID NO: 625752 - DNA, 688 bp, Homo sapiens
  misc_feature (22)..(22): n is a, c, g, or t
  misc_feature (130)..(130): n is a, c, g, or t
  misc_feature (153)..(153): n is a, c, g, or t
  misc_feature (170)..(170): n is a, c, g, or t
atggcttctctgtgcatatctnaatgccagcatcacattcttgcactttggggttgttattaagtaaaataagggtgacttgaacacagacactgggataccatgacagttgtcttgataagcaagatgnctacaaagtgtctgagggatggnaagtgtttcaggcatgnagacgctggacaaagggagaattcatgtcctggttgggactgagctgtaccatgtgagattttatcatgctactcagagcagtgcacaatttagaattatgagttgtttacttctggaattttccatttaatatttttgactgtggttgactgtgtgattaactgaaactgcagaaagtgaaaccgtggataaggagggtgggtatactatacttagttctttaaaaaaatgctggccggatgcggtggctcacgcctgtaatcccagcactttgggaggccgaggcgggcggatcatgaggtcagcagatcgagaccatcgtgtctaacatggtgaaaccccgtctctactaaaaatacaaaaaaattagccaggcgtggtggcgggcgcttgtagtcccagctactcgggaggctgaggcaggagaatggcgtgaacccaggaggcggagcttgcagtgagccaagattgtgccactgcactccagcctgggcgacagagcgagactccgtctcaa

SEQ ID NO: 625753 - DNA, 835 bp, Homo sapiens
  misc_feature (525)..(525): n is a, c, g, or t
  misc_feature (559)..(559): n is a, c, g, or t
  misc_feature (561)..(561): n is a, c, g, or t
gtcttgggagatcaatggctgtcaaatgggcatcccggaatcgtgatgccgctgggcgcacggacagtctcccacatgatccaaggacatgtgcccgcgtggccctatcctagagaccccatggaatgaaccgggccgtcgtcgccaagaagtataatatgcgtgtggaagactacgaacctttacctcggcatgatggtcgctggggtatggcgatctaccgcgaagactccctgaccgctcacagcatgagaggagatccatggtagtatctgggaccatgccgggcgctgaaggttcgaactgaggagtgagaccgatgcaactggcacgcgtatgacatgtatcgaacaggaaccgatgtaggaatacatacccccacaacctgtatcttggcatagtcatgtgtatgcagctcttcggtttcctggctttcatgatattcatgtgctgggtgggggacgtgtaccctgtctaccagcctgtgggaccaaagcagtatccttacaataatctgtacctggnacgaggcggtgatccctccaaagaaccagagcgntngttcactatgagatctgaggaggcttcgtgggctttcggtcctctaactaggactccctcattcctacgaacagttttacagcccgtgtaaacttgaagaattcccccccttagattacagagagcgttccagggtggcatggtggacacgcgcagccatcgaccagcaggtgcgcctacctcgacaccagccaattagcacgcacaacagagcaaataggcgcggtgcggcgctcggcgcctcagagagagctcccgccgcgggggggctcgc

SEQ ID NO: 625754 - DNA, 278 bp, Homo sapiens
gtccacttgaggccagaggtccctgaaatccaggagtgtcccataggtcaagaatccctggaatcccaggagcagcgggcacgagccggccttcgggagcgatacctacgcagcctgctggccatggtgggtcatcaggtgaatttcacgttgcacgagggcgtgcgtgtggccagccacttcggagccaccgacctggatgtggccaacttctacgtgtctcagatgcagacccccatatgtgtgcatgcagaggcgctgctccgatgtagagacat

SEQ ID NO: 625755 - DNA, 1552 bp, Homo sapiens
gctcaatgcggggtgcatcttggatgctgtgtgcctgtcagcgaatggtccttaccggaggcccgagactctggtgtgcctcttccgagacttcccatgtgcgtcgaggaacctgacatcatactctgcagtcagttgtgctaacagtggacacggagccttatcctcaagaatggatctggacgctgcccgcgagtactaacctttagtgactgactgcagccatcctggctcccaatgactgcatctcgttccagatgaaactcgatgagacgccggggttgtccaagatggttgtatgcatccatgggatcgtgggttccagggctggctgtactatttggattccttatgaatcttggcgcagtgggaagtaatggcgccgtgagctggcagaggcccatccatgtcatataactgggtccaaacgtgccgtgcccgtttgccattacagattgacttgatcctgaagctcagtgagtccaatgtgcgagatttgacctgcttggtgtccgacagaaagggctcggtcccaccattgataagaggacattgtgggagtcacacatttctcagggcaaagtaaaacggctcttgttactgccagacgttttacgtgcgtcatgtacccaatgctgcattcctcagtactgcttaggttgcgacattcttgacacgccaaaggctgtgtttgcgacaccaggtggcatttgatagggaaaacgccatttctgttgaacacattgttagcagtggaacctttagcattacgcctcacggtgggagacgcaaaaattgggcgcatggtaatctggcccgtacttgttaggacccttgatgtacacttcggtagcagttgaccgaattatcaaagaggtccaccgacttcacgtgggaaaggaaagtcagtagacgcatacaattacagagatacgccaacttgggagatggggcgaccgaaggaccatatacttagcaatcggtcaacccccgacagaagagaagtcgactcggacacgacacacagaggaaagccattggggaagggcccacaagcggattgggacggcacggggaaagtcagtaatgcaaccggagcgggtacgaccacacggcgcacgagaaccacaaaaggtcccatgcgggccccataacaacacaaggggggggcaaggcgaacaaccgacggagaacccagccataaggaaacacacaaacaggcgccataggcaaacacgaacaggaaaggaacccgtcaaggcacaaagagaggcgccccactacacaacaatggaagagcacgacgcggcacgttgcaggagagagaggagtctaacacgcagaaatctcagcagaacaacagcagcaatggaacaacaacacgtggccgatcaccaacacggcccgtagcgaggcagaacagaaggccacaggcgggcaaaagatacgcacgagaggacgaaggcgcaacagacaaccaaaaggaacgaacaaacctagaacagacgaggggacaacaataacgagcgcacagagaaaccacacacagact

SEQ ID NO: 625756 - DNA, 465 bp, Homo sapiens
tctaccaagtgccaatcaccatggctaaagtgggcgtatattacagcctgtgtcctaagcttagaagctttaatgtacttttttaaatgaaaagtattagagggggttgaacattgtaactaaagcataaagttagaccaattacatgcagagatgtttatttaatattgtgtgagctgagtccttctgtataaattatttgcacacttttcttgcatgatgaactgattttttaaatgaaaagtattagagggggttgaacattgtaactaaagcataaagttagaccaattacatgcagagatgtttatttaatattgtgtgagctgagtccttctgtataaattatttgcacacttttcttgcatgatgaactgattttttatagttgtttgtaccagacggtggcatatttttgtaaaaaacttttgacactgaattgcaataaatgtttttccaacaaca

SEQ ID NO: 625757 - DNA, 405 bp, Homo sapiens
tggagaaagaacaaagctgtagtacacctgttattggattaacctttgactcctgagtggcaatgtggtcacccatggtgtggagctgcagctgtgctgcattcagttactaaagcatgaggcagagagaaggatcgacaacagggttcccgacattgagggacggataaaggaaacaaaccctctggcaaggaactgaaactcatcagaccactacatccaatgagacaccagacccctcatccatcatgattgtttccttacccctctctaattcctgtttttccacgtttcccactccataacctcctcagttttacttggttggggagacggatttgacttcatctcccattttccccaggttcagcacttgattaaagccttcttcctggcaaaaaaaaa

SEQ ID NO: 625758 - DNA, 533 bp, Homo sapiens
  misc_feature (6)..(6): n is a, c, g, or t
  misc_feature (196)..(196): n is a, c, g, or t
  misc_feature (252)..(252): n is a, c, g, or t
  misc_feature (284)..(284): n is a, c, g, or t
  misc_feature (288)..(289): n is a, c, g, or t
  misc_feature (320)..(320): n is a, c, g, or t
  misc_feature (327)..(327): n is a, c, g, or t
  misc_feature (365)..(365): n is a, c, g, or t
  misc_feature (414)..(414): n is a, c, g, or t
  misc_feature (421)..(421): n is a, c, g, or t
  misc_feature (423)..(423): n is a, c, g, or t
  misc_feature (440)..(440): n is a, c, g, or t
  misc_feature (526)..(526): n is a, c, g, or t
tgaatnttacttgtaacttggcctttagggtttaaactgtctttggcttgaagatgggatttcactgggtacctgcccctgttttaggatttctctgcctcctccctctatcatttccccctctgaagaggtacatgtaactgccgttagaacagggatgatgactgatcttagctgcttcctgctgacaggggcnttgttttaggggcaatgacaatcagatttctctcagaggcctatctaagggtcctnagtaaaagggagccattgtctgaggctctggntgcnngactggagtttgttggcctgtaggcaagaanaaacaanttttacaaggctaactatgcatggatcaaatatgggtnttatacaaagaggagttaaagggaacgaatctagtgtcaaagataacanaaatganangtgaaatatactaatcnttctgaaaataatattgtgccccgatgaaagaaattaaatattgtatgggagcaattctttaagagataactgttgagggggtggntttctgg

SEQ ID NO: 625759 - DNA, 1065 bp, Homo sapiens
accacgaccagacacgcctgacacgcagagacacatacatatccatattctacaccctagataggctccctatcccctactcatcgcactaatattacactacacaaccacccataggctcactaaacattctactacatcactactacactgacccaagaactatcaaactcctgagaccaacaacttaatatgactagcttacacaatagattatatagtaaagatacctctttacggactccactatatgactccctaaaagacccatgtcgaagcaccccatcgctggagtcaatagtacttgccgcagaacatcttaaaaactaggcggactatggtataatacgacatcacactcattctcaaccccctgacaaaaaacatagacactaaaccttccttgatactatcacctatgaagaataattaataacaagcatccatctgaccatacgacaaacagaactaaaaatcagatacatagaatactcatacaatcagacaaatagaccctcgaaagaaacacaggacaagcagtcaagaccaaaacaccctgagagactacacccgggcgcaagacatactacaataaacaggccacggagataacacatccctccagtaactaaccaggcatagcaaacaacaaacaacgaacggaacgcgcaggcgatcataatgcacatcgcaaggacatcacaaggaagacccacaaagaagaaaggacgcataaagagaaccagaaaaccggcataaccccaaagtacacaacgagaagaccacgtcaaaaacaagaaagagaacaagaacaacacgagaacagcacaaaacaagaaagcaataaacatcaattataccaaacaatgagtacattaacaccattaaacttaaactataaaaaaaaccagtaaacatcccatacttattccaccaacttacgaaacataaaaacacaaaacaacactcaaaaacataccaaacaaactctattaacagacatatgatcatcacaaacacacaaaaacaacatcactaaaatcattacctatctacatatataag

SEQ ID NO: 625760 - DNA, 753 bp, Homo sapiens
  misc_feature (474)..(474): n is a, c, g, or t
gcatgttataattacagtttcgctatggaattctgtttcggactttgaaatatataaataagtaaaaaattgacattgagagaggttaacaaaacgtgtaattatgatataagcacagaattagagtcatttggttgagcattacaagcagtgtactttaggtattaacttttaataggcaaagttctttttattgaagttgaaatgaggtttagtaatgttgggtctcttattccctttgaatgtttcattttaaaataggcattcactttttttggtataggagaaattcaggaatgggatgacattttaatagaatatcataattatggtttaacaatttcagtcttggttactagcaatttattacagatcattttctgttgactgaagtcaagtaacgtatatgtaacccaaccagctaaacaactagagtgtgtctgaagaatactcccaggggtactttgaatcttnccctatggggggccggaagcgaacagctgtgttcccgggaaacgcttgttgggcctttccacaccacggtggcattattctcttcaaaaataggtcgtccctattaaaaggagggggtagattccacccgtatttgggccctctcgggaagcgcgaggtatctttcttaaacgggacaacaacgcacatacacaacattgttctcggtacagtccttcttctcctcttctgtgcatacctactacaaatatcaactaacaaagaaacacaaaagacaga

SEQ ID NO: 625761 - DNA, 87 bp, Homo sapiens
ctagaagattcagcaaagtacttttgtgctcttggggaacacctccttcgcattactgggggatgtatttacctcgataaactcact

SEQ ID NO: 625762 - DNA, 223 bp, Homo sapiens
gcaccagccaccacattatccagagctgagctcctccagcggatgacgccgtcccaccactccctcttcttcttttcatccttctgtctctttgtctctgagctttcctgtctttcctttcttctgagagattcaaagcctccacgactctgattccccccgtcccttctgaatttaatttgcactaagtccatttgcactggttggggtgggtggagagcgg

SEQ ID NO: 625763 - DNA, 194 bp, Homo sapiens
gagtgtcctctggttctcgaaacacctcaagtttattgaaatgctgatagacgatacatggatagactggggggacttgatagtatttaaatactgttaacgcaaactcaagcatagctactgcataaacgaggtgtatcatcgcctgttgaaccgatccggcaaataggttatcacgacaatgaatctttcca

SEQ ID NO: 625764 - DNA, 322 bp, Homo sapiens
tggaattccctcaacaccaaacaataataacactccagtctgcagtgaggacactagagaatgtctttagggaagcattatgttcacgttctttgaaaatagaactgttgatttttataaacacttcagggaggatgccgagtattgctgaatgaatgtggtcggggggcgcagcaattgttttcgtgacctcgacttgaagactttcctcgacaaccttcgccagtggcggaagctaatgactgggtaatttctagcccacacagccataaaccctgcttaacggagacgaaaatagcctcagctttgactgaatcccaac

SEQ ID NO: 625765 - DNA, 116 bp, Homo sapiens
agcggggaacaatcactttggctggcaacctagcaaaagtgaacaaataggattacatgaagtgaaaaagcttatgtacagcaaaggaaacaatcaacaaagtgatggttcccgcg

SEQ ID NO: 625766 - DNA, 217 bp, Homo sapiens
tgccaccatgccgggttaattttcggtatttttaatagagacaggtttcaccatgatggctaggcgggtctggaactcctgggcctcaagtgatccgtctgtctcagcctcccaaaagtgctgggatacaggagtgagccaccgtgcccggcctggccttgtggcttttagtattgaaaactctaggatgctccatctggtctgtgttacgtctagg

SEQ ID NO: 625767 - DNA, 395 bp, Homo sapiens
agaggatcccgttgccaggctggagtggagtagcacaatctcatgctcacttgcaactccacctcccagtgttcaatgcaattctctttgcctcatgcacccaatgtagcttgggactatagtcacacgccaccacacctggctaaattttttttttgtatttttaagtagaagatggggtttttgccatggcatttcatgccaagtgctgggtctcaaactcctttaccttcagtgttgatccacgccgccttcagtcttcccaaatgtgcttggattacatggtgtgagcctaccaccacccagcgcgaagtagtttttttcttgttaaatcttttcccattgcttgcaattgaaaaccttgcactgagcactggccagtggttacttggtct

SEQ ID NO: 625768 - DNA, 568 bp, Homo sapiens
  misc_feature (555)..(555): n is a, c, g, or t
cccgtggataacggcattagctgcctcttctgatggagtgacaagcggcgagatggaacgtgtgctgcggtccaagtgtgagtatagccctgatgctgatgggctagaaatcgctcagaccacagggttaccagtctgggatgcatttcatgctctgatgaagccaaggctcctgcgcatcgcatgtaccagagttggttggtacacgcaatccaggcgtgaacggtacatcacgacgtgttgtctgagatgcacgatcggagcatcgataactagccactcttgaagcgcgacttgatgatgcgtcgatcataagcttggttgctcgttgaacgggcgggggcatccggtggaatggcttagaacgcggcagatctgcgggaatggaatggctattgattgcaaggtgataactttggcgaaaggaagccctaagcattccggtaccgcttaagacttgggctttgcggttagaccaggggaatttcggattgagcaagaacttgtttaccttcgaaaaagggccctagggtgtgggtcgagggatagttcccntcttctcgttgtg

SEQ ID NO: 625769 - DNA, 515 bp, Homo sapiens
tgatgcaagtgtctaatagctatacttctttatctatttttatttcgtctttttttttctggagagggagtctcagtcggtcgcccaggcgggagtgcagcatgcacgatctcagctcacggcaacctcggcctcgcggggttcaagcaattctccggcgtcaacttcccaagtagcggggattccaagcacccaccatcatgccggcctaattttggtattttgagtagagatagggttccaccaggatgggccaggctggtcttaaactcctgacctcaggtgctctgcccacctgggacctcccaaagtgcggggataacaggtgtaagccagcacaccgggtctccatggaggtctaataatattggcttaatacatcggggtcctcggcggttgggggatatatgtcaagactggtatattggctggatgaatcaatctctttgatcgtgatatacttaccttgtctcctttaactggtttggacggtttaatggtagctatttctccca

SEQ ID NO: 625770 - DNA, 454 bp, Homo sapiens
ctgaatagacatttctccaaagacataaaaataaccaacagatatatgaaaaaatgctcaacatctccaatcagatgaaatctgattgcaattagagaaatgtaaatcaaaactacaatgagatatcatctcatcccagaatgctggcaaggatgtgggaaaaggggaaaccttgtacactgttggtgggaatgtaaattaccacagccactatgaagaacagtatggaaattcctcaaaaaaactaaaaacagaattaccatatgatccagcaatcccgccattggatatacatgcaaaagaaaggaactcagtatatcaaagagatacctgaactctcatgtttattgcagcactattcgccatagccaagatatggaatcaacctaagtgtccaccagtggataaaggaaatattatacacactcatatatatataatttcacaaatacac

SEQ ID NO: 625771 - DNA, 118 bp, Homo sapiens
cctcggctcggcgctcggtccacaccagcgaggagcgttttcccgcgagcggcaggatcgcgaagggcccggcgggcagaaaatgttcttcggcgcggccttcatggtcgcgctcgtg

SEQ ID NO: 625772 - DNA, 339 bp, Homo sapiens
ggggtattgaccgtcttagttaagagcatgttagagattattttctgctaatcttgagaacgggctccctggcccctttcctagaccccgccagctcgccttgcttttccctgccttctcagaaacagagcatacaggcaagcacaagaatgtccacatgcttactgccctgcctttcacccagtcaggtttcttccacctgacagctgctctccagatctcttcaggtttcaatcaggatttatctaaaggcctaattggctcagaacacctaacgcagtatggcaaacaggtttcatgtttttcattaactctgactgattggaagtggctggtgga

SEQ ID NO: 625773 - DNA, 112 bp, Homo sapiens
tggcagtcaggcactgagctcccgaatctcagtcttcactttcagcactgtcagtttatatgggctctgttgtttcttgttgcagcccaagtgtagatgtactcggggcatc

SEQ ID NO: 625774 - DNA, 230 bp, Homo sapiens
ggatgctgtgttgtatccatggtatggatgtaccacagtttgcattacattcacccactagaggacataagagatgtttcagttttttgccctaataaagctgctgtgaacattcatgtacaggtttttatgtgaacatacattttcattttctgggataaatgctcaaaagggcaactgttgggttgtatggtaaacacatatatttttgtaagaaactaccctactct

SEQ ID NO: 625775 - DNA, 311 bp, Homo sapiens
  misc_feature (14)..(14): n is a, c, g, or t
  misc_feature (73)..(73): n is a, c, g, or t
aatggctgggagcnccaaaggtgagcctcacacttcacactttttccaagcactctccacagttatgattaancagaagggggaggattcccagaacaagtttggagtcagaagtcaaaaatatcaaatggcatttgaaaaatgaacaaatgtcattccttcatattttggaaagacagccatgtggaattagttcaagagtcatacagggctgggcacagtggctcattcctgtaatcccagcactttgggaggccaaggcagatggatcacttgatctcaggaatttgaaactagcctgcccaacatgg

SEQ ID NO: 625776 - DNA, 507 bp, Homo sapiens
aagatttcagacttaattgaggacacatgtctttgatagctttcttgaggtaactctagtcctttaagactatcttgaaaccatcagcaggatttattttaaaaatcctccagttgaggcagccatttaaaattgagtaattattccctggggcccagttctttattaccaaaattatagcatttttagggtttagaactctcttgggctcttaaagccatgttgtttagaaaaattaaaatgtaaaaaatggcctaagatttctaaaccatgtgacctgtggtcagtcctgttcctcttgctatagagcaggggaccattgtaaacaggaaaattctaatccatatgcagctagcaacttcagcctttcacagactaacaactaagaccactatgagccctatagctcctttatttctcgcatgggtgcctcatcacatggaggccagggaagaaggagcctgggaaaaggaacactttgtcttcagatttagaaagcacacttgg

SEQ ID NO: 625777 - DNA, 404 bp, Homo sapiens
gagtgcagtgtctcgatctgggctaactgcaacctctgcctggcaggataatcgcttgaacccgggaggcggaggttgcggcgggccggggtcgtcccacttgcacttctgcctgtgcttgtgttccgctctgtctgcctggcctccttctctttggcgctcctcctgtgtctctttcttttcgcttgttctgcttctttactctcttcgctcttttttctctctgttgtttcctttttcctgcctctctctccctgccatttcccgtctctctttcctatgtccttcttgtgcttgctctcccccttctctctttcttctttttcatttttcgccccttcttcccgttctttctctgttttctttctctgtctgctcttctcttcgtcttccttgtttcccct

SEQ ID NO: 625778 - DNA, 183 bp, Homo sapiens
ggggggggcccaaacccccccccctttttttaaaaaggaaaattttggccccccgggggaagggcccccccccccccccccggggcttttggggggggattaaaaacaccccccccaaggccccggaaaagggggccccaaaaaaaccccccccaaaaaaaagaaaaatttttcccgggggga

SEQ ID NO: 625779 - DNA, 246 bp, Homo sapiens
ggaaaggttgtagttgactccagtgcttcctgcagcctaggtaccatcccgccaatgatgctgcgcaggtgcaggtacaccatgtccttggtgtcagattcataatcgctgatctcttctttttgtcctccctaatcctgggttaaattcttaatccacaatcgatttgtgaagctggctggaaaaaacttattcatgaaggggctgatggtgtgggacagggccaggattcccagcttgctcaga

SEQ ID NO: 625780 - DNA, 406 bp, Homo sapiens
agctatgatcacaccactgtactctagcctgggtgacagaatgagaccttgtcttaaaaaaaaaaaaaaaacaaaaagcaaattttctaccaaaaaacacaaatgcctgctgagaaactcggaagcacttgcccacggggtttccacttcctttcagctccgcttgcagagttgcccagtcttcccacagtgtccccagccttcctctaagagactctcaggcaggaacagcgtccacttggcgggaccctggctcggtcctacgtggtgtatgatgcactataaaagcaaagactggctgggggcctggagaaagacaacccgagtttctaacccaaggcttgatccaccggtcccagggcttggagcagcactcttaaaagagcccgattgtgctaccgggttg

SEQ ID NO: 625781 - DNA, 376 bp, Homo sapiens
gaggatccctggcgggtccttcctggacttcagggatcacctggcctcggtctcccagagagctaggattacaggccaccgcaccaggccagaataaggggttttaggatagtattggcaggcctcagggcaacctcaaattaaaaaaacatacaaggaatacagaaaagtattaaaatcaagaaattaaataatatcaccagagaatatcacctacattagaaggaagacagaaaagaagaaatgaaggaaaggaagaccacaaaacaaccagaaaacaaataaaagggcaggagtaagtccttacttattaatcataacatcaaatgtaaacggactaagctgtctactcaaaagaccaagagcgacggaccgg

SEQ ID NO: 625782 - DNA, 799 bp, Homo sapiens
  misc_feature (632)..(632): n is a, c, g, or t
cgtcattggatatcccgaaatttactgaggggtggggaccagtggggggaagctctgtcacttctggttaccactgttttgaagcttcattgtggctaatccaccctgcagaacctcaaaccacttagagatcaaactccatagatctttggttttcttcatctggttcacatggaacacagctttctcctagtctgtgctttgtttgctcacgtgtttttttcttcctcttgtggttcatctgtggcactccattccgacccttgccttctgtcccctgtacttctgaactgtctccctggggacctccgccctctagatgagttatacgctcagaagctcaagtacaaagctatcagcgaggaactggaccacgctctcaacgacatgacctctctctgagaggcagccaggtcgctgccctctgtccttctcacatggtgcctcctacgcccctgtgggcttctaggagctccggtggcctgccttctggtttgaacgtcagagccttcttctgatgtgtctgtgactctacaaccgaaataaagacgggcagtcctcctcttcatgccccctcattctcattttctccacttgctgcctttgagctgtagctgtgtgcccttaaccanagcctgaaacctggagaaatacgactactaaaagtagacaatcgagttgttctgccaatagaaataacaatccgaaatatagtgtcctctgaagacgtactacactcatgagctgtcccatccctcggttaaaaacagatgctatcccaggacgactaaaccaaaca

SEQ ID NO: 625783 - DNA, 934 bp, Homo sapiens
  misc_feature (2)..(2): n is a, c, g, or t
  misc_feature (20)..(20): n is a, c, g, or t
  misc_feature (27)..(27): n is a, c, g, or t
  misc_feature (31)..(31): n is a, c, g, or t
  misc_feature (39)..(39): n is a, c, g, or t
  misc_feature (41)..(43): n is a, c, g, or t
  misc_feature (48)..(48): n is a, c, g, or t
  misc_feature (68)..(69): n is a, c, g, or t
  misc_feature (249)..(249): n is a, c, g, or t
  misc_feature (412)..(412): n is a, c, g, or t
  misc_feature (475)..(475): n is a, c, g, or t
  misc_feature (508)..(508): n is a, c, g, or t
  misc_feature (519)..(519): n is a, c, g, or t
  misc_feature (567)..(567): n is a, c, g, or t
  misc_feature (593)..(593): n is a, c, g, or t
  misc_feature (597)..(597): n is a, c, g, or t
  misc_feature (603)..(603): n is a, c, g, or t
  misc_feature (606)..(607): n is a, c, g, or t
  misc_feature (611)..(611): n is a, c, g, or t
  misc_feature (634)..(634): n is a, c, g, or t
  misc_feature (638)..(638): n is a, c, g, or t
  misc_feature (641)..(642): n is a, c, g, or t
  misc_feature (648)..(648): n is a, c, g, or t
  misc_feature (652)..(652): n is a, c, g, or t
  misc_feature (661)..(663): n is a, c, g, or t
  misc_feature (667)..(667): n is a, c, g, or t
  misc_feature (670)..(670): n is a, c, g, or t
  misc_feature (707)..(707): n is a, c, g, or t
gntacatttgacacccagcnaaagaanacanatcagaanannnccagntgtaaatagccatacccagnngtactacaatgagctttttaaaatcttgaatgaattgagtattctagacagcagcataagaaatatacaaacagtatcctatgaatttagtggttttatgtggatatgccaccacaagtggtatgctttagatctgcacatgtgaatttagcataatcactgggaatttgaaattcttgncctctgtgataattaggacataacaagattttccatactaaacatcacatgtgtttttcagtatctctgcaatccagtatgcattccaaatgaaatgtgtaacatttaaagtagcatggaacctacgtctttccctactgcttgctggcatatatcagttggnatgaacattgttcttgagctgcctcttaggaaacagaagacagtgttgaagttttccctgctnctggttgctgaagatttctagactgcttctggnttgctgaagantttctagaagcactatttacacaaatatgcaaatgtgaaataaccganctataacgtgaaggggcagacatganctgnactacncannatgnaccacagaataagagttggcggnaagncanntcccantcgnagctctttnnnccgnggntattgccttccaaatgccttgtttgtttacaaaattntgtgttccagacagaaaccactgtgttggttttcctggttccctaaaattcatgattggtttcccaaaggtgggagctctgtgctccaaaggtctttgaacttaggaaatttatcggcgggtctggtttaaagtcgggacacctaaaagttaatgggagagagaccctatacggcaacccgcagaagtattcgccaaaatggggcaaggaagagctacagagaaagc

SEQ ID NO: 625784 - DNA, 1116 bp, Homo sapiens
tttctcacagtggctgcgcagtgtttccccactgtctgctgaatgtgaccactgtgagggggttcaaagtgttctgctgtcccatgtactgtggaactgatgcctctttgatctcttcctggggctttttctgtgctttcctgtgaccatctggagcccacatgagatcccttattatgtggaagtggacttgactctgacgactgaatgatcgcattgattgcagggacaggcaatgaaagcacagcacagcggggctccattgttgtgcccggatgggacaccccaaagggtctcccatcagtcccttcagccaaccacccctgagtgcaattcgggccttctgtgcattccaggcttcaagaccccaagtgcatgggaggtggacttacctgtctctccacacgaataacacatctcccggggccttctgtcggacttggcagccctacagctcacctgccgcacttcaccacattatgctagtccatcttcaatgtgcggaactacatgaggcgcgtgcacatgcgcactcatcgtgaccatttatcccccagtgtccccctttcccccttgtgacaccccttttacccaaatgcggtccccttggactcgttccaaggagtcgcacaaggccttgggggttgaacgaacgaacatcacatgtggagacaaggggctaaccagatggaaacccagccctttcacgcggggaagctttctatacgtggccttttacatggtttattccccagaggaactttatggtccaacgcccattggcccccaatcggaaattcccttcttgggcgacagggagagagccccttgtgggacagaaacgctcggacttgcaaaagtgaaacatggttgcacattctcccgcaccacacaagagtccaaggcaaccccaaataacctttgggtgggcctttcacaaatggaacatggggaccaacttttcccacatcaccgggcgggtctctggcctctgaacactcgcgctaacttgggggcccttaactttgggtgaacgcgccacccacaatttccctttattgacaacccataagaatgaacgtggccacaggctcgcactccttttggtcgatcaca

SEQ ID NO: 625785 - DNA, 124 bp, Homo sapiens
ataccttctaggtgaaacacaattaaaatctcgtgtatatcttcatatcccatgtggtgtgtatatatggtgaggggcccacatggggggtttggagtaaaacaggatacacaagatcacaaca

SEQ ID NO: 625786 - DNA, 162 bp, Homo sapiens
gagcggtctgccccccaccatgtttcccctttggtagccataaatttgttttcaacgactgtgagtctgtttctgtttcataaataagttctttgcatcattttttaagattccacaaataaacaatatcacatatttgtctttttctgtctgacttacttc

SEQ ID NO: 625787 - DNA, 715 bp, Homo sapiens
ccagcgtcggaccgggcagccatatgggggatacgccagcaacagacgccgggctgcagagatctgcatccctaggccacgctaagacccgtggggaagagcgcaggagcccgggagaagggctggaagggagtgggtactggacagtgcgcgagaagttcccccctaagaggcagaagcccctcgaccgcagcactcgagctccgctcgggcagagcgcctgacgtgcgcgtgcgctgatgcgggcgacccacctcgcaccagccatgccaggcccgggcaccgacgcggggaagatccctttctgcgacgccaaggagagaaatccgtgccggggctcgaaagctctgaggggcggaggtggcaccggagaggccaggcgcgcgcgggcagctggcggaacatcgtctggaggaatgtcgtcctgatgagcttgctccacgtttgaggggggcccgtgtactaccctggtggtaatcgcccaataggcaagcccattcaactctgctcttggagccgtacattctggccttctctcactgggccggctctggggtggtgacaaggtggtgtccaattcgactatgtggaagccaaagggatcctaagcggtgacaaggctgccttctggaggaatattccatggttgtacgcaagtctccatggctttccaagaactgacatcttcaagtggccagggaacaccgggccacaa

SEQ ID NO: 625788 - DNA, 1753 bp, Homo sapiens
  misc_feature (1)..(1): n is a, c, g, or t
  misc_feature (525)..(525): n is a, c, g, or t
  misc_feature (545)..(545): n is a, c, g, or t
  misc_feature (834)..(834): n is a, c, g, or t
  misc_feature (1050)..(1050): n is a, c, g, or t
  misc_feature (1261)..(1261): n is a, c, g, or t
  misc_feature (1463)..(1463): n is a, c, g, or t
ncgtgtgctgttgtgttgtgttttcgtggttcgtgatgtatcagatttgtaggtgcagcaatacatacccatggggtgctccaacacaccacccgttttgggcgaccattatttgtgtctctcgagagggctcccccacaggggtcgccccataaaacagacgcgtgttgttttaccccccctgccccctcttttcctattttcccgggtccccttatagtggttccggacgccccccttgcggggtggctccaaattttttcggcgtatctgaaggggcgggttttctcccctcgcccaccactatatgtgtccccggtcggatgctcccttctcttgaattgacccgcgtgcctccctggtggtcaaccaagagaagccacaggggaggggtttgtctccgacccagagccgccccctcacagcggcggttgtaggtcaaccacagggggtttttttggcgggagccacacgacgagaggtctcgtcggcgaccccaccgttgtgtttggtggatttcctgcncggtgttctctacacagggnctttttggtgtgatgtgtgttccccaccggcggtggtgttttccccccccccccaccggggagctgtgtttccttcccttctcgctttgcgcatggtgcccccacggccttgtgtggccgcggcccacgacaccacgcgcttgtggtataatttcgcgctttgtagtaggagtaccgctccctgcgtccgctccgctgtgtatatgccctcctctactacccacggcgatgttctcgcgcgcgattgggagtataaacagacgagaggtgcgccccccgcgacgatagngggccatattaggtgcgccacacaacaaccctcggcgggtgttcttctttcggcgcacacgcgcggtatacaacacgcgaggagttgttatatactactacgagagtgtttcctccctactgttctcccgccgcaaaatattgttctatactagacaacatatatcatctcttctctcttgtgggtgtacaactactcaccacgcacacgaccacnacagtagtgtgtgctgatcacaccacagagagacccactctgccgtcttcacacgagtagaggactctgacacacaacacggtgtgttttttcgggggcgagagacacctccacagagtgtcgagagtagagtagtttatgtttcgccgccgcctacagccacccacactcttctgagccacaggtctgctctgctgagagagaatagtgntccacaaagtgttcatcacagcgtgtgataaagacttctgtgtctctctcaccacacactctctcacacagagaatacacaccaccacagagactctcccacactcgtgacaccacagagaggagagagagtgggagatagagaggagatagagagcgtgtcgagtgtgagatacacaccgcgcgtgttagagaagtctgtnaaggagacactaaaagagagatggtgcactacgtgcacaccaccgccacatagtggtgtcgagagagcgcccaagcgccctctccccgagccctctgtaaggaccaccccttatatgattatttgtgtaatatgccgagtttatggagaataaccacacaaggaaccataatgggaacccacatttttttgtgggtttccaagaggagattactcccccttgggttgtgaaattggaccgtttttatccataaaaaaaagattatggcctttttggttgggaggaaaaaa

SEQ ID NO: 625789 - DNA, 961 bp, Homo sapiens
gaggtctgtcccgtgcccaatacccgctggtgtcggtgggacagggcggcgttttgtcccgggcccccccggggtttttgccaggccaggggccgtatttcgtggggccgggtgattgtgtcccctccctcctggtgggcctctgaataggacgccccggtgcgcacgtggccttgtagacagacgcctgttcgtcgcggcggagtttgcttaacctccgagtgggtgcgtcgtaacgagacaggatattgagctgttcccgcgcggtggcgggttgctgcatctcgcccagcgcggcacgctcctgggtgaggccattactgggggtctcccacacgcgtgacgaaaggcgcccgttctccttttctgacgggcccacgcaaatgcggcccccgcattaggttgggcgccccgccgcttgtggaggcggcgtgtcgtccccttgtgtggtgggccctctcattcaccggggggctgcgcgccacgtggcggtgctggtggaccacaacagggtgtgtcgtacacaaggggtggttgtattgtttcctaaggacggccaccgttcagcactgtcgttcttttctccaagccgatgggcgcgcccaatcatgtacacccgactgtgtgctgccttccctgtttcgtggtagaggccctccctactctgggtgtgtatttccactagcgcccactgttgagtgtggcttcgatcgcgcgtgaatttccctctgctgcaggggtggttctgagcctcttgtcagaaatcgttcgaaccctcttggtggatcccactatattggcacgaagaagcggcgtgcgggccatcggccccccctctcctggagttgctgccctcctctctggtttcccgccggtttgtttgatggtccgcccgaaaagttggtagacgagttcctcgcgcgcccctcattattcgagggaaaagggccgcccacaaaca

SEQ ID NO: 625790 - DNA, 330 bp, Homo sapiens
agctgagattatgtacgtgagccacggcacccgccttatagttatctttcataatcgttttttcttatataacctcccctcccatttctctatgggtattaattaagatttttgtctaagttctttttctggaataaccggtatcttccggttggtatattttacttttcttatttggctggctttttcttctgcaggctggtgagtggtccagtgatctttatcacatttatgagtaaatggcggaggtggttatggtaaatgtgtggggttcccctgaagctccccagttgatctcttcttacataggagacgtagtgtaccctggta

SEQ ID NO: 625791 - DNA, 150 bp, Homo sapiens
gcccccttggttatgtgtccatggtcgcgcgaccctttgagtccccttaagtgtgcagctggcgatgatggggaacgcgggcggcctcccggcttggtgattgtttcagtgcatgtctgaatgcattcttgctgctgggcgcagtgtacg

SEQ ID NO: 625792 - DNA, 80 bp, Homo sapiens
gcagactcaggggcaggcacagataactgagtgtgtttgatgggaagcagtagaacatccaggggatggggagagggttg

SEQ ID NO: 625793 - DNA, 827 bp, Homo sapiens
ggcgtgcgactgtcgtcgtgctgcaggagaaagatggtggtctccacaaggagtcatagttcctcgtaatatacgcttgttggccgatgttgaagaaggacaactaggagataggcgagcgggtgactaacggtgtgatgtctgggtgcccttgaaagactgattgagagatttgtgacacttacacggtggcacaggcattgattcattctgggctcacctaagggtgcaaattcatgtaagatctgattatgattggcctgaaagtagcaatgttgtgaagcctaaaattactctcaagaagctcctccgtcagttaagatttggtacacatactttcacttattgaaccgggaattaatttgaatccacatggggagggatggggttgcgatggccccggggaggcataacccaggtgtttagccaaaaaactgggcgagcaattttcattataggcatataaaagtttgtactttcaaagaggctagatgaccgtctaatattggagtggtccagaatgaaacacatatgtaagtcttcccatcaagggcaacaacccgagcaaaggcatagaaattatgtgtcacagaacataatttcaaattacttccaacgcgggggcccttcgtccataacctgtgttcctcttaactcatcaaaggaaacgccttacataacttccatggtttcaactggttgcttttgcactttagatttaattcccgcataatgtgcaacaagttccggaccatgtaaggttacacaagcgaaacttcccagcccttggtaattaacattgaactcgttggacccatttctggtcc

SEQ ID NO: 625794 - DNA, 672 bp, Homo sapiens
aaattggctcggtgtggtggcggatgcctgtaatcccctgagattggaagggaggctgaggcaggagaatcgcttgaacccaggacgtgaaggttacagtgagccaggtcgcagcactgcaatggagtgcaagactgtgtctcaaaaaaaaaaaaaaaaaaaaaaatttacccagggcattggttggtgcaggggcgcaattctttggcctcacgtgcaacctttcgccttcccagctactcgggaggctgaggcaggagaaattggcgttgaccccaggaggcggacgccttggagttgagccgagaatcgtgcctcttgttcccccaggctggagttgcagtggcatgatctcggcacactgaaccggttgcctcccgcatttcaagcgattctttcttgccctcagcgtactcaggaggtctggaggccggggaagaaaatcgaacttgaaagccccggggaaagatcaagcagggtttgtcaggtgaaacccggagaagtgcgttggcccatgtccacgttccctatcaccccggtcggtacgacgacatgggtttgcaacaacaggttggtctaacatgggttgccccaagaaacaaaacgagggtattgtggtttggcaaatgcggcgccccgttatgtgattgaggggcccggtggtatggacgc

SEQ ID NO: 625795 - DNA, 898 bp, Homo sapiens
caacagcatcggtcgggacgcatgcactctggtctcaggccagttgcagccttctcagtgcaatacgccgaccaaaggaaaaatcactaccatgagaattgcaatgatttgctatttgtctcctagggcatcacctggtgccatatcagtataaacaggctggttctgggaagttctgatcgacaataggcgagctatatacaacaagaatacccagatgactgtggcacacatggctgaagcctgtagccatctcagaaggcagaatctcctagtccccgacagaatggtgatgtcctctgaagaaaccagtgaacttaaaagacaagagacccttccatgtaagtccaatgacaaggctcgtgaagcacatggttgatatggatgatttaagaagtgagtgaatagaccactgtggagcagacccggggactccattggaggtcaaatgatactgtaagtgatgtagatgtgccacttgatgattgcctcaaccagttctgagagagggtcgtacaggcatactgatgaatcgagagtaagaagggtcactgatgatcccacggagctgccattgaacgaagtgtttacatccagttggtccccaaaatgtggacatcatgtgatggcgggtgtaaggtggctgatggagctgtggtcaaaattaaagaagttatcatgatgttaacgtcagtacgcatgatgttcaagcagaggtcttacctaaagttgggaaggagacttgaagttttagaaaaaagaacacgtgccatggacttgaggcattggatggaaagggggcggattaaaaagggagggggaaaaggaaaacaaacaaaaacaatataggagcaagaaaggaaagaaacagaaaaagagaacagatcaaagaattagc

SEQ ID NO: 625796 - DNA, 753 bp, Homo sapiens
  misc_feature (55)..(55): n is a, c, g, or t
  misc_feature (81)..(82): n is a, c, g, or t
  misc_feature (100)..(100): n is a, c, g, or t
  misc_feature (146)..(146): n is a, c, g, or t
  misc_feature (149)..(149): n is a, c, g, or t
  misc_feature (155)..(155): n is a, c, g, or t
  misc_feature (228)..(228): n is a, c, g, or t
  misc_feature (295)..(296): n is a, c, g, or t
  misc_feature (337)..(337): n is a, c, g, or t
  misc_feature (394)..(394): n is a, c, g, or t
cggctgctcgcggaggcacttctccgagcgtgacgtgcggactccgctccactgnggcccgccgccgcggtctagccgccnnctcttcgctccctgagcncgccaggcgagggtcagctgccggggcgacgcggcgcggagagggntgngctggnggggctgtgggagcgccggtctctatatggcggcggtctgtcgggcctggctgtcctggctctcgcgctcggncgctgccgctcctatggggtcttctgcaaggggctgactcgcacgctgctcatcttcttctgacctnngcctggctggtgcgtatcaacttcccctacctctacatcgntggcttccatgatgctcaacgtccgcctgcaggttcatattgagatccattgaatgngccctcccagactgacgaaggcgtgacctcatggcccacctgatccaagaacacgaagcatgatgggacagaagagggcccctcggcacctgcctggcacaagtgcagcaggccggaggaggtgactcggacaaactatcatgcaagccttaaagaaaaagaatgccggaggagccctttggactgcagattgcaccctcctggatgacataatgctgtggttgactggaaaattcccaaaagtgaggcatatatcacctggaaattgagaaacaggatccgagcggggcttggcactttggcttcacagtggcggcccaagtgcttccatattgtgagaccaactcacgacagaacga

SEQ ID NO: 625797 - DNA, 116 bp, Homo sapiens
tcgtagcgatggggtttctagcctccgtgaggtgcttgacaagagtgtgcatccgctggatgctgatgacaaaccaagagtaggagtaccatgcaagacactttaagcggtggtcg

SEQ ID NO: 625798 - DNA, 346 bp, Homo sapiens
  misc_feature (159)..(159): n is a, c, g, or t
  misc_feature (282)..(282): n is a, c, g, or t
  misc_feature (298)..(298): n is a, c, g, or t
  misc_feature (333)..(333): n is a, c, g, or t
  misc_feature (344)..(344): n is a, c, g, or t
ctcccgagttcaagggattctcctgcctcagcctcccgagtaactgggattacaggtgcatgccactgagcccggctaatttttgtatttttagtagagatggggtttcaccatcctggacaggctagtctcaaactcctgaccttgagatccaccctnctcggcccccccatttcttgataaattctattaaagatcaaatctcctctaagaactatttatctggggttcacgaattttgatggattttcatcatttaagttctacatacttggtaggttncctttattacttcttngggaacaatgaaatcttcttccctggccaggtaanaaggctaggangg

SEQ ID NO: 625799 - DNA, 327 bp, Homo sapiens
  misc_feature (4)..(4): n is a, c, g, or t
  misc_feature (9)..(9): n is a, c, g, or t
  misc_feature (13)..(13): n is a, c, g, or t
  misc_feature (16)..(16): n is a, c, g, or t
  misc_feature (70)..(70): n is a, c, g, or t
  misc_feature (72)..(72): n is a, c, g, or t
  misc_feature (84)..(84): n is a, c, g, or t
ggantccgntgcngcntcgccctcgctcgccatggagaagaccgagctgatccagaaggccaagctggcnangcagcgagcgcntacgacgacatggccacctgcatgaaagccgtgacggagcagggcccgagctgtccaacgaggagcgcaacctgctgtcggtggcctacaaaaacgtggtagggggccgcaggtccgccatggagggtcatctcgagcattgagcagaagaccgacacctctgacaagaagttgcagctgatcaaggactatcgggagaaagtggagtcggagctgaggtccatctgcaccacggtcctggaa

SEQ ID NO: 625800 - DNA, 575 bp, Homo sapiens
  misc_feature (4)..(4): n is a, c, g, or t
  misc_feature (62)..(62): n is a, c, g, or t
  misc_feature (99)..(99): n is a, c, g, or t
  misc_feature (113)..(113): n is a, c, g, or t
  misc_feature (120)..(120): n is a, c, g, or t
  misc_feature (123)..(123): n is a, c, g, or t
  misc_feature (134)..(134): n is a, c, g, or t
  misc_feature (137)..(137): n is a, c, g, or t
  misc_feature (139)..(139): n is a, c, g, or t
  misc_feature (159)..(159): n is a, c, g, or t
  misc_feature (166)..(167): n is a, c, g, or t
  misc_feature (175)..(175): n is a, c, g, or t
  misc_feature (189)..(192): n is a, c, g, or t
  misc_feature (205)..(205): n is a, c, g, or t
  misc_feature (212)..(212): n is a, c, g, or t
  misc_feature (216)..(216): n is a, c, g, or t
  misc_feature (218)..(220): n is a, c, g, or t
  misc_feature (230)..(231): n is a, c, g, or t
  misc_feature (248)..(248): n is a, c, g, or t
  misc_feature (257)..(257): n is a, c, g, or t
  misc_feature (287)..(289): n is a, c, g, or t
  misc_feature (316)..(316): n is a, c, g, or t
  misc_feature (324)..(324): n is a, c, g, or t
  misc_feature (390)..(390): n is a, c, g, or t
  misc_feature (429)..(429): n is a, c, g, or t
  misc_feature (462)..(462): n is a, c, g, or t
  misc_feature (572)..(572): n is a, c, g, or t
ggcnatgtgcgctaccaagtgtgaagtaaaggctggtctcgtgccacgcctcctgtaggaanggcctgccttgtaatgacacctatcatattcgtgctnaatctgaagtcttntgttttnctnatggtaaaaantantnctgatagaggtttttttctnatggctnnccactgcntcctggctctaaannnnccgcgagcgctcncttctgnttgnannnatattctttnntcttttggacatcaggnttgatggtntcactgccaggtttccaggcagctgggctnnnttccccatgtttgtcagtgaactgganggcgctgnactagtctcaaagtctcatcctactagtagcggccgaacgaggtggggtcatttacagtgatcatncctgaatgatatacctcttatcatcaatgataaaaaggnccctgatacgagatgtccttcatgagcctttangaccccataatctctgagcaagtggtgcgctctcgggtctgataccaaaggaatgttcatgggtcccagtcctccttgtttcttaggtgtattgacccatgctagatganaga

SEQ ID NO: 625801 - DNA, 277 bp, Homo sapiens
atcctcccactcctttcaaaggcacacagaaccttctcagtatttctgtcattatgtaatgcacattgcacatccctaaaaaaacaccacaaacgaatagtgatttagtaccatgcacacactacaataggcggagattaacattctactatcggaagtccacatcgctaacacagtactacatagatatggacgaatacaacctagacagtactgtccagatgtggacaacatagaacgcttagacgtatgaccagtattttatttgatcctgtaa

SEQ ID NO: 625802 - DNA, 480 bp, Homo sapiens
ccctcgtactggcatttgatatacatagtctacactttctacatagtatacatgatgtataatttagcttttcataatacagtgttccatacatcattagttctgttaaacattaagtcactttactttccaaatcccataactttgaaccggttccttttgtacatagtttagcaaggctaatttacattagatgctatttattcagaggtatatgatctgagtattaacagttgctgaagtttggtatttttatgcagcattttctttttgctttgataacactacagaacccttaaggacactgaaaattagtaagtaaagttcagaaacattagctgctcaatcaaatctctacataacactatagtaattaaaacgttaaaaaacagtgttgaaatctgcaccagtatagaccgctcctgtcaggataagactgctttggaacagaaagggaaaaaacagctttgagtttctttg

SEQ ID NO: 625803 - DNA, 157 bp, Homo sapiens
ttgaggctagatgaggaatgaggagcgaaggaaaaggcgccgggagaagaacaaagtcgcagtagccctgatgcctggaacaagaaagaaggagcgcacggagtatctgcagtgggaatcctgagcgtgtggaactcatgaacgcagagctagaaga

SEQ ID NO: 625804 - DNA, 380 bp, Homo sapiens
  misc_feature (135)..(135): n is a, c, g, or t
tttgaaagacaccccaacgccctggggaaggaaggagtagggcagtggtgccttctttcaaaaaaacatcaaccagtagcgctggcgccatctcaggagctggcgggctggccttttggacctggcttctccccncttgtaacgcctggttaccacaaacttgttttgggttcccgccaggcttgaaaaaaatgatttaatttttttcctccctttggttttattttggtggtttaatttgtgttttcttttctcccttttggggggtattcaaaatgggctgggcccctgggcgaaacacaactacctctgttggcatttttttaataccaggaacccagcggctttagcccctgagcggctaaattaaataaagtgga

SEQ ID NO: 625805 - DNA, 557 bp, Homo sapiens
tgactctagcaggatcctcgattgtgaaataggtaggtagaatcaatatggtgaaaatgaccatactgcccaaggtaatttatagattcaatgccatccccatcaagctaccaagtgactttcttcacagaattggaaaaaactactttaaagttcatatggaaccaaaaaagagcccacattgccaagtcaatcctaagccaaaagaacaaagtgggaggcaccacactacctgacttcaaactatactacaaggctacagtaaccaaaagagcatggtactggtaccaaaacagaaatatagaccaatggaacagaacagagccctcagtaataatgccacatatctacaactatctgatctttgacaaacctgacaaaaacaacaatggggaaatgattccctatttaataaatggtgctgggaaaactggctagccatatgtagaaagctgaaactggatcccttccttacaccttatacaaaaattaattcaagatggattaaagacttacatgttagacctacctatttcacaatcggggtaccgagctcg

SEQ ID NO: 625806 - DNA, 943 bp, Homo sapiens
  misc_feature (78)..(78): n is a, c, g, or t
  misc_feature (80)..(80): n is a, c, g, or t
  misc_feature (88)..(88): n is a, c, g, or t
  misc_feature (184)..(184): n is a, c, g, or t
  misc_feature (208)..(208): n is a, c, g, or t
  misc_feature (211)..(211): n is a, c, g, or t
  misc_feature (219)..(220): n is a, c, g, or t
  misc_feature (237)..(237): n is a, c, g, or t
  misc_feature (251)..(252): n is a, c, g, or t
  misc_feature (350)..(350): n is a, c, g, or t
ggcgccgcgggtgagaccctgcgtgtctgctcagcggactctgcccgcccccacctccccctgcgtcgggccgacatnangtgactcngctggtgctgctgggccgtgtcccggcgcacccggactcccgctgctggttcctggcctggaaccccgcggggaccctgctggcctcgtgctggcnggcgacctggagaatccgcatctnggngcacggannggtgacagctggatctngcaagtctgtcctnntctgaaggccaccagcgcaccgtgcggaaggtagcctggtccccctgcggtaattacctggcctctgccagctttgatgctaccacttgcatttggangaagaaccaggatgactttgagtgtgtaaccactctcgagggccatgaaaatgaggtcaagtcagtggcttgggccccatctggcaacctacctgggacagcttgcgaggcgcgagataaggagcgtttgggtctgggaagttgactgagagatggatgaggtatgagctgtagttaagaagtgactagaaggtgagacaagagaagaggatggtcaaggattgtaggtttgagaggcgaagtgtaaggtaggctcttgagaggatgaggtggaggagtagatgagtgaagcaacaagggtgaagtatattgaaaccgagagagggagaagagagataactaactgggaaggtagaggccatgagaaggagaagacagaaaaggggtgacactggaaatgcgaacatggattggggaggagagtggagcgtagggtagacagagggagagagcagagagagaatgagaaagtcgatggtagggagaaggagcggaaggtggtagagagaataggaggtgagaaaactgtagagagaaagcaataggaagaggggagattggggacaaggggaaagtgatgagagagggaatta

SEQ ID NO: 625807 - DNA, 647 bp, Homo sapiens
  misc_feature (41)..(41): n is a, c, g, or t
  misc_feature (62)..(62): n is a, c, g, or t
  misc_feature (64)..(64): n is a, c, g, or t
  misc_feature (79)..(79): n is a, c, g, or t
  misc_feature (97)..(97): n is a, c, g, or t
  misc_feature (103)..(103): n is a, c, g, or t
  misc_feature (105)..(105): n is a, c, g, or t
  misc_feature (107)..(108): n is a, c, g, or t
  misc_feature (122)..(123): n is a, c, g, or t
  misc_feature (126)..(126): n is a, c, g, or t
  misc_feature (131)..(133): n is a, c, g, or t
  misc_feature (135)..(135): n is a, c, g, or t
  misc_feature (141)..(141): n is a, c, g, or t
  misc_feature (167)..(167): n is a, c, g, or t
  misc_feature (235)..(235): n is a, c, g, or t
  misc_feature (582)..(582): n is a, c, g, or t
  misc_feature (584)..(585): n is a, c, g, or t
  misc_feature (587)..(587): n is a, c, g, or t
  misc_feature (591)..(591): n is a, c, g, or t
  misc_feature (600)..(600): n is a, c, g, or t
  misc_feature (603)..(603): n is a, c, g, or t
  misc_feature (607)..(608): n is a, c, g, or t
  misc_feature (611)..(611): n is a, c, g, or t
  misc_feature (613)..(613): n is a, c, g, or t
cccctcccgggcaaaatacgcagcgctggggcactggtgcncccggaggattctgccgcacntnccgagggatggacangctgtgctggagaatgtntcagangntnncaaggaacttcctnnctncctgnnnanaccgcngccccccggccacacgctggaagccngctggtttctgctccgtcattgcattcggaaaggcgaccccgaacttcgggcccacgtgattgaaaanttcctattgttgcccttccactccggatgggaccctgaccacggaggcctcttttacttccaggatgctgataacttctgccccacccagctggagtggcccatgaagctctggtggccacacagtgaagccatgattgccttcctcatgggttacagtgacagtggggaccctgtgctttgcgcctcttttaccaagtggctgagtacaccttccgccagtttcgcgatcccgagtacggggaatggtttggctacctgagccgagagggcaaggtgccctctccatcaagggaggtcctttcaaaggctgcttccacgtgccgcggtgcctagccatgtgcgagnanntnctgngcgccctgntgngccnnccngnccccgccccctcccccgccccctcccctgcctgc

SEQ ID NO: 625808 - DNA, 1191 bp, Homo sapiens
tggactggacaggaacagagggttatattggggggtccgtggaaaacacgtggggagagggacgagggggcaaggctcgaggctcacgggggcacccccttagccaaagtgccccctttccccatagggatggggaggaagacagagacagacaaaccaacagagagtggagaagaaagaccaagcggagtgctagcggagaaggagggaaggaaaccccgaggtggtccaccaccttcccactcagaagtgagttccaccgggataaagaaatggcggtggaccggctccacagcgctatacggaggaacaagaagaaggagtgtgtccgcccttattctcactctcttagaggaaagggtggacaggcgcaaagcccatagaaccaggccacatctcgcagtgtgtgagtggcgggtgtgtgtggtgccccattagaattcagtctccattctcatacgtgggccagaggggatttctcagggccagctacatagtctcatagagtgttatgggcggcggggaaacaactcgatagagggctcaggatccaatttccacaagctcggggcagggggggaattcgacgggcagggggccatctacccgggttccctctttacagcacgagggcacgtgaaacagcggggacaagcggagatctccggcatatatccatttccgtggggttccccaggtgacccctggaggggatggacatcgcggagcgcgatctaggaacaatgccgggacattgcttccctcccagattctcccaaatcagggtccgtcaggaatgacgggctcccaggggaagtgcggcagacctccctggtggcgcgtcgcggtgccatcttaacgcaacacagggcccccagaaaggacaaggaactgggtggacgacccaggggcacagtgaagtccccagtctgggggacctaggggacacacaagcataccggacgacccaaaggcacagagatctccccacaaatgggggccccgaggccacataagcaccccgttgttggggcccccacatcgcggccgtgtggtttgcggccccaccatcacagggcacccaaagcaacggaaaatacagagacgggcgcccaacacaaacccgtacgcacaccgggagaggggacgcaaccacgaagagtgagaacaacagcggcagaggtatacctg

SEQ ID NO: 625809 - DNA, 250 bp, Homo sapiens
tacatcagctcggtccacggttaggtacagctacgggtgaggtccagctcatctggtagcgagccttaggcttccctctagaaaggcccatagttcatgagcacagagggtctgatgaagttagtgtactctaatatcagggtatcatctggagattgagtgaaagtgattaccagaagagtgaggaagcctaaataaaaagtatacttttgtttcaggcggcctttaaagacttaagattaaattatat

SEQ ID NO: 625810 - DNA, 504 bp, Homo sapiens
  misc_feature (14)..(14): n is a, c, g, or t
tccattgggagccntgtgatccatccattaggtgactgtgagcatccacttctgtgcttgctaggccccagcatagtctcacaagagacagctatatcacggtccttgcaacaaacgcttgctagtgtatgcaatggtgtcatcgtttggaggctaattatgggatggatccctggatatgccagtttcttgatggtccatccttttgtctcagctccaaactttgtctctgtaacttcttccatgagtgattgtttccaatcctaagaagggacaaagtgtccaaactttggtcttcgttctttttcagtttcatgtgttttgcaaattgtaccttatatctcgctatactaagtttctgggctaatatccacttatctgtgagtacatattatttgagttcttttgtgattgtgttacctcactcaggatgatgccctccaggtccaaccatttgcctaggaatttcataaattcattctttttaatagctgaggtcgacgc

SEQ ID NO: 625811 - DNA, 1226 bp, Homo sapiens
caaaccctgaagacacccctgcccccctccagagagtgaggagggggcctgagactggacctgggatctgcccacggctggaaggggcccatggctccccgatgggtaaacccttgaagacaccccatgaccccccatccatgagagtgaggagggggccatgagactggaccatgggtctgcctgacctcagaggtggctctcaggatgggtgacagagggggccttgatgtctgtaaatagccatgatactaacatttcttcccatctgtgacaacggggcccacacccaggggcaagcaaggagagatccatccccatactcctactacaacaagcaccagaagactagaccaacaaaaccacgggagtgcgggcataagagcaagcgagaagacagaagggaaccaaacatgaggaaaaccgagaacaaaggacacaagacaaccaacacaagaaccacaaacaacaagacaaaactagaggaaaagaaaagtagaaacaagacaaagaacaatagaaaggagaaacagaggacgaaggaaaaggaacaccatgaacacctgaacagcacaaaaacaaaaacaaaaccagaaaacacaaaaaaaaaaaaaagaccacacagagaaatcaaaaccaaagaaaacaaccaagcagaaaaaggaagcgacgaggaaaagacgacataccaacgtagacggtaaaaggaaaaacagaagatatgaaagcagaaagagaagacaggaccaagaaaggacgcacaggagagagagcacacgatagaagaagaagggacagccagaacacaccactacaaaacgaacaccataagacagaaaagcacgacgccactaataaattcagaacgcaatatcaaccaaaaaaacagacaaataactgagagacgatataacatataaatgacacagataaacaacctaaaacaaacaacaagaaaacataccaacatggagaggaaggagcgcaagaggaagaagagaaagacgaaagagagtggtggagcaggggagagagacgaaggcgaggggagaaatggcagagaggcgaggcagggcgcggctgggaagagcggcaagaagagaggagggagacgcggaagtagggagagcgagagcagaggccgggacgagcaggggaaggggaggaggggggcagacaggaaggagagagggcaggaacgggggagggggaggaggggggagcgg

SEQ ID NO: 625812 - DNA, 364 bp, Homo sapiens
gacttatggttctggtagactagaaattccaacagcaagagaccagtatctggtgaggaacttcgtgcagtataattccatgatggagggcagaagggcaagaaagggtgagagcaagaggatgaagcttgctttataacaaagccactctcaggatagctaacccaatctcatttataaggacaacatgacctaatcacctcttcttaggccctaccttccagcactggttgcattgggatttcagtttccaacacatgacctttggggaacacattcaaaccatagcaacagtggtgtcagtgaggttggtagtgttggtggtagaggtgacagtgcaggtggcagtggggttgtggagttg

SEQ ID NO: 625813 - DNA, 532 bp, Homo sapiens
catacgtatagagcacttagatcagtgccaggacatcaagactcgctaggtgagtgtgacatcatcatcagcattcattcttatcacacatctactgatgatgtatatgtgactctgagatgcacatcaggtaggctgcatgacatcgcctcgcatagccacatcagatgacttagcgatgacacgagttagtgtgtgcagagggccatgactactgtcgacagatcgccgagtagaatatacatatcctggctccacggatagcatcgtactttctggcggatcacctcggcaccgcacatcatggatatgtcagagaagcgggctgtatgtagtgcatgtagacagttgtacacatcttaccatctctttctgtgcgcagtatgtagtagttcttactctggtagcgtaccgagtgctccacatagccatgtgcaatctcgcggggcttcggtcagccgtcatctgcgatatccgtgacatccttgcctaagtccactgcattgatctgtcgccactcgtgccgaattcc

SEQ ID NO: 625814 - DNA, 92 bp, Homo sapiens
acgcggtcattcgcggcaatctggagcgtctggcaagcgagccggacctgcacagctttctcgggcatatgctcctcgagacgaccccccag

SEQ ID NO: 625815 - DNA, 198 bp, Homo sapiens
catacacgatccccccaccaaaagggcatcttattcacagtcgctttctttcgatttagaaaagccccagagcactttacaggttcatgtacctttatcggatctaaagtacactgacttactgcacttacttcatttcctattctacttttattgtaatatctgtaatcattctagctaacttccttcaacgagact

SEQ ID NO: 625816 - DNA, 1279 bp, Homo sapiens
tgggcaaaaaaaaccttttaataatgaggggaaaagggcaaaaaggtgcaacccaggcaggcaggtttgagggcaggaaattgccgcctttcatagggttctccaaaaaacctgctgctcaaccggagaacgttgggccgggaagggcccaaggcctgcagcacattctacacaaggggctcagcaaaacttccaggcggttccacacctcgttgcaaacaacaaaggtgtgtctcagtgggcctcatcaaagcgtgggggttcgtgccccgtggtgtgttataggttccagtatcttttcccgtgcatttgccgcaggttaacacaggttcgtgtcgtgcgtgtgccgccagttggcgggccactctgggggtgcctcctcgagatgtggccctccttgtgtgctcatgtgggcctatacagagattcttccttataagctctcaatcagtgtgggccattttctccctctgtagaggggctcaactcacaaggcagaatcttagctagtggggtttgattaaatggcgccccacaaacaacaggacaaagattctcgcggcgcggacgaggagctcacaagggggatcactgtgtggcagactcccattaacgaagaggtagggagcaagaaataccgaagctctccccgataacaagcggggtttcttataatacctttcaacaggtggctccgtgatgtttttcccacaaatgtgtctcgccgcggagaaagaaattggccatattccctctggaaaacattcagtagagcgcgccagaaaaagtgggcacagcctaacaggaaaatgctccccgcgacaacccgcgaaaggtggtggccccacaccaggtgtgggcctccaacgtggggcctcccgagatctgtggcaacagacgggcacacacgctggcgctctacaagaacaaatatctcactcgcggggggacacacacctttgtggttatcgtgtgccaccacacaccggagcagcatctccaccacgaggtggttagtacaaccagtggaccccccgcggcagcgaggaaccaaacacatctgtgttggggggtaagaaccccccctcgctcgaagaagcacccaagacgacggggaggtgccccccgtggggcacacaagactaccgcgggcgcccctacatataggccagcgagctgtggaggaaaccacccgggggagggggcccacactatagaaagggcgaacaactcaccccactgaaacgagcactcgtgtgtgtgtggctcaaaacaatgc

SEQ ID NO: 625817 - DNA, 365 bp, Homo sapiens
cagcacactgcagcattgagaatgcatacggtctctatggctgatatcacatgcaatgatacaagattaagtattttccggctgggcgcgggggctcacacctgtaatcctagcactttgggattacaggcaggcggatcatgaggtcaggagttcaggaccagcctggccaacatggagaaaccctgtctctactaaaaatacaaaattagccaggcatgctggcgcatgcctgtaatcccagctactcgggaggctgaagcagcagagtcacttgaacccgggaggcggaggttgcagtgacccgagatcgtgccattgcactctagcctgggcaacaagagcgaaacttcgtctcaaaaaaa

SEQ ID NO: 625818 - DNA, 369 bp, Homo sapiens
atgggccccccccccctggggcccggccaggaggggccctgcccatgccccccctacaggccaggggttggggggtggggcaattccagccccctttcccggggcccggggccttggggtcctgccctccccccccgggttggttcctcccgggggcccccctgtggaaataaaaaagggatggaattggggaaaaggaggagcaggaggccctcttcctttttttgcccggggggtggggccccccccctttggagggccgggggcagggggggggaacccccgggggggggtttttttaaactgggtttttttttattttttttttattttccgtttttccctaaaggggcccattcccccttttga

SEQ ID NO: 625819 - DNA, 1094 bp, Homo sapiens
gacgtagtctcacgaggtgcggaacttagggtgttcgtcttgagaaggtggtcaggtgaagaaccatgttatcaagcatttgtatctctagatggcttgcttcgcagaaagtcgtagttgtgttcagtgctagcctagtatcgtctgcagtaccatttcacatgacacgtgttgagcctcagtgtccacttgagtccagcggaggcgcaagtacagcctctgggcgtgtgacgtggcaggtgcattcagatgtacagcgcatacacttcgacgcacatgatattcctctacagccaactagtggtcgtcggctaagtagctgaagtggcttgacgccgacggcacttgtaggatgcccaggacgagttgacgaggcggtaagcccagggggataatacaggcccggaccccaatagcgacgcatttgtacaagaccttctgcgccgaaacgcaacacacgaggatggtagaaacgtgcactagtagccccggaagtacttacctcgctttgtgcgacccacctagggtagaggaccccctacgttgccggagcccaccgcaagtcgaggaaacgggcactcgtgtaaggacacgcccgtcttgcgcgggccgaataagtagtgacgcaagcaagttgccgcggcgcgacggggcataattagggagagatgccaagtcaggttgccaaccaacccccttaccaacctattcgactgcattccctagccaatcaaaagaacgcaacgctacgcgaacagaaaagctgcataaaggccgtgctgacgagcaacccagctacacgggataaggggtatccccgcgcccgggaatgtccaattggcgataggaaacacaccaaaaaggtggaaccatttttctgcgataccaaccacccatagtggtgaaattagatactggtcccacatatgcgtcctcagagagtacacaaacagtggttatgcggttcccccttattgtcccaatagcatagcgtattgccaccagcaattatggggcgaccacatatcaactaggatacattatataccgaaagacacaactaagagcgcggtatacctaaatatatccccatg

SEQ ID NO: 625820 - DNA, 111 bp, Homo sapiens
agaatacgaaatcatgactcgtcgtgtgttgctagtctgccagccgaacgtaaagaaggatggatcgtacgacagtctgttgtgcgtgctattgaaacttctaaaactagg

SEQ ID NO: 625821 - DNA, 111 bp, Homo sapiens
gctctctagaggatccttccccttctcccacattattcctaacctggctggcagggtggagcgatgtgatctaagggtcctgtgagaagggtggagtggaagaggcaggtc

SEQ ID NO: 625822 - DNA, 718 bp, Homo sapiens
gaaagcaggcgacctcttcctgatgagaagaagataactagctgggtaccacatgcctgattgccacagctgttatcacgctatttaatgaacctatagctgaagacagcataaagggtgcattgacagctgcacacaaaaaagcccacacatttttgtgcctatgaaaatacatctaggatgtgtctgtcctcactgggacacagagctcccgtctctcacgcagcgaagttcgatccatcatcctctatgaaatcatgcaccgttggaagctggcccaggtacacgtacacatagactctatagaagctgtcactaagatagcatctgagcacacagctgtccgggaacaggcataggaggcgtgcatagctgcagcagaacaggccatctccgtccgacagcaggacaggctagagaatgctgcacagtatagagagcgagcaacatgcgacccatggacacagatcagatacacgagaggaaacgacctcagaatgtccaagaagccaaaggacccacagccaccagataaagagtttacgccttacgactacagccagagagacttcatggctgttgcttaaacagcagatacaaagttgcttctcagattgatccacatatacagaccccgtctgtcgtgcgttgcagccgacacaggctctggtactactgggcacgagatagtactggagacacgtgtcgctgctgacag

SEQ ID NO: 625823 - DNA, 298 bp, Homo sapiens
tcgggggcgtccctgatttttttgggggcccccccggccggggcccctgcccctaaaaaagggggtgggccctttgggggggaaaccgggttttggcctaacggcccagaccccgggggggcaggggaaccttgtttttggagtcgggaaattgtttgacacccggccgggggcttttgttggccggaatctcctcccctttattgatctaaaggggggggcctggggcccgggcccggccccccttgtttgggtacccttgggggacaccccctgggggggtcaggccccggttttc

SEQ ID NO: 625824 - DNA, 781 bp, Homo sapiens
ggaacaaatctctgaactcttcagcaaacagtggtgacataaagaaaatcattatgggtctggatacaatgaagaaaacagcatgtggattctagtctagtaggaatattaactcacgcgcagcatcgcgcgaacaacgccactagcggtcacatacaatagggacgcgtactaggcatgacccgaatcatatcgctacagactgcggacgctcggctttcaacggacgggcaggcacaaataccggcccgttgcctccgaaccctgcggtcgccccacgctcacgggagactgacgctactcggccccgcgacctaccgaatgcctgcggaagaagtgacgcgcatactggccaacacacctgggccacctagcaccaccacgatagacggtggcgctcgcacccagacatcatgctacaagtcggaccaccagcccacgtcaccgtctcggcgactcctgcgtgccgcacccctcatcgcctcggcacagtagagctactaacaagccctaagacacgtctctggccaacaccgcaggccaccacacaccaccaaacgacccaccaggcactaacggtcaattctcactggactccctactacacaccctagccagcgcgcctgcgcccacacgccccatcatctctagccccaacacacgctcccacactcctcacctatgcgcgacaccagcatacaaaccatctccaacctgacagcgtcaagcttgcacccgccactgcaccacactagccttagcgcagccacgtgacagcaca

SEQ ID NO: 625825 - DNA, 465 bp, Homo sapiens
tacttttcacagggtgtaagctccttcttcttcctgcacccctgccgctaggcctctgtctcagcaaaatgggtgagcagaagagtggaaagaccagctttggagctccatagctctgccgcttaacggcaccttttggacaacacgcttaaccactctgaacctcacgttctcacctgtagtatggggataaggactccagtacttttggggtgttgcaaatattaaaataagaatgcagaatgcaacactaaacacctagcaaaggtttggcccttagtgattgagcaggaaaattgtagctgttatttccattcacaattgcactgcaccttacactgtccaagaagccgttgagaaatttgacaaggtctgctctgatcgtgaggagctgatcctgaacagctaccttgctgcattgttttagtttcatcagtagtagtgaaatcagagcagcagagagaa

SEQ ID NO: 625826 - DNA, 155 bp, Homo sapiens
ttttcccccccccctttctcttttttcccccgggccccccaaaaagtttttttttggggccccccccaaaaaaaattgccccccctttgggagggggggagggtttaaaaaaatgggaaaaaaaaaaaaaaaaccccctttgtttttccccccca

SEQ ID NO: 625827 - DNA, 523 bp, Homo sapiens
tgggtcctgcctcaggaaagaacagaaaaatgagagttgatattaaaaaaattttctcctgtgatatatttgagagatctatagcatgaataaataaaaacttatatttttacttaagaaaaatattcatcaaattgataaatatggtaaatttccatttcagatcttaaaaaatctgatttttaagaataatgagaacttgcttattttattcataagggtagttgaatctgtagttctttcaagatggaataatttctaaaatactctattcagaactataaatgaaaactagtcagtggggacagttttaaaattcaccagataaaggcatgtttaaaccagtagtccccccttatctgtggtttcactttccctggtttcagttacccaagatcagccatagtctaaaaatattaaatggaaaattccagaaataaacaattcatcagttttaaattgtgctgcttttctgagtagcatggtgaaatcttgctctgtcctccccagggcataaattatc

SEQ ID NO: 625828 - DNA, 157 bp, Homo sapiens
cgatcagaggatcccaaacctaatacgcctcatggtactagtcgggttagttaccaagtgaaccataatggaaactcccaaattcaattttatggattaatccgtcacactaggctgagtttcccatgaactcccattgaaaattcacctctccctc

SEQ ID NO: 625829 - DNA, 131 bp, Homo sapiens
  misc_feature (35)..(35): n is a, c, g, or t
  misc_feature (48)..(48): n is a, c, g, or t
  misc_feature (90)..(90): n is a, c, g, or t
ggtcgacgagttcaccctctaaatcaccacagatncagcacacagggnactaagcatcaagcacgcagcaatgcagctcaaaacgcttangcctgagccacaccacccgacggggagaacagcagtagatt

SEQ ID NO: 625830 - DNA, 267 bp, Homo sapiens
ccgcccaagccatcaagtcacttcctgctcacttttcctcaggttctgtgtgggagggcagtagccgtagccaagctacagcccataatctatcctcgggggcaccctcgaaaactcaatggcagagtccttggacagcagagcttactgcccactaggccagccagagagctggcatttcgcagacttgtactttccaaacttttcctgtgcctggcggagaagattccagatggcatgctccttgccattcacacttcgcgccac

SEQ ID NO: 625831 - DNA, 496 bp, Homo sapiens
  misc_feature (433)..(433): n is a, c, g, or t
cagtgacgtacaggtttctcttaccgtgatagatggtgctatcgcttcctgcggatgccgggctgaacggatcctcccggatggactgaacgcgcacaggcacgtctcacacccgacctgagcctgccagcctccacgacctgggctagcctgagagcacggggcccggcggccgggtccgccaccaccagtgtctctgatgcctgcagcctccccagccccgcttcctctgcagcccggcgcttgggtgggcctgaggacccagggggagtgtgcggcgtatgaagggctgtgccataggctcgcagcctctgtggctgttcccagccctgtttgatctctccatcggggacagttccctgcggggaagtcctttgtctgagttctccaggggcagctgctgggcccagcctccccaggggcctcagagccncaggtgcctggggcaggcctgtggtgggcagctggaggcagcagcagtctgtttgcttgtttt

SEQ ID NO: 625832 - DNA, 201 bp, Homo sapiens
  misc_feature (32)..(32): n is a, c, g, or t
  misc_feature (75)..(75): n is a, c, g, or t
  misc_feature (139)..(139): n is a, c, g, or t
tcagtctggggcgagatcgggtagaaatcttnatcttaagtcacgtaagatacaagttcaggcaggtctgaaggnctggatggcaaacatcagacctgtcttccaaggagacaagtcctggctacatcccagcctgtgnttacagtgcagacaggccatgtgagcccacggtgccagcacagagcgtccttcccaccactg

SEQ ID NO: 625833 - DNA, 120 bp, Homo sapiens
  misc_feature (51)..(51): n is a, c, g, or t
gtcggtcatccgcagcgcagtctgctacaaagtgccactaggcactcgcancacgcctgtcagcaggagcggctctgccattaagttgagatggtgagacgaagtgctaggggcggtacg

SEQ ID NO: 625834 - DNA, 157 bp, Homo sapiens
aggtctgctgatggtatacctctgcgtgggctctggcccagatcagccgccgtaaagttgcgccggtacgtgtggtccgtggcgatgatgctcagacgcaggcatccagagtggtcgggatgctagatgcgccaccgagcaagactttgacgcccag

SEQ ID NO: 625835 - DNA, 394 bp, Homo sapiens
  misc_feature (59)..(60): n is a, c, g, or t
caggagccggcccgggggccccccccggagattgcccccaatgccccctttctttattnngaagccttttaacgggggccggggcaaagggacccagggggaaaaaaaatcccctttttgggggtccaaggggttttccccccccgggggggccccccaagggttgtttagttcttttccaaaaaggaaacccctgggtccttcccccaaaaaaaaggggggcccccccccgggccccccgggggggaacccccggtccccttttttttttctccggcccaggggggggggggggccgggggggaaaaaaggttgacccccccccccccccccttttttttttttaacccgggggggttggttgaaaaaaaccctccggttggcccccctttga

SEQ ID NO: 625836 - DNA, 442 bp, Homo sapiens
  misc_feature (25)..(25): n is a, c, g, or t
  misc_feature (30)..(30): n is a, c, g, or t
cgaagggaagctctgaagcaccctnaaaanacctggccattattaagctgagcaaagacaagcagtgttttaagcaagaaatcacttaaaccttattttgaacgctgacctatattatcaagaaccacattattattattattttttgtgacaggtttcgttttcattctgtcgccccaggctgcagtgcagtggtgtgatcatggctcactgcagccttgatctcccagggctcaatcagccctcccacattagcctcatgagtagctgggactacaggctcacaccaccatgcccagctaattctttgttgttgttttttcttatagagatgaggtttcaccatgttgcccaggctggtctcaaactcctaggctcaagcgatctgcctgcctcggccttccggggtgctgggattgcagcatgagccaccatgcctggc

SEQ ID NO: 625837 - DNA, 556 bp, Homo sapiens
  misc_feature (44)..(44): n is a, c, g, or t
ggtcgatctagaggattccccggtgggagacggggttcacacgntgggccggggctgggtctggaactccgggacctcgggtgatccgcccacctcggcctcccaaagggctgggtattacagggcgtgagccaccaggccgggccattagtagggtgttaaaaaataggttctcttggtaaaaattagtttggaactttatttttactttttttcttggcattctcacccagtctattttgggtcttatttggaagtttcgcacaccagtcaagatgtatatatatgtgggccaggggatatactttcggacttggttattcggtcaggtggacactctctcagggggaatcggcatgggtctgttttcacacggctgataaagacataccggagattagaaagaaaaaagggtttaatgggacttacagttccacatggctagggaggcctcagaatcagggcgggaggcaaagggcacttcttacagggcagcagcaagagaaatggaggaagaagcaaaagcagaaaccctggataaacccatcagatctcc

SEQ ID NO: 625838 - DNA, 112 bp, Homo sapiens
tgcatggacaatcacgaattctcgtggcaggctggcagagcatcctgaagaacccgaagttcgagcagccggggcagaccatcaaggtcgccgccaaccaggtctggttcga

SEQ ID NO: 625839 - DNA, 228 bp, Homo sapiens
cccgcttatactacaggtgcatgccaccacacctggctatttatttttaattttggtagagacaggctctcactatgtttcctaggctagtctggaacacctggcctcaagtgatcctcctgcctcggcctcctaaagggctggattataggcaggaccactgcgcccagcccaagaggtgagttttcaagagctgagaaggcggagccaggccctttcctagcggtg

SEQ ID NO: 625840 - DNA, 259 bp, Homo sapiens
ttcggtcaataagtataggtcatacaaattgaaaccgtggcgcctaatatgttccgcaaggtgacagatcagatattatgacctcagcatttatagcgaggactaaccccttattccttctgcattatgaattaactagaatataactttgcaaggagagccatatcttagacccctcgttaatcagacaagctaccttagaagcagcttatatagctcgcccgtctatttagcataattgtgggaagatttattggtc

SEQ ID NO: 625841 - DNA, 215 bp, Homo sapiens
ctaaaactaatcgtcccaacaattatatactaccacggagcatgactttccaaaaaacacataagttgaatcaacacaaccacccacagactaatgattagcatcatccctctactatttttgaagccaaatcgacaacaacctatttagctgttccccaagcttgtcctccgaccccctaacaagccccctcctaatactaactacctgactcc

SEQ ID NO: 625842 - DNA, 2205 bp, Homo sapiens
  misc_feature (1039)..(1041): n is a, c, g, or t
  misc_feature (1046)..(1047): n is a, c, g, or t
  misc_feature (1049)..(1049): n is a, c, g, or t
  misc_feature (1057)..(1057): n is a, c, g, or t
gtgtctttgtggtgcatctggttctgtttccctacggttacgttctccgtgtgtgtatgtcgctgctgcactgtgtgcccctggtctgtcacgccatggatacgtttgggactccgtctcgttcgagtcttctttggtcccgtgttcattcttcccttgtgtacgtcgttgactacgttcaatgctctttttgttcccttgccctatggtctaggttccatttcatggcttgggactctggtagatcctggaactgcgcaactgctttttatgtcgtcagtgcctgatccccctatgatttgaatggtatacgccccctccccgatagtctggctatcactagatagttgtaatataatttatacgtcgctctaaaggaagtgaaattgtatccgactgaatgcttgatggctctcgttggtctttaaacgcttatcttagttaacggatcacagaagcagtcatttccatcgtgtacgttgcgggttaacgcacgtctatcgtgtactcgcctttcagttgtgcgactgctcctagtatctttgtttgtggtttaacgacgcactgtaaggaatctgcacgccattcctgggtcgtcccagcctcgatcacggagcgatcttgatggttgtctgggaccaccctgatgccggctctctcatggctcgtgtgactgactgggaagcccatcctgaccagtctgctctcgaggacccatggaaaggcaggtattgaaacatgtctcaggtaaacgtggaccaagaagcagtggcctttattgcatcgccagaaccagcgcctcattgaccaggctgcctcccttgtggcagcaatcggcatcagctgaattctactcacagtgcgttttaagtgaatatggtcgagaaagacggcaccaggaagccgtcctggcgcctggcagtccgtgggacgggatggttctggctgtttgagattctcacaaggagcgagtcatatcgtggacacagcacagactatttcttagattcttcttttgccttttgcaaccaggacagcnnntgcannanctctgtgngagggtaggagggtgggaaggaaacaaccatgtcatttcagaagttagttagtatatattattataatcttataattgttctcagaatcccttaacagttgtatttaacagaaattgtatattgtaatttaaaataattatataactgtatttgaaataagaattcagacatctgaggttttatttcatttttcaatagcacatatggaattttgcaaagatttaatctgccaagggccgactaagagaagttgtaaagtatgtattatttacatttaatagacttacagggataaggcctgtggcggggtaatccctgctttttgtgtaaacccgtaccgtcagtacgtacgtacaccggggggttttcttgccttggtctgtctggcaaggacttcgtacattctcgggaggtcttcatgagaaacttaaatgtcattatctgggcttatatctggcctctgctttctcctttcaattgtaaagtaaaagctataaaagcagtattctctcttggtaaaacaccccccacaacaacaacacaccaccaaaccactttgacaccctcccccctctccatccactttttcttcacccaccttccacccacggcccacccgcccccatgctcacatgcaccacggcgcccaaacgcggggggtgcctaaagcgaaacacccgggcgctcaacagcaacactagcgcacgagaactccctaccagagaataaaaaaagaggcgccgcgcgcgacacacagccggagcctgcttgcgaccacaccacacccaaacagtcggagaatcccacggagagcagcactactacaggggagacccaccaccactaagcgaggacgctcaccacaaggacaagagctacacatattcgacagtaaacgccccccagcagacgcgggaggcacccagcaacgcaccaccggacgatcgctaacggacgacaacgaactgcgcgaccaggccagccacgcgctagacgagacaaacacaacacagtcaacatcccaagcggccagcaacgccactagcaccaccggacagccaccacgcgaaccacaccatcgtacggaccaacaaccacgccgggaccgacgcaacgtagcacaaccgtactcagccacaccacgcac

SEQ ID NO: 625843 - DNA, 940 bp, Homo sapiens
  misc_feature (541)..(541): n is a, c, g, or t
  misc_feature (940)..(940): n is a, c, g, or t
gactctagaccctctctgtgttctctacacagtgaccagatctgctgtctagagatgatcgtcccctgtagaatgtactcctgctcaatgggagtatactcgcgtccctcatcggtaccaagaagcatacaacagcatgtctgagacctaccgtttatctgtaaagtgcgatgctagaaatacgtatcgctagcatactgcacagtatgaaaagcctccattgggcttgagacattcgcatgtgcaccttaaccatcacttgctcttcataatgccctactgttcattaccagaatccacatatgcgagacgcatattgattcaatatgctatgcgataactctcgattgcaagcagatatttggccactagttggagatagactgaagtcgagatccaaggtgaataggtcaacgggctgttagggcatccctcacccaaaggggaatgactcataccatctaccttcttcttggacatcaatacagctgtgtcatcacttagcacagtcatgaaagatttctggtccaccttcgcgggnttcatataggtagcatcaaaatggaactgtacgttagcctcccatcatgctcatgatggctagtgatattagccggcagccggactcggtaaagatcaatccgagggcttgaccagaacccgctgtgttacttaaaccaaataatctgacccaggtattctgggagagtacgctgatgggcagggctgaccgacttcgagccaactcactcactgtctcagtccgggcatatagatattcatttgactcctgaaacaaccggcatcatcaacctgcaatcctgcaccatgttttccgggcccacaaaatgcgaccacactttttggcacacggcaacgaaacaccgacggccaaagactcgcccggcgactctcaaaagcgacccttaacaagcattcn

SEQ ID NO: 625844 - DNA, 315 bp, Homo sapiens
cgggcggatctagaagatcccctgtgcacgtggcggaagtgatttacacgcaggcatcccggagaggcagcgcggcgtgaggccctggcgcgagactgagtctctgtgagcagaacgtcgtctggatacctgcaggctgtggaggctcccatctattaaaatgctctgatgccttacatttatttcatcaccggcacccacagacacacagcacccactgagcctcatgaggaaacacggtgaccgccagcactctgttgcccagctggccttctgcagagcctggcgctgaagcagcttgtcgaattctgtgct

SEQ ID NO: 625845 - DNA, 443 bp, Homo sapiens
  misc_feature (77)..(77): n is a, c, g, or t
  misc_feature (145)..(145): n is a, c, g, or t
  misc_feature (261)..(261): n is a, c, g, or t
  misc_feature (296)..(297): n is a, c, g, or t
  misc_feature (367)..(367): n is a, c, g, or t
  misc_feature (394)..(394): n is a, c, g, or t
gtagacacagtttcctttagttatttgaacatatgtgtagaagctgatttaaagtacttgtctaagccgggcgtggnggtgtgcgcctgtaatcccagctacttgggaggcagaggcaggagaattgcttgaacccgggaggcanaggttgcagtgagccaggatcaagccattgtactccagcctgggccacagagcgagacgctttcctagatagatagatagattagatagatagatagatagatagatagatagatngatagataggataagataagatgataggtgacttnnctactagttcaacatcagggcttattcaagggaaagttcctattgatgaccttttttcccatgtcagagnccaggtaaccatctctttcttgggggnctcatatatatgtatttttgaagactggcactttaattgtgctgtgcct

SEQ ID NO: 625846 - DNA, 694 bp, Homo sapiens
  misc_feature (96)..(96): n is a, c, g, or t
  misc_feature (152)..(152): n is a, c, g, or t
  misc_feature (194)..(194): n is a, c, g, or t
  misc_feature (350)..(350): n is a, c, g, or t
  misc_feature (461)..(461): n is a, c, g, or t
  misc_feature (474)..(474): n is a, c, g, or t
  misc_feature (476)..(476): n is a, c, g, or t
  misc_feature (619)..(620): n is a, c, g, or t
cccccctacacccgctagtatgtttcagcgcaaaaggaaaccccaaggaatttaagaaattaaggcttaagagaaaagaaagaaggagggggaaangaaaacagaaaagaccagaggccccgcggggcaacaaaataaaaacaagaattcgngaatttaaaaaccaaccccaagaagagggaaaaggggcccanaaggcccaagaaaaaggggaagaagggaagggaaacaaacccggggaggaaaaagggaggggggggccccggaggcgcaaaaccggaagggcggggggcgcgaagcgaggaagggacgggggcgggaaagacgacggcatagaagaaggcggacgncgaaaggggcagaaagagaggcgaagaagttgggccgtaggggttccagaccgagacccgggggggcggcgagcaagagacgcaggagctggcctcgaaggggctggacanccagaacaagagnancaaaaaagatgtgaagcagaacgccaagggccgcttccacaagattgccgaggagggcgcgggcggaaccaagagccgcctcacgcagaccaaggcggaggccgccgaaaacagcgacaaagatgggcgacttcaaagaacannacgcgcagcggggcccaagcagcccagagcagaaggcggcaggcgccgaggagggcggcgggccgcggcgcgcg

SEQ ID NO: 625847 - DNA, 888 bp, Homo sapiens
  misc_feature (28)..(28): n is a, c, g, or t
  misc_feature (84)..(84): n is a, c, g, or t
  misc_feature (171)..(171): n is a, c, g, or t
  misc_feature (227)..(227): n is a, c, g, or t
  misc_feature (273)..(273): n is a, c, g, or t
  misc_feature (314)..(314): n is a, c, g, or t
  misc_feature (351)..(351): n is a, c, g, or t
  misc_feature (354)..(354): n is a, c, g, or t
  misc_feature (359)..(359): n is a, c, g, or t
  misc_feature (439)..(439): n is a, c, g, or t
  misc_feature (450)..(450): n is a, c, g, or t
  misc_feature (454)..(454): n is a, c, g, or t
  misc_feature (464)..(464): n is a, c, g, or t
  misc_feature (587)..(587): n is a, c, g, or t
  misc_feature (604)..(604): n is a, c, g, or t
  misc_feature (608)..(608): n is a, c, g, or t
  misc_feature (615)..(615): n is a, c, g, or t
  misc_feature (620)..(620): n is a, c, g, or t
  misc_feature (624)..(624): n is a, c, g, or t
  misc_feature (680)..(680): n is a, c, g, or t
  misc_feature (694)..(694): n is a, c, g, or t
  misc_feature (715)..(715): n is a, c, g, or t
  misc_feature (741)..(741): n is a, c, g, or t
  misc_feature (743)..(743): n is a, c, g, or t
  misc_feature (758)..(758): n is a, c, g, or t
  misc_feature (767)..(767): n is a, c, g, or t
  misc_feature (795)..(795): n is a, c, g, or t
  misc_feature (818)..(818): n is a, c, g, or t
  misc_feature (849)..(849): n is a, c, g, or t
ataaatagagtccaggcagggcagagtncattggggatgcccaagccggattcacccacccctccagccccagcctaggcgcanggcggcctttcgagaggcgaaactgtcttccttgtcctggtgtcccagcagggtcactgggaggcaacagtgtggtctcagggtgcngggcgggcccgtgaggcccatcgccgtccccctaggcatcctgtaccatctgtganccgaggcagggggtgccgcagcctccccggttgtcccaaccctgcncccctcccccctctccttcctctcgtagatggagtaaagcntgtggattaagaagaatttgtcctcaccctcattgcnganctgcnccttgagcaggcagaagaccttgcgccggccccgcaccaccaggatgtggaggtagatcacggccagcggccgggctganaccaggaaganaaanaaggggtgtnccatcaggtaccggtgcacccagggcagccaggagaccctggggcctgccgcctccaggtggcgcacccacaccctgccggcctcgtacatggagtccagggtccggaaggggccgcagtgcncgagggcttaacctgcnaaanggcgtanagaangaanaaagccgcgcccaggaaggcggggaagcagagcagcgtaaggaagacggtgctcangtgtaaggacagcnagggccggcgcggcgcctggnagttggccaaaaggctggtcttcttnanaaaaaagaagagcancagcctgangaactgcacggcggggaggaggggcganaagagcacccccagccaggtcanagtttgcccataaataagctccaggacattncgggcaatgtaaaactccggcttccgcctcctcttcagc

SEQ ID NO: 625848 - DNA, 823 bp, Homo sapiens
  misc_feature (823)..(823): n is a, c, g, or t
ctccagtgtaccctgctggaggactaaatggcagtgatccttccccctcatgcactggatggaccctcattgtggactgtgggtagggatatcgcctgtagtcctccagtgtaccctgctgcaatgctgcttgtgtggcaaaatgtgactggacctaccgtaagactgtgagaaagcccgggaggtcaccagtggtacgcccgtaggactctacagtgtgacgaggaaattgagccctgtaatggacaatcacggatgcctgcgcgctggcaatcgcagaggacgcacggccaaccaagagccggcgggactagatgaggagccccgagggagccgggagaggcgagagcgcgtgcaacgggaaccagtggccaggcgcaaatggcgccgttgacgacgcccgccagtgtccaggtgcaccgacagaaaggaccggaagcgacgagccgagggcagcggctcccatggcatggaagcgcgtgaaatcgagaggactggaccactggtgaagtcgctgagacgacgcgcctccaaaatgggaaacccccggaggaaccaaaatgcgggaccacgtggcgcccacgtggggcactttcaattaacccaggaatgcaagcccgaatcgaaagggcccgtacatatccgcgaacatcccaaacgcaaggcaagacgcttcgggaggatcacgcaatttgggaccattagacctgattcagccgacatacatttccaaccataaggggcgcccacttgaacacacttacgactcagcccattcgaggcaggcgcctcttcaatgacaacgtctggacaatctgagaan

SEQ ID NO: 625849 - DNA, 168 bp, Homo sapiens
tctgtatcccagcacgtcttggggagtcaggtgggcggatcacgaggtcaggagatcgaaaccatcctggctaacacagtgaaaccccgtctccactaaaaacacaaaaaaatcagctgggcatggtggcaagcacccgtagtcccagccacattggcagggagcccg

SEQ ID NO: 625850 - DNA, 179 bp, Homo sapiens
ggtagagatggggactcactctattgcccaggttagtctcaaactcctggcctgaagcaatcctcccaccgccttccgaagagctgggattacaggtataagccagcatgcccacccaacaatttttaatcgtcacatagtctgtatttatgttccttcttctgtttctggcccttctc

SEQ ID NO: 625851 - DNA, 520 bp, Homo sapiens
  misc_feature (1)..(1): n is a, c, g, or t
nctgcgcggtatggaacgcgtggcccgcgagaactcagactttcaacgccagaagctggaagcccatcagggcctgctggcaccccaggaggcgaaacagaaggtggagaaggaggttcaggcccgggaggccaacctccaagctgaatgctcccggcagacccagctagcgctggaggagaaggcggtgctgcggaaggaacgagacagcctgcccaaggagctggaagagaacaagagggaggcggagcagctcaggatggagctggccatcagaaactcaaccctggacacctgcatcaagaccaagtcgcagccgatgatgccagtgtcaaggcccatgggccctgtccccaacccccagcccatcgacccagctagcctggaggagttcaagaggaagatcctggagtcccagaggccccctgcaggcatccctgtagccccatccagtggttgaggaggctccaggcctgaggaccaagggatggcccgacttggcggtttgcggaggatgcag

SEQ ID NO: 625852 - DNA, 499 bp, Homo sapiens
  misc_feature (19)..(19): n is a, c, g, or t
agttcgacggaaactctcnatgttatcaggctaggagataatggaattggaatgatgagtaataagaaaagagattagaaaggctgaggcaaggtttcttaatgagtttcaactatgttggtctccagagatgcttatttaaataatcttggtcacttttcaaacaatgcttttgattgctactctcaaagcagcattcttttcttttctttttttttttttttggttattggacatgtgccattaacagagagggtgggacacagaaaatgaagaaaataaaatttaggagttcagcgtgttggagaagtgaggaatataattatttaaccacttttttctatcccgtgttaaaaggagaaaaaagcaagttatgatgcgggttccaacgcaatatgggaaatcatcatgttttgggtttattaatacacttttttaagagcggtggtagtccacagcaaaattaagcagaaagtacagagagtctccgtcgaacggg

SEQ ID NO: 625853 - DNA, 293 bp, Homo sapiens
atttcatcaacgtatcatgcttcgagatgtcttgtgagacctctgggctggaagtcaatgcgtggtgtcacatccccacttgagctggctgatgcataccgctctctggcttcagcaccgctgtcccttgtctgggacccccacgcaaacgcctgaagcccttcctcagatcctgcttgttgtaagacctccctttaattctccacgcacagcagctgcccactgttgcctgccactgaccaccatgtagactgcgcagtctgtggagctttcactctgtcgtgaggggaata

SEQ ID NO: 625854 - DNA, 575 bp, Homo sapiens
agttttatttcatatttgtgtatctgaatatattaaaatatcttttttttttttggatgcggagtcttgctctgttggtccagcctggagtgcagtggcttgatctcggctcactgcagcctctgcctcccaggttcaggcgattctcctgcctcagcctcctaagtagctggtattacaggagtgtgccattagcctggctaattttggtatttttagtagagatggattttcattgtgttgggccatgctggtcttgaactcctgacctcaggtgatcctcctgccttggcctcccaaagtactgtgattactatcatgagccaccacacctggcctaaaagatcatggatttagtttggagtaagattttaagtgacttcaaattatggtatggtggtgtctggaatatctgatactagggtttttttttttttctttttcaccagcttttcggatactccttaaattgggggtattgtctgttcccaacatctttcagggaacatttaaggagggtcccctttttttttcaactcaacaccgtgttttttaacccgggccttgggggcccc

SEQ ID NO: 625855 - DNA, 513 bp, Homo sapiens
  misc_feature (158)..(158): n is a, c, g, or t
  misc_feature (164)..(164): n is a, c, g, or t
gcgggtggatcacgaggtcaggagatagagaccatcctggctaacacggtaaaaccccgtctccactaaaaatacaaaaaagtagccaggcgaggtggcaggcgcctgtagtcccagccacaggggaggctgaggcaggagaagggcatgaacccagngcgggncggggagctttttggcagttgaagccagagatcaacgccaaccggcactccagctctgggcaacagagccagactcggtctcaaacacaacacaaaggaaaacaaggaatgagcagacaaactggagaactggatcataacctaatatggatctaactatggttgggtggcgtgttctctaatctacttggacgaaagaggttaaaaacttccaattaaaaagggcgtggaaaaagaaaaggttaaggccacaattttttaaaacaaaacgggggaaacgaaaaaaagttcctataaatggggccttgggaagggggaagcaaatttaacgtgggcaaacaaacgtgca

SEQ ID NO: 625856 - DNA, 1053 bp, Homo sapiens
gctgcgtggaggctctggagcggagacttggggagctgcccgccgacaccccaaggggcggctgctgcgagaagagctcgctgcggcctcctccgctggccttcagcacccgacctggctcgggccctttcccgccacgcactacagcaccctgtgcaagcccgcgccgatcacagggaccctggaggtacgagtggtgggctgcagagacctcccagagagcatcccgtggaaccctaccccctcaatggggtggacctgggacacccagatcaggcgccccccttcctgatggcgccatgcccgtgggcctttacaagcgaatgcggaagcctcagtggcggagcagctcaaagcagaagccgagaacaccaagtgaagtccaggactgtggctttaagggtggacattaccccacgtggtgggggcacaacctgtttggagaacacacagtgtggccccccatgtgctcgtgagaccaagacgctctcatctcttggactcgtggaaagggccacgaggaactgaggtgtggtgatgttctgggcagaggacccagagcacgcactgtgtcgcctaaaacttcccttgacactttggcagcgacttctgggacaactgacgagtcactgacggtgcagctggatacactggaacgcgcccaggactgccctggcgagcggaaggccaccgatcccggcacccccgtcattgcagaggcactccatcggcaaccgcacggggagacacgaacaaatcccaccgcggcaagcaaagggcaggagcaaccgccgagtccagccggcatcgacatcgaataccgcaaagtgagggcgacggaccggagggccaccccagacgcaccgggcacaaggcgcgtttacgcccggagctcccacggatcgaggcggaaccagcggaacacgggcccacaacagaagacggacatacgcgacagccacaagcggagcgcggagacccagagagccacccgacggcactaagcacatgcctcgccactagcagtcagacaccgagacctggccgggcgga

SEQ ID NO: 625857 - DNA, 151 bp, Homo sapiens
  misc_feature (6)..(6): n is a, c, g, or t
agatcntgagcaggttagggcggatgagcatgtatcagctggcaagagtgagatctgttaaaataataatattagtataatacgataataaaataaagatcatatagtgatcagaaggttgtgtgcctcccttcctgggagatgaaacctg

SEQ ID NO: 625858 - DNA, 643 bp, Homo sapiens
  misc_feature (40)..(40): n is a, c, g, or t
  misc_feature (66)..(66): n is a, c, g, or t
  misc_feature (71)..(71): n is a, c, g, or t
  misc_feature (96)..(96): n is a, c, g, or t
  misc_feature (105)..(105): n is a, c, g, or t
  misc_feature (180)..(180): n is a, c, g, or t
  misc_feature (187)..(187): n is a, c, g, or t
  misc_feature (203)..(203): n is a, c, g, or t
  misc_feature (238)..(238): n is a, c, g, or t
  misc_feature (245)..(245): n is a, c, g, or t
  misc_feature (262)..(262): n is a, c, g, or t
  misc_feature (274)..(274): n is a, c, g, or t
  misc_feature (503)..(503): n is a, c, g, or t
  misc_feature (612)..(612): n is a, c, g, or t
gatcccggctcggattggccgggcacgggtgccccagaantggaaggcaggattgatcctccttgngcccntggaggaattcatcctgtcgacacntggacttcngcccagtcaaactgttatcggaaggggtccggatccggaccccccagaggggttcttggatctcactccaggaangaattcngggcgagtccaccaangtaaattgaaggcaagttttttaggaaagtagggnattaaangaatgtctactcccttngacagagcaggncattcctgaaagcaacaggaggaaggcacccaccttaggtacagtgcttatttatacacaggacaacaaagtcaaggaaattatggggcgatgtgctctactacgagagcttgtgacaaaggattgttcgtctttgtgtaactattgtcgtctgcaagaatctatattaatatctttaaagtaaacttattcttttttttattatactttaagttttagggtacatgtnacaacgtgcaggttagttacatatgtatacatgtgccatgttggtgtgctgcacccagtaactcatcatttaacattaggtatatctccaaatgctatcccccccaccnaaacccctaaagtaaacttattcttaaacta

SEQ ID NO: 625859 - DNA, 1002 bp, Homo sapiens
  misc_feature (768)..(768): n is a, c, g, or t
cagcccatgacccctaacaggggcctctcaggtcctcctaatgacctccggctaatcatgtgatttctcttccactccataacgctcctcatactaggcctactaaccaataccattaacccatataccaatgatggcgcgatgtaacacgagaaagcacatagcaaggccaccacataaccactcgtgtccaaaaaggccttcgatacgggataatcctatgtataacctcagaagttctttccttcgcaggacttgtgtctgagccttttaccactccagaccatagccccgctatcgccccctaattagagagggcactgggacctgcaagcaggcatcaccccgcgtaaatcccctagaagtccctacatcctaaatgcatccgtattactcgcatcaggagtatcattcagctgagctcaccatagtctaatagaaaactagcgaaacgaataatgtcaagcacgttgtcattacaatctcctacgtgggctctctatttgtaccctccttacaagcctcaggagtacgttcagaggtctcccgttcaccaatttccgacggcatctacggtcaactatttggtgtagccacaggcttcccacggagcgccacgtcatggatgggtcaactttcctcagtatcgtggtgcatccgcaactaatattgcactttgacgttcaaacaatactttgggttcaaaagtccgccgcctgatactggcattttgtcgatgttggcgttgactagttcctggatgtctcngccctatttgataacggggctttaacaccacataacgcgcccacatctcacaccacagagagggggggccgaaaatataccccggggcgccgcgtcgatccacgttgttaaaggggcgccaaggagggatataaacggcgcggcgctaaaccgtggaaacagcgtgtttttggaaccctgtgtggtagtcccccactacgcgaatatctgtgtcgcctgtgggtggtttcacca

SEQ ID NO: 625860 - DNA, 104 bp, Homo sapiens
aggtcggtggcgtaattgtactagaacctcatttaggaaataggtgttttatacattttatactgcaggtttgatatggggctgaagactttgtcggtgccaga

SEQ ID NO: 625861 - DNA, 377 bp, Homo sapiens
ggcagatcatgaggtcaggagtttgagaccagcctggccaacacagtgaaaccctgtctctactaaagatacaaaaaaccagctgggtgtggtggtgcacacctgtaatcccagctactcgggaggctgaggcaggagaattgcttgaatccaggaggcggaggttgcagtgagctgatatcatgccattgccctccttcctgggcgacagggtgagtcctttgtcttaaaaaaaaaaaaaattgaaaattgacatctaatctagagcttctgtacaggaaaataaactattgacaaagtaaatggacaacctacagtatggaataaaatatttgcaaactgtgtacaataaaaattaatatatagaatctataaga

SEQ ID NO: 625862 - DNA, 404 bp, Homo sapiens
ccctcagtcaggttggtgggggctgagtcctccctgagcaccccctttccacatttgctagaggaacagtgccatggacacctgtgacagagagaggacagttagtgaggagggtcagccagctcttcctttgggagcctggctagtctaggacatccccttgctgggtcttttcaagcttttaaaattggccctgaacgtgtgacagggtcctatggtgttactcaaagctgtgcagggtaaatgatgtcatatttattctttttccatttgttctagaaacagggcctttttcatcagttgcattttccggggtgagagctgtataaaaccttttggactgtgcccctgtcccttcctttttaagaaaaataaagggctttatggtagttggtaaaaaaaaa

SEQ ID NO: 625863 - DNA, 114 bp, Homo sapiens
ccgcctcagtctctggagtagctgactacaagcttgcgccaccacaccttgctaattagccagttttggtggggccttggcctcccttgctgaaggtggggattgggggaactc

SEQ ID NO: 625864 - DNA, 367 bp, Homo sapiens
aagagaaacctccccagaccactctttctaaaatgaatcttctaggctgggcatggtggctcacacctgtaatcccagtactttgggaggccaaggggggagatcacttgaggtcaggagttcaagaccagcctggccaacttggtgaaaccccgtctttactaaaaatacaaaaaaattagccaggcgtggtggtgcacccctaaaatcccagctacttgagagactgaggcaggagaatcacttgaacccaggaggtggaggttccagtgagccaaaatcatgccaatgtattccagtctgggtgacagagtgagactctgtctcaaaaaataaataaataaaataaaatgaaatagatcttaaa

SEQ ID NO: 625865 - DNA, 1089 bp, Homo sapiens
taaatggttctcttaaaagtttattataaaccagtttcataggccacaaggaaataaaaggatctatgtacagccttaacgggaaaacagaggcaagggaagctgaaggaagggccaagaatgaagtctaagggcctgtggggggcgctattcccgggggagagggggccctcgctatcccgagggggaaggaaggccgatattcccggagagggggcatgccctatgggatgtcccttcttccgaggggggtatcccctatggggggaaccctataagggaggttctctataccagggaggtggggccctatctatgcctgggagggggtgcccctgcggcccataaggtgggggaggacccccaagggccagtgtgggtgtcactggttgttgggacgccccgggaaaaactgggtcttgtgggcacgcaagctggcagcgggtatggaaaccagtaacctctcttccttggggggggtctatcacctggtgggggatggggccggcaaaaccccaaggggactgggcccaagcaatgtcctggcaggagaccctgggggggcttggggagaacccccaagctggggagatacccttctggcacaagaaggccctctagcgcgaagatccccgggggggcccccccaagagaggtctcccagcaaagtgggaaatctcggaagcaaatcacccaggttatcctcttgggggaagggaggggtccccctactaaactggtcctttgtggagaacccaatattttctcccccctccgcagaaagacacccagaaccggaagggactccggctttactcttcccctttttctgggcttgggtacgggaaccagtctccttagggcgcatagaacctctttctctggagaactcccatccacagcagctccacccaagaggggacccaacatccccatgttccgctttgttcaaaaaaggctcttttaaaggggggcacccattaaaaaacatccggcgccgggtctcgtggaggggattagtgccccttaatctctgtgtaatcacaaattatcttgggcgcatctttgctgtctcttggccccccggac

SEQ ID NO: 625866 - DNA, 391 bp, Homo sapiens
cggtgtgtgtgtgggggaagccttgcttagaatgaatgagaagttacatattttactaggactgcccaataaaaactcagctatcatccaaagaggaaaagctcagccttcctgtctccatggacgacacctttctcttagctggcatgctgtgatggctagctgtgctatgtgaaaggaggagctgattttgttttttttttttttttaaatgctttttcttgggaagtatttgtggcctttaatttgtaactatatacctagatgcctatattggacataggcgaatgaagttttttctttctttcgtttttattttttttaaattaaaaaagaaaatatatgtatacagtaatacacacacacacacacacacacagtagcataaaat

SEQ ID NO: 625867 - DNA, 1521 bp, Homo sapiens
gagacgacgtgggcgaccgctccggcttcggacgcgggacgtgttcgtctgtgccagcgacctacacaacacgacgacacttaacactactgcggtgactgcttgacgaacacggcacgaacgacttttctattactgacacgttgttccacatgtgccaccacacgtttgcacaacggcggcaggcacatgccacacatgaccttgaggcacaacattctccataggatcatctatatcgaggacggaacgacaaggtcaagtgccccttgcgatactcattacaacagcctgccaactacgaacaaaggcactcatctggggcagaggcatacacctgatggagtcattcggagaatccccaagcaagtacatcccctggcacacaacaccatgcatcttcagtcgcgcattaccgcacgaacggcacgacacgccgcccgaccctatccctacgccatctactctcacacacaaacgcctacataaactgacgctaatacctctggccccacatggacctttactctctactaaccacaaaaccgagacaactgtcctcattgcactttcctcactcgtgtcaccaaatccgcttttaccctcagacattctacattacgacacccgagcacaattgcacgacatccagtggcacacttggacctagcaccgaggcacagtcattcactggtcacgcgggccagctcccttgacatcttcaaaacactcaagcaacttgggccgatgatgggtctcacatgtcacaacatcgtaccaaggatacaaagtgacacttcttcaaaaataacgataaacactacacacaatgtcccaacggaaacactatggggttattacaacttgggtagaaccccccgcttttataacacaccgcattatccgaatccaacgaccgctactccgctgaacggacaaatttggtgacacacatcttgcaacacaatacgactatggggcagcaacttgggacccaatcatcaacacacacttcacactggggaacgcatacgcgagatcaacacacatacccaccactgcaccacatacacactgagagctaatgcgagacacatcaacgcccccaacacccaccactgcgggccgaaaccagagggcgcaaccacggcagcacaacgaaaccacaagcagaacacaaatataacaccgcaagcaccgcagcgagagccaaacgggtcacactcggacaccataaacgaggccaggcgcagccacccaacacacaggcggagcacagcgacacactaaatgcggaccgcaccaacaaccacaccagaacagaacaccgagcaacaaaaagaccgcagcacatatagcaaaacacacaggcagcaagaagacaacaagaacgacacaccacaccaacacgagagcgaccgtcaacacacacaaacgcacccacagaacctcaagtgctgaagcacaccagacgacacggatgagacacagcactctcgccagcggtgacaccgcaaacac

SEQ ID NO: 625868 - DNA, 336 bp, Homo sapiens
gtcgacatgtgccacgactcagtttagttgaaccctggaacgagcccagtggtagttaacagctacgtggtgattagttcgccttgctctctctcgtatttcattaacacacacacacacacacacacacacacacacacacacacacacacacacacacacacacgcacacacacacacacacacacacacacacacacacacacacacacacacacacacacacacacacacacacacaaatacactcactcactcacataaacagataagcccattcacatgtccccctgtcctcttctccaaactgcctttgtgttcatgttaacgtccacg

SEQ ID NO: 625869 - DNA, 777 bp, Homo sapiens
tgacccctccttagctttatgcgctcagaaaaccaaattaaaccccccccccatgtaacaggggggcagggacaaaagcaaaaacgcccgaacccagccgggaaaccaccatttcttgcccccgcgcaatttatcgcccctgatgggattttggtttttcatctggtccctgtagctggggtcggaggttggagggtgggagcctccgggggggcactgggccattgagccccctgggagaatgtcagaggggatgtggagagggccactgtccggccggggcttctgggggcacagtgggttgggtccccagaatgtcctgagggcggagggggggtggtggggcagggtcctccctcagggtgtcaggaggggtgcctcggaggccacaggagggggcctccggtggctgtggccttgaggctgtggccgaaggggaaggggctacgcagggttgtgtaaccagagggtcccactcaggcgtggggcaggggtggccgcccttccgcacacttgaggaacccttcccctcttccctcggggacatctgctgcccgcccctaagaacccgtgcctgtgtctccaagggaggtccgaaagtctctgggggacctcctggggggccaaggtgggagtaaaggccgggcaaatagggaggataagggcgggtatagagcccacagagcaggaaagctgcccaggttctgccccattcgaccaggtttgctggggccccgggagcccacggtttctggtgatgccatagcagccaccaca

SEQ ID NO: 625870 - DNA, 629 bp, Homo sapiens
agcggggttacttcctccagagactgacgagtgcggtgtcgctccagctcagagctcccggagccgcccggccagcgtccggcctccctgatcgtctctggccgggccctcgccctcgcccgggcgcacgagcagacgcgggcgccgagcagacaccgtcccgacaagcgccggcctgccgcagcggccggatgaaatgatttcggaatcaagaatatggaccaggtagcccctgtgggctaacagttacagagggacactcaagcgcgagacagactttgacacctttgatgggtccctgtgttgctgtgttaccttctctaaatgaagagcaaacactgtcgaagaagtggcaacagggcttggattcccatttctcatgagtccgccaactgtgaattgcctttgtgaaccccgtgcagcgaaggctgtgatgagtcaaagccttaaaagctaccttcagtggcttcaaaaggaacacgcgggcgcctgggcattccaaagaaaccctggctgtggagtgagcaacaggtatgtcagtggcttctctgggcaccaatgagttccactctggtgaaacgtgaaatctgcacagggttcggatgaaatggacaagatgctgtgtaacc

SEQ ID NO: 625871 - DNA, 158 bp, Homo sapiens
tgtggtcccctcccccccgtggggggttttttcccccctttgggggatttttgttgggttggggccccgaaacccttttccccccccttaggcgggggggggttttaaccctgggctggccctttcccggccccttaagggggtttttttccccccca

SEQ ID NO: 625872 - DNA, 1063 bp, Homo sapiens
aattttatgtatgtatgaggcctgaggtgttatatcggctacgaggcagctcgccgcttgctattgcgtcgctcaccgtgaatggcctaccttctgggcaaggaggacgcgggcgcgcgagattcggcgcttcagcttctgctgcagccccgagcctgaggcggaagcccgaggctgcggctgggtccgggaccctgcgagcggctgctgagccgggtggccgccctgttccccgcgctgcggctggctgtgttccagtgcgcactacctgcgatgaagggactggggacttgtggttgccttttccagtgaccgaggaattgacaatggccatgtcctactgtgaagggatgacatcttccgaatctacattaaagagaaaaaaacgagtgcctggctgggaccacctgcccacctgtgtgctcaaggagtgctgccccgaaacatggttgcaccccaaatgtgatctgccgatggctagcaacttgggacctgtaggtaggaaacccggcttacaaagatgcaaggtgtactggcccagaataacgactatgttgtacacgtctagcggagggaacaacgggggctttgcaccctgggttgctaccaaaccaaatgctacgacatttccccacaagccactttacgggacacaccttgtcttgacgggctacctacgccacaagaccgctgggcatcctgtacaaggtgttgaaaaccaccggacccactttcgcagtttgggacagcgaattgcgcaaactggggtcccaccaggaaacactgggaagcccagtgttctcctcgcttgccggggtgagtgcccctgccattggccccacacggcagaaatcagactcctggtccatggggaggatcgaagtgtgaaatttacgtgaacgaccgttgggggagagatgttgcagatgaccatataccaccatctggtcatataaattgatatgatgtggagcacgtgggcaaataagcaactaacagggtctcaagaaagtccagacacaggaatatacagcaaagcaagacaatgggataaatcaacagg

SEQ ID NO: 625873 - DNA, 116 bp, Homo sapiens
ataatcagctcggccctattaagtattctgaatacaagtaggataccactaataagaatgtatttacctaagaaatctatgatagtgaagtggctatcctaaactggtttatctcc

SEQ ID NO: 625874 - DNA, 429 bp, Homo sapiens
agcctgtgtgcctggttaagggtacgaaggagttcctgaaagctttcaggtatctgagcctcgggattctcggtgaggttgaaattcgggccctcaggaatttcatcgtgagtgtcagccttggtccacagtaagagcattgcaaagcctgaagcgatgctcactggggagaagacgatattggtgctgttggattggtgtgccagctgacggtataggttaaaggcgatctcagccaggttgggggtgatcttgttagaggttgggtgatcctgatcatggtggtatgtatcgtgtcttgtggacagcatctccgtggggatcttcagacagggagacagggaccaggcagcacaggcatgccagcaggagtatgccccgagacacagtaggcggcattgtctattcagtgtcccaggtcagtggtgg

SEQ ID NO: 625875 - DNA, 195 bp, Homo sapiens
tgttcatgagtattagtcgtcatttttgtaacgatgtaaaagttctagcagatctgattcatcgaacaatattacagatattcaatatttcacacaatagacgtatgtacacttaacacaatgtctaacgatgggccatgctgcagtcggctcgaggcctatatatcccaggtactgttgggaagctgaggtcag

SEQ ID NO: 625876 - DNA, 251 bp, Homo sapiens
ggcaaccaaatcccttctgagtcttgcctttggtcagcatctacctttctcccagatcacaggcaaaacctcagctcgctgcaacctccgcctcccgggttcaagtgattctcctgcctcagcctcctgagtagctgggactacaggcacacgcaatcacgcctggctaatttttgtatttttagtagagacaaggtttcaccatgtcggcccggctagtctcaaactcctgacctctggtgatccaacca

SEQ ID NO: 625877 - DNA, 303 bp, Homo sapiens
atcattaacagcgcaatttttcatgcatatttaatgctgagttcaatttaggatgtattacatataggcaatgtgttgagcaatacccacaacaactgcagtttcttacttggccaagagaatactcatttaagtgctagacttccattctggcaaaatcttgcaccaaaactgtgcttgctttgtgcttgctacacttggctgccttacttttcttgagctaaagacagcctttttccaccgatattataactgctatcatcattaacagcctagttttacaaccctatttaatgctgattg

SEQ ID NO: 625878 - DNA, 217 bp, Homo sapiens
gggaccccccccccccttttttttcccccctttgaggccccggggccggttccccccccgggttttttgtttgggcccggggggggtttccctttttccccggggcccgcttttgccctttgggcctttttgggggccctttttgacccgttttttccaaaaagccgggtggggccgggtcgggtttttcggggtttttttggcccccggggcccca

SEQ ID NO: 625879 - DNA, 132 bp, Homo sapiens
gggccaacggaggggttcaaagcaaacccaactttttgaactttattttgttgggacggaaggcccctttggccgggaggttttttaatttaaaggggctgggtccctataaattattaaaaaaacccccca

SEQ ID NO: 625880 - DNA, 397 bp, Homo sapiens
  misc_feature (329)..(329): n is a, c, g, or t
  misc_feature (369)..(369): n is a, c, g, or t
  misc_feature (391)..(391): n is a, c, g, or t
tgaaaagtaacacttttacactgctggttggaatgtaaactagaataaccactgtggaaaatagtatggagattccttaaagaactaaaagtagagctaccatttgatccagcaatcccattattgggtatctgcccagaggaaaagaagtcattatataagaaagacacttgcacacgatatttataacagcacaatttgtatttgcaaaactatggaaccagcctaaatgcccatcagccaacaagtggataaagaaaagtggtgtttatattactatgtacactatagaatactactcagccataaaaaggaacaaaataatggcntttcgtgaggccaccgcgcccggccaggtggatctttttnaaaatgtgggatgtattatggntttatt

SEQ ID NO: 625881 - DNA, 145 bp, Homo sapiens
tccccgcgacattgggcctgtagccttcccccattattcctagaaccaggcgacctgcgtactcctttacgttcacatcgagtcgctactcccggagttgaaacccctcattcgctataactatcttacagtcacaagtacgtct

SEQ ID NO: 625882 - DNA, 667 bp, Homo sapiens
tgtggtagctcatgcctgtaatcccattactttgggaggctaagatgggtggatcacttgaggtcagttgttcgagaccaaccagaccaatatagcgaaacctcatttatactaacaatacaaaaattagccaggcatgcctgttatcccagctactcgggaggctgagacaggataattgcttgaacccaggtggaagaggttgctttgagccaagatagcgccactgcatttttttgagacgctgtgtcaaaaaaaaaaatggcaagaatggaggtactgaggcagggtgcactggctcacacctgtaatcccagcactttgggaggccaggcaggcagatcacttgaggccagcagttgcagaccagcctttccaacatggtgaaaccctgtctcttctagaagcacaaaaatgagctgcgcgttctggcgcgcaccttgaatcccagttacttgcgaggcttaagcagggagaatcaccggaactcacgaagccgcaggttgcagcgagcccagatcggaccagtacacttcagcctagcccacaagcaggactggttctaacaacaccaccacgacccactccaatcccaccctcccaaactgtcggcctcttggcccaacccctctctcggcaggcttagcatccgggcgcttgcggccct

SEQ ID NO: 625883 - DNA, 254 bp, Homo sapiens
tcctaagcagataggtgtttttcatttcatgattaatgctcccacctaccaagtgtaggtggggtctaggagctggtctcctaatcccattgttgtgcaaccccagttagtcctcagggctctgatcgctgtccttgggtttgtgccacgtgagagagattagagaaacaatacttgctgctgttgctgggcaaaggcttgcgttgctctgaggagaggaaatgtgaagacccagttcgccccatgattagtct

SEQ ID NO: 625884 - DNA, 301 bp, Homo sapiens
tgctctagattatgttgttttaaattagatactgcaaagtatttaaaaggatatctgatgtccatttgttccctttttgactctgtgggaaaaaggaataaggtaacatttttttaaaaatggactactttggaattttggcggatttgattccggaatttatattaaaggcccaagaaaatccaaacctattattcaggttcccaaaatataatctgtggtgcagattcaggggttgtggaatacatgttagagtagcaattctgttgttagcgatacataaactaatgtcgacgcggcc

SEQ ID NO: 625885 - DNA, 526 bp, Homo sapiens
ggggtggattccctgaagggaaggtaaccccaaggaaaaggaaccatattctttaaatattattcatgctatcatttagaaactggctatttggatactttgccagccaatgtgggtatatttcatctttgcaaatctcttgggtacctcttagatctttaaaaccaactttcagtttcttttttataggtagaatgacaactctcctctatcacaaggtacatttcacttttcttgttagagtgttccaatagattcaaaacagaaacacaaattaatgaattagaaaggaccattactccccccacactctgctccagagcaagtattgcagactcagactcctacaggagtgagtgaggcaggctagggtgagcactctggagtctggcattgtcatcattctcattcagtactgaacctgacacctagcatttggggagcataaacccttccaaaggggacagccagttgttgccatgggggattgtaggcccaatgttgccaagtcttctgatactttggg

SEQ ID NO: 625886 - DNA, 140 bp, Homo sapiens
cccaaacccacttccacctttactaccataacaaccttagctaaaccatttacccaaattaaagtattaggcgattagaaatttgaaacctgggcggcaatagaatataggtacccacagggaaaagattgagaaattta

SEQ ID NO: 625887 - DNA, 120 bp, Homo sapiens
tacagagaggagctgagaccccagaagtgctctgaaccccaatcctcaaaatgaagatactgacagagagcagcagaaactctggaactgtttccagagggcctgcattgcatggaccag

SEQ ID NO: 625888 - DNA, 151 bp, Homo sapiens
tacagtatataacgtatggtttgtgaactttgatatttcatgtacactataaaatatatatttggggaacattgatattatatgtacagtgtataatctatatttgatgtactttcatattttatgtacctaatatatatttcatgtaatc

SEQ ID NO: 625889 - DNA, 607 bp, Homo sapiens
gagacgtgaatggaggaagtggagtagatgaaatggttaaatgttggagaaaagaggctatttatgaatatgaccactgtcattcagataaaatttctggactgttatcattgaaaaaagtctcattatgtttctatttgaaagccaacccttatgcttttttgaggaaaaaaaaaaactgtgagtcacgttatgcttgcaagtgtttaattcagaccatttcatctttaagaaggcccctggtcacattatacggatgatttgcttattaaatggaactcctgtttcttgcaccatgttgtggggtcaatatgagaagcctaattaacagaataaaaagcattaaagcttctttagctaagtcaaacttagagaattgtctaatggtatgtagcccctcgttctaagatgggcgttttccccagataacttgaaaatctactggtaacagccacttccctttaaagattctattactaatagccatggagtaaatgcgggatcctctagagcacagttaagaatttgcaggccttaaaaactaacttatttttcctgattattgagtttattgtagaattctacgtgtaagcattccccagccgct

SEQ ID NO: 625890 - DNA, 165 bp, Homo sapiens
cccccctattgggcccccccgcccgggggttttctgggcggggagggggggaatgaaatatcttatattcttgggggccccaggggttctaagggtcccagggggcctggtccccaccccggttattttccggaaatttttataataaggggttccaatttccca

SEQ ID NO: 625891 - DNA, 396 bp, Homo sapiens
agcgaaggtcgggtctagggtgtagcctgagaataggagatcagtgaatgaagcctcctatgatggctaatacagctcctattgataggacatagttggaagtgagctacaagcgtaatacgtgtcgtgtcgtacgatgtctagtgatgagtttgctaagtacaatgccatgtcaggccagcctaggtcaaacgaccaccacacacgtttatctatgtaacaaaactgcgcttccggcacatgtaccccagaacttagaatttgaatcaagagccggcgtgggacctgagacagataattttctcaaaagaagacactcaagtatatgaaaaaacactcatccttactaatcatcacatacataaatgcaagcaaaaaccacagtaagatgccatc

SEQ ID NO: 625892 - DNA, 165 bp, Homo sapiens
  misc_feature (82)..(82): n is a, c, g, or t
tgggactgagaatgcaggaaccataatactctgtagtagccataataatctaaatacagtattagagacctagaaataatgngtctgattcactacccctaccagtataggaagatttagactacagagtttgcttcttcacataacaccctatatccaacaggc

SEQ ID NO: 625893 - DNA, 86 bp, Homo sapiens
agcgggcagcgcctcagggagcgcggggcccactgacccgcggaagccagcggacccacttgtgcggcggtcggcgcggggcgcaa

SEQ ID NO: 625894 - DNA, 426 bp, Homo sapiens
atgatcgaaacatcatctgaataccgttaaggcattaaaagaccgaaaacagtaaattcgttacgtagtatcacctaccagccccgactcaccattagcattatagatatatacaatcagactggaatgaatcttattaaaaatacaattatacgtcctagaaagtgacaccatcaagcccccgataaaaggacattcctcggagcgaattcccaaatgataaaaatagacccctagacttcatccctcaacaccccagtacaccctccacccaataactcccctggacgaaaatatgtagctacgatagtcatccggtgctattttagtcgcgcaagacctacacaagcgtaggtgcctactgccactggaaacttactcgttgtgtaagtggagcggcgtcgatgttcttctcaacgaacacgc

SEQ ID NO: 625895 - DNA, 251 bp, Homo sapiens
ggatggccggtgtgttccatgatcgactggcttcctcagtcactcagatccttcactcatccagggatctaagaacatttactgaccatgtctacgtgcagctctagtttacagccttaggaggtcttattctgacttcctctgattttggcatgtgtagacactccgataaggagagttcagcgcctgtggtgaagtgaagaatctcatttcccagagtctgaggagaagagatgtgtaccccgagccat

SEQ ID NO: 625896 - DNA, 895 bp, Homo sapiens
acaccagccctcagtcactgggagaagaacctctcataccctcggtgctccagtccccagctcatcagccaacacaccatgtgtgaagaggagaccaccgcgctcgtgtgtgacaatgggctctggcctgtgcaaggaaggttcgcaaggagatgatgccccccgggtttgtcttcccctccattgtgggccgccctcgccaaccaggtgtgattggtgggaatgggccaagaaagacagctatgtggggggatgaggctcaagaaccaagcgagggatcctaatctcaaataccccattgaacacggatcatcaccaatgggggtgcctttggacgaaagatcttgcaccactctttctacaatgagctgcgtgtagccacctgaaagagacccaaaccgtgtctccacagaggctccccttaaattcccaaggccaacagggaaaagatgacgccagatcaattgttggaaaccttcatgtccctgccatgtacgtcgcccattcaagctgtgtcttccctttatgcttctggcgcacgaaaggcatcatccttggattcaggttgatgggcgtcaccccaaattgtccccaatttaatgaaggtaatgctttggccaaatgcataatgcgctgagttgttgcgtgactccgggacaactcatgaacgtctcaaagaaggagtatcctttgtgccacgtggagaaacctggcggcctcaggaacgttggcatttgcactgttggaagaggagcacggagtcttcccctgggaagagattactgcccaaggaggtcacatggaaacgtcggcgacctaagcctatgggggcggaatgaccacccggggcgccggtatacagctgcccttttgtagtacctcccggggctcttgc

SEQ ID NO: 625897 - DNA, 465 bp, Homo sapiens
  misc_feature (4)..(4): n is a, c, g, or t
gtanccagaggatgttcatggataatgccaagtgatgggaggtggttttgaccgagggaaaaaggatcttgggggtgaatccaaatgccattggctaaggtcgggcatggcaacccatgcctgtaatcgctagcactttggaaggtgaggcagaggattgcttgaagccaggagttcaagaccagcctgagcaacaaagtgagcctctgtctctacaaaaaattttttttaaaaatttatgcattggccatatttccccacattactgaaggctgccttagggacagacacacaggtctgacctgtcctttttttgtagcttctggctcagggcctaaaacaaactggaagcccctaagggtatgtaccgctttttctttccatttcctgaatattggatagtaagtagagggagactattcttcagattgactagattagaataggcattgtcattgtttttca

SEQ ID NO: 625898 - DNA, 817 bp, Homo sapiens
ctgaaaactgggccttttccagttaaaatatgctgtagattagaggaattcttggttattattttagaaaacctgatcttctcttttgggtcatttgtctgggttaggtttcttcacaatcttgaacattttacagtagaactcatctaaaaatggattggggatggggaaacatgcacaaaatcttttcataattaaaaagagccttacctttctttacataccacatggacagaattgtgtaaaagtgaattatcttatttaaaatgtatgtttcccctcactgttgcagctcccaatgtcgtcatttttaaatgttatatacatctcaagggttaaccagaccctttcctccaaaacccaacctttcatttcctacttcattccagcaggaggcacttaggggagactcgcgatggggacatggagaacaacccaagctccttaaacttattattattgtaataatctaatgatatcactcactaacacgtgaggccaggaaaaatgcttctccttttaaaatcccctccaattccctcacaaaaacacaccttttggaaaatccttccccaagaatgtttctttaatgacgacctcctcgaatcttgtcgtctgatccaggtaatcatattcactctcgttaaaatataccattcagatcagagacaaaactgtatccatacgcggatccagaaagttggcatcaatcacttgggctgctggcataacaaagggtacttttttacccggaataaaacgcccagctgtcgttgacgaggtgggtgaaacaaccgaccatcaaaggaatggacac

SEQ ID NO: 625899 - DNA, 430 bp, Homo sapiens
cgcaccaggttatcgcctgtcatgttctgcagatcagcctggtactctgtgttcgcgtatcgacgccccacctcgaaatactcgaattcgcgggccgacatggttcccgtgcgcttagcttctgccgaggcaatcttttggtagtaagactcagccgattttgaggaccgtgcctctttaagcagatctttagttgagtccagcggttggcttgcggcgatcatttgatcttgaggatccgtcgcagcggagatgatcgagttgtactggttcatcaggccgatgtactggacaccagcgtcagattcggcctgccccttcttgagctgtggagccactgaacgccgcgcggagttctgcgtgtacatccctggctgcgtccgtttgcgcctgagtaaaggtgaggtcctggtccttgccatccttgccg

SEQ ID NO: 625900 - DNA, 758 bp, Homo sapiens
ggccgggctcgatgtctcatgcctgatttaagcgcgatctgctttaccatggctaggatggcctacaagacccagcgtttgctaatggtgctggccgacccacttgcatcgtgatcacttctctcaaatccatgcactggacccaatcccgagcccatacccagtattacccatactctctatgcactgactcggaggtcaccattagtccagtgaaagtagtggaccagtagctcatgtgttgacacgattaccagtccacgctatgcaaccagtatcagcgctcatagtcggcttactcggattacaatgtccagcgtggatctgtggcgtggaccgactgccaggacactgagcaatgctcaagatgttcagattatcgatgtgcaaacatctactagaggtacacaagtagctaaatctgcagatctagccatatgaatgcagtgtgtccatttgaccttgcagagctcagtcgacttcctccatttctgtgattgttagcatcattggctctcacaagtacgactaatatccaactcgcacctttgtctaacgatctggtgtacacccatgccctttccggctccaaccttgtcccatcgggacaatcccctttcgtaccatccttaagaaccactttaattccatcgctgacgcctaacaccactccggtccaacctcctcactgttccccaacttaccgaatatcccttacaggcgccacccggcctctctctccagtcctcaccttctcc

SEQ ID NO: 625901 - DNA, 329 bp, Homo sapiens
  misc_feature (1)..(1): n is a, c, g, or t
  misc_feature (79)..(79): n is a, c, g, or t
  misc_feature (82)..(82): n is a, c, g, or t
  misc_feature (89)..(89): n is a, c, g, or t
  misc_feature (101)..(101): n is a, c, g, or t
  misc_feature (114)..(114): n is a, c, g, or t
  misc_feature (116)..(116): n is a, c, g, or t
  misc_feature (122)..(122): n is a, c, g, or t
  misc_feature (137)..(137): n is a, c, g, or t
  misc_feature (139)..(139): n is a, c, g, or t
  misc_feature (169)..(169): n is a, c, g, or t
  misc_feature (182)..(182): n is a, c, g, or t
  misc_feature (222)..(222): n is a, c, g, or t
  misc_feature (283)..(283): n is a, c, g, or t
nacattatatcattactacatatttctccttcactaaatcttaatctataaagcacattttttataattgttatcaganaanctataancgagctccattntgggtcggttttncnccagcngggcttgggtttgtnantatgcttttgaatagggtcatgcaaaaggngagcttcgatttnggaacttgatccaagcaccagatataaccaaaatctctgnactaggaaatatttgtattcacatagggtcattttccacacaatgatgcccattataaaanagcctcctctcatattctatattttaacttccagagttttccacta

SEQ ID NO: 625902 - DNA, 383 bp, Homo sapiens
ggagatcatttaagggaaacgtcgtacttgatatgcagcgccatggcaacagcctcgggagaattgtcaagcatctggagggtctctctgaagaggctatcatagagctgaacctgacgactggtatacccattgtctaatgaattggcacaagaactatgcagcctatcaagcccatgcagttctgggggatgaagagacggtgcgcaaagccatggaagctgtggactagcccaggacaaggccaaagaacagtcgaaggccggcgagaaaggatactgtccccaggagcacacctccctgcccgtctagtccctctgcccctcccagctgcacatagtaacactaaccacatctagtagacatctaagaaagtacctgca

SEQ ID NO: 625903 - DNA, 902 bp, Homo sapiens
  misc_feature (499)..(499): n is a, c, g, or t
  misc_feature (615)..(615): n is a, c, g, or t
ggacggggacctccgacggtaccaagttaccgcttggtgtgcggtgcaacggagaccgcgaagagccaaggctatctacctgcagtgctgtaggatgcgagtgttactagcaggtgtccctggcacatgccaagaatgcaaggtccacatgtacattcgcagagttggtaggtccgaaggaaggtggatctgtcattgaatgtcgacaatcactaatgcgtgacctgccatctagtcgccatttcaccggaggatcccggaagatagagatctcccacatggcgcgggtaatatacacatggacgtgccagtggctaggtcgaggggatccattacaccttgcaattgcatggctgtagtggctatccagagacgagtgagcccaagatcgcgataagtgttattgggcgcgactgcagcagtcgcacccaagccggaggtacacgcaagtcccgcgatccgtccgtcgacgaccggggtgcacacgtattccatcaancttttctgagctagctggctcgcgtgggtatcttctccccatagatggggactggttggcacctcagtcgcttgcttcgcccggcgtcccgctgccatggggcgccgacaagaggntgtacaccggccgtcttctggccaaaggcccgctcgcggaaccgcgccgcataacgtacaaaactaccatgctctaagtcccgatgcgcgggggaggtcgcgataccggtatcagtagtccgtaagcccagcaagggtcctgctcagggaggcatagaccggagtggtcacaagctagtctacatccctgggtattcccgtgagcttgctccttttgtttcaccccacacgatctgcggtcgtaccgtgagcattctacgcgggcctggtgcccagttgccccgccg

SEQ ID NO: 625904 - DNA, 989 bp, Homo sapiens
ctgagttgttacacgtgtaactctcctctcccagaaccggaagatggtgccggtacccgagggggcttacgggaactttgttgaggaacactgctatgtcatcctccacgtcccccagagacccgaaggccacgcagggggcagtccgagcagatctgcactacatgaggctcgggaagcaggcgcggtgcggaagccgcaggggcggcggctggaggcacgtatcctagtcagcgcctgacaggcacagaggcattgaggtgggcccgagacccgctgctggcaccggccgaagcgcgagggcgcagcgagtccggacgatgctctctgcgagctcacttccagcccggggcaatcatctgacgacggacacgggagagccatatggctatctagacccttcaagcgatgtggatgaccctaaacttgttgtcaagcaattccacgctgacgtgctgccaccaatcgactaccgggagcgaagcgacagtggatcgttgctcgactagaaagggtagtgaagggctacgtcccctgggggagaccatgccctttatagattagaggggggtagaaccggtctttttcccgtgggcttgtgggaatcgcgtaaggggcgagacgaactgaacttggaactttgcaacggtcgggcaaattggcggcgtccctctaggaggaagcccatgccctatttttgcgttggaacggaaaggggccctcggccgcggtgcgacccgtgtgcgacttttcttagaagcgcttaaagcgagggcacttccccggggccgcaaccatagggggggcaacacccgctggcgcctggcgctatggagtccggctcgcccactaaggactctggggaacgctgcggctagggaatcgcaatttgaaaggcgtcccctagatatggacccgcgcggtggaacgccttcccaattgtccagagaatccgactcgcggagaggagtcggttaggtggctttcgg

SEQ ID NO: 625905 - DNA, 703 bp, Homo sapiens
ggcctcctgacaggaatggtttagaggtggacatagtcctggccaggccgggccgggctcgcggggccaccccggggggccgagtgcatggatttgctccgtctgaaggtgaatgaatttcgtagaggagctgctgcctggtccggtggtgcatgtgactacttcagagtggctctaaggtcgtagcgtgttgctgatcgcggtgctaggcgcgtgtgggacggtccgcccgagccctgacgagagatgctgggatgctcgagcgaccgagcgagcgcaacgcggtggcgaatcggtgcagcataaacgacgagactgtcagtggagcaagtatttaccatgggcagagatgcaatttctagctgatacccaaagtcagtcaaactgagaaaacgaggtcaggctacgagagtgagaccacctggaaatggagcatcagcaggttctagtcgtccagaaatgaacgacagattgatgaagcacaggatcaccgcaccagcttcctcccgcactgaagcttctcaactcatagtccgaagacctaggcagtaattccacgcatgtcgaaagaggccttatgcacagaaaaccggggacggtggtactttgagcaccgcgaggatggaggggcgctctgctcagtctccctgctgtagaggatgagctgactagatgatacccttgtagctattgaggctataag

SEQ ID NO: 625906 - DNA, 149 bp, Homo sapiens
cccgatttctctctgtgggggacgctctcgtggggtgacggctcgctcaggtgggaggcaggaggattgctttgaacctgggaggcggaggttgttctgagctgagatcgcgccactgcactccagcctcggccccacagagagagcgt

SEQ ID NO: 625907 - DNA, 207 bp, Homo sapiens
tagtaactttacatcatattttcttgaacagaaactttacaccactgctcattatttaccttatgagacaaaactactaacacaatttatatgggcttacaattataacacaaacctgtgagagggcatgatctaatttaattttgattgccttcttttattattatcactactactgtctgctcactatttctgtgcccttttcaa

SEQ ID NO: 625908 - DNA, 154 bp, Homo sapiens
ccatccttttattggtgcgaagaaaagggagcaatgatgagtgttgacccctgcatcttatgtgtgtacttgtctctgcctctgtacacacacacatgcaccacagacacaccacacacacacagcccacatacacagcccacatacatgccca

SEQ ID NO: 625909 - DNA, 743 bp, Homo sapiens
  misc_feature (680)..(680): n is a, c, g, or t
ctctaaacttcccttctcacttcatttcattcatttcatcttccatcactgataccctttcttccagctgatcgcatcggctcctgaggcttctgcattcttcacatagttctcgagccttggctttcagctccatcagctcctttaagcacttctctgtattggttattctagttatacattcatctaaatttttttcaaagtttttaacttctttgcctttggtttgaatttcctcctgtagctcagagtagtttgatcatctgaagccttctctcaactcgtcaaagtcattctccatccagctttgttccgttgctggtgaggaactgcgttcctttggaggaggagaggcgctctgctttttagagtttccagtttttctgctctgttttttccccatctttgtggttttatctacttttggtctctgatgatggtgatgtacagatgggtttttggtgcggatgtctttcctgttgttaagtttccttctaacagacaggaccctcagctgcaggtctgttggagtttgctagcggtccactccagaccctgtttgcctgggtatcatacagtggtggctgcagaacagcagatttttcgtgaaccacgaatgctgctgtctgatcatttctctggaagttttgtctcctccaagtaggctgctcgggggtcanggggcaaggacccacttgaagaaggcagctggcattctcagactccaaaggggtgtgggagaa

SEQ ID NO: 625910 - DNA, 104 bp, Homo sapiens
gacgcatatcaggactttattgtgttacatccatgtgactagaactcagatcgggccctttaacacctttcgtactgatatctgtggcatgaagaagggcgtca

SEQ ID NO: 625911 - DNA, 123 bp, Homo sapiens
actatcatccccagatactcgggtggggggctgtagatgtatgcagggcgtggcgggctttccggttcctcatcttcttcttagggcgacggagtcttatcctttgatgcctttgacgctgtg

SEQ ID NO: 625912 - DNA, 517 bp, Homo sapiens
gcgtgggcttgcctctcctctgcatcctggaagcatcgtgcatagttctttcattgtaagccgctattttacattcccacaatgcatgactgtttgaccagtgatgtgctactgatatgtcacacgacgttattctttgatttggtgttcaggttttgctttcgtgtgtgtgtcttctaacaggtaatgtgtattttagtgtcgtctaaacagtcgatttttacttatagacaaagatcatcttcaactgtttattgacttctgagttatatagttcatgccctgccaaggcattgttcgactccatgatactaaaacataatgaaagaaacaaactccagtatggagaagagaaagtttaattatttggttccatctagaaaagcaacaacttaaaggaatccttcactaggattgtcttatcacctttattagataaatcatgaagtgtccctgtgaaattgaagtgaaactatctctgtaggacttaagagaatagctaaaaggtgtgacttgc

SEQ ID NO: 625913 - DNA, 174 bp, Homo sapiens
  misc_feature (126)..(127): n is a, c, g, or t
taattttaagcacagctagaaggtagtagagagagaggaagctggaggcacggccctgctgatcacaggagccttcacacggtggcgctgctgggtcaccaagacctgagcaggttgtctcccagnngacgtgaaccattctttctcccccgcgcccttaccacagtgttccag

SEQ ID NO: 625914 - DNA, 174 bp, Homo sapiens
tactcgacaggctccagctataacgatattctggaggtcagcacggtgctcacgtatctgacggaacttgtacaggcaggcatgcaccgcagtggtgaatacacgtacgacctgtgctccatctttagcgatattttggtggtcagcacgtgtgctcacgtgatcgacggaact

SEQ ID NO: 625915 - DNA, 124 bp, Homo sapiens
gtggctcacggagttttggcagagatatgagatctgactccaaactccattcccaagggtttccatggacgggaagcaggcgtgcgtgctccatgataaaagccctggagctcgaccagcaatc

SEQ ID NO: 625916 - DNA, 118 bp, Homo sapiens
caccctgttgcacgatgcggacggtgtggagccccatacaaacgtgaacccgtggaggatggcagagagaacctgtccgtcacgtgcataaacaacaaaataccgggcgcggcggccg

SEQ ID NO: 625917 - DNA, 199 bp, Homo sapiens
  misc_feature (18)..(18): n is a, c, g, or t
  misc_feature (68)..(68): n is a, c, g, or t
  misc_feature (122)..(122): n is a, c, g, or t
  misc_feature (149)..(149): n is a, c, g, or t
  misc_feature (177)..(177): n is a, c, g, or t
agacaggctttcaccatnttggtcaggctggtcttgaactcctgacctcaagtgatccacctaccttngcctcccaaagtgctgggattacaggcataagcaacgtgcctggccctggattngtatcttacttcaagttgaaatcattngagaagttgtagtttcaaaaagttgctngctgacctatatcttcctgcat

SEQ ID NO: 625918 - DNA, 602 bp, Homo sapiens
  misc_feature (439)..(439): n is a, c, g, or t
cacatgaggtgtactcagcttctggcttatggcggcctctgtcttgcaagcagagcctatctgttgtctgtgcttgcatagtctattcttcactggccgcagcggacatcttcctttctggcacgaagtcataattcatagactgcagtaccggcatttacttccaatgttcccaaagttgttgctctctgccagtaggattatcttcctcatgttagcccacactagtttctcccttcaagttccagatgcaattgatgagcacctcgtcaatgctcatccctaaaaggttaatggattggctggggcctgtgttttcattctcttcccatttgacatttggttttctgtggtttaactggtcaaaagactgtttggatgcctgtgtgtgcatagaactgggaaggctcttgtcaaaaagacccctacccctttcttnttgtggtccccggcattagattgggggtttggaaggcaggtgaatgtctaagtaattgttctgtttgaactggaatgtttttgaagtctttggtgtgtccgtgaaaggctcgccactggtgctcataggtgtctttgcagacaataaatggcaaatacaccca

SEQ ID NO: 625919 - DNA, 373 bp, Homo sapiens
accctttttgaacccccgggaagatccccatcccggtttccccaatttttttttccccagttttttttatagggacttttaaaaaaggagattaagggggggggggctcccccctgtaatcccccccctttgggggggggaggtggggggttcccctaaagtcaggggtttgagccccgcctggctaacagggcaaacccttgtttttcctaaaaaaccaaaaattaggtgggcgtggggcgcccacccctgtgttccccgctaccccggagattgagccaggaaattcgcttgacccccgggggcaggggttgcggtgggttgagaggggccccccccccccccgccggggggccagagtgagactgttcca

SEQ ID NO: 625920 - DNA, 116 bp, Homo sapiens
tgcaccttgcattctgatggtcgatctagaggtatccccgttgggagcttcatggtcttcaatcctgcttatgggattgcagtctatgagccagcgcactgacttgtacccatgtt

SEQ ID NO: 625921 - DNA, 887 bp, Homo sapiens
ttcttttgttcaaaaaacagaaaacgggaaactagacaggcacgacagagggtaagctcccgtggcggagaattggtgtaggaaacccgttgagagacagcatctcggtaataaagggtgtcagctgccgtgttttaccaacggatggggtattacggacagaaagacggtccggtgcaggtaacggtcgtccccgctctcattaaaccgggagtaaatttggaacggccccccgtgcccgtttttccgcaggtcctctcagggtcccgcgcggaagtttgccgccccctgcgcggtccagggttatacttttagcacgagtcgtcgggccccggcccagacccctccccccggggaaccttgcgctatcacccgagaacgaagggcccccaaaaagaggcggttatcaagactgggctccctctccaaacaagccgatcaccggccccaatcaaagccgcttcggcgacgaacacacgtctttagagacgcccgcggtcctcctcgcaggagagtacaaaggcaaccacccctctacagaaggatcccccccaaaaaaccacccgacccagcacaggggggattcaacaacggaaagaagtgcgcacaggaaccagagtggggacaagacaacgcacacagatacggctggaccaacgacgccccaaagacagaatatgggtcgcccgcctgggcatctgccaccctgacaagcgtctgaaccctctgggaatctccaaacaggggggggcgtccccaagaaacaaatcaactgcatgaaacagaactctacgcacagactccggtttacagaaggaaaatagaccacgaagcggccctgggaaaaggaaaggagacaccattaaaaaaatccgggccacaaaaca

SEQ ID NO: 625922 - DNA, 119 bp, Homo sapiens
ttaaggatcccgtggaatcctcctgctgctcagcaggagctcaggataaaactgtgatgcatgtgagtgtgaacactcctgaatgaatgaccctgtgaggagtgatggccaatgaccca

SEQ ID NO: 625923 - DNA, 669 bp, Homo sapiens
  misc_feature (90)..(90): n is a, c, g, or t
  misc_feature (189)..(190): n is a, c, g, or t
ttggagggtgggtacttttagtgaaatgtcacttcaagcatagtggtccgagtctgccctcctgcgacctgtccactccctgcaggggcntgtgtcacagctcgagaggagctgggaagttgcctgtgtgtgctcaggtgtgaaatgcctgccaggatgcaggatgaaggaggctaacaaaggccttgnntgtcgtacgggaagtcagtcattcagtctgtggttagtgttgcaaaccctgaaaatactccacgcagagcagaagcaagaagcgccaggcacagggctcattatcagacaccatgtttaggaatgggtttggctttggctatctatacacctcctctggtttaggagtgagtttgaggaaagctggtgtttcacattcagtggcctgatgttggtaaccctgtgaaaggatagtacagtttctccagagacgaaaaccaagtgcgctttatttaacaacaggctctacgctagaacttgacctgcctaattgctgacacctatataaattactaatatatatatatatttatttacttatttatttattttccatctaacctttggaccatctttattccacaggaaagccatgacttccacaaaagcagctgcatagtaccacacagggcataagtttgtgtttggggctgaaacgat

SEQ ID NO: 625924 - DNA, 614 bp, Homo sapiens
gtgcgctgtatgtcctggtaatccggtccttcttcccggctctctaccatcttgcttgaatagcacaggcgatggtccctgaggcccgcattcggagtcaaacttgcggcaatgttgccgattatctgcagggttgttgcttgcagaaggacccaaagctagaaaaggaggccaaggacactgaccccttcagtgacagaagtgattgtattcaaagcagattgacctagaacgtggtgactgaaggcagagtagggcgacatatacaagatgtaagactgtcataaagtgtaaggcacacgactgaatgcgagtggacctaagtatgatgaagagccaaagcctgatgaaaagccagaagaggacgagaatctagatgaggaggtcaaagctatacactacaggcatctaagcaatgacgatgtgtttagagaagctgatgaaatagatgacataaggagagtcagaaacaaacttatagtgatgcgtagcaaccttaatcgtaaccatgcttaccgctatttatggagtttacctcgatttgtatctgatattaacattaccatgtagctcgcttcttattagcattcccggaaattccttcgaccacataa

SEQ ID NO: 625925 - DNA, 396 bp, Homo sapiens
  misc_feature (393)..(394): n is a, c, g, or t
  misc_feature (396)..(396): n is a, c, g, or t
gaaaaatacctgctgtcaaatgatgcaaataaaataatatggacatgcaaatacttaaataccccggatctctgagcctcttggaaatgtacatgaagcaatatcttaagagtataatcacaggccgggtgcagtggctcacacctgtaatccccagcactttgggaggctgaagtgggtgtatcacgaggtcaggagatcaagaccatccctggctaacacagtgaaaccccatctctactaatttttgtatttttagtagagatggcgtttcaccatgttggccaggctggtctcaaactcctggcttcaagtgatccacccaccttggcatcccaaaatgctgtgattacaggcgtgaatcacagcactggcctgaatctagggttaaannan

SEQ ID NO: 625926 - DNA, 443 bp, Homo sapiens
ctttttttttgagatagagtgttgctcttgttgcccaggctggagtgcaatggcaccatcttggcttgtagtacgacgagccacagacaaaactcctcagactccgagttaaagaaggaaggggtttattcggctgggggcatcggcaagactcctgtctcaaaagccgagctccccgagtgagcaatttctgtcccttttaagggctcacaactctaagggggtgtgcgtgagagggtcgtgatcgattgagcaagcagggggtacgtgactgggggctgcatgcaccggtaattaggtcgtaacaaaacaggatagggattttcacagtgcttttctatacaatgtctggaatctatagataacataaccaattaggtcaggggtccatctttaactaccaggtccagggtgtggccccgggctgtctgcttgtggatttc

SEQ ID NO: 625927 - DNA, 511 bp, Homo sapiens
cccaaaaagtaaggaagaagataacacctgaaatttcgtttttctcatgaattagatagggcctcttctgagggccattaaaaggagaaaaaacccatttctccctttgcctttagtccaaagaaaaaatgctttatagccaaatgaaagagaccctgaaatgcttctttccccgtttattgggtgaatggggatctatttgagtctggaaaaaactaatgggtttgataattagtttagtttgtggcttcaaggaaaccccccgtaaactaaaagcttccggggtatgtttatgttccttccatagaagaaaggccaaccaccccggggttttaaaatttgttattctcccctgaaaagaaatttatggagaagccacccaaatccttttccccccttaaaaaaagaaaatacccttttttggccccataatcttttgttttttaagttaggggatattttgttgggattttctttttggggggggaataaatctttttttttgaatgta

SEQ ID NO: 625928 - DNA, 178 bp, Homo sapiens
catactagtagggtcaaggatctgtgaaagggattggcagatgagggactctgaaaatcgtaggaaaaggacagtaataagtgcgaccaaggggtgctacctgtctccacgtcagtgagccagccagaggaatctcctcttaccattacaaattccagtggaactagctgtttgacct

SEQ ID NO: 625929 - DNA, 869 bp, Homo sapiens
gggaactttccagaacgctcggtgagatgcggaggagcggtaattaccccgtctgcgcacattcggcgctccttcccgctcctctcatacatcggacttcatgccgtaccggcagttgcagatggtgacagaaacaattactacgaatgttttgggggtcagacccacatgctactcaggcacgaattgagagaggcttataggatactgggctccgaagtaccatcctgataagaacccaaatgaaggagagaagtttaccagatttctcaagcttacgaagttctctctgatgcaagaacgggactatatgacaaaggaggagaacaggcaattaaagagggtggagcaggtggcggtttggctcccccatggacatctttgatatgtttttggaggaggaggaaggatgcagagacgaacggagaggtcccacatgttgtacatcagctctcagtaaccctagaagacttatataatggtgcacaagaaaactggtctgcaaagaatgtgatttgtgacaaatgtgaaggtcagaggaggtacgaaaggcagcagtagagtgctgtcccaatttggccgaggtactggaatggcaaataagaatccatcagataggaccctgatggtcaggcaattcaggtctgtgtgcctggagtgccaggccatggggaccggatcagcctaagaatggatgttacagtgccccgcagacaatcagtcgagaacaacactttgacgtccctttgcccaggctgaagatgccacgtacttctgcgaggcgcccaccggtggccggcatttatggggatcgacaccctcgtttccggaaccttgttacaacgtacgtggccacacttctcacacgt

SEQ ID NO: 625930 - DNA, 407 bp, Homo sapiens
  misc_feature (35)..(36): n is a, c, g, or t
  misc_feature (98)..(98): n is a, c, g, or t
gcgtcgacctgcactccaccctgggtgacagagcnngactctgtctccaaaaaaaagaatggctaaaatcaggaagagcggcagagacacccctcacncccaacccctcaaccttatattaccttgaaattccaccgatgctatatccgggtttgtttgcaactttcaagtgggtattatttccgttggctttggaggaatattcttgtgatcacgcaatcaaccatcatgatagagcctcatgcactgtttaggaaccagttttcggaaagaatcaagatctgtgagtcattctctcatttatctacataaaactattggaagaagcagctcattaagctaaaatgtattccatttctctaggcgtatgaaggcatcaggtgacagcactgctgccctcagggtct

SEQ ID NO: 625931 - DNA, 112 bp, Homo sapiens
catatgttggtcgatttagaggatcccagtgctaccacaaacaggagttattgatgttatacactcccttccattcaggattttctgcttggagggaaactatgttgatcct

SEQ ID NO: 625932 - DNA, 254 bp, Homo sapiens
aaaggttttttgggctgtaggtttattcaatgcaaaaagaatcctctccaattttactgaggtggctgaccacgtcacgacccaaatccgcctctaaactggaattcggttgctgaccccagcccccagccctcgggcttttctttgtcgggcacccagggtgggcacagcccactcccgtctggtagggtatctctgggtcaagccctcccctattctgtcggtctttctcggcaagcccggtattagataag

SEQ ID NO: 625933 - DNA, 415 bp, Homo sapiens
tggatagggagaagagggtatggtatgtgggtacagggtagggcctgaagtagccaggaggtccctccgtaccctggcttagtcatgtgatatgaaaagtctgctgaatatggccaggcgtcttaagttgtccaagctcgggaagtctgagccactgtgtctgctgctgaagctgctcaggtagccctcttggtccaagagagaatcttaaggcctgggggaagagtcacctatgtgaggggactcgcacatgggccgaaagagtaaggtggtcgggaagccacccccggacagccccatgctagggccaaagaggcttgccagctcctggctggagaaggcaaaagggttattgtgtgccatcggacagtgtaggtgagcccaggaggtcatcggcgctcagtatagggggtct

SEQ ID NO: 625934 - DNA, 336 bp, Homo sapiens
tgttatggtagtaatgagggatcccttttcttaacctgcaaaaaagtagaacatttgggttgggcgtggtggctcacactgttaatcccagcactttgggaagccgaggcaggcggatccctggggtcaggagtttgagaccagcctggccaacatggtgaaaccccgtctctactaaaaatacaaaaatagccaggcatgttggtgcacacctgtattcccagctacttaggaggctgaagcaggagaatcgcttgaacccgggaggtagaagttgcagtgagccgaattgagccactgcactctagcctgggtgacagagcgagactctgtctc

SEQ ID NO: 625935 - DNA, 573 bp, Homo sapiens
atatataccagaatttacttccttaacatatatgccttcctcaaattaccaaatataatttattttattaattcaaaagtaaaaatattcatttgtggtctcatcaggaatgagtttgttgtagatggaatagctaacagctatttttagagaatcagcaaaaatccaatctttccaaaaatatctctttcactgctcctaaaattcacatttttagaatctttttgtgtgtgtatgcagtgtttttctagaaagccttttttaaaatttatttatggggccaggcatggtggctcatgcctgtaatcccagcacttcgggaggccgaggtgggcagatcgcttgaggcccagagtttgagaccagcctgggcaacatggtgaaaccccatctctactaaaaatacaaaaaatgatctggttatgatggtgcatgcctataatcccagctactcaggaggctgaggcaggagagaatcacttgaacccgggaagtggcggttgcagtgagccaaaattgcaccactgtactccaacctaggcaacagagcgagactctgtctcaaaaaaaaaa

SEQ ID NO: 625936 - DNA, 206 bp, Homo sapiens
actggtccacacgccaccggagaagggggtctgagccgcagatcctggcaccacagctcacagcaacaccggatccttaatccaccaagcgaggccagggattgaacctgcatcctcacggatacttgtcagatttgtttctgctgagccgtgacgggaactccaaggacttaccttttaacacacctttccgtgctgtggaccgt

SEQ ID NO: 625937 - DNA, 119 bp, Homo sapiens
gtgactgtggccagcggacacagctctacggcaaacggacgagaacttgtggccaggcggaacggacttgtggccagcggaaacctaaggcaaccggacgacgaactgaggcaacgcga

SEQ ID NO: 625938 - DNA, 111 bp, Homo sapiens
cagcaatgcaggatccgagccacatctgcaacctacaccacagctcatggcaacgccagatccttaacccactgagagaggccagtgatcaaacccgaaacctcatggttc

SEQ ID NO: 625939 - DNA, 818 bp, Homo sapiens
ggagcaaggctagtgaagggcgggcagtaaagggcacgctgcttgtgtgggtgactacaggttaggagatccgttgtaccctggaggggcctaggatggactcccgtggaaagattcttgagtacgtgcgcgcgtctccctggcgccgatcgttcacgcctacacgcggcgggtatattctgttgcagattggtcccaggacgctgtttccaagactctgggcaccgctcgctagcgttgccgtccgcgtccatgggtattagtaagagtgatgctcaataggaaccccgaccccgcggtgacactactcgcaattcctgggtgactttctagatcgttctggttgaacgcgtgcgcctttagatgacacgaagccatacgcacaatacccgtgatttccagcggatgcccgggcctggagcccacagaattcttccagatccctgggtggggacggagaaagtgaacgttcagattgagatggcccatggaacaacacgctcgtcttcaagttccagcatggagtgattgcagcagtggattctcgggcctcagctgggtcctacattattgccttaggggtgaacaaggtgatatgaggattagcccttaactgcttggtaaccatgtctgggtgtgcagcagactgtcagtactgggagcgcctgctggccaaggaatgcaggctgtactatctgcgaaatggagaaccgtatttcagtgtcggcagctccaagctgctgtccaacatgatgtgccagtaccggggcatgggcctctctatgggcagtatgatctgtggctgggataagaacggc

SEQ ID NO: 625940 - DNA, 402 bp, Homo sapiens
ttacaacagctcaaaacttagctgcgttctctttatctgaaaatatactatttacctatttgctaagggtattagtctttgtctgccatttagaatggtgtctagaatgcaggcatttctctgtcctgttcctgctgtctcttcagcatctagaacagtactgggtatatagaatgctcctgataaatgtttcgaacatatgaataaacattattcactttctttctataagacctaactgttacattctttatactttactttcagatgtacattattacattgttgtaataattactattttactagttatgcaaatagatagcctcatccatatccaggatacatacgagaaggatgattctcagaaagacacctccgaaaagggtcaaactatctcag

SEQ ID NO: 625941 - DNA, 292 bp, Homo sapiens
gattgcatttagacctagtatgggcaacaaactgagaactgtctgccttaaaaaaaaaaaaaaaaaagggaaaaaaaaaaaaaaagaaagataacacttccccacagctatacaagagttgtcatttctgtgcattttcaatggaccccttttactttggcccacattcttaaggcaaacacatgtgggcatttaatagtcgggttaaaggtgcatttattaaaaagcaagatggagagatattcctcattattttttattacccatttaaatttccccaggaatttggctg

SEQ ID NO: 625942 - DNA, 135 bp, Homo sapiens
caattcctagagttaagagacccttaaaagattcccgctcatgctaaaagtatgtaaagatcccatgtccagtatgaaagtgtactttttttaaaggcctgtcaatatacaaacctttaaagattaaaaccctta

SEQ ID NO: 625943 - DNA, 435 bp, Homo sapiens
caccgccagttacaactatctgacacctgtaatcgcagctactcaggagactgaggcaggagaatcgcttgaacccaggaggcgtagactctagtgagccgagatagcgccactgcacgtccagcctggcaacagagcgagactctctctcaaaaaaaaataaataaagtaaaagaatgcaagaagaccaggtgcaatggctcacacctgtaatcccagcactctgggtggccaaggcaggagactcacttgagctcaggagtatgagaccagcctggacaacatagtgagaccccatatataaaaaaataaagtagccgggtatggtggggcacaacttgtggctccactattgggaggctgaggtacatcacctgagcctagcaggtcaaggctgcaagaaggtatgatcacaccactgcactctagcttggg

SEQ ID NO: 625944 - DNA, 101 bp, Homo sapiens
gacgctggtcccccccttatgccgtggtggggggaggtggcatgcgtgggcttgcttccctttgtggagttccccatcatcatagagagactgggatggtt

SEQ ID NO: 625945 - DNA, 159 bp, Homo sapiens
actgtgagctaccttggaattagtaaacagtggggaaaaaaagaacacaatttaaaaatgacctttaacattatccatatttatgaaaattaacaaaagaaacagatggatattctctctgatgacatctataaaactgtaatttatatcttatttgcc

SEQ ID NO: 625946 - DNA, 351 bp, Homo sapiens
tccggaaatggagtcaaatagatgtatgtgtttttagtcttttataaaagggaaattcaaaattagtgggaagtgatagcatattcaaaagtgatgaggacaatttgatcagggaaaaaaaattgacatcctacacttattacgtatatcaaaataaatttgcagatgaaacccaattattggaggaaaaaaggaactatagttgtgaataagataagggcttacttagaaaatactatgagtatctgggtgataggatcatttgtaccacaaacctcatcattatgcaatataaccaggtaacaaactttcacatgtaccccaccaccaagctaaaataatagttgaaat

SEQ ID NO: 625947 - DNA, 355 bp, Homo sapiens
  misc_feature (334)..(334): n is a, c, g, or t
acatcaagttttctttaaagtttacttttttagaagcttcctaaatagttgaacataaaatttctcaaattttcctcaaagtgtgcatttcgcttactattttctggaatataggaaacaaggatcatgggacagcacgtctcactggcatttacattcactgccccaaatcagaaccaaaccactgttcaagtcttctgtaagaacactggatttgggtccctgaggtgctgataaaattttattttttggcttacataattattatatgggcattcagtaattgttggactttacatgtgtggactttatgggattttgcaattgtatttcncaataaaaagaaacaaaaggc

SEQ ID NO: 625948 - DNA, 303 bp, Homo sapiens
  misc_feature (207)..(207): n is a, c, g, or t
ccaccacataccctcatacccccacacctcaccctcacacccccacacctcaccctcacacccagggatggtgccactgcttccgcgttccgcctgcccttagcatccccagagccaggaaggaaacctgccgcttgtctgtctggtcctttgtctctgtgcttcagctgatttgccccagcttgtgatcatgtttacactgcctgntgtagggccaaggtgagggcactcaactcagagcttctttaattaggcatcacttctaattgaatttcactcaaggaaagtagaacattcttgtgg

SEQ ID NO: 625949 - DNA, 442 bp, Homo sapiens
agctgcagtgcagtggtgcaatctcagctcactgcaacctccacctcctgggctcaagccatcctcccacttcaagagaagaaaatgcccccagcccagtggtgttctgctggagatcagcaggaaaccctactccatagtcaagtcagccgttagcctttcaggaagttcttcctatggtgaggcctcctcaagatatatatatatacatacgtgtatatatatatacttacgtatatatatatatgtgtatatatatatatatatatacacacgtatgtatatatatatacacgtatgtgtatatatatatacgtatatatatatatttattttaagaggtagtctcgctctgtcaccctggctggagtgcagtgagcagagatcccaccattgcatcccagcctgggcaacagagcaagactcttatctcaaaaaaaaa

SEQ ID NO: 625950 - DNA, 135 bp, Homo sapiens
cagctcgcgtacctataggttggacgagtagtggtaagccttgttgtttgttggaaaggtgctaacaaagcccattatctctaaagggactgggggtaatgacgagaaattataaacagctataaagttattata

SEQ ID NO: 625951 - DNA, 182 bp, Homo sapiens
agggaccacagtggctgactggagtgtagcatcccacaggaggtagcattcccactaaggatatcctcacttaggctccaagctatacaatgatgtctattattcttctaattcagtaaggaagagacttttctggttagtaatagttctgtaggatttcttttctatttttttttccggtg

SEQ ID NO: 625952 - DNA, 113 bp, Homo sapiens
aaattgcgccactgcactccagcctgggtgacagagcgagactccatcttaaaaaaaaagcaaaaaaaccaaaaccaaaacaaaacattaacactaatgatagctgatgagct

SEQ ID NO: 625953 - DNA, 371 bp, Homo sapiens
ggcacgagcgctctctctctctctctctctctctctctctctctctctctctctctctctctctctctctctctctctctccttccttgtagcacagatttgaatactattacaactacaggaatctcttcaactacactcttaatgccgaaggtcctgctccccttgaactacccaaccagtggctatgggagattatcgatgagagcaactaccagagacaggcattcagtcactaccgctgtaagacatggcaagaagtcacaggcagagaatgactctctttgagtccaatcccttcaacatcaaccgacaggtgtgaggtatacacgcggaggcgaccccgagagtgtggctggggagttgggccg

SEQ ID NO: 625954 - DNA, 418 bp, Homo sapiens
aaagtcctagctgcaaacgtgcatgcttgcttgtgggcgatatcatagaatctgttgattactatgagcctgtatgaccgttttcatgatattgattcttcctatccatgagcatggaatgtttttccatttgtttgtgtcttttatttccttgagcagtggtttgtagttctccttgaagaggtccttcacatctcttgtcagttgtattcctaggtattttattctctttgtagcatttgtgaatgggagttcactcatgatttggatattattggtatataagaatgcttgtgattttcgcacattgattttgtatcctgagactttgctgaagttgtttatcagcttaaggagattttgggctgaggtgatggggttttctaagtatacagtcatgccatctgcaaacagagac

SEQ ID NO: 625955 - DNA, 1753 bp, Homo sapiens
caaccgaacccatctacatcaccgacccgaccttagcatctcaccatcgctcttctactatgaacccccactcccacatacacaagaccccatggtcaacctcaaactaggacctccataataatacatagacacaccatctagaccatagacacgacacatacagatccatcgtgaatcaaggatgagcaataaaaaacaaacaacagaaacctgactcggacagcaccagaagaaaacagaagcaacaagacaagtaaacaatagtgacaagatcagcgcaaagaacacacagacaaatacatacataagtagcagaaacaaagacagaaatacagaagagccagtcacaaacacagatcacaaaacagaacggcagacaagaacacaagacaacaccagaagacacataaacacacatgacagaagcaagaaaccacatagagagacaagccagacagccaagcacaacacagcatcacaacagagcataaggcaagagaagcaccaaaacgcagcacacaccaaaacaatacagcaaccaatagaccgaaaagagaaagaaaatacagacaaacatacaaacaaacagagaaatacaaaaccgacaggaaacaataccagagaccgcggcagggaacaacacaaacagccccaacaaataacacaccagagtacgaccacaggacaaggagaacagcagagcccataccaccccaaactgaacaaaagaaggcaacaaagccaagaccacaagaaccatccaagcaccacggaagcgacagccgaccggaaccactgaaacggaaacagaaaaagcagacacgagaacaactacaaaaagccaaaagcaactaacgaaggggagcaagactgaaaaggacagcacaacacgaacataaacagcacacaaaaagagagaaataaaaaagaaaacaacaaacaaccagaggaaataacaaccagaggccagacacaacaagacagagaagcagaaaaagccaacgaacaacgcaacaccgcaataacaaaaaaaaggagaacagctcacccagcagcccaccagaaaagcgcatagcccacaacacacggaaaagacagacaagacaacacaaacgaacagacgtgcccagagacaacgagcacacgaaacaaagaaaaagaagaaagaaaacagacaaagaggagaaacgcgaaacagagagaaaccaaacgcaacatgagacacaagagaaaaaagacacgcaccgaagaaaagaacgagaccgaagcatgccaacagacagagaagaggaaacaatagaaaacagagctagcgaagaagcagagaagcagcacaacagaagcacagcgacagaagcacaacacggaacgacgaaaacagcaaagaacacacccatacacaggagctgcacataggagacagcagcgacgcagcacatagacagacgaggacaacatcagcgagacgcgagtgagatcgagaagcagagacagaacagacacgacgaactaaacagtagctgacatactgatgacagtgcccaacagcgaggagaacggagatcagacagcgaaggagagcagacgacgaagtaaagcgcagaaaaagcaccgcagaagaacgacgaaagacagaacaacagaacaaggcgacagcgaccgagacgcgaacgcgacacgaaaagacaggcaacaccagaaggtagagcacgagagagagcacagagagacgagagcacagaagcagagg

SEQ ID NO: 625956 - DNA, 975 bp, Homo sapiens
aacggtggctcacacctgtaatcccagcactttgggaggctgaggtgggtggatcacctgaggtcaggagttcgaaaccagcctggccaacatggcaaaaccacatggctactaaaaatacaaaaattagtcgggtgtggtggtgggcacctgtaatcccaactactcgggagtctgaggtacgagaatcacttgaacccaggaggcagaggttgcagtgagctgagattgtgccactgcactccagcctgtgtgacaaaacaagactcctcctggaaaaaaaaaaaaaaaaaaagggaacccggaaattcggtttaccattggtaaggtcaaagggtttggaagagatgtcattcggaaggttcaagacctggtgggacaggcgcggatgggagatcctccagcatgtttggaaacactgttaacgtcaacgccagggtcctttggtaaactctccaaggttggtacaagagcgctttggctttgggccaggttggtgtccacgcctttgggcggttaaagtggaggagactttgggatataacggtgggcacaattcggctctccattggaaattggactgggcgatccacactaggtcaggcatttggacgtggcgcttaaacattatacgcggggggacagggggcgtattctttacaagggcgcgtaattggaggatccgggggaaattttctaaacgcgcggggcgtcctccccccacggtcttcagagtatgtgcaggtgcggcttcacagaggggggacccaactactggggcggcggcacatcggacatgcggcatgtgggtttgtgcgaacccctcggaaaacgtggcccttttggggaagcggcaaatcgggggcgacaccccaacccatttaaagtttttttcacttagcgggccaagcgtgtgggccaacacccaccgtgtttacggccatgtgcttgcggcgtctgcatgcacaccagcgc

SEQ ID NO: 625957 - DNA, 117 bp, Homo sapiens
ggacataattgacttcatatcagcgttaaagtattgctaactttatataatagcatttggtttggggatatggtgcatttcccggttgtagaaaggatagctatattatgtgagaca

SEQ ID NO: 625958 - DNA, 1035 bp, Homo sapiens
gccgaattggcactttaatttgagcatccctgggggcctgggctgctgacagaagggctctctctgccctccactccaaagtgggtgcccccccaccctgtggccaggacagggagggagccgcgtggtcgtgctgccggaggtggtggctgcacgagaggacgccatgacttgctgttcaggcccgcgacgaatgtcccagtgtccccgttcctcactcgtttgtaagtcgccgtctgtttgttctgggtaaggaaggcaatgatgctatagagtaaagacgtataaactaataataactttaatgtgaatgggttctgagctcatccctgcgccccgggcgggccaggccgagcattttgcacttaatgtgtcccactggtgggcgtgagtcgggagtgtctggggacgtgcgtggtttgctgatgcggatccggcttgttgtgtctcctcgtctctacgatcactgtatagtgataccggttggcgagcgggggtcgtgcaggtgcacgcggcgtcaggaggggtcactttcgcatgagctgctcttagctatcactttcgatcgagtatgtccaacacgggataatcgaattaggaaagtcggaccgcttgccctctctttgattcacacatgatgactagtcctagacatccggggtcgtcctggcctgtgagtggtgacccttgagtcatctcagaccctgatagtagtagagacgaggctcactcagtcatcggatgagcatgttctgcgagccatttaatcccttaagtcctgactaatgagcgacgaccggcattatcctattattaggacagtctacttacagaagctacgcttattctataaaacccttgggacgagcggacgcgaagggacctggacccgtgctgggagcgtgcccggcagggcagagtaggtcgggcgcagggagtactagccggcctctctgtcctggcgtcccctcttccccgaaggggaacgggcccagcgagggcgacggggagcgagggaaagggcccacacagagg

SEQ ID NO: 625959 - DNA, 908 bp, Homo sapiens
gctagcccgccgcagcccgggcgttgaaggtagtaaagcggccaccctggccgcatcatggtgaccccactgtcccaccagcccctcgatgcccctgcctgccctgagcgtgggagtgctgggacaactgaccatgaaccttacgctgcccctggctgaagaacgagcaggctgtccgcagcctccggagggaacgcagccgctgccatccccatgaaaccctgtgcccgactcccgggatgactcacggcattatgcgaccatgtatcgagatcccctcatgctcctgtgctcaggactggctgcacgagcatgccccttctagcggctgcgcgggctgcgtagcacccacatgcccctgtgccctggacccagaaccactgtaggacgcaagctaagatactacaagaacctttcccgactgacatacggagccacgacgctgcttacgaccgtatccgcaagtgcgccagggcagagcccacattccatccctgctgggcagagcgactggacactggacagcccatctacgctgacgcgtgcatgggtatgacgaccactgcatcacagcagctcgctcggcatcagttccatcttcgactcgccatggcctcttcgtcacttctccattgcctgtgctccggcgccttcgcgaacgcggcctcgggtgtaccacgtggtatctagttcccaggggatcgccaggaccccctgaggcttcggagagtccaacaaagacgtggcccagctggcacgagcgcgcgcttcacacccgcggccccttcgatatctacgagccagggaagtgcgcccgcaaaaacatgtgtgagtgccgttaaggaccgtgcctctgactggggaaccttggcccccaggtacacacaacatgcctggccctaacttgg

SEQ ID NO: 625960 - DNA, 143 bp, Homo sapiens
ggatatggcatgtacaccgtgtctaatggaagacgagatacaatagactcgatagatggatgcttgtttcaaaggtgttctctccctctacacgaaggcagtacagccagtactcctgctctgctaaccctgcgtagcacacg

SEQ ID NO: 625961 - DNA, 134 bp, Homo sapiens
gattgttatgtaccagttacttatttgcttaactctacgtgagagaaattttaaccttacaaaaaagacagcagtaggatgaacccttgcatatttattcaccttactgtggcccctttcattattattttaaa

SEQ ID NO: 625962 - DNA, 198 bp, Homo sapiens
  misc_feature (32)..(32): n is a, c, g, or t
  misc_feature (63)..(63): n is a, c, g, or t
  misc_feature (170)..(170): n is a, c, g, or t
gacctcgtttttcatcctattatggcgtttancaggctagacagaaacacgccttaactttanttgccacaaatcttaatattttctccactaatattagaaaggaagcaacaaataatgtcgcttttcacctgacgtctggttcaactttccgcccagcctattcctgngtcttcctcctgcctttctaatgtccca

SEQ ID NO: 625963 - DNA, 393 bp, Homo sapiens
cttacactgttgttctttatttttaacattattattctttcctttttgtctttggttgtctctttttgtttcctctgttcttctgtttcttaccttctgaatctcacaggtatataagtgcctttaagagactcagttacctgtgagagcataaaaattagttcctaatacgaactaattaaaatcataattaaacatgaaaagccactctcatcattaactcttaagttctctcagtcttttcttttctctgcttctaaagaggatttgagatttctttgttctatttcctcctctctgccagcctcttaggaaggtcagccttgctagctaattcctttggacttgcagctgaaggattctgaataaaaggtcagtggcccattgtttggc

SEQ ID NO: 625964 - DNA, 114 bp, Homo sapiens
aagcaactaatgttagtcatcagtacaccatgaaaacattctcctccgcataagcctgtgtcagctttaacacaccactgacactgcaccacattcaaccactcccaccttcac

SEQ ID NO: 625965 - DNA, 133 bp, Homo sapiens
  misc_feature (6)..(6): n is a, c, g, or t
tgggcnggaattctttttattaaaatgggcgggcgcgggcagctttaggtgggctggttcaactttctggagttcccattaaactgggttctaagcgggctggttcaacttcataaggaagcactcgatgtcg

SEQ ID NO: 625966 - DNA, 536 bp, Homo sapiens
catcaacattctcactgtgcctgggtcaaccgaatacacggagagagagagccttcgagaggtgcggccggcctatggacccctgaccgcctggggtggctcagacacctaacgcgtggacagagctatgatgactggactgagaaaccgcacgcctgtgacgggcttttagcatgagctagtgggaacctggcgagcgacattgtacccgtgcccagatccttgatttacactattcagcgttctctgagaactactcatcaatgaactgatactgaaggtcggaggctctctgcaatattgttctgaccaactactgcatgtgtgtggcgcgtatttaaactcgggccgtagcggccttcgacgtcatagagagtgatgagtgtaaatattttgcacttagagtgcagagctatacgtatattgagagtgtacagcgatactctctgaacattatgagatcctatgcaccatggtctgcgtgcactatgaatttcctctctgtatgaggaccgacacttagatgggctccgctt

SEQ ID NO: 625967 - DNA, 163 bp, Homo sapiens
  misc_feature (155)..(155): n is a, c, g, or t
gtgccgcacttggtcgctcgaaggcatatatatgaaatttcacatgaactctcagttgctcaaggaccatgtgccaccttctcgaagctcatggacccaagaaccccagaggaatctttagcatgaccgaaagaatagcatacattggggttccngttgccgc

SEQ ID NO: 625968 - DNA, 215 bp, Homo sapiens
agcggcgccttttttaaaggcattcttggtatcccagggggagagttagaaaaaatttacaaagcatcggcggaaggcattttcaattattccggggctttaccagggctattactttctggatggtaagaattttacattttcaaatatgctttaactttacaaggcattaagaattacggttttaagattcttatgagggttttatctcactt

SEQ ID NO: 625969 - DNA, 101 bp, Homo sapiens
  misc_feature (1)..(1): n is a, c, g, or t
  misc_feature (78)..(78): n is a, c, g, or t
  misc_feature (85)..(85): n is a, c, g, or t
  misc_feature (89)..(93): n is a, c, g, or t
  misc_feature (95)..(95): n is a, c, g, or t
  misc_feature (99)..(99): n is a, c, g, or t
nttcaagagccattttttaaaaatgagcaataaagaacctctatcagagacttctcattttatagcaaatacattttngcagcgnaaannnnngncaanga

SEQ ID NO: 625970 - DNA, 1520 bp, Homo sapiens
tatggcgtcctcgttttgtcttcgggtgtctcgctcgtcgtcgttcgttttctgtgtcgctcaacatcttctgctcctccgctctttgcggtgaccagtgtccaaccggcgtcccgctatctgaggtgcctgtcttgttcttcttgtcggtcgcccagtatcgttctgtccacactgctttgcaccttcggcatcttcctgggtggttgcccctagttctgtcgtggcggctttctctctcgggtagtctcctttgtcgcttgcctactgcgtgacttttctcatcgcgtgccacgggaccctgttcccttggtttaccacctgacggttcggctacatttgcgtttctgttgctctttttgcggctggctccgtttcgtgcggttcgtcttggtattctctccctgcggatgtgtggtgagctgcctgttaggctgctcttgtttgctcctcttttcttcccttctctgtgtgacttgtcgtccggggatggtgtcgtcatttatggcgttggttttggccgtttcttcctcctgcttcttgttgtctccgtctgtgtctgctgtctggcatgggtttgcggccccccgttctaccgattttctgttcgcggctatccgcctggtctgccccacgtcgggtgtcttatgtccttatgtttcgttggatgtctgctccccggtcggtctcatgttgtcttcgcctttgtttgtggagtgtgcgctcgtttgtactcgcgtacgttccgggccttccgttgactcgttgtctttgcttgggatggaaggatccatctaaggtggctccctggtgagtgtgtactcgcgtagtctggcttgatgttctctggtatgctgatcttggatgcgctttggagcctctggcggtgctgtcgcgtgctgtcccgtttagatggcggatgagtactgcttgtgccctcggccacgtagcccttggaccctctggatgtctactcctatacggcattcgatttttcccctagttcggatacatctgttggtgcgctagagcggtttctgtgcgagttgtttagcaatgtcttgactcgactgtctgtatgattgtttatgcatccatttcctttggtatgcgttacgttgacagtataacgatccatcagacgacatatggcacaggccgtgctcacaaccatgcgtgagtgacaccctgtcagataagagaggctgattgaagccaatggtacagttacagtgatagagtccatgtctatgatagtgtaattatcaaatagcgtaacgaagtacaggcaccaacatatctgatgacaataattctatatctttgaatccgcaaggtgcatgacgtggctggaatgctacgtttgtaggaatcacgtccagatgtgagttgtttccaatgcaacctcacctgaaactctatataatggaatacatttttctgtgaaagggtctgtataatcattttctaagataagtatgggtatctatactaagtgtttttacatgaagacactaggt

SEQ ID NO: 625971 - DNA, 404 bp, Homo sapiens
ctttttcatgtaaatatttttatgaagtttttagtatttaaaaatgttttatctctttaaatcattttagtatgtcacatttatttatttaataattattcatttctataagtttattattttttattggtcctctcttcttatctgtagctcagggtgggtttccggtgtacaagtacgtcccgtatggtccagtgaacgaggtgatcccctatctgtcccgtcgagcacaggagaaccgcggcttcatgaaaggagtgcagatggagagagaactgctgtggaaagagctgatgaggagactgagcagcggacagatcctctacacaccacctgtataaaacacacactcctgctgtttattcctcttcacccatccattcataaatctatttatattctca

SEQ ID NO: 625972 - DNA, 634 bp, Homo sapiens
  misc_feature (455)..(455): n is a, c, g, or t
  misc_feature (461)..(461): n is a, c, g, or t
  misc_feature (479)..(479): n is a, c, g, or t
  misc_feature (492)..(492): n is a, c, g, or t
  misc_feature (501)..(501): n is a, c, g, or t
  misc_feature (556)..(556): n is a, c, g, or t
  misc_feature (562)..(562): n is a, c, g, or t
ggtcaggcggggatacagcctggaaggtaatgcatgtccatggtacacaaattcacaaggtttgtaaatgagaaaagacgtgaggttcctttgttctttacctgtggcctccctgccctacacggggactctagggtggaatgtagcaaagcccatccaccagctcatgatacataccccccaacctcggccaggctggtagcgacctgtgtctggggagctcgagccccagctttctcgcttgcggtgagcccggactggggcacgtcactgctgcagactcccacgcttgcgtgtgaggcggagcttcccgacaagaaccgcagcactccgcatccttctccaaccacttcgtttcatgccttgtcctagacagtaagctggggcccagcggaggtagcagcagacgcctgagagcgaggccgaggcccctcagggtttggagaccctgacanacccancttctcacctgggctctncgtatcccccagncttgagggnagatgaagcctaaactgatgtaccaggagctgaaggtgcctgcagaggagcccgncaatgngctgcccatgaatgagattgaggcgtggaaggctgcggaaaagaaagcccgtgggtcctgctggtcctcatt

SEQ ID NO: 625973 - DNA, 778 bp, Homo sapiens
taggggtttcatgtgcgcagggttgtatgtggtcgacagtgtgttcgcggtcctgtgtgcgggcgggaccctgtggacaggcgtcgggacggggtccgtatggtccagcgggtgtgtgggggtgccctgtctccccggggggaaggtgagtgagcccgccgtgcgggagccggttggtgtggcgccgggtagccgggcgggggtgtttccacggggccgccctcggcgggtgttctccccgggaggggggtctgttgcgccaattttgggggggggagccccctgggggcccccctgtgtccacatcacgcattgagagtgggtgcaccgcggcagaggatgacctttcctgttagttggcccacaggacgcgtttgtatatcgcgcgttgacccacaaacggtgttgctgtcaggctacttcggctgcagtctaaacgtcggggcacgccttgcctggccagtcagggtcgcgccccgccctatgtgggggaggcgaatataattgtcaaaactctgcccctcggggaagctcgttcccggcctcaacaaaggtttcaggcgcttcaggagccccccccaaaggaggcggtgtttgtattggaatctgtgggcaataagaccgcgcccatcgtctcgggccaaacacggcgttgttaggagtgtgccccccccagtcttggtctcatgttaagcagttgtcttatgctcatctaagaagaaaacctctttcagtgagcggggataactctttaaaataaaaaccacaacaacaataa

SEQ ID NO: 625974 - DNA, 264 bp, Homo sapiens
gtttgtgtggcacgaggacggcacttcgcgtgcccatgttctcaagcgcgagtacaccccccgctactacgacatgatgaaggcgctggaagacctgaccggcaacggcgtgtcgctgaacacctcgctgaaccgccgtggcgaaccgatgatctgctcaccgaccgatgccctgaacatgttcttcggctcggacctgcagtacctgatcatggaagacatcctggtcgtgaaggacggcgccgccgcctatgaccagccgct

SEQ ID NO: 625975 - DNA, 108 bp, Homo sapiens
cggtggtcatgtatccacctccacagggggcgagctgccaaacaaggggtacacatgtgcccccttgacataggccaggtggtctctgccctctgtagctcccatgag

SEQ ID NO: 625976 - DNA, 256 bp, Homo sapiens
tgtagtcatcacttgtgagtggtaacaactcgaccataaaaactgataacagttagaaaacaacacagtttatcgttgataccctgtggagagaattttgaagaaaccacaggctgatggctgaaaccatgtcatactgtctgcaactttacagatggtgcattggttcagcatcaggagtgggatgggaaggaaagcacaataacaagaaaattgaaagatgggaaattagtggtggagtgtgtcatgaacaatg

SEQ ID NO: 625977 - DNA, 329 bp, Homo sapiens
tctagaggatcctgatccaataacacctgttgcaaatggatcacaaaaagggaccagagtgagccctctggactcttaccccgccctgtctctggcttgccgtgtgctctctactgcctggtgggggtgggagcaatggagcacctgcagttccctctgggctgtgagctggtttggggtttggaggagagtctatgtgtaacgcggaggagagtccttcttaggaagacttggagctagggaagtgtgtaggatggccagcgccagggaaagtcgaaaagggagtgctgatgggtccatgggctccgtgctacagaccatgaaggtat

SEQ ID NO: 625978 - DNA, 1415 bp, Homo sapiens
  misc_feature (240)..(240): n is a, c, g, or t
  misc_feature (324)..(324): n is a, c, g, or t
  misc_feature (786)..(786): n is a, c, g, or t
caatctgtggggggggaattttaagttccccatctgcccacagggggggagtattcctctggcacgcgcggaaattcttccgggggggacaccaaccatgcacgaccaagtagctgggtcccctacgccccgcccacaaaaaatgggcgcgtgtttctgtttaataagcccgggggaatccttctccacgccccgcagaaaatggctctggtttacgaccaacaatgtgttgtgccgctncaccaacctggggggggttttttataaatgtttggtgaagggacaattataggaagagaacgtgtgtgtggggccgcccccccntgggcggccgccaaaaagttggcccacaagccacccacacccctgtgccaactaggcctaatgaccctccttcccccccgcagaaattcctgggggggaaataaaaagcgcccctctttgtcgcagaaaaaggaaagaattttgggggtccccctctcgaaaaagcgctcgtgagtgatatctcctcggaagtaatatcccccggcccacctctcggggaaatttggattagtagaaaagaacttgttgggtttgccctgggagattttttgaggaacacccctcctggtgagatttagagaaaaggttttataacacctctgtgttgtcccccccctctggggtaaatattttgtgttttaaaaataaacacccccctgggtggaccacaacaaagatttctctttgggagagtgtctcacacccgctctctatagtgaaacgcttctgtggggcttcttngggtgcacactcttctgtgggcgtctataacgggttataaagaaaactgtgggtctcttgtgtggagaaaagacacacacagtgctctctgtgggggctctttggtgtgagagagtttctctgtggtttgcgcccaccgccacgcgcgcttctctcagagattctctgtgcacacgggcgtgattttaacacgtgtgtcacacggggctcgaagttgttttctcgggaattttcttctatagagaggctcggccacacgaaccccacagtttgtgtttggttctcttgcgggttctctgtcacacgggtttggagaaagttcccacaggccgctatggagacccacgttcttcctctttcttaagcctagaatgttctttggcccacggaacacccgctggggctgttaactctggctttgagagttggaaagccgcgtttgcacatttataccgccctgtaaaagtattcattctttaatttatgtaaggtgtttttttgtaccccaattctctgagttcttttgaagagatgaccacaccaaattttggttttctacctgttatgtgagacacccttaggccccagccacacgtcattgtgtaaggaaaaataaaagtgctgccgta

SEQ ID NO: 625979 - DNA, 416 bp, Homo sapiens
acagcaataggtatggtgtcgagtgagggagtgagggaagcttcgtctgtatttacagacactcccctatgctcacattcccgcctgagctccaccttctcagatgagcagcagcattagatgctcataggagaacgcaccctgttgtgaaccatgcatgtgagggatctaggttgcgctgtccttatgagagtctaatacctattgatctgtcactttctcccatcacgctcaggtgggaacatccagttgcaggaaaacaagcttaacacgcccactgattctacattatgacagggtctccctctgttgtccaaggctggagtgtagtagtgctatcgcagatgactgcagcctcaaccttccaggctgaagcgatcctcccacctcaacctcccaagtggctgagactacag

SEQ ID NO: 625980 - DNA, 696 bp, Homo sapiens
gggatcccccgaacatgtcgtgctgaggcaagagaactgctggaacccaggaggcagaggctgcaatgagctgagattgctcactgcactccagcctgggtgacagagcgagactccatctcaaaaaaagtaaataaataaaaataaaataaaacaggactctaagtttaaaaataccaaagtagccaggcatggtggcacatgcctgtaatcccagctactcaggaggctaaggcaggagtatcgcttgatcccgggagacggaggttgcagtgagctgagatcgtgccatggcactccgcgcctgggcaataaaggtgaaactaccatctcaaaaatataaataaaaatatcaatactttccccatagggctctgtgtgaacataggaaccccggacacataggtctcatggggaccctaaaatagtctgtgctgtcacatagactagtacctgttccttccaaacatgtaacctttaataattgtgacattttgcaatgggaaagggcacaaaggagggagaggggagtcatgctgtatatactctaaaatgtgatgtgtgtggtgtttctctgcgctgtgtcacacctctgagcccgagagaggctagcattttccccccccagtgagtctcgggagctgtgacacacaaagactctctgcttgtcccccgacagggttaaaagcgcctttg

SEQ ID NO: 625981 - DNA, 285 bp, Homo sapiens
gcaggcagggtgtggggtcagtggggcagacatacgggctagatccggaagccccatagggaggaggtcaccaggaggcagctgtataaatcagatatctgatcaatcacactgaggaactggaaggaggtgaagaactgcaaactatttcaaaggtgactgagccctgcttctggtatgagaaagtccaacttccatccaaaacggatgccaaggcattgtaaaattgtaagcattcacaaatactttcgatgcattcttatttagctgacttctagattttac

SEQ ID NO: 625982 - DNA, 322 bp, Homo sapiens
tctgaggatatacggaatgctcaatcttattaacttggaatagcataaggtaacagccacattgctactccccactgttattgttatacatcaatgcatgcttcgactgtgatccctcacagatgtaacacttgatatgcacggtagaggatatgaaaaaatacttccgaaaccaggaattcagtgtatgtaagttttatactgtttgataagaaaagtcaggtccagccttacagcagcacagcatgcgctgatagcatgcatagtcaggaactttaatttatttcttttaggtctagggacaggagtgaatagaaaggga

SEQ ID NO: 625983 - DNA, 272 bp, Homo sapiens
tccctttaatttgaaacggcaacactaatgactgtaaaatgtgggcacaatatttaatctttcgccttattaaaagcttaatagtggattataggggggcactttcaagggataatatgggtgcccacagtaccaaagcgtttagaaacctctgtttaatttaaggaatgagatcaggtactgcttctctagacttcctagcatgggctgccgcactggagagaacgagagcttccacaagactacaatgcctgtgactttctcatatgaca

SEQ ID NO: 625984 - DNA, 1312 bp, Homo sapiens
  misc_feature (247)..(247): n is a, c, g, or t
gttgacatgacccttcctggattggccgctatccgctcctgtagttgtgatatgtcacttccagtacacgaattcaacatctggcgtccattgcacgtctataggaagattctctccctctcatctacagggacgagacactccttaccagcaagttcgtcctagggagtatcgagactagtccgtaaacatagcttgtctatcgtgagggacgcgtaggtagaacactcgcacgacgctctagaangctgtgatatcctagactatgtatattatcatgctcactgctgcgtttactcatcagttctctagaattgcctatgcactcctctgtgtcacatctccctttgtgtggtaccaacgttgagtctgtcccgtttagagactctccactatcaactcagagagtgacacagtcccacgttggtctacatatatataaagacacagacacaagacacacacaaataatacatagaggaagagagcgagggccagcgttgtgccaaggacaaaatatctttcccaaaaggggaggggacgcccatagtcgctccttttcctacgtttgccctggctaatgtcctctgtagcgtctcaataggccaggtgtgtggagtctcctcctctctatgtaacgttcgagcgcctcaaagctcttcctatgtaccgtcctcactagattgttctctctcgaggggctcgcgagtggctaatctaataggagcacaaacccgtctattggaaagagtatcgcgagcggcgatcccactgttcgccttccaaggaataggagtgcctaaactgttgttcctgttgcccacttgtggggcccccacttctcaaagaactcctcttagaagcggggggaagtctagaattgcgactggtaacttatgggcgccaaaagtaaggacttttgagtcggcccacaagttgccaacagggtctattatgttccctaaacgcccaatgggggccgcttgccgcaacacgcgggattaaatatcctagaaggcgcgtggtttatattaccccgcgagatttttctccacacccaaagtggtgtgatgtcttttaaacacccccaaaacaaacccgcgtgggggagagaaatgatttcgcgtcggggaggttttgttttgtcgacaccccccacagatttttaaacacgcgggaaactatcacccccgaggggaacccaactttggtagcccaacgcgggggtgtgccaccacagcgctatgtttttccaaacgggcactaccagagctcgcgatgcagagagcagggtgtgatatactcctacacc

SEQ ID NO: 625985 - DNA, 575 bp, Homo sapiens
tggccactccagatctgaatgatagaccgagactccatctcaaaagaaaaaaaaacagccgagtgtgcatgtgactcacggcctgtcgatcccagcactttgggaggcgaaggcgggtggaacatgaggtcgggagttcgagaccagcctgacgcaatcatggttagagaccccggtctctacttaaaaacaacaaaaactacctgggtgcgtgatgggcacctgctgttgccagcatactcagggactggcttgacggtccaggtgaccacatggcagatgacaaaccacgggaatgttgcgtcgggcttgcacttggacacatggaagcactcgatggacaagtggacaacatcccaacgaccgatggtaccgatacagtaacgacagacacacttacgcatagtcacaaaagaaaaaaaacaaaagtagcagaaccattagcggctgtaccatcgtctgaccgtgacagagcaacaacgtggatacgcatcatgatcaaatgttgtggtagtgaataaagcaaaatgaacagacacacccagcaaaaagagacacatcagcaagtcagtaga

SEQ ID NO: 625986 - DNA, 1290 bp, Homo sapiens
agcgggctggagtgcgccattggagccggcttgtgctggcgagcccggctgagtgagcctcttgtggcctgcacttactgccgctgtcctgctccctggtccctggcccctcagctggcatggctgtgctggggctgactgctgaatgctggcccatgtgagttctgaggcgtgcgctgctgatgcccctggctccccgaagctggcgtgtgctgctgccccatcatgcaccagtgaacaccaactccctgggcactcagtgcccacctgtgacgcctgatgccggactgccggccggtaaatacagaacggcaagaagcaacaaacccggaaggaaggtctcctggaaggaaaggcccacagacccaacggcccgggtcgacagacggtaaatgagcggggggtggctcttatccacacgagtattacgctgaggacgcgcaactaattttatttctgccatgtaagacccatttaaacgcgccccagagggaacaatacttacgataccggttggtactcccacgaacgcgctgcgaagagaacgaagtttctacgcacacggcttggcttccgtagttagaatcccaatgcaaaggttggacaggagccttctggcttggcgtatccaggggcaaacaagggctcacaagacgctgtcgcaacgtacgcggtccacggcgaccttcaaaccaaagaccaagcccataagagcgtacttcccaggggatatacacgtaccaagttgcggatcttgcacactgaaaaaggggaacaccaagtgcacccccaagccgattatgtaagccgagccgtacccaggaacacacacaggcctttgtggccagcttacgacactaacgttggatcgcaagcggcctggcccaggttcgtctatcacgtaacaccggaaccgtaactttgaacacggagcacttaccatacctcaatctgcctggcgtagccatgcgggcacgggtacattgggacgtgcgagacgtagttccccctatcccagacgtgacgccaccaataaaacgcgtaatggcccgcatgtacaacgcgacacactcagcttgtaaacatttccatgctgaagtcgggtggaaagcgcggtttcaccaggccagccaagtagggagttgcgaatgtaacgtatcagttggctggaccagcggaataaatggggcggcaaccaacacggtgtgtgcaacacgcagagcggcccctagccttaggtgcgtacccacttggaaagccgcgatcaatatgagctcgaaccgcaattaa

SEQ ID NO: 625987 - DNA, 458 bp, Homo sapiens
gactagttctagatcgcgagcgcccgccctttttttttgtttttctaaaaataaaaaattaattcgggtattaaaaaaaaataaaaaaaacatatgagaaagggaaaacccatagaaaaagaaagaagaagaaaaaagaaaagacgggggaaaagttgttaccgaaagtgtggggtaaaagacgcgcggcaaatgacaaggtgttttaccattgttgcgtgggagagcccgaccaccttcgaaaaaattgtcgtacatgagctacaacgattaagtattctaactaataatagggatgagtagagacgatgatgaaggagttatcacaacataagactagtgagaggtaataatacaacggcagtagacacaatatgggataatacaacagataataataataatgagagatactagcataagatatatcagacaattagattcactatacaactaat

SEQ ID NO: 625988 - DNA, 738 bp, Homo sapiens
gattaaatatctattatatgtcaattttttattgttaatacttgtgaaagatgttgatttgtatagtacactgaaagcactcacacggtcaacattctgctcccgagtgactgtattcacagatcacaaggacataacttctccataatagacaaaaaaaagtttttttagaatgactaccattcatctaaaactcacagatgcgggttttcctccaaatgatccacaatccagttttaataaacacgttggtgcttgtaagataataacccctcagtctccctctcctcaaagaacagggcagccaggaaactgcactctccagtaaatgacagccggcgggactcgctaaacagggcgccggaagattgccttctcgcagagagagactttcaagactcaagatgtccccgctccctgattatcctacaaaggacagggctaacccaactgcggactgaggcagtaaattatcatgtcttccagctaatagcatcatccacccaagaatgagaggtaccattttcattctcggggggactgcttacaagcacttaatttaggttgtagtgattattggggcttctgtgttggcgtcttatgcggtgtccctcaaagcagtttatactcccctccgggaggaatctgcccgttaccacccgacatgtataagaacttttccctcaggcatttgtttgctccagtttcatttctcccactgtttttctaaaaagagtt

SEQ ID NO: 625989 - DNA, 460 bp, Homo sapiens
ccctgactggtagacatcactctcgaagtggagcgagtgacaccattgagaatgtcaggcaagatccagaccaggaggcttcctctggacagcagaggtttgtctttggtgggaaaccgctggaagatggacgcacccctgtctgactacaaaattccgaaaggagtccaccctggcacctggttagggattggcttcgacagcatcctaaacagcatcggtggatgtgtcatcccacatgagccttcatctccccatgaactttgattttaaacaaatttggtagaattctggcaaaagtctctggggactgctcctctacatccggcaacacaggacccagcttccaaaaacatgctcctgctcccaggggaggtgctcagccacgagggatggcaggtcccgagaacgccatgccacatcactcagcagctgctggtagaaagtgctgaaccttcat

SEQ ID NO: 625990 - DNA, 689 bp, Homo sapiens
tcgccccgttcctcccaatgaccccccccccctgttaaaccttgcaaataatttaggacccttttttcttattgaccgatgcctacgccgccttgtttacgccaactccccttttgagcgctaccacgagatgaccaagaggtttcaaccgcgccccaggctctcactggcaccaaacactctgtcaaagtgtctatcattccccaccagggtatccgctgcgttcatccggaagcagcgaatacctaggtacaatccgcactgaacagggacgccctcgacccggataccctccctcattgcggcgggggccccactgcgggacccctcagccacacgcgccgcgcatataatatgatgagaccccactgccgccgcccgcgcaaccagaagaggggcatacccctcgagagaagggtaccccccccgcgatctgacccccaccacatggaaaacggcctccgcccaagaaccaatcttctctgtcacatgagatacttcggcgccataccctggcacgctcctaggacctctttggtggtaacacccccacagcggagaaccctctcttccccgcgtttcctcccccctacttcttctttttttctgtccccacatccccctctctttcctccacctttctcccccaccatagccccgcataactaaccttcgccccataatagacc

SEQ ID NO: 625991 - DNA, 101 bp, Homo sapiens
gaagctgatagaaaagatagtaactaagaagctgagacactgcacattatggagatgatactaagcataatatttatttattttttgagatccgtttcaac

SEQ ID NO: 625992 - DNA, 92 bp, Homo sapiens
  misc_feature (27)..(27): n is a, c, g, or t
ggatttgctggtgcagtacaactaggncttaatagggctcgaattcgagctcgaattcgaggctcgaattcgagaaaaaaaaacgttagaag

SEQ ID NO: 625993 - DNA, 357 bp, Homo sapiens
tcgcgtctgcctgggggaagactgctgggagttttctggcagctgtcctctaatgcatttcgagaacaagaacctcatgccacctcttcgtagtggtgcacgaccgtgtccctacaactccacagccacactctccgtcatcagggactacctggtccaaaaactacagaaatagtccagaatgtcacaggtccagggcagaggaccatcgttgagctgaggaccatcgttgagctgaggaccatcgttgagctgaggaccatcgttgagctgaggaccatcgttgagctgaggaccatcgttgggctgaggaccatcgttgagctgaggaccatcgttgagctgaggaccatcgtt

SEQ ID NO: 625994 - DNA, 200 bp, Homo sapiens
aggcatagtagctcacatctgtaatcccagtgctttggaaggctagtagggaggatcatctgaacccaggagttcaagaccagtctgggcaacatggtgaaacctcatctctacaaaaaaatataaaaatcagtcaggcgtggtggtgtgtgcctgtattcccaactcgtcatctgatctaattgggtaccgagcgtcga

SEQ ID NO: 625995 - DNA, 2556 bp, Homo sapiens
cgactctgcagaatggaacaaagcacccatccccactgggctcctggttgcagagctccaagtcctcacacacgatactgcctctttgacgaagcagctgtgtgcaagaacagactgcaatgcccagagtgccctgcccatttcttgtgtgtgctcatgtgtcccttacttgagctcaagtgccccttgtcccttcccctcgtgcacaggtgccacaaattgaaacctgagtggcagctccacgttatctagtgcaacatttgcctttccttgggtagcctgccaacaccttggccgtcgtccaatcacccgaagcctcgtcccaaccatcaagcgtgcaacacgcacaacgctgggcctggcctgcgcgcccacacaccacacacgcgcgccgcacttatccactgtcttgtggcccacccgtgtgaacccccgtggctatatcctacgcgccattattcgaccctaggccaccaggcacacacgcacactgcacacttacgccgcatcacttctcccccaacccgttggcgcacaacgcaacactagcctttcccctaagaccccgtactggcatattttacgaccccccggcacgtttttcccattcggtgggggcaaagatgcacatgtctagccggctggcagcccactttccgccattttcccggtcctctaacaagcctctttagcaccacaccggcgagataccacacagagttcccccgaaacaccgccgcgagttggcacgacacttatggcaacgttccatggacagggtccccaattggatcaacccgcatttccctaaccagtggctgcaaacaatgtcgtcaacccgccgttctccactgcttatcactacttggacggtcgagtcaaaatcccccccacgatgccgtgcggtgcaacgatcacgaactcgattattattcgtcaccgaccccaccgtcacgccgtttagccgctatcgctctcgcccacagcttctctgcgacgactggggctaagagtaacatattcgcgtttcgcctacataccggtccaaacactttatacactggccacactcgtatgcgcataacccctattctccctacacgttcatcatcgtttttcatcacccctatcttatcacagcccccagaacattctcccctctcggcgccttcggcgctcaaccagaccgccatttggtcggcacaactgcgagtgtgcaacgctcatctcccccacctgtcgtctcacatcatcccgcggctggctgcacacaacggctccgctccccacgcgctgcggtaccatctggcttcgctacagccatccctcatctgtgtctccccacttacactcacgtccgtatcggaccttcatatagccccgtgctggccgccaccaacccatattacttctcggtcaacaaccccgccttagggtgcacaccgccaacaccatcctcctacttccccacctttgtgtcaagctcacgtatgcgcccctccagaaactagcacacgctcatttgtgacacctactatctctccgcaactatcgctgtgtcagcgtcgttagcacacaactgtgactcatcgtcgtcctcccctgtttctgtgtaagccagtcctgacccctctttgtccacaatccacccccttttctcgcggtctgagccaacagcacaagtgtgcccatctcacctcctctcccaccttctggtgcgtgcatttatatgcgcctttataaaggtgccacctcaactccacccgtattaactacacacgcaactggtcgcctccaaaaactgtctcggccagtataaacatagtgtggtaaaaggcgatctatcccctcaacaaacactctgcgtcagggtgtactattaactccgccgacagcaatgcacccgcagctattatcctacaagtagatccggtccacgtacgtgtctgcgctgcatcacctcaacatgcatcaaacaacgactcgccaccgcataatcctcatatacctcctctggtgtaattatgcattgttattctgtcttttatcacataaggtcaaccatgtctgatgtcgcgtccgaaatcgcgcacccctcatcctccctcaatcactgagtcgctcactcaactacttacaacatcactgactgatctgacgccaacacatattcccagcactagttcgctacacatacatccacactattcatggtcacaaaacgcacgatcgtgactcaccccacttcgattgtcttccccatcttgtcaatcacttctccttcctcctcctactacacaccgctgacaacacctgcagaccattcttacaaacgtcccgaatttacgccatacactacgtacttctttacgctcatcccactccctcttctcgctcctcatctctcataaccacgctcccccactttacaccccctcactcatactccatgccctctctcctacacactacacctcctacacccctctactactacacactcatctccctacgtcttctaaccaccccttcccctcaaccatcatccaatccgct

SEQ ID NO: 625996 - DNA, 399 bp, Homo sapiens
cggtccgttcagcgaagcaaacacaaaaggaaaaaagcatatgtaatataatacaagagtttacaaagtttatattggaaatatgtgcatctagttataaaaatgattattgctaaggtgatgtgtgttttgccattgatggttatttctgtaggtttcttaactgaatctacatatgaatgtgcactgagtcttatggaaagaaattgaagagctccccagataatgaatctactatcagcaatgtccctctggagttatgtttactcctgcgggtcctgcctattttattgccctaagttataagttatattgacgtacgtcatacaggtgtgatactaggtggtatctgtggtctcatttacacagttagttttacaggttaggcgttggctggaa

SEQ ID NO: 625997 - DNA, 161 bp, Homo sapiens
acatagggccgaaggaactttttctgacatatagctgcgcacattatgaggtagacctagaccgacacgcctccgtacgacctcctggagtgtcaacacggacgtgcaacagaggaattcttgaatagacgtaattggatccaattatggcagcacgtgct

SEQ ID NO: 625998 - DNA, 263 bp, Homo sapiens
  misc_feature (213)..(213): n is a, c, g, or t
ccgctgatcgttacgcacacaaaactacagcattacacttgggttgcgttattctaatcagcagttgaatgattataatcacactttgctattttaacatacattggtgcttagagcattaagaggaagcgcaggcctgtactcagtattattatttcttagctcagaatgcgaaacaactttaaagtgtctatattcatatatatgtgcatntcttaagatttaaatacaaactgatgttactccttaagcggatccacggg

SEQ ID NO: 625999 - DNA, 305 bp, Homo sapiens
ccagcccggagcagcgagcggggggctgcccaggcgcgcaagaccagcgcttcacgcacctgagccccgaggagaaggcccttaggaggaaaccttaaaaccagagtagcagcctcagactgccaaagatcgaaagagggttcgaattagttaagctggaaccgcaagtggtagatttggaggaggagacccaaaaccttttctctagaaaatcagcttttacgagagaaatctcatggccttatagttgagacccaggagttaagacagcgcttggggatggatgccctggtttgctgaggagg

SEQ ID NO: 626000 - DNA, 191 bp, Homo sapiens
ccaaggcagagtttattaggtttatgctttatatttatatataaggttttattcatgttaaaaacttaaaaccaacggattatgcaaagtgataagtgtatcaatgaatatacaactgactggattttaaatatacacaaaccagtatacccccagtacttaaatgaaggcactcagtatacaccaaaatt

SEQ ID NO: 626001 - DNA, 685 bp, Homo sapiens
agtgtttgaataccattagcaagcgtgctatcagcagagtgaacattgaggcccagatgccatgtgaccgttgacatcatgtttgacaactcttgccctgcctctcattcgcatcctttctggcactgcaggcaaccaaggatgctaggacttagctgcgcagattttgaagcgatgagcttacagcgctggctatgctatatggtacaactaatgctcgacctacagcttatgtataccgatgatgctgacgtattcatgaaagcttgcatgtctagactcgacatttttcaggatgattcaagctgctttatggatgcttccttgcatggcattgctatgcacatattatgggcttgagaccctgcacttgcaaccacggatggctgctttagtatgtacaattttgagttcacagtcagtctgacatatcaccaggccgtgataattatgaatattctatccattactaacctttcattgagtcagtcatgtactatagttcaatgtactaagatgctttataccacgatcctattgcgtattaggacattccttatttagtacagaattgctgctcgatattcactatatggagttctgagtttacccatcgtaatacctggtcacagcattccaacccatagtaactaggatcccgatggcagccacatccacggcgtcc

SEQ ID NO: 626002 - DNA, 408 bp, Homo sapiens
ggctcaattcctggtaaatcacgtgttgggctttttccctaaaaataggctcacaggcatcctcctgactcagcctctggtctccctctggctgagaatggttcaaaccaaggatgagtgtgatgagtacagacacagagatggtgatagagaacaggatgggaacacggagggaatgaacgaagaaggaagaaggggaaagggacagaaagtggggagaaggagaaagaaagagaccaggagagagaggaaaagagagagagagagagcgtgtgcgagagagagagagagagagagagagagagagagagaaagcagtgatgcgtggatgctactgtgtgtggcaaagaggactccaggttacaggtacagcacagcgacaatcatgacaacagagaatcacaagag

SEQ ID NO: 626003 - DNA, 220 bp, Homo sapiens
agcggggaacaatcacttacttgaggttgaaatatgagaagacaatatgtggtttgctgctatagataacagtggggcggtcagaacaagcaaagacgttggtaggtagaaagagaacgaaaagtcctcaatacggtgggctaggtgcccaaagtacactactaaacggtcgctacaacagaactgtctacaatgtatgcagcccaaaagtagacaaagc

SEQ ID NO: 626004 - DNA, 995 bp, Homo sapiens
ggctaattctcgcactctggctgcggcgggtccgccgatgtcgttcctctgccggtcgtaatgcgaagacgagatcggcggctgatcatagacaatgggtccagatgtgtaaatgatggtgttgctggggacaggacgcctacccgagacgtgtatccttccatgcgttgaggacgctccatgagacaggggggtcatggtggagcattggtgtccaaaggacatccatcacgtgcggcagacagcatgccctcgatgctagtgcgctatgtgatcctgaccctgcaaagttacccgattaagcatggcgtcatcatcaactgtgacgagatggagaagatctggcaccacacctttctacaaactgagctgctgcgtggcccggaaggagcaccacatgtgctgctgaccgaggccccctgaatcccaaggccaacacgagagaaggatgactcagattatgtttgaaaccttcaacgaccccggacatgtacgtggcatccaaggcgcgtagctgtccctctaagcctctgggcgacacacactggcattgtcatgagactctggagacggggtcaccacacggtgccatctaacggaagggctacgcagctcccccaagcaatcctgcgtctggcctggtaggtcgggaactgaccgatatctcaatgaaaatcctcactgatgcgaggctacagctttcaccaccaacggccgagcgggaaatcgtgcgcgacattcaggagaagatgtgcaggtcgcctggcatttgaacaggagatggcaccgacgaatctcatttctctgagacgagctagaatgcgatggccatgctccaccttggcatggacggtcccgtgacgagaggcgacacactcattctggatggaatgcgatccgaacacttatcacatgacggtatgatcccagactagcaacggatagggaccaacgattgaaagaagaaccggccaaaatatcaaagaggacgaggc

SEQ ID NO: 626005 - DNA, 200 bp, Homo sapiens
gtcgatgtgcttctggatcaggcggacaatgaaggacgggatgttcacacctgctgcggacctgatatgcgctgcgatcagcacgcgagcgtggtggatggacttggccaagctagcttgaagaccttggcttcaggcgtctctctagaatctctatctcagcctagatgtatcagctcatctgcctatcagcacctaat

SEQ ID NO: 626006 - DNA, 110 bp, Homo sapiens
ggttcaaggcccgaaagcctaaatggaaccttaagggaagcccgttttaaacttacgggaaagccggaacgtgccgaaaaggaagggagccaaggcgccctggcccttgc

SEQ ID NO: 626007 - DNA, 965 bp, Homo sapiens
cactgtattattatcggatcttcactgtggacgacaacctactgcccgtgggcaagacagtcgtcatcctcattgagacccccgatggcattcctgtacaagagagacatttctgtcttaccaacaaccaacacggatcttgccttgtcttggaacattcctgaactggtcaacatggggcagtggaagatccgagccttttacgaacatgcgccgaagcagatcttctccgcagagttgaggtgacggaatacgtgctgccagtttgaggtccgggtggagcccacagagacatttttattacatcgatgacccaaagtggcctggaagtttccatcatagccaagttcctgtacgggaaacacgtggacgggacagcctacgtgattaaggggtccaggatggcaggataagaagatttctcatggcccactccctcacgcgcgatagtgatcgaggatgggtgggggatagcagtgctgacccggaacggtgatgatgggacggggtaaggcctacaacgccagacgccctggatggggaagatccctgtatgtctccgacacatgatacatccatgcactcagggcgtgacaatggaaaaggcaagagcgcacagagggatcccgatgtcactaaccccgatacagataccacttgacaagaacatcacaatattcgttcaagccaagccaggccattagtaccatgggtcgagaaccaccccgaaggatatcggcagcgacagggacggagacacagagagaaactaatgcaaggcgcacccagaagaggcgtggcacatagctaaaaacccaaagagacaacctacatgagtgagaccgaggaaaccaagagacagcaccagcatgaggcaccatgagcaaaaagcaacataaatgacagtagaagggcaacgagaagacgataccggatgagacccgaaacaaacacaaggagagaga

SEQ ID NO: 626008 - DNA, 442 bp, Homo sapiens
ggggggcccccccccaggttgttcattcccaaagggcccaaaattccccaacggttggggaaaggccttaaacaggaagcctttttccccaaaaaggttcgttttttttaaaaaaaaaccccccaagggcgggcggggacccaaaaaccccggaagcccctttaagaagaagggccaaaccaacgcttttaaacccaaccggggggggcccccggggcgaaggccgacctttttttttaacccttcaaagaaaaacccaaaaggaaaatggggttttcccttttagggtggagggcaattcccaaaaaaggttttgggcccttcccccccggggctggaaaaaagttttttaaaaaaaccggggttttggccccgaagggaacccccaccccttttcagggggggttcccccccccccaaaaaaatttggttggggggggga

SEQ ID NO: 626009 - DNA, 838 bp, Homo sapiens
tccctcttcgaattcatctgttcctggccccttttgccacacccttctttgccgccggtttttatcccctctctccgggtttcctcaccgaaaatgggttaagaccaccgcacaaaagggtcccccacaacatactgtctagaccaacttgcctcctctgttatagagactcctcctcccaaatcttcctcccccactttttcttttgaggctgtcctcccgcggcccctctctcacagaaagaagctgttctcctccacacccacatctttgtgaacaaagagaggtttcccccgacgagtgctccctttgaagaacctcttcggaaacctcccctctactcacgtcacttcctcccaagactaccacaccgaacaacacccagtggggaccgccctcaaaaaccatgcgccgcaccaccacttgtgcgcgcccccctatcagttgtggtcgaaatataagccggcacgcctccaacaaaacacactctctcgccacacggataaacaacaaccctgctccccgcttagggttaggatgaagggcgccccccttgggcaaaaaacaacttcgaatggacgaattcaatgccagaagaaagatattccttgtgtcgcacccccaccaaccaaacagccacgcagcaatgtatttagagattgtgccccccaccctctcagaagcgacgatagaccaggcacgtcagctcctcctgctcctacaccgcgtcgagcgaatctaatcctgtaaaagacaagagtctcttgcagtcctcggatcaccacttcaaggaccccgccccccgggcctcggacacgcacacacggcccacaagaca

SEQ ID NO: 626010 - DNA, 289 bp, Homo sapiens
tggtttgtagcctagcagtgataggccataccacatagcctagttgtgtagtaggatatatcatcaaggtttttctaagtaccctgtatggtgtgtgcacaacaatgaaattagcctaatgacatgtttttcagagcatattcccattgttaagcaatgcatgactactcaggagggtgaggcccaagcatcccttgagcccaggaggtggaggttgcggtgagccgggatcgcccccctgtacttcatcctgggcaacagagtgagactctgtctcgaaaaaaaaaaa

SEQ ID NO: 626011 - DNA, 483 bp, Homo sapiens
gttcagaaatccccaccatgagattctgggaagcttatagagacatctacttgtctcccgatcggactggctcctcctttgggaagaactccgaaaggagggagaggatgggcccaccacgacgactactaccagccggcttcggggaaggagaaaccctagtcccgacccactcctaccaaagaaatggggaatcccagaggaaaagtagtcgtcccacggcgggaagaaatctcacccacgcaccactccaagagtcgggaagagcgcacccaattcacgcggagacccacgaggaagaaaatagggacccccagccacggggcccccaccggggccggggcaccggaccggaccggaccggaccgcaggacccccgcaaccggacccaattcctttaggtcccgaatctggcagagaggaggtcgggtaatagaaccgaactgttcagatccccaatcccaataaactattttgttctta

SEQ ID NO: 626012 - DNA, 1595 bp, Homo sapiens
  misc_feature (451)..(451): n is a, c, g, or t
taaattgttgctcaacttttatttctcctttaaaccacaaaatagagtcttgggtgtgtacaaacattcactagtttacagtctcgccgaggttcctcggcgggggtgtggggcagttagtaagctcacgaggccagaaattccgtggggggctcctctttataacaagtgcgttaaccaccccgaggtgttaaagagcacttgtgggcgcagagggtgtgggtgctgtggaacctgtggcgagggcccccccaaccccaaagtctctgtgggggaaggtgtgcctgtggtctccctctctatagggaggcgccacagagggggccccagagcgccacaaggggggcgccccagaggcgctatatacggggcgcgggcgggtctgtgctgtgccacaaagtgtgcccccacaattcttctcgagggggccccccacaagagagcgcccggnggttgtgtgagtgcgcctgtgcgccagaaaagagcacacgcgagaaacgccactattctctcgcaatcgctctcgctctcccgtggcggggccacgaggggcccgtgtgagacagaaagtgggctctcccggaggggacaccctctcaaaaattctcctctcgaaggcaaagagtctcgcggggtggaacgaggggcgtctcccccgggggagaggtgtcgcgtgggctctgtgtggggcgcccgagagagctcttctcccaccagagggggtgtgggtgccgacaccaggagtgtgtggtgcccgccaggggggcaacagggtggggccctctctgggccccaaggtctccgccctcccggagggggggccccccccgggtgttgtggcccccggaggccttctccctgtgagggccacctctctgtctgtaggggggaaccccaatatctgtgggtgggcttcctgagaaagaacgccgttcctatgtggtgtcccccatactgcggacttttccaactcccctggggcttttagcaccctctccacaaatcagggggggccacgcggccttttcctcaggaggaccctcaccaagggaggccccctcgggaagctctccgggcaagtgggcgcactaggggccacccgtctcccggcggttttgccccgcggttggaggtgccccgggacaatttcttttggcgacgctgcgcagagaagcggcgtctcctcttggtgtgggggcggccccgtcagcagcttttgaggccgcgttgcgctcgaacccggctgggggcggccccctctccgcccaggggggcggtggcggggacgaccgccgggcactatggcccttgaagagggagggcgaccgggagcagtgtccccaggggggggggggacgaacacccaccgggtgtgtcatcctcttgcgccaagaggatacccccgcaccaggagagagagccgattgttagtcccacaccttgttgagttccgacgaaaatagagccctcgatggggatggatagtgagtgacccctccaatctacgaacggatgataccacagcaaaaagcaaactgtgagctgctggagggacccccaacaaatattatgtcgatgcgagcggaggactggct

SEQ ID NO: 626013 - DNA, 366 bp, Homo sapiens
aacagcggtgggtgaatcgactttctacttgtatgagatttacagactttccttctgggttgtatcatgacagaggggtactatagggttggtttatactggcatatagaggatcagaagccatttgatttggtaggtgtgtcagaagggagaatgatggctgacgaagtgctggaataggtcagaagatagccatgctaaaatgcgattatatcctcatgtttatcccaaactaatcttggacttttccactcattagcttggtttagcccttgtttccctgtgaaggtttaagttcaaccatattctgtcaactgtacagtttcagtggaatcttgtatttctggttcattataacaaactgtt

SEQ ID NO: 626014 - DNA, 259 bp, Homo sapiens
  misc_feature (65)..(65): n is a, c, g, or t
ttttttaaaaaaaaaaaaccccccccccccccaaaattttaaaaaaaaaaaaaggggggaaaaancccccaagaagaaaaatccccttttttttaggggggcccggtccctttttccccaaaaagggcccccaaaaaaaaaaaggtttgaagggggctttaaaatttaaaaattgccttttgttttaaaaaaggcccatgtttttttttttttcccaggaaaaaaacccatgggatccccccccccccgggtggtttta

SEQ ID NO: 626015 - DNA, 506 bp, Homo sapiens
gacgctgtcctggacgtagtgcggaaggaggtcgagagcggcgagtgccttcagggcttccaggctgatccacctcgctggggggtggctgcggggtcccggaaatgggcacgctgctcatcagtaggatccgggaggagttccgcagaccgtgtcatgaacaccttcagcgttggtgcgcctcggcccgagaaagtgtctagacatgggtggtgtgggccctacaatgccacgctgtctgtgctccagctggtgcgacgaatgcggatgagacctactgcatcgacaaggaggctactctacgacggtctgtgtccgcaccctcaagctgaccacccccacctacggggacctcaaccacctggtgtcggccaccatgagcggggtcaccactgcctgcgcttcccgggccagctgaacgccgacctgcgcaagctggccgtcaacatggttccctttcctcgcctgcacttcttcatgcccggcttcgcacccctgaccagccg

SEQ ID NO: 626016 - DNA, 1276 bp, Homo sapiens
agcggagctgggctctcaggcgctgccggaggagagaaatagccccaggctctccgagggacacacaaagacacaaacacaggcggtaagagtaacaacagcaacagagtaaacaaccacaaaaacaacaacagaccacaacaaatagaaacaaaaacccaccaaacaccacacaaaacagaccaaaaaaaaaaaacccagagtgaaaaacaacaaacaaaaaaaacaaaacaccaaccgaccaggcagcgaagaaaagcaggtaacaaagaagacccgagagatcaaggacaggagaccctaatagataactaaccaacagagagaaacaagcgtcagagactgaagagataaccagtgatgaagcgcagaccatcgagacaacgaagaccagagacagaaaaaggagacaggacccaggacggaatccgagaagaagaggaggcaggtccccccaagtgacgaggccgttaacgccggaagaaaagagcctaagctaaggatcgaaggaagaaaccgaacccggatggaacgagagcgtagtccagttcgagtgcaaccacgaggagtcggagaagatgccagatgagtagaggagagtccctcgaatgcagaagattacaaggaaccaaggcgaacggaactggagaggtaagtatcacagagctgacaccagccccccagagtggaaggccgttcaggactaaacgaggtccctagtgaaacccgaatggaactgaatctaaacattgatgatgaagtggtaagctccccctctgggtgagctgtctgctgactgagcccagctgggaaagagtgacccgaccatgtgtaacgaaatcgtggatccaatgttcccaaatattccattgagctccccttagtgtgcttagaagaatctagccactcgtgaataataaatgtaatctaggtagtacttatgtaagacccctgaattggaagctagtcttgccctggtgcatgtcctccccttaccaggagtctcaattaatggtttcaataatctgaaaaactgtgtataaatgcttcaagtccaatctaaaatatgaacctataacttatttgaattatttctatcttgttacctaataattattttatctgttcctctaattcttaagagtatacttaaatttcgcctctaaagtttaatctaacttttaaatgtctaatttagtaactctccctaggtttcttgtgattattttaagtttagtaattgatccttacgtaaccttcttcaatgtatacccct

SEQ ID NO: 626017 - DNA, 119 bp, Homo sapiens
tagatcgaccctacaaaagtcaaaagctgaaaactctatgtcacatcagcaaacagtcaacatcatgccccatacatcatcaccaattctgaattgttctcaaaggaggtcccggcgtt

SEQ ID NO: 626018 - DNA, 221 bp, Homo sapiens
cgctacgagcacagagcttcagcatgctggccagactggtcttgaactcctgacccatctagagcaagctaggtgctctttccatgtggactaggatctcgtacttactcaacacaccgaattgtaaatgctctgatatgtgtatcagcactgcttaccacctccacctaaggggagggcagagaatgtctcgtttacctcttttaattcctgaggcttag

SEQ ID NO: 626019 - DNA, 785 bp, Homo sapiens
tgggaaggggtcccaactttattaaaaaccaaacgggccggctaccatgcccccgctcctcagctatggctctaggggaggagcgggataaactagggcccttctgccaagcccggggtgctaggggaggaaccccttggcttggagattgtccgggatgtggacctccttcatcttcttcgtgggctgtggtgcccggggcccgctgtgaatctcttgggtcagcgtggtggccccattctgtggtggcctcccggtgcaggtgggacaatctacgaggctcagcttcagcctctcattcccggggtgttcggatgggccaacaatttggcagcctgggagccacattggccaacaaagaagcaaacgcctttgacctttcggcctcgggacccaggcgggagaagcaatctttcgtgggcatccgaatgggtaatgtggtatcaggcagattctccacaaagggcggtgtacgcccaagggggtggattcgctggctctggggaaaaatctttcttctagctctctcccaaatctttccaaaatctggccaggggggatgacaagttttacagccaaccaaagaagcctcctgtgtgcagggggatgcggagaaagctcacatgttgcacagagtggttctgacacggctgttgtggttaacccgccaaagaaagtggggggcgcactggagttcatgtgtaaaacacggtgttaggaatggtgcccccaattctcggttataaagagcccaggagtaaacgaaaagacggaatgagaccccg

SEQ ID NO: 626020 - DNA, 467 bp, Homo sapiens
tataagaatccccaatttccgctttttggggcgcttttccaatttcaccaaggacttggtgaccaccaaccttgcttaccaagcggcaaccactggtaacttttcagtggagaaacctggccgacattattttaaccaagtgggaaacattaacctcaacaggaatgggacaagttgacattgggtgactcctaatatgggacactgagaaaaaaggcgcattctttctgggggatttctgcccgagatgcctaaatcatgaggacacagcagacaaatccaaacttgaagacaacctacaaagtcattgacctgtatttttcaaaaatcttggccagagaagggaagcctgaagaattgttctagaataaattagactgaagagactccttgaaggcgactgaattggatgctgggcctgtaaagtctcatcttctgccaatgaatagtgcaaagttccagagaag

SEQ ID NO: 626021 - DNA, 604 bp, Homo sapiens
gtgtcgtcctccctccccggactctgcccctctaggtgtcgtcctccctccccggactctgcccctctcggtgtcgtcctccctccccggatctgcctctcgcatgtgtcctccctccccggactcttgggacctgccgtttcttccctctcacccatcctgacctaagaagctgagagaatctgtgccctcttggtagactgggaaggcgggggagaagcccctctgccctcgtcacccagcaagggctagtgcagcctcacgtcatgtggattcacagcagaccctgttacaaggcagaggcagtctggtcaggacctggcagaatacaacatgggtccaggcagcttcccgagggagatgccacaaaggttacctgcgactgctgtcccgggtatgacccaatgtgactagataaaacgaagactcagggaaaaaggagcaaaataataggtggccaaggtaggtcatgaaaagggaaacacatcgagacaaggcaacgagggcgtacaaacacaaagtaaaacaggcacaaactcaaaaagagggatggaggcgacaccaaaaacgcaaagaagtggcgattcaacaaacagggtaacag

SEQ ID NO: 626022 - DNA, 887 bp, Homo sapiens
  misc_feature (176)..(176): n is a, c, g, or t
  misc_feature (440)..(440): n is a, c, g, or t
gtcctccaccgaggcccatgcgaagttttccactatggcttccagcactgtcccggtgagcgctgtggctcggtaatgaaactcccgaaataccggacaagtgggagatgggcttcggggcgtctaccgttgtgccactgataggaatgacttccggagacctgtgatactaaatngggactcttgtgctgcgggagtgggctggccaggaacttgagtgacattgacctcattggcacctcagccaggggtgtacgccaagtagttctaatgccacctgtcgtcttatcatcgtgatggcagacaaagtggaatcctgtgctgaacccgaatcttccaaaaaaacagctacaatcttgtgaccaccaaagatgtgccctgatggcagctgaatgttggattcaggaatgggcacttttcttccccttccctgcctagtntcctttttggtttcctgtgagtccacgcagaaattccattctctggtcagcagacagggcttagctaaagtatggcctctattctgtaaagggtcctgtaccatagtccccaaggcttctgcagggggtgattttggtctggtctgagaaaataacagtgctgtttacacaacatttgaataaataccggactcagaaaaaaaaaaaaaaaaaaaaaagttgtgggggggccgggcccaggaaagttctacacattctgttggccgcgcgccaggttgtaagcacatgccactggcggtccaggaacctggctaccagtcgggttccccaaaaacgccgggcccggctctgacaccagggtcgcgccctgggtacaggcccagcccccccccgcccagcgggacgcccggacaacgagaaactcgacaaccgaaaggacagaccacc

SEQ ID NO: 626023 - DNA, 1402 bp, Homo sapiens
  misc_feature (134)..(134): n is a, c, g, or t
ggtagggtggggggcatcgatatagtcgctccaggtgtatcggagggttctgtctgactattaggactgtgcgcctgtcgaatgcggaagagctgtctcaaagtcactgaaaagttacttgaagtatgtactgncgtgattacgaggaacattgacatgagcactagagatgactaggactggtttcactgctggtggtatgcattcgggtgtagatccgagatgaaacgatcgtgggggcaatttcacgggattatgggaccgaagtaacaggtaggtatgttcgggcacaggaacaggctttcacgagtatcttaggtcgcgcactgtacaatgaatgcaatgaggatcgcacaaagtcgtgcactatgtctcggactgctcatgtgcttctcgcgcaactgacgtgtgtcgtcagagttctagatagaaactactgggcgagaaacttcattgtagactttgagataggccacttcgctacttgcactcgagacaaggggtaggagagttctcggtactctcgagctatgagacccacctaggattggcacatggttgaggctctgagcatacacgataaagttagctcgttcaatgcggaagactatgacgaagggggaggtggggtggggtagcctgcaagtggttatgtccttccgtgcgttacacattaattcacccccgttgggagaaataccgagggacgcaattgcgggtatggtgccgccaatagaatgaaaagacgttaagtgaagaaatctctcttcgagagagttcgtacgagaaggccaacgggagacagtttatgccatggacgaaaatcacttaacaataaagtacgcttattctccttgactggggaaagggtaaattgtgcaccagaaccggtgcggaacgcctccatatttcccctgtacacggaacaccggaccacaggcggaagaagcgggggaaggtcaccacacggaaggttgtagagtgggagtttccgttgggagaccaacgaagggcgccatgtggggaaaataggaagttacacccctttctgtggggcgtcgcaaaaacccgcccgggtattagttccacggaaggcggaacgcggaaaggagggggaatgaactcagcgcggtggtttgttggtggacaccctaagccaatggagcttttcctctcacaccgaagaactgtgggccattacggaagatatacacttcaaagaggggggtttaccccatggggttcaaaggcacgagattgcaaagtcacaacccaaatagggcgttggaaagaaaacttcttcctcttgagaacatgggcgttggtagaacatgttggggggtacacctggaaccgaggtgatcactctggggagactcttctgagggccaacagagaagtg

SEQ ID NO: 626024 - DNA, 257 bp, Homo sapiens
gtcatgactatataaccagacaagagaccgagcgacctgggcttggaggagcccaactgaatacccagctgcagcttactacggatcaatcttaaccaggactttatagacttaagcagtgctctgaacagtactgttgccagcgtgctgcgagctgtgtgtgctggcactagactggcttggttggattaccatgctagagatttgatactgttcactgatctcattggacgcacaggcatatacgtgcatgactg

SEQ ID NO: 626025 - DNA, 374 bp, Homo sapiens
tttttaagccccccctccccgggatccgggggggggggggtcggggggggggtccccctgtaaaaagccagctgttatttaaacaaaaaaaaaataaaaaaaattgggtcggttgggagttttattaataaaagatttttcgggtggtccttaacaccccttcctgaggttcccttcacccctttttttggccttccttccctttcccttttttcctgataagccccaagtcccttcattgggatttggtaagcaaaagtccctttcctttccttttttttccctcaaatttaggggatccttcctcccccccgggccttcctttcctttttcctcctcattttccccgtaaggctcccttggccccgccctca

SEQ ID NO: 626026 - DNA, 157 bp, Homo sapiens
ttgacccccaaaaagtgctatttagaggcaagggcccatatatgtgcccataaaaagcactatacaggtgaatgtctgtactcatccctctaatcatatgtaaataaaattatatcgcagtcaataacagacaaagataaggggtataccccaagga

SEQ ID NO: 626027 - DNA, 201 bp, Homo sapiens
cgtggagcagcatcgaagacgaagacaaaagcagaacaagacacaaaaagacaggaggacaagacacaaggggcgcggctcgacctgcaatggcccaagctgtctccagccctacataccctgagggccctaggcacaccccgaaagtcggcctccgggcatctggcaggcctgggctgccgggccgtttactttttactg

SEQ ID NO: 626028 - DNA, 128 bp, Homo sapiens
cagggcctctcagggggacagggggtaggagaccatcaagacaaacacgtggatacatggaggggaacaacacacaccagggcctctcagggggacagggggtaggagaccatcaggacaaacacgtg

SEQ ID NO: 626029 - DNA, 374 bp, Homo sapiens
gtcaactttcactttccattcttcacccagagcgtcaacagcaacttctgtgcccatacgcttctcatagaaagtccaaagtttgcgttcatggtccactccattgagtttgtgacagccagtgcctggaaagaaaatgtctcagtataagaattaaaaggggggaaagagtttacgaacctatcatatccaggtaattgtaaagcctatccacaaagttaattcctgtgcaaaaagcctttcatgtgtgcttccacacaaccagaatatataagatgcggcgtgcactcactaagagcatgtgagaacagagtaacagtcaaagagcggcgcactcaacagcgcgttctcgcgtgccatattcgtacagcccg

SEQ ID NO: 626030 - DNA, 136 bp, Homo sapiens
cagctgtctggctaggcggcccgtcatgatgccactgcgcaactcctacacagcagtgcttcccagtctatcacctgccaatccgccccatctataagctggcagatgctgctctagacctcaaggtgagggaaca

SEQ ID NO: 626031 - DNA, 504 bp, Homo sapiens
  misc_feature (37)..(37): n is a, c, g, or t
gtggatcactgctgcaaaccagacttcgccttcagangaccactgctttgagcatctgaaagctgatacaacgtatgagctcccatcagtctccgcacttgtatctgctttgcatacagactggtgtcagcctcgtaaggaggaccttcagaataagaaacacaggtttctggtcaacttggtgaagtggatgccagggatcacggatgaggagtggctgtgcttgttcacaaagttcactgctgccagggaggagtgcagcgaagtgcaggagcctgagtcctgtttcagtccagagagttcaaaaactggtgacgaaagtcaagctacagagaaacaaagataaccgaccaaagccagtgccagtttgcaggaccgtcctccgccctgtggtgtggtgaaattcagcttttgagaagaatggaatagaaggtttttccgtaaccctttcttgaatcatgttcctacaaaaggcaataaaatgaaaggataaagttaaaaaaa

SEQ ID NO: 626032 - DNA, 318 bp, Homo sapiens
gtctattaaaatacacggagcggctactgtaacatagttgctttatacatccttctcctcaatacagaaccaggaatgtaatttccctaactcaggcaggcactgatactgatggacactgcgcgtgtacacacacacacacatacacacacacacacacacacacacacacacccccaccccacaaaaaacaaaatacagagtatgtcacaagacaaaggtttgttattgtatcgctcaaaacccagtgaactcaaccccatctctcttaacttaacatgtatgctgtatcgctcttgcctctatattactgaactc

SEQ ID NO: 626033 - DNA, 366 bp, Homo sapiens
acatgttctttacggtggcgttcttgttttctcggtgggcagctgatattcttcctctaaagattgcagcccctctagaagcacccaggctgactttgatgtaggccctgcccacattgagagcagacaaatgaagagaacaaccctctttctgcctgtggggtctggtttaatggtgtctactcttagagtgaagttaagggagcgccggatttttgattttgacatatgacaagtgactagctacagtgtcttagacaagtcataggctccaggccttagttttctcatgcatataacaaattctctgatttcatgatttcaatataaagccattcttaagtcagattttaaaactatcatttt

SEQ ID NO: 626034 - DNA, 288 bp, Homo sapiens
  misc_feature (163)..(163): n is a, c, g, or t
  misc_feature (237)..(237): n is a, c, g, or t
  misc_feature (277)..(277): n is a, c, g, or t
cattttatagatccacgcaatagagagcttccttcctatgcaccttgagatctcttttttttgagacagagtctcgctgttgtcagcccaggctggagtgcaatggcgcaatctcggttcactgcaacctctgccttccaggttccagcaattctcctacctnagctcccaagtagctgagatgacaggcgtgtgccaccacgcccagctaatttttgtatttttagtagcgatggngtttcactacattggcaggctggctcgctcctgacctcangtgacccccgc

SEQ ID NO: 626035 - DNA, 305 bp, Homo sapiens
acggcaccccggcaactgcttcggatggccagtctaccgccattttccttctcacgggaattttcagggtaaactggccatcccaaaatagcaacaacccaaactgggtccttacttccttttccatcactaaaaatcacaaagcaatcagagggacccagtaagaccaaaggaggggaggacagaacatgaaaaccaaaatccatgccaatgaaatgtaattgggacgacccttacccccaaatcttacatttcaattcccattctaaaaagcacttatactttatgcatcccaagcattgccg

SEQ ID NO: 626036 - DNA, 206 bp, Homo sapiens
gaggttgcggtgagccgagtatcagctcactgcattccagccctggcaacagagcaagatgctatctcaaagaaaaagaaataatagatgaaagggaagactgaccatgttggaatgtggtgcatcctaaggtgatatctctagatggaatattaacttcttaggcctttttccctttactcattgactctgcaacctcacctcct

SEQ ID NO: 626037 - DNA, 163 bp, Homo sapiens
ccaataaggggaggggaagatagttggacccatagtctcaggggagtcttcaaccccccgaggacacaagggatcctcgggcctcagcctccaagtagcgggaataacgggtgctggccaccaggcccaattaattttttttttttttttttttttttttttt

SEQ ID NO: 626038 - DNA, 246 bp, Homo sapiens
cggtcacggacaggtgagaggagagccggtggcctcctggctcaagggcagccggctgtgtgtggatcggaagaaggctgggttgacgcactggggttgatgtcagagctgaggtgtcctcatgacacagaaagaggtgagctggttcccaggcatccagctccagcccgggactataccagcccgtcgtagagggggacctcgcctgcactattgcacgggtctgccagggtaacccacgcgggt

SEQ ID NO: 626039 - DNA, 178 bp, Homo sapiens
gagatgggtcggagaaaagcaaagccttttcactctgtaatgcacgctggtaatgaccagcctgcagtccagttcttgaaaatgtggatacaccagaattgctttgcaaactgtgttacagtgcattctatttggatggctcgagtgttacccactatagttcagcgatctgacggga

SEQ ID NO: 626040 - DNA, 161 bp, Homo sapiens
atagggactgtggtgtgtgtgatgtatgtctagatggttatgtgtgtgtgtgtgtgatgggatgtctgcatgtgtgtgcgtacaattgtgtgtctctgtgagtgtgtatgtagtctatgtctgtggtgtgtgtggtatgtgtgcatgtgtgtgcctgatag

SEQ ID NO: 626041 - DNA, 435 bp, Homo sapiens
gttatgtacgattcagtgtggccttacctcttctctctcctgagcgcctcacagtgcttctgagcctcgagcctcaagctgctgctgcgcatgctgggcatgcatgctgctccttttcgcgcatcgcttgcagtccagcacccgggacttctcctccttcagcttcctgtagctgagcgtgatgggcctgtgtgtcctggtgcacgcaagcctcctgtgtcctctggcacagctgctcggtcagcgagccgctcgtgccgcaaggcctcttacagctccagggtgcggctctttctcagccgtaaggtccttctggagctcagagagctggatccgctccctgagccagaagggcctcgcaaagtgaaatagcatcgatacgcagaatctttctgcaggttgtaccttggccgtcttaccggttcccaaggtggt

SEQ ID NO: 626042 - DNA, 139 bp, Homo sapiens
aatcaatagatccagaaaaagtagaatcgcgtgaataaaagattatattcagtttccagaaagagggtagaatgaatgacccatccataaggcttagcaggtctagtctcacagatactcgcaatttttcacagcaccc

SEQ ID NO: 626043 - DNA, 965 bp, Homo sapiens
aggtgctccggaccgagtctcgggtgtatggggacgtaggaaccggctcggggcccgataacggggcgtccccgacagtagactccgggctggcgtgagggtctcccttgagtctggagaatggctacctcgtcgatatgagccagtggttgatattggtgtcggggtctatgggacagtgtgcaaggcccgggatccctcaatagtgtgacagttttgtgggtgcatcgaagtagtgtgagagtctggaatgggagtgatgggtaggtggtaggagggcttccctattggcacttggattcagggaggtggcgtttaggtgtaaaggtgagtggatgcattatgagtatgtcaatgttgattggtgtgatggacgtctgtgtctagatacgcgtgatgaccgggatatctatgtaatgcctggtgtttgagtatgtagtaacaggactcataaggactatatctggagataggttagatcgccaggtttgtcagacgaaatgatcagggatgtgatgagcgagtatctaagagggctagatgtagcttcatgtcaattgcatcggttcaacgagatttgaagactgagtaagatcgggtgactaagtggtggaacagtctgaggatggtgactttggctggcagaatctatagtttaccagagtggaacttactaccggttggtgtgagcctcgtggtagcgaaactggcgaaggtcattcgggagtccagatatgcagcactgtggtcatgtggcgctgtaggctgtatgttggacgagatggtttgtgagagacccccgttttggggagacctggagggacgcagtgggtaaatgttgacgagttgggggggcacagggtaaggggcagaatgttctcggccggggggttccgaagggcaccaggagtggacagaataaggagcacggggatagcgacacagacagttgaggggataaagag

SEQ ID NO: 626044 - DNA, 2821 bp, Homo sapiens
acttcagggagagggcctcgagggacaggacgtgaagatagttgggtttggaggcggccgccaggcccaggcccggtggacctgccgccatgcaggacggtaacttcctgctgtcggccctgcagcctgaggccggcgtgtgctccctggcgctgccctctgacctgcagctggaccgccggggcgccgaggggccggaggccgagcggctgcgggcagcccgcgtccaggagcaggtccgcgcccgcctcttgcagctgggacagcagccgcggcacaacggggccgctgagcccgagcctgaggccgagactgccagaggcacatccagggggcagtaccacaccctgcaggctggcttcagctctcgctctcagggcctgagtggggacaagacctcgggcttccggcccatcgccaagccggcctacagcccagcctcctggtcctcccgctccgccgtggatctgagctgcagtcggaggctgagttcagcccacaatgggggcagcgcctttggggccgctgggtacgggggtgcccagcccacccctcccatgcccaccaggcccgtgtccttccatgagcgcggtggggttgggagccgggccgactatgacacactctccctgcgctcgctgcggctggggcccgggggcctggacgaccgctacagcctggtgtctgagcagctggagcccgcggccacctccacctacagggcctttgcgtacgagcgccaggccagctccagctccagccgggcaggggggctggactggcccgaggccactgaggtttccccgagccggaccatccgtgcccctgccgtgcggaccctgcagcgattccagagcagccaccggagccgcggggtaggcggggcagtgccgggggccgtcctggagccagtggctcgagcgccatctgtgcgcagcctcagcctcagcctggctgactcgggccacctgccggacgtgcatgggttcaacagctacggtagccaccgaaccctgcagagactcagcagcggttttgatgacattgacctgccctcagcagtcaagtacctcatggcttcagaccccaacctgcaggtgctgggagcggcctacatccagcacaagtgctacagcgatgcagccgccaagaagcaggcccgcagccttcaggccgtgcctaggctggtgaagctcttcaaccacgccaaccaggaagtgcagcgccatgccacaggtgccatgcgcaacctcatctacgacaacgctgacaacaagctggccctggtggaggagaacgggatcttcgagctgctgcggacactgcgggagcaggatgatgagcttcgcaaaaatgtcacagggatcctgtggaacctttcatccagcgaccacctgaaggaccgcctggccagagacacgctggagcagctcacagacctggtgttgagccccctgtcgggggctgggggtccccccctcatccagcagaacgcctcggaggcggagatcttctacaacgccaccggcttcctcaggaacctcagctcagcctctcaggccactcgccagaagatgcgggagtgccacgggctggtggacgccctggtcacctctatcaaccacgccctggacgcgggcaaatgcgaggacaagagcgtggagaacgcggtgtgcgtcctgcggaacctgtcctaccgcctctacgacgagatgccgccgtccgcgctgcagcggctggagggtcgcggccgcagggacctggcgggggcgccgccgggagaggtcgtgggctgcttcacgccgcagagccggcggctgcgcgagctgcccctcgccgccgatgcgctcaccttcgcggaggtgtccaaggaccccaagggcctcgagtggctgtggagcccccagatcgtggggctgtacaaccggctgctgcagcgctgcgagctcaaccggcacacgacggaggcggccgccggggcgctgcagaacatcacggcaggcgaccgcaggtgggcgggggtgctgagccgcctggccctggagcaggagcgtattctgaaccccctgctagaccgtgtcaggaccgccgaccaccaccagctgcgctcactgactggcctcatccgaaacctgtctcggaacgctaggaacaaggacgagatgtccacgaaggtggtgagccacctgatcgagaagctgccaggcagcgtgggtgagaagtcgcccccagccgaggtgctggtcaacatcatagctgtgctcaacaacctggtggtggccagccccatcgctgcccgagacctgctgtattttgacggactccgaaagctcatcttcatcaagaagaagcgggacagccccgacagtgagaagtcctcccgggcagcatccagcctcctggccaacctgtggcagtacaacaagctccaccgtgactttcgggcgaagggctatcggaaggaggacttcctgggcccataggtgaagccttctggaggagaaggtgacgtggcccagcgtccaagggacagactcagctccaggctgcttggcagcccagcctggaggagaaggctaatgacggaggggcccctcgctggggcccctgtgtgcatctttgagggtcctgggccaccaggaggggcagggtcttatagctggggacttggcttccgcagggcagggggtggggcagggctcaaggctgctctggtgtatggggtggtgacccagtcacattggcagaggtgggggttggctgtggcctggcagtatcttgggatagccagcactgggaataaagatggccatgaacagtc

SEQ ID NO: 626045 - DNA, 154 bp, Homo sapiens
tattagacatctccctacttagacatctactataagtaaaggaaaaagcagaaaaatatcaacaaagtcaaaaggtggtcattagaaagattaataaaatgggtaagcccgggcaatactgattttttttaaaaaggagaaaacacaaaggtat

SEQ ID NO: 626046 - DNA, 1063 bp, Homo sapiens
  misc_feature (108)..(108): n is a, c, g, or t
  misc_feature (1032)..(1032): n is a, c, g, or t
  misc_feature (1044)..(1044): n is a, c, g, or t
tactctcatttcctcttcaaccctccccccccacaaactttttttctttccaacaagcgcccagcaacgccagccgcaagcaacgacgagccatacatcgcgaagagncatgtacgatgcccacggacctgtacactacaagaacaacgacctccccgctccaaggtggggcgcggccgcacccggggccacgacacgagggaaaggagaggagccggggcggccggaggggggagggaaggagggggaggcggcagaacctccgacagcacgagcacggaaccaccccacgccgcgcaccgacctggaacgacgccacacgagtagaacataagacgaggcaaacccgcccacccaacccactccctcacccactatcttattacaaattgaggaaaataaggcgcggagacacacaaccggacgcggaggggacgtaggagaggtattaattgatactcaaaatgatattattttacaaaaccatagtggcacagaatacgacgtgagctgatcaaggcggcggagagcggagagcaaatgaagacaacaaagatagtatcacgaaccacctcgcgacagcggcgagaggagagacgagacgagaatatagaacgcaggtacagaatagcacgacacggagaaggttaacaagaaacgaaagagtgaatgcatgataagaaggaatgacgcagacgtgaatcatacgagcgcgtcgcattcaggcagccggtcccatacatagtgagagcatggcgaagaccgacgtgacgcaacgggtgcgaacgaacgtagggagcgattacgaagcacgaacgacgcggcacacttcacacgtggagaaatcacagcgaggatacagcaacgcacatcgacccaggtgcgcgcatacttgcgaccgcgaatcagtcgcgtgatctacacgcacagtacgagcagatcgatgcgtacgagcacagacactatgcctacgaatatgcgatttgactgtacacatagaaatactcgtcgctcacatcagacacactaacnagacagagatgnctgtgacgatcgacacacg

SEQ ID NO: 626047 - DNA, 960 bp, Homo sapiens
gtggtgtaatcaccaccgggggtgctagaaaaaattgttgtagtggtggtgcacccccgcctcggtgatgatttattgtgataggatgtgggtgcgacttatcttctcaataggcaactaatatatggggggtgcgtgtccacccacaaacggctccacgggggcgatcctgttgttgtgttgcgacccacctcctggggggtgtgtagcccgccctttgaccgacgtgcgttttggttgtttagaaggtgtcgcgccgaggctttcattaaatagaaactctggtgtgtgtgcgtcaccagacgtggatagatagccatgtggggccagacagccctcccgccccttgtggggaggcagccctcgggtggccccccacgtgtagcaagagaatggctccacgcttcggggggaacgtctccaacagctggaagagttttccccccggcactcatccacgcgcgttttctggaggaaatatttcttcccctctgcgtccccacaatctctggcagaaattaatttattatttgggccccctcggcccctccaaatatgttcttgtgaagtgctcacctctctcagctatactctcggactggggtcatgaggtgggtgagcgatttctcttcgatgaaaagagaagagagaccacactcacaaagggtgtcatcgccgacaagtcgatgaattgtggcaccactcggattggggcgaagacgtccaccgcgacgctggtttgtctagaagagcccagaacatactgaaaggggggcgccgcacaaaaagacggcccacgcaacgactgttagaaaaaacaaacggcagtaggggggggactaccacaagccacagccccaaggcggtcgttgccgcgaagcaacaagacgaggaccacgcgagaaggaaggaacccccaaacaaaatcaaaggaggtattcgccccccacaaacatgaca

SEQ ID NO: 626048 - DNA, 2786 bp, Homo sapiens
gagggcctggggtgcaggagcagtggtgccaggtcccagaagccagagagggttttggaggcctctgtagggggtgagggggtcctggggcctgaggccggcgtgtgctccctggcgctgccctctgacctgcagctggaccgccggggcgccgaggggccggaggccgagcggctgcgggcagcccgcgtccaggagcaggtccgcgcccgcctcttgcagctgggacagcagccgcggcacaacggggccgctgagcccgagcctgaggccgagactgccagaggcacatccagggggcagtaccacaccctgcaggctggcttcagctctcgctctcagggcctgagtggggacaagacctcgggcttccggcccatcgccaagccggcctacagcccagcctcctggtcctcccgctccgccgtggatctgagctgcagtcggaggctgagttcagcccacaatgggggcagcgcctttggggccgctgggtacgggggtgcccagcccacccctcccatgcccaccaggcccgtgtccttccatgagcgcggtggggttgggagccgggccgactatgacacactctccctgcgctcgctgcggctggggcccgggggcctggacgaccgctacagcctggtgtctgagcagctggagcccgcggccacctccacctacagggcctttgcgtacgagcgccaggccagctccagctccagccgggcaggggggctggactggcccgaggccactgaggtttccccgagccggaccatccgtgcccctgccgtgcggaccctgcagcgattccagagcagccaccggagccgcggggtaggcggggcagtgccgggggccgtcctggagccagtggctcgagcgccatctgtgcgcagcctcagcctcagcctggctgactcgggccacctgccggacgtgcatgggttcaacagctacggtagccaccgaaccctgcagagactcagcagcggttttgatgacattgacctgccctcagcagtcaagtacctcatggcttcagaccccaacctgcaggtgctgggagcggcctacatccagcacaagtgctacagcgatgcagccgccaagaagcaggcccgcagccttcaggccgtgcctaggctggtgaagctcttcaaccacgccaaccaggaagtgcagcgccatgccacaggtgccatgcgcaacctcatctacgacaacgctgacaacaagctggccctggtggaggagaacgggatcttcgagctgctgcggacactgcgggagcaggatgatgagcttcgcaaaaatgtcacagggatcctgtggaacctttcatccagcgaccacctgaaggaccgcctggccagagacacgctggagcagctcacagacctggtgttgagccccctgtcgggggctgggggtccccccctcatccagcagaacgcctcggaggcggagatcttctacaacgccaccggcttcctcaggaacctcagctcagcctctcaggccactcgccagaagatgcgggagtgccacgggctggtggacgccctggtcacctctatcaaccacgccctggacgcgggcaaatgcgaggacaagagcgtggagaacgcggtgtgcgtcctgcggaacctgtcctaccgcctctacgacgagatgccgccgtccgcgctgcagcggctggagggtcgcggccgcagggacctggcgggggcgccgccgggagaggtcgtgggctgcttcacgccgcagagccggcggctgcgcgagctgcccctcgccgccgatgcgctcaccttcgcggaggtgtccaaggaccccaagggcctcgagtggctgtggagcccccagatcgtggggctgtacaaccggctgctgcagcgctgcgagctcaaccggcacacgacggaggcggccgccggggcgctgcagaacatcacggcaggcgaccgcaggtgggcgggggtgctgagccgcctggccctggagcaggagcgtattctgaaccccctgctagaccgtgtcaggaccgccgaccaccaccagctgcgctcactgactggcctcatccgaaacctgtctcggaacgctaggaacaaggacgagatgtccacgaaggtggtgagccacctgatcgagaagctgccaggcagcgtgggtgagaagtcgcccccagccgaggtgctggtcaacatcatagctgtgctcaacaacctggtggtggccagccccatcgctgcccgagacctgctgtattttgacggactccgaaagctcatcttcatcaagaagaagcgggacagccccgacagtgagaagtcctcccgggcagcatccagcctcctggccaacctgtggcagtacaacaagctccaccgtgactttcgggcgaagggctatcggaaggaggacttcctgggcccataggtgaagccttctggaggagaaggtgacgtggcccagcgtccaagggacagactcagctccaggctgcttggcagcccagcctggaggagaaggctaatgacggaggggcccctcgctggggcccctgtgtgcatctttgagggtcctgggccaccaggaggggcagggtcttatagctggggacttggcttccgcagggcagggggtggggcagggctcaaggctgctctggtgtatggggtggtgacccagtcacattggcagaggtgggggttggctgtggcctggcagtatcttgggatagccagcactgggaataaagatggccatgaacagtc

SEQ ID NO: 626049 - DNA, 137 bp, Homo sapiens
tcggccctcttagtcaagacacagtaaagcggttgtcttcttccgggtcacagcctgatgtctgacagtcaccaccttcccgtacatgttcagcacctggaaaggtctcccgttctagtcgcacgatgcaaggtgaa

SEQ ID NO: 626050 - DNA, 149 bp, Homo sapiens
gaggggcatggacaggtgataacgactgaacctgtgggcatgaggaggaacgacagagcagtgcatgctaggcagcaggcaccatgtgcaaaggcatggcagagcagagcttgttgggcaccaggacacaggctgcacagcactatggc

SEQ ID NO: 626051 - DNA, 2993 bp, Homo sapiens
acttcagggagagggcctcgagggacaggacgtgaagatagttgggtttggaggcggccgccaggcccaggcccggtggacctgccgccatgcaggacggtaacttcctgctgtcggccctgcagcctgaggccggcgtgtgctccctggcgctgccctctgacctgcagctggaccgccggggcgccgaggggccggaggccgagcggctgcgggcagcccgcgtccaggagcaggtccgcgcccgcctcttgcagctgggacagcagccgcggcacaacggggccgctgagcccgagcctgaggccgagactgccagaggcacatccagggggcagtaccacaccctgcaggctggcttcagctctcgctctcagggcctgagtggggacaagacctcgggcttccggcccatcgccaagccggcctacagcccagcctcctggtcctcccgctccgccgtggatctgagctgcagtcggaggctgagttcagcccacaatgggggcagcgcctttggggccgctgggtacgggggtgcccagcccacccctcccatgcccaccaggcccgtgtccttccatgagcgcggtggggttgggagccgggccgactatgacacactctccctgcgctcgctgcggctggggcccgggggcctggacgaccgctacagcctggtgtctgagcagctggagcccgcggccacctccacctacagggcctttgcgtacgagcgccaggccagctccagctccagccgggcaggggggctggactggcccgaggccactgaggtttccccgagccggaccatccgtgcccctgccgtgcggaccctgcagcgattccagagcagccaccggagccgcggggtaggcggggcagtgccgggggccgtcctggagccagtggctcgagcgccatctgtgcgcagcctcagcctcagcctggctgactcgggccacctgccggacgtgcatgggttcaacagctacggtagccaccgaaccctgcagagactcagcagcggttttgatgacattgacctgccctcagcagtcaagtacctcatggcttcagaccccaacctgcaggtgctgggagcggcctacatccagcacaagtgctacagcgatgcagccgccaagaagcaggcccgcagccttcaggccgtgcctaggctggtgaagctcttcaaccacgccaaccaggaagtgcagcgccatgccacaggtgccatgcgcaacctcatctacgacaacgctgacaacaagctggccctggtggaggagaacgggatcttcgagctgctgcggacactgcgggagcaggatgatgagcttcgcaaaaatgtcacagggatcctgtggaacctttcatccagcgaccacctgaaggaccgcctggccagagacacgctggagcagctcacagacctggtgttgagccccctgtcgggggctgggggtccccccctcatccagcagaacgcctcggaggcggagatcttctacaacgccaccggcttcctcaggaacctcagctcagcctctcaggccactcgccagaagatgcgggagtgccacgggctggtggacgccctggtcacctctatcaaccacgccctggacgcgggcaaatgcgaggacaagagcgtggagaacgcggtgtgcgtcctgcggaacctgtcctaccgcctctacgacgagatgccgccgtccgcgctgcagcggctggagggtcgcggccgcagggacctggcgggggcgccgccgggagaggtcgtgggctgcttcacgccgcagagccggcggctgcgcgagctgcccctcgccgccgatgcgctcaccttcgcggaggtgtccaaggaccccaagggcctcgagtggctgtggagcccccagatcgtggggctgtacaaccggctgctgcagcgctgcgagctcaaccggcacacgacggaggcggccgccggggcgctgcagaacatcacggcaggcgaccgcaggtgggcgggggtgctgagccgcctggccctggagcaggagcgtattctgaaccccctgctagaccgtgtcaggaccgccgaccaccaccagctgcgctcactgactggcctcatccgaaacctgtctcggaacgctaggaacaaggacgagatgtccacgaaggtggtgagccacctgatcgagaagctgccaggcagcgtgggtgagaagtcgcccccagccgaggtgctggtcaacatcatagctgtgctcaacaacctggtggtggccagccccatcgctgcccgagacctgctgtattttgacggactccgaaagctcatcttcatcaagaagaagcgggacagccccgacagtgagaagtcctcccgggcagcatccagcctcctggccaacctgtggcagtacaacaagctccaccgtgactttcgggcgaagggctatcggaaggaggacttcctgggcccataggtgaagccttctggaggagaaggtgacgtggcccagcgtccaagggacagactcagctccaggctgcttggcagcccagcctggaggagaaggctaatgacggaggggcccctcgctggggcccctgtgtgcatctttgagggtcctgggccaccaggaggggcagggtcttatagctggggacttggcttccgcagggcagggggtggggcagggctcaaggctgctctggtgtatggggtggtgacccagtcacattggcagaggtgggggttggctgtggcctggcagtatcttgggatagccagcactgggaataaagatggccatgaacagtccacgacaaaacgctccagcacaacaaaaaaacaaaaggggggcgcaaaaataccccagggccccattagccccctttggaacaggggccaaaggcgttaaagcagcggcgggaacagcggggagaaccccgcgctttgggaccccgggggcagcacacccaaaaagcggaaa

SEQ ID NO: 626052 - DNA, 432 bp, Homo sapiens
tcgattgctccctcttcaccaaataaggccggtcatggcagctcacgcagtaatcccagcactttgggaggctgagtcaggtggatcacttgaggtcaggagttcaaaaccaggctggccaacatggtgaaaccccatctctactaaaaacaaaaattagccaggtgtgatggagagcacctgtaatcccagctactcgggaggctgaggctggagaactgcttgagccagggaggtggaggttgcagtgagcagagatggcaccactgcactccagcctgagtaatagagcgagactctgcctcaaaaaaaacaaaacaaaacaaataaaaagtataacatagattcagtggcttatgcacaacagaaatttatttctcacaatcctggaacttggaagtccaagatcaggatgccagcatggttgggtac

SEQ ID NO: 626053 - DNA, 2675 bp, Homo sapiens
tgactatgtcaggtactaacttgacactgtctcataattcaatcacattcaggctgagggttgcagctggctcccctcactcttctcaacttcagcacacaggacattggctgtgcacagcagccgcggcacaacggggccgctgagcccgagcctgaggccgagactgccagaggcacatccagggggcagtaccacaccctgcaggctggcttcagctctcgctctcagggcctgagtggggacaagacctcgggcttccggcccatcgccaagccggcctacagcccagcctcctggtcctcccgctccgccgtggatctgagctgcagtcggaggctgagttcagcccacaatgggggcagcgcctttggggccgctgggtacgggggtgcccagcccacccctcccatgcccaccaggcccgtgtccttccatgagcgcggtggggttgggagccgggccgactatgacacactctccctgcgctcgctgcggctggggcccgggggcctggacgaccgctacagcctggtgtctgagcagctggagcccgcggccacctccacctacagggcctttgcgtacgagcgccaggccagctccagctccagccgggcaggggggctggactggcccgaggccactgaggtttccccgagccggaccatccgtgcccctgccgtgcggaccctgcagcgattccagagcagccaccggagccgcggggtaggcggggcagtgccgggggccgtcctggagccagtggctcgagcgccatctgtgcgcagcctcagcctcagcctggctgactcgggccacctgccggacgtgcatgggttcaacagctacggtagccaccgaaccctgcagagactcagcagcggttttgatgacattgacctgccctcagcagtcaagtacctcatggcttcagaccccaacctgcaggtgctgggagcggcctacatccagcacaagtgctacagcgatgcagccgccaagaagcaggcccgcagccttcaggccgtgcctaggctggtgaagctcttcaaccacgccaaccaggaagtgcagcgccatgccacaggtgccatgcgcaacctcatctacgacaacgctgacaacaagctggccctggtggaggagaacgggatcttcgagctgctgcggacactgcgggagcaggatgatgagcttcgcaaaaatgtcacagggatcctgtggaacctttcatccagcgaccacctgaaggaccgcctggccagagacacgctggagcagctcacagacctggtgttgagccccctgtcgggggctgggggtccccccctcatccagcagaacgcctcggaggcggagatcttctacaacgccaccggcttcctcaggaacctcagctcagcctctcaggccactcgccagaagatgcgggagtgccacgggctggtggacgccctggtcacctctatcaaccacgccctggacgcgggcaaatgcgaggacaagagcgtggagaacgcggtgtgcgtcctgcggaacctgtcctaccgcctctacgacgagatgccgccgtccgcgctgcagcggctggagggtcgcggccgcagggacctggcgggggcgccgccgggagaggtcgtgggctgcttcacgccgcagagccggcggctgcgcgagctgcccctcgccgccgatgcgctcaccttcgcggaggtgtccaaggaccccaagggcctcgagtggctgtggagcccccagatcgtggggctgtacaaccggctgctgcagcgctgcgagctcaaccggcacacgacggaggcggccgccggggcgctgcagaacatcacggcaggcgaccgcaggtgggcgggggtgctgagccgcctggccctggagcaggagcgtattctgaaccccctgctagaccgtgtcaggaccgccgaccaccaccagctgcgctcactgactggcctcatccgaaacctgtctcggaacgctaggaacaaggacgagatgtccacgaaggtggtgagccacctgatcgagaagctgccaggcagcgtgggtgagaagtcgcccccagccgaggtgctggtcaacatcatagctgtgctcaacaacctggtggtggccagccccatcgctgcccgagacctgctgtattttgacggactccgaaagctcatcttcatcaagaagaagcgggacagccccgacagtgagaagtcctcccgggcagcatccagcctcctggccaacctgtggcagtacaacaagctccaccgtgactttcgggcgaagggctatcggaaggaggacttcctgggcccataggtgaagccttctggaggagaaggtgacgtggcccagcgtccaagggacagactcagctccaggctgcttggcagcccagcctggaggagaaggctaatgacggaggggcccctcgctggggcccctgtgtgcatctttgagggtcctgggccaccaggaggggcagggtcttatagctggggacttggcttccgcagggcagggggtggggcagggctcaaggctgctctggtgtatggggtggtgacccagtcacattggcagaggtgggggttggctgtggcctggcagtatcttgggatagccagcactgggaataaagatggccatgaacagtc

SEQ ID NO: 626054 - DNA, 2948 bp, Homo sapiens
acttcagggagagggcctcgagggacaggacgtgaagatagttgggtttggaggcggccgccaggcccaggcccggtggacctgccgccatgcaggacggtaacttcctgctgtcggccctgcagcctgaggccggcgtgtgctccctggcgctgccctctgacctgcagctggaccgccggggcgccgaggggccggaggccgagcggctgcgggcagcccgcgtccaggagcaggtccgcgcccgcctcttgcagctgggacagcagccgcggcacaacggggccgctgagcccgagcctgaggccgagactgccagaggcacatccagggggcagtaccacaccctgcaggctggcttcagctctcgctctcagggcctgagtggggacaagacctcggtgagcgatgggcccagcccgagggggacgatctgagctctgcagtctggagagtgggaggctctgcagcgggcccggacacaggtgagcccaggcacgccactcaccgccccctctcgacccacagggcttccggcccatcgccaagccggcctacagcccagcctcctggtcctcccgctccgccgtggatctgagctgcagtcggaggctgagttcagcccacaatgggggcagcgcctttggggccgctgggtacgggggtgcccagcccacccctcccatgcccaccaggcccgtgtccttccatgagcgcggtggggttgggagccgggccgactatgacacactctccctgcgctcgctgcggctggggcccgggggcctggacgaccgctacagcctggtgtctgagcagctggagcccgcggccacctccacctacagggcctttgcgtacgagcgccaggccagctccagctccagccgggcaggggggctggactggcccgaggccactgaggtttccccgagccggaccatccgtgcccctgccgtgcggaccctgcagcgattccagagcagccaccggagccgcggggtaggcggggcagtgccgggggccgtcctggagccagtggctcgagcgccatctgtgcgcagcctcagcctcagcctggctgactcgggccacctgccggacgtgcatgggttcaacagctacggtagccaccgaaccctgcagagactcagcagcggttttgatgacattgacctgccctcagcagtcaagtacctcatggcttcagaccccaacctgcaggtgctgggagcggcctacatccagcacaagtgctacagcgatgcagccgccaagaagcaggcccgcagccttcaggccgtgcctaggctggtgaagctcttcaaccacgccaaccaggaagtgcagcgccatgccacaggtgccatgcgcaacctcatctacgacaacgctgacaacaagctggccctggtggaggagaacgggatcttcgagctgctgcggacactgcgggagcaggatgatgagcttcgcaaaaatgtcacagggatcctgtggaacctttcatccagcgaccacctgaaggaccgcctggccagagacacgctggagcagctcacagacctggtgttgagccccctgtcgggggctgggggtccccccctcatccagcagaacgcctcggaggcggagatcttctacaacgccaccggcttcctcaggaacctcagctcagcctctcaggccactcgccagaagatgcgggagtgccacgggctggtggacgccctggtcacctctatcaaccacgccctggacgcgggcaaatgcgaggacaagagcgtggagaacgcggtgtgcgtcctgcggaacctgtcctaccgcctctacgacgagatgccgccgtccgcgctgcagcggctggagggtcgcggccgcagggacctggcgggggcgccgccgggagaggtcgtgggctgcttcacgccgcagagccggcggctgcgcgagctgcccctcgccgccgatgcgctcaccttcgcggaggtgtccaaggaccccaagggcctcgagtggctgtggagcccccagatcgtggggctgtacaaccggctgctgcagcgctgcgagctcaaccggcacacgacggaggcggccgccggggcgctgcagaacatcacggcaggcgaccgcaggtgggcgggggtgctgagccgcctggccctggagcaggagcgtattctgaaccccctgctagaccgtgtcaggaccgccgaccaccaccagctgcgctcactgactggcctcatccgaaacctgtctcggaacgctaggaacaaggacgagatgtccacgaaggtggtgagccacctgatcgagaagctgccaggcagcgtgggtgagaagtcgcccccagccgaggtgctggtcaacatcatagctgtgctcaacaacctggtggtggccagccccatcgctgcccgagacctgctgtattttgacggactccgaaagctcatcttcatcaagaagaagcgggacagccccgacagtgagaagtcctcccgggcagcatccagcctcctggccaacctgtggcagtacaacaagctccaccgtgactttcgggcgaagggctatcggaaggaggacttcctgggcccataggtgaagccttctggaggagaaggtgacgtggcccagcgtccaagggacagactcagctccaggctgcttggcagcccagcctggaggagaaggctaatgacggaggggcccctcgctggggcccctgtgtgcatctttgagggtcctgggccaccaggaggggcagggtcttatagctggggacttggcttccgcagggcagggggtggggcagggctcaaggctgctctggtgtatggggtggtgacccagtcacattggcagaggtgggggttggctgtggcctggcagtatcttgggatagccagcactgggaataaagatggccatgaacagtc

SEQ ID NO: 626055 - DNA, 430 bp, Homo sapiens
taaaaggggggggtctcgtcgaaggttacctaggcgggtctccaactcgggggctcaagcaatcctcccgcctgggcctcccagggcgcggggattacaggtgtgagccattgagctgccgaacctagagttgggttttctgaagtgcttacactgggggagacccaggtcaggctctgctgggctggcgaggggagaaaccgtatggcagtgtgcttctccatagagcaagtccacacgttacccagactcgggggaggaggacaatagggaacccaagttggtcacggcttcgtggtagccagtgcggaagggggcggctttccctaacaacaccgggcccaagtcagaggtggaaacccatggctcgggcaaacgggtcccttctcagttaggtggattgtcacacaattgcacatacataggaagg

SEQ ID NO: 626056 - DNA, 2902 bp, Homo sapiens
acttcagggagagggcctcgagggacaggacgtgaagatagttgggtttggaggcggccgccaggcccaggcccggtggacctgccgccatgcaggacggtaacttcctgctgtcggccctgcagcctgaggccggcgtgtgctccctggcgctgccctctgacctgcagctggaccgccggggcgccgaggggccggaggccgagcggctgcgggcagcccgcgtccaggagcaggtccgcgcccgcctcttgcagctgggacagcagccgcggcacaacggggccgctgagcccgagcctgaggccgagactgccagaggcacatccagggggcagtaccacaccctgcaggctggcttcagctctcgctctcagggcctgagtggggacaagacctcgggcttccggcccatcgccaagccggcctacagcccagcctcctggtcctcccgctccgccgtggatctgagctgcagtcggaggctgagttcagcccacaatgggggcagcgcctttggggccgctgggtacgggggtgcccagcccacccctcccatgcccaccaggcccgtgtccttccatgagcgcggtggggttgggagccgggccgactatgacacactctccctgcgctcgctgcggctggggcccgggggcctggacgaccgctacagcctggtgtctgagcagctggagcccgcggccacctccacctacagggcctttgcgtacgagcgccaggccagctccagctccagccgggcaggggggctggactggcccgaggccactgaggtttccccgagccggaccatccgtgcccctgccgtgcggaccctgcagcgattccagagcagccaccggagccgcggggtaggcggggcagtgccgggggccgtcctggagccagtggctcgagcgccatctgtgcgcagcctcagcctcagcctggctgactcgggccacctgccggacgtgcatgggttcaacagctacggtagccaccgaaccctgcagagactcagcagcggttttgatgacattgacctgccctcagcagtcaagtacctcatggcttcagaccccaacctgcaggtgctgggagcggcctacatccagcacaagtgctacagcgatgcagccgccaagaagcaggcccgcagccttcaggccgtgcctaggctggtgaagctcttcaaccacgccaaccaggaagtgcagcgccatgccacaggtgccatgcgcaacctcatctacgacaacgctgacaacaagctggccctggtggaggagaacgggatcttcgagctgctgcggacactgcgggagcaggatgatgagcttcgcaaaaatgtcacagggatcctgtggaacctttcatccagcgaccacctgaaggaccgcctggccagagacacgctggagcagctcacagacctggtgttgagccccctgtcgggggctgggggtccccccctcatccagcagaacgcctcggaggcggagatcttctacaacgccaccggcttcctcaggaacctcagctcagcctctcaggccactcgccagaagatgcgggagtgccacgggctggtggacgccctggtcacctctatcaaccacgccctggacgcgggcaaatgcgaggacaaggtgaggggcgcggtgtggaggagggccgtcccccgggccgccgctctgacccgcgcccctgccccgcgccccctcccgcagagcgtggagaacgcggtgtgcgtcctgcggaacctgtcctaccgcctctacgacgagatgccgccgtccgcgctgcagcggctggagggtcgcggccgcagggacctggcgggggcgccgccgggagaggtcgtgggctgcttcacgccgcagagccggcggctgcgcgagctgcccctcgccgccgatgcgctcaccttcgcggaggtgtccaaggaccccaagggcctcgagtggctgtggagcccccagatcgtggggctgtacaaccggctgctgcagcgctgcgagctcaaccggcacacgacggaggcggccgccggggcgctgcagaacatcacggcaggcgaccgcaggtgggcgggggtgctgagccgcctggccctggagcaggagcgtattctgaaccccctgctagaccgtgtcaggaccgccgaccaccaccagctgcgctcactgactggcctcatccgaaacctgtctcggaacgctaggaacaaggacgagatgtccacgaaggtggtgagccacctgatcgagaagctgccaggcagcgtgggtgagaagtcgcccccagccgaggtgctggtcaacatcatagctgtgctcaacaacctggtggtggccagccccatcgctgcccgagacctgctgtattttgacggactccgaaagctcatcttcatcaagaagaagcgggacagccccgacagtgagaagtcctcccgggcagcatccagcctcctggccaacctgtggcagtacaacaagctccaccgtgactttcgggcgaagggctatcggaaggaggacttcctgggcccataggtgaagccttctggaggagaaggtgacgtggcccagcgtccaagggacagactcagctccaggctgcttggcagcccagcctggaggagaaggctaatgacggaggggcccctcgctggggcccctgtgtgcatctttgagggtcctgggccaccaggaggggcagggtcttatagctggggacttggcttccgcagggcagggggtggggcagggctcaaggctgctctggtgtatggggtggtgacccagtcacattggcagaggtgggggttggctgtggcctggcagtatcttgggatagccagcactgggaataaagatggccatgaacagtc

SEQ ID NO: 626057 - DNA, 1514 bp, Homo sapiens
  misc_feature (1271)..(1271): n is a, c, g, or t
  misc_feature (1285)..(1285): n is a, c, g, or t
  misc_feature (1294)..(1294): n is a, c, g, or t
  misc_feature (1319)..(1319): n is a, c, g, or t
  misc_feature (1328)..(1328): n is a, c, g, or t
  misc_feature (1336)..(1336): n is a, c, g, or t
  misc_feature (1339)..(1339): n is a, c, g, or t
  misc_feature (1343)..(1343): n is a, c, g, or t
  misc_feature (1346)..(1346): n is a, c, g, or t
  misc_feature (1349)..(1350): n is a, c, g, or t
  misc_feature (1355)..(1355): n is a, c, g, or t
  misc_feature (1357)..(1357): n is a, c, g, or t
  misc_feature (1359)..(1359): n is a, c, g, or t
  misc_feature (1364)..(1364): n is a, c, g, or t
  misc_feature (1375)..(1375): n is a, c, g, or t
  misc_feature (1377)..(1377): n is a, c, g, or t
  misc_feature (1387)..(1387): n is a, c, g, or t
  misc_feature (1393)..(1393): n is a, c, g, or t
  misc_feature (1395)..(1396): n is a, c, g, or t
  misc_feature (1405)..(1405): n is a, c, g, or t
  misc_feature (1418)..(1418): n is a, c, g, or t
  misc_feature (1425)..(1426): n is a, c, g, or t
  misc_feature (1430)..(1430): n is a, c, g, or t
  misc_feature (1433)..(1433): n is a, c, g, or t
  misc_feature (1437)..(1437): n is a, c, g, or t
acttcagggagagggcctcgagggacaggacgtgaagatagttgggtttggaggcggccgccaggcccaggcccggtggacctgccgccatgcaggacggtaacttcctgctgtcggccctgcagcctgaggccggcgtgtgctccctggcgctgccctctgacctgcagctggaccgccggggcgccgaggggccggaggccgagcggctgcgggcagcccgcgtccaggagcaggtccgcgcccgcctcttgcagctgggacagcagccgcggcacaacggggccgctgagcccgagcctgaggccgagactgccagaggcacatccagggggcagtaccacaccctgcaggctggcttcagctctcgctctcagggcctgagtggggacaagacctcgggcttccggcccatcgccaagccggcctacagcccagcctcctggtcctcccgctccgccgtggatctgagctgcagtcggaggctgagttcagcccacaatgggggcagcgcctttggggccgctgggtacgggggtgcccagcccacccctcccatgcccaccaggcccgtgtccttccatgagcgcggtggggttgggagccgggccgactatgacacactctccctgcgctcgctgcggctggggcccgggggcctggacgaccgctacagcctggtgtctgagcagctggagcccgcggccacctccacctacagggcctttgcgtacgagcgccaggccagctccagctccagccgggcaggggggctggactggcccgaggccactgaggtttccccgagccggaccatccgtgcccctgccgtgcggaccctgcagcgattccagagcagccaccggagccgcggggtaggcggggcagtgccgggggccgtcctggagccagtggctcgagcgccatctgtgcgcagcctcagcctcagcctggctgactcgggccacctgccggacgtgcatgggttcaacagctacggtagccaccgaaccctgcagagactcagcagcggttttgatgacattgacctgccctcagcagtcaagtacctcatggcttcagaccccaacctgcaggtgctgggagcggcctacatccagcacaagtgctacagcgatgcagccgccaagaagcaggtgaccaccccgaccacccactcgctgccccctggtgacctccttcgtgggccccaccacctcccactgtcctctgctcactgagcacccctcatgatccccaagctgactggntagaccccactctntctggagcnccctcagcagaggaagagcagaagnatacaattnggatacancantatnacntgnntcacntncntaccnccacatatacntnatcacctccntacacncnnacacctgcntcacctccgtacncccacanntatncancacntcgtacactccatacaccactcacacatatgaatcacctcctctgcccggggatctctctagatcaccatcagaatc

SEQ ID NO: 626058 - DNA, 1247 bp, Homo sapiens
tggttgcactttccatcctattttcctcccttctctgttcgctttcctgtcccgttgcttttgctcgtttctcgctttgctgtggtcttcgcctgttgttgtgcagcctgtgtgtgcgtgtcgttgctggcgtgttgtgtgttgcttcgctgccgcgtggtggtgtttgcctgtgcgcttcctctttgtcttttttgttttcttttgtttcttttgtctctttctgtgtgtcatcttttctgcttgtctttctttttttcgggttgctcctatacctttgtttttttcttctttcggcgggtgctgttggtttttcttcttggtgttggtggtctgtgttttttctttcttcgactgtgtttgtcttgtctcgccttctccttgccttcggctctgcttctgtgttgtctcgcgcgcgagagcgggcggggtgaaaataaaccggaagcctctttttttttgggaccccccccatattgtctcctgcgttgtgatcccacaacatcacccctctgtttttgttacccctctccatgtttatttacaccgggggtgcgtagttacacattcccctccgggatttttttccatctttccccccgcggggtggggataccttttttctcccctccgggacactccgttgtgtccactcttgggcgcccttttttgggtccgcccattattatccacccgtgttgtgcgcaccccatacacacccgccggtgggttcctccgcccgcgaaattctctcgcgcgcgatattttttgctccccactctgtgtccctcccccgcgtcgtcgccgcccccacagatggtggcgtgtgttgtggagcacgcgaagtatattttggtggccccccccccccccctcactctcacatattttctatatatcacccacctcccccgcgcgcgtgtgtggtgttatatatagaagagggggcgcctctctcgcggggagatacccccgtctctctctatgagggggcgccccctcctctctctgagagaggggtgtttctcccccccccagcctgggggcccccacaagaaattacttcaaccaccttctttctccacccggcggcaggagacaataataacaagaaggccgcgattgtccacacccaaagaagaagatgagctccccccaccacgagcctcccccccactcgtggcgcccccccttttatttgtcccccttttttgggggggggggaaaaaaaatttttttttttttta

SEQ ID NO: 626059 - DNA, 106 bp, Homo sapiens
atccccctaaaatcgatttctatcatattcatctggcgtacatctaactttcttcccacaacactttctcgtgcttatccttgaatgccctgacgttactcggact

SEQ ID NO: 626060 - DNA, 1113 bp, Homo sapiens
gggtccaacatggagacctttgatgtggctgagttggaccatgtaactgccgcccaatggtgcacccaggccatgtgagcatgctactcatgcagccgtgcctatgtggctgggcagtgccctgtgccgtggccagtggacactccgcctggatctccaagccaccatggcgatggctctgcccacggatctcaccacctggctgtggatgccaaagcccatgtgtgacagacacgacgacctgcgtgggccccacgggcgcccccacactacacctgaccatgacatccacctcacagatcgcctacacctccctcagcctgccccacatatggctcagccttcccctccatactcccgaccccagtattgactaactctgaccatcagccctcaggaccctattatggccacgtcgggccaggcctctggacctctactcgtgccttctcctatatggggcaccatcgcacgcggcccctctacacggccatctctgacacacacagacccctcacgggcccctaaacacacacagaccccacaccactggggaagacagctccatgaaatactaccgcacacctgatcccaggtgcccttacaccagtgtcgccgtgctagccaaccaagctcaccgtcacctcccgcctacctacatcccaccgtataatacccactgcatcctacttcccccccatcaccccctcaccactacctacctcactcacactaccaatactcacataccccatacactacccaaaccaacaatcacgccccctcactatcacccctcccccatctattctcacccccgctctcccacaccacctcctcctcccccattcatacattcaccctcactcaccactctcctccctcctcccctaaccccgaacataactccactaacccccacccttctcctcccagaccctcccagctacaccttctacactctactcccccccctcatcccctccctccactttcaccccccctcccccctgcacccctcttcccctccttcctatcatctcccaccttaatacccactcccctgtcccctccacccaccactagatcatctcacacacccccctacaactc

SEQ ID NO: 626061 - DNA, 1077 bp, Homo sapiens
tggtgtcgctctctgtgtcgtgttgtccctccgtgacctctgtgtcttgtggggttggagccaccacgggcctcactggtactgaatgtgttccgtacctgtggtgcgacttgctcagcctgtttgtggatattattagccccgtggcgttactccgcgtttattccgtcatcgtagttcgtcatgtcgtgttggatcacgggataccttttgaattggctgctgcatttcgtgtgttggccggaatctccgcccctccctgttctgtgatctggtgcggtttaccgggcccgctggcttttttcctagcgccacccaggcgtggcgcccctggcgtgcagcggtgatgatgctctcccctggggctggaggccaccttgtgccaggcccaatttctccttagcttttccggggcccccgccatttaggtttcggagctgagtgcggaactgcttcatgggctataaatgtgattttcttagattgatgctccccccctctctgaagcccccagattccagtccccgagggtttgtcatcgttcaagctctgttgtcattcgtttccccggggaccccttgcgcgtattctgtgggctttcgctagtgtcctgcgcccgacgctcggaggcccccccccgtggtcaacggccatgcagcagcagtgtgcgaatggacacgtacttttgtattcgggacgcgcatcgggccacgtagtaccctgtttttacttatgccagggtattctactcttctgcttgttgacaccttttagggcccctccgtctgggagggcttcagtgccactgcattctgggacctctgttgtccccccggcctgcacgggatcaacatggcctggccagccatcgggcgccggcgtgggtcgcgaggggtgctgcctttttcagctgggccgtaatccatttaatggtcctttaaaatgtctgtgtatttaaaatttaaggatacccccccttaatattaaatattcataaggtctagtatcttgataataaagtagatgttttaataaccatttttgtccttcttaaaataaaatggcaaggaacttgga

SEQ ID NO: 626062 - DNA, 411 bp, Homo sapiens
  misc_feature (45)..(45): n is a, c, g, or t
  misc_feature (53)..(53): n is a, c, g, or t
  misc_feature (86)..(86): n is a, c, g, or t
  misc_feature (108)..(108): n is a, c, g, or t
  misc_feature (138)..(139): n is a, c, g, or t
  misc_feature (175)..(175): n is a, c, g, or t
  misc_feature (395)..(395): n is a, c, g, or t
  misc_feature (400)..(400): n is a, c, g, or t
ccccccaaaataagggcccccaattccaaataaattaataaggtncccattanatggtaaataattaataattaccattaaatgtnccctataatattacatgccacnaaaaagaataaggtagcctgtatatttccnngtatggaaaaaacatattaatatgttataaactatnaggttggtgcaaaactaattgtggtttttgccattgaaatggcattgaaataaaagtgtaaagaaatctataccagatgtagtaacagtggtttgggtctgggaggttggattacagggagcatttgatttctatgttgtgtatttctataatgtttgaattgtttagaatgaatctgtatttcttttataagtagaaaaaaaataaagatagtttttanagccntaaaaaaaaaa

SEQ ID NO: 626063 - DNA, 1560 bp, Homo sapiens
  misc_feature (422)..(422): n is a, c, g, or t
ttagccgccacgcctgtgtgtttgaagaagctcgcgtgctgtagtcgtggggtttgtgccgtcgtggaggaccaccgagggtgcacatcccggctccgagtatgttgtgatggggggcgctgccccgacagcctgtgcgcttggttgcccctgtggatggatacgttgtctccgcagtattgcttctgtgttgttgccagggggggaagccaccacgcttgtgtgggagcccctctctgtttggtggtgactcctgcctattgtgtcgacgtgtgccaccgtaggtgccccccaccccgtgtggtggccaccacctggggtgggttctctacgctccgcctgtgtgagggtgttgttaagggggcgccccccccccccgtcggggtggtgatccgtcggggccctgcacgagttgggtgtgntgtcgtcccaacagagggggagtaggggggggtaattgtgggacgcactcagtgtgtggaagggacgtcctccccaacgagtgtggtgttctacttgtctgctgctgcgccgtgtgtgaagatgtgtgtggagtgttggttgctgtgtgtgtgccgccccgcgccccgactatgcttctaggcgcgcaccaatatgggccgttgcgcacccttggggcggttcctcacccgatgaggcgccgccactattctcgggggaccacttcttgttgtgttacacatattgtccgttggggtcgtttgtcttgtgtgggcggctggccggttgtctgtgtgtcgtctgtctacgctcgccggcgccattgttggggggtgtgtgctcacatggggatggatttatactcttggggcgcacttttctcatcggccaactctcgggcgctgtcacacacgcttgctgtggcgcgccccgcacatgttcgttgtggggggtctcccaccattgtgagagggatatactcacagcggcccctgggcgtcgcgctctccggagcgctttttgtctctcacagcgcggtctgtgtggtgtttgcgcgcacacgctcggtgtggtcccactctgcgcttctccgcacagtggttgtccctctgtagagagcacacactctgtgttgtctgcacagagactgcacacgttttggtgtctgtcctcgccacagagtgtgttcacgagagatataaacccacactgtggcacacctgttggagaatttgtgttccccagcgcccgctctgtggtttccgcggggttctctctggtgccacactctgaggaagactcggggggagacccacacccacccgcgtttctcccacactcccacacggttcacatacccacgaagcctgtggggccacaactgtggcacacctgtgcacacctgtgcctctcacaaatgtctgctatacgaagtgagaccacgctgctggtgtggaaggaaggccaagggcggccccctgggaaacccggctttcaccacgtaacagagaaaagaaaacttgctctgttttgtaacagcgtgttccctttcctcttttttgtccaccttaaagaccccaaaagaattaagaaaaaaaa

SEQ ID NO: 626064 - DNA, 227 bp, Homo sapiens
acacggcggtgatttcccccaccacagctcacagcaacgccagatccttaacccactgaacaaggccaggatcaaacctgaaacctcatggttcctagtcggatttgttaaccactgagtcgcaatgggaactccccatttttttcttctaagagaggttttgttcttatcacctgatgccttcacttctagccactctgtgtcaccacccatcggggtaccgagct

SEQ ID NO: 626065 - DNA, 317 bp, Homo sapiens
tcttgccctgttggccaggctggtcttgaactcatgacctcaaggagatccacccacctcagcctcccaaatagctaggactacaggcacataccactgtcttctcagggacatgaacataaaagagtcaccaggagtggaattattattcctgaatcctccttgatgagattctactgttcattttttaaagttacctagaattctagaataagttttaaaagtttcattttcaagttttgaggatgatttaaaaagataattggagagtaatgaaataatttaactttctacttgcaggattcctagaactcatt

SEQ ID NO: 626066 - DNA, 561 bp, Homo sapiens
acctgcgagggcatcaccagagaaccgagacgatactaatatggaccaagagaagagtaggaacacctctcatggaacgcaatggcaagggaccgcgccagagtgagggaaccaggcaatccggccattatggccggggaggggcgggcagaagatggaaacatgcggatgtcggtcgctgcagggaccacccagggccgcgtataacgccgtatgggcctcggacccgagtcccgcatccatctgtggcggaactggctcacagggctggagcggcacgaacgcatcgaggcaccatgggcgcgagaggacgaaatgaggggctacgcggagaagcacatcgactatgggaagctgggagacactaacgaacgagccatgcgcaaggcggacatctggctaacagagaaggattagatcccaaagctggatcaagcacgggcccctcgggacaaagatcaaaccgggggatacacaagaatgctgaagagcccaaatcggagattggaacgggccaagagggcagagaacgagaataaagggaaacgcctaccaccccgg

SEQ ID NO: 626067 - DNA, 155 bp, Homo sapiens
tggtagtatacacttagcttaccttctgcttgtctttctctgcactctagtctaggcaaaatgctgcaaacatggcactatttaggtcacctagggtatatcctggctgtgggaatctaaagtctatctagaataacgtgtcctttggttgttca

SEQ ID NO: 626068 - DNA, 149 bp, Homo sapiens
ggacgtatacggagggtcgttacggaagggctgttacggaggcgctgttacggaggagctcgttaagagggctcgttacggaacggaggccgttggcgctcggtaacggacggctgttacggaggggctcgttacggaaagcgctcggt

SEQ ID NO: 626069 - DNA, 407 bp, Homo sapiens
  misc_feature (3)..(3): n is a, c, g, or t
agngcatctagcagagaggcaggaccaactgggagagggtcattctgtgacacctactgcatcaccgggctgtgtgaagtgactcagctgccagaactcacacaatatcattctacaccaaaacctcacgggaaaaatcactaaagtttcaatatggcaccttaattccttaacgaagagaaagaatgtatatcttgtggtaatggggacagcagctccatgaatcaaagctttctgtggctcgatctagttcagagtctgagtgatacatttaatgtgccagcaaaagcctctggtaaacagggagcagtgttacagccagcagacccaagagcttgccagagctgatggagattgaagggagcaggttggagctctcctgaggcagaatgagaggaaggctctcc

SEQ ID NO: 626070 - DNA, 244 bp, Homo sapiens
tatcctgtgtcggtgttggcagctggggtgccaggagctccgtaaactgggtgatgcagagtccagtgtcagccccatgactcagtttatggttttttgtctttgagaaagggtctcgctgctgtcgccctggcttggagtgcagtggtgttgacctagctcactgtaatcttgaactcctgggctcagtgctgatcctcctgcctcagcctcccgactgtagctgggactacaggcatgtgcc

SEQ ID NO: 626071 - DNA, 203 bp, Homo sapiens
ctgactatttgttgaatctgacaaagattctttggagatggatatttgtgtagagtatgaataaattaccaaggaataaatacaatcgacgtttaagaacacaggccatacacagctggcttaaaatccttattagcatgagagaatcttttaaaacttgtgaccacgaagccactatcatgcttagccttgggcagaacaac

SEQ ID NO: 626072 - DNA, 669 bp, Homo sapiens
atactacgaatgcctaatccaaggattcccaaatcgcccgcacatcctgaacggtaaaagccccagaggccctagtacgaaatccgcgactaagggattaaacccctagaagactttatatcatcttaggcagacgacccgaaacctgagaatggccattgaacaaagtttgtatacgctacctacgtagactaacggccgaccgacatcccttaatagagggaaagttactagaacgccatccgaaccccgccaaccgaaccacacccgacgagaacatgctgcccgactctatcctcttaaccgtccttctatatgccgcttcctagaacctcgttttaaaaatcgtcttaagggaaaagaagacttctcccgatatagagccccgggagctctaagaatcgtctaacaagaatctctaaagacccgaggcccgcgtggggaccccgacttaactcgcggaacccgaagagcctccgactgggcgccggcccctagcctgccccgaccgaactcctgcctatctactaccgacgcgatgaatcccaaccgactctaagattctctcgtcaagaacccgtaccctccgctccgctacctttaaggaaatctctctccgaatcgacctaggaagcgatgtcatttatttgttgggttaccgctaaagcg

SEQ ID NO: 626073 - DNA, 390 bp, Homo sapiens
ataaaacatgacctattcccgttcatttacgaagctgtcactgtctgtgcttaccatgctcttgtatcaatcagtaggcagtatggtgcatggagagttgtcaaaacaaaactttgtgtttgttgaatgacgtaggggaattattctctttgatttcatgtcgtgtgtgtgtgtgtgtgtgtgtgtgtgtgtgtgtgtgtgtgtggtttttgagatatagtacgctctagcactctattatagtctcctgaggctgctgtcccaaaatcccacaaagcgggctgtgataaacacagcagaaatatattctcaataggtggggaggctgtatctctgatctcaagatatcagcagggcccatgctctctctgaatacaggctgtaggaaag

SEQ ID NO: 626074 - DNA, 501 bp, Homo sapiens
ctcgtgctcagcgtggactggtacatgccgtgggcctcttgttacatttgtcctgctttggccaggctttgtgtttggtcgtggtctcaatccagagagagatccagacatctccaatggattcaggctaatatcagtcacacaatttctgcgtctgtgcatcttgctacgtgacaacaacatagcagcaatgcatctcttcccaggcagcaacttggggattgtggcattctctaagtgagctcacagcaccttaatggcccggcatgaccagacttcaagcaagcaacgggcacgatgaggaggcgtctcaagaagcaaatgcagcactcgtatggcaaaggcgcacgaacagaaagtctggttgtggtctctggagatactttatcattcatttcctcattcagatttggaggctgacactgattataacatctgatgtctctcgatatatggaagaccctggtattgggtatgaagagttagccagaaatatcaggg

SEQ ID NO: 626075 - DNA, 161 bp, Homo sapiens
  misc_feature (137)..(137): n is a, c, g, or t
ttctagaggatcccgcatagttaacaacacatgcgaaacgatagatatagagaaggtaggagtgtagttcactgctcagtttcctcaccttgaaaaatggagagaataagccaggcattgatggttgacgcctgtanatctgtagcactttgggaggctga

SEQ ID NO: 626076 - DNA, 1002 bp, Homo sapiens
gcaagtctatgaactgtagtaagtgtgaggaagtctagcgcacagcatctttcattcaacgagtgtacatgtacagcagttgggagagtaactgatgagctctatgaatcttcacagttatacagtatatgaccagtcatactcgatgagagcatgagtcggttcatggtgtccttttggagattcagctcttaagggattacactctcccagtgagctgctaactaaaggcaggctgctgaagtatatagcagcaatcccacaatagcacacctagcttcagattcagaggatgagcccccttcttgagccctgtagatatgtgaaacttaattatgtagatgcatttcatggcaccagatcctaaggtacagtataggtatttcactggagaccacttactttgcttgctttgctttttgttggcattttggcaggattattcaacttcaaagaaagtacgttgagaatccgtggccctaccaacgggtgatggaaccaggctagggttcctatggagtcggttggggcctctccaaaaagtttcatatactgtgaataaggaatatgataaccttaagcttcgaatgcacagggaagagaacccatgattataagccaaagtttgcacggaaatagggtgagtcttggtgtaaataactagtgagactgtgggaaaagggtagatagcacagggaatcacccccagggtccacgagttaagcagccgccacgaaagagcttggaatcttgagacggggccaaaaattacaatagtcacaaggagagtgcggtgcactcaaccagatagggaaaggagctcacaaagtgcatgaacaaaacaggaacgcagggggcgccggcagagcgcgcacaacaaggcactgaaacaggaacgacagggccgggtgcgaaacgaaaagaaaaacaacacgacgcggagagaatcagccaccgaacagaaaaacagcgacaaaaggagcagaggacacaaaagagacc

SEQ ID NO: 626077 - DNA, 451 bp, Homo sapiens
  misc_feature (61)..(61): n is a, c, g, or t
  misc_feature (99)..(99): n is a, c, g, or t
tggatggagccaggaaagcatgaaagtgagaacccaccatggaagagatggtgtggttgtnttggaatatgcttggccccatgggaaagtggcactatnatgaaggtgtggtttgttaaagggaagtgtgtcactttgtgggtggactttgaggtcctatgctcactcaagctctgccctgtaaggagagaccctcctcctggttgcctgtggaagagaatccccttctgtctgtcttcagatcaagatgcagaactctcgggctggtgagatggctcagtgggtaggagcacccgactgctcttccgaaggtccggagttcaaatcccagcaacacatggtggctcacaaccatccgtaatgagatctgactccctcttctggagtgtctgaggacagctacagtgtacttacatttaataaataaataaatctttaaaaatatatattt

SEQ ID NO: 626078 - DNA, 530 bp, Homo sapiens
  misc_feature (79)..(79): n is a, c, g, or t
  misc_feature (157)..(157): n is a, c, g, or t
  misc_feature (160)..(160): n is a, c, g, or t
  misc_feature (163)..(163): n is a, c, g, or t
  misc_feature (171)..(171): n is a, c, g, or t
  misc_feature (173)..(174): n is a, c, g, or t
  misc_feature (176)..(177): n is a, c, g, or t
  misc_feature (180)..(181): n is a, c, g, or t
  misc_feature (183)..(186): n is a, c, g, or t
  misc_feature (191)..(191): n is a, c, g, or t
  misc_feature (195)..(195): n is a, c, g, or t
  misc_feature (199)..(199): n is a, c, g, or t
  misc_feature (204)..(204): n is a, c, g, or t
  misc_feature (213)..(213): n is a, c, g, or t
  misc_feature (220)..(220): n is a, c, g, or t
  misc_feature (228)..(228): n is a, c, g, or t
  misc_feature (232)..(232): n is a, c, g, or t
  misc_feature (235)..(235): n is a, c, g, or t
  misc_feature (243)..(243): n is a, c, g, or t
  misc_feature (246)..(246): n is a, c, g, or t
  misc_feature (249)..(249): n is a, c, g, or t
  misc_feature (252)..(252): n is a, c, g, or t
  misc_feature (258)..(258): n is a, c, g, or t
  misc_feature (261)..(261): n is a, c, g, or t
  misc_feature (267)..(267): n is a, c, g, or t
  misc_feature (274)..(274): n is a, c, g, or t
  misc_feature (284)..(284): n is a, c, g, or t
  misc_feature (286)..(286): n is a, c, g, or t
  misc_feature (334)..(334): n is a, c, g, or t
  misc_feature (336)..(336): n is a, c, g, or t
  misc_feature (339)..(339): n is a, c, g, or t
  misc_feature (341)..(341): n is a, c, g, or t
  misc_feature (343)..(343): n is a, c, g, or t
  misc_feature (345)..(345): n is a, c, g, or t
  misc_feature (348)..(348): n is a, c, g, or t
  misc_feature (362)..(362): n is a, c, g, or t
  misc_feature (369)..(370): n is a, c, g, or t
  misc_feature (398)..(398): n is a, c, g, or t
  misc_feature (400)..(400): n is a, c, g, or t
  misc_feature (413)..(413): n is a, c, g, or t
  misc_feature (420)..(420): n is a, c, g, or t
  misc_feature (425)..(425): n is a, c, g, or t
  misc_feature (434)..(434): n is a, c, g, or t
  misc_feature (437)..(437): n is a, c, g, or t
  misc_feature (439)..(439): n is a, c, g, or t
  misc_feature (452)..(452): n is a, c, g, or t
  misc_feature (459)..(459): n is a, c, g, or t
  misc_feature (469)..(469): n is a, c, g, or t
  misc_feature (494)..(494): n is a, c, g, or t
gagaggtaaacaaaccacgcgcgggctgcccgcggcacggcgggcgcggctggcgcggctggggcggcaggggcggcangggcggcggagagcgcgccgagccgcggccgagctggcccgcccgcccgtcgcacatgttccggaacgctcccgtccntanccnccatcttntnntnnttnntnnnntaaantttnaatnttctnttgtggttnagtaggngggtgatntggnaantctgtttntcntcntcngccgtntgntatagnagattcntgatggtcangncatactgagatttctgtctcttttcccactatgtcgcggtgttgcttngnatngntngnacngggggtcgttgcancatgccnngggggcgatcattttccggtttgcactncngcacagcaaatangactgcnacagnagcgttggncgnantgatcgcgcgccntctgttnccccccctgncgtaagagctattgtgattttattnaccgagttaccacccttgtacttggcgtcaacggct

SEQ ID NO: 626079 - DNA, 232 bp, Homo sapiens
ggaaggttgagcttacacacatcctccgctggcatcttgtatttatctacatggtatgtgacacaacgtgaacatgggtcagaaaatgtctagctgcacgaaaacatttcagccgattctaacacagagggagcatacacatggaggggccggaggtaaggcaggtggatgaccaggcttccctgctcacggctcgtgtttcatgcccgctagcagcgggtgctctgggtgg

SEQ ID NO: 626080 - DNA, 262 bp, Homo sapiens
tgaataggctaggtacgaggctgggttggcttaagctcaggagttcgagacagaaagcaatggtcctcccttctcaagaaaacaagagttggccaggtgcaatggctgacatctgtaattccagtatttgggaggccaaggtgagaggatcacttaagctcaggagttcgagaccagccaggtcaacatagcaagactccatctttacaaagaaaaaaaaagaggctgggcgcggaagaacaggaaaaaaataagaaaaagg

SEQ ID NO: 626081 - DNA, 120 bp, Homo sapiens
caggatatacggggctggacggggtcctcacgccctggtggacttggggtcacgctactgctggtctccagacactcacatactgtcctgacaagtggcatccgtcaagcaacttctctc

SEQ ID NO: 626082 - DNA, 268 bp, Homo sapiens
gcccgccatccgccgcctacttacgcttcaccatctgcgaccctggcgcgctcggctgcagggcgcggcgtcctcttcggctcctcctcggaatagctcgcggcctgtacccctggcaggaggcccctcagccccccggtgtggacaggcagcggcggctagcgacgatacccgggatttcggcggtccccggcgctccctttcccggcctcgttttccggataaggaaggccgggtcccgcatgagccccggcggtggcggcagcga

SEQ ID NO: 626083 - DNA, 251 bp, Homo sapiens
cgttctcaattgctgcaactactagctacaaatcaatacggttataaaaccccaggttctgaaacgggcatttggaaaatccttttttatttttaatttttacggggggcaaaatagaattataaaaaaacgatggatctcacaacagatgaataaaaatatccagaggtcctctaaattttgcacattcacatctttttattatctcacacgggcaagattttgggccgccctcaattgtgtatcaaatc

SEQ ID NO: 626084 - DNA, 551 bp, Homo sapiens
  misc_feature (551)..(551): n is a, c, g, or t
gccttaaccctggcagcatagtgtgagaccctatctctaccaaaaaaagaattacaaaattagctcggctggttgtgtgcctgtagtcctagctacttgggaggctgaggtgtgaggatcactttcagcccaggaggtcaaggctgcagtcagctatgattgtgccactgcactccagcctggatgacagaaggagaccctgtctcaaaaaatagaaaaaccttagagcccaacctttcagttgcaatccagaggttcttgaaggatcagcgagtgtgctagggctgctggcatgaatattagtccaagaaagacctcttggagcataatgtttgcgtgtgctgtttgatcattttccaggtctttctagtaactctgagtaggctagaggaaaagaatcactaaggtaactgtcaacatgctcaagtatttgctttcacctgaggtttaaccctgaatgttgaccttaacccctgactccagcactgtcccatcatcaattttcccagtttgagtaataatatttagtccatatctaagctatggtctan

SEQ ID NO: 626085 - DNA, 209 bp, Homo sapiens
aaacatcctcagctttcctcggattctttggtcctggggacttcgaccccatctgttgacgtctatgccatgaaacgccatgacagttcccccaagaaggaggtgtatttcatgtgccatcatttgatatcctcaacgccatacgtatacaaacgaagaaagcgtgcacatgcttgacaacaacggattttacacggcggcaggggcct

SEQ ID NO: 626086 - DNA, 129 bp, Homo sapiens
gctacttgtgaatgctgagtgtgggaggatcgcttggggcaggtgtgagggacaaggctgcagtgagccatgatcacaccactgcactgcagtgtgggcaacacagtgaccacctgtctcaacaaaaca

SEQ ID NO: 626087 - DNA, 1787 bp, Homo sapiens
  misc_feature (1358)..(1358): n is a, c, g, or t
gtgctgctagcaggtggctcttgcagccgtcaatatacaggccatggtgcaggcagcatcgtgtgattgtcaaccaatcatcacgaagcatgagtgatttatccttggcaagcgcggccgcagattcgatatttccagcaaacgtccagtcaacattgtacagatgcttgggttcgcgatagatagattcgtggagaagatgcatgtggcattatagaaggtctacaatcactgctaatattcaatgtgcagcatattagcagcaaggaacaacctatgcatgggagtgcacagtggtgcaactgaggttcttgttgcaagccacaatagtacgagatcgaggtaaatgtcattgaagatcattttcaaatgtgttgggacagacgaaatagtgcacgcgatggttacgtgattaaaaggcagggctacaagacattgtgagtcgtgttgcggactggttgcagagacaatatgggcaacgatgggacatcaaggtgaggttaccataagaactttccactgcactttacgacccacacgcgcgcgcgtttggaaacctatggacgccagcatagggaccccacgaccaatggaggcaatggaacttaccacaaacagcatatacacctcgggaccatataaaacagtgcaccattggggattcgacccacttggagacatccccctccaagagaacacgggacatataccgacacatccgcaggcggccccgcacctttatgacagatagatttctaggagttgtgggaataaagaagtttgaggaggattcgtgcagagagttaacatttgagagtgctcttttggcatcagtaaatccgtataccacaagatgtttgaatgggactcaaagtggcgagagtgttggcgattaaacaatgttcgtatgacgactaacagcgctacaccagcgtgattaagaggaagtaaacgagataatatttgggggacatagagaatgttcacaatgagagtagacacgcaaatacgattacatgacggaacatgtcgttactaactcagcccaaacatacagcgaacattcaaacacactatatgcgagtagcaagacaaaaatctaatcagcacgacgttaggacagagagatagaacaagcacgcatagtccggagtaggacaaatagcataaacggagccggctcgggaggacactaagacacagaaccagggagcataccactataccatcacagccgagtctggaccggaacaccagaagaccacccatgagacgtcgccccatacatatgagagaccctagaatgggtgacagcaacacaaaacccccacaggaacaagcgcaatcatcagcaatcnagccgacatagccagagaacaatggacaagtaccaaaccatgacagtcgaacaattatacagcacgatcagacaaccagtggcaaaacaacaccacagatgcgcccggagagcagaaccagaccagcccagaacagagcacaccgaaacggaccagcggcaccacgacacccagcacaacaccaacgaccacagactcaacagcagcaaccacagaagatacgcgatagaggcacagcaaacaccactagaaacatgaaggagcagacggcgacagggagcacgcaacgcagcgagcaagaacacagatcgacaagccagtgagacacagcagcaacgaaccagcacaagatgagccacaaaccaccgatcagatcgaccgaacccgacgcagcgatcgacagcagaagacgagcacatcaacagcagc

SEQ ID NO: 626088 - DNA, 167 bp, Homo sapiens
ggctgccttttaaaacatgctgctctttttgtctttgcaaggggtagaaatttgaattctctttgggggtagatcttctgtaatccccttctggtcccagagccttctgacaagttttgtcgactctcacctctgggtctcacctgtgacaactaggagaggaggca

SEQ ID NO: 626089 - DNA, 423 bp, Homo sapiens
  misc_feature (126)..(126): n is a, c, g, or t
  misc_feature (194)..(194): n is a, c, g, or t
  misc_feature (324)..(324): n is a, c, g, or t
ttcggcccggagcaattgtgccacaatctaatcaagataatgactgacacccactgcggacccaaggccatgtggacatgagccggggaaatggtcaggggctgcaggagagactttactgggacncctttttgtggaacccaagctctgtgattccaaaatctatttgtgaagtcccaatgggagcgagagtncgactgggagaatatgggaatgtgatacctgatggaatggaaacggtgagggttgagcaggctttatgcaaagcgactgcagctcctttacctgaatgtactatgggggtggatattgggtctggctgangtgtttctcttacctagcatgctaaagcggaaggcatgtgaatctccccacctgccaatattgattggatgtacttgatggaaaccagtaagattgccc

SEQ ID NO: 626090 - DNA, 238 bp, Homo sapiens
  misc_feature (155)..(155): n is a, c, g, or t
acttacgatggagaatttgttatctaccctccacaagatcttatatccagaacttacaagggactttaaccatttaccagaaaaaaacatcccctttaaaaagtccaggcaaggatatgaaccgacacttctccaaagaagacatttatgttggncctgaaatatgaaaaaactccacatcactgatcctcggaaaaatgcgaaccaaaaccacaaagagataccctctcattcccgg

SEQ ID NO: 626091 - DNA, 165 bp, Homo sapiens
agtattgaaaaaacttcactacgtttctctactgtgcatcggtatcacaggtaacatcaaatcaatgtaatagcttcagtaaacgtcagtagtgttcagctaagatgctgtaattaaatttgtactagggaaggttgatgagaacaaagtgggaaaacttgtaaa

SEQ ID NO: 626092 - DNA, 94 bp, Homo sapiens
aacgacacgccattattatgatgttcgacacgactgtgtatattcgaaaagtgattttcttatatatggcaaattacaaagtttaaaaaggtta

SEQ ID NO: 626093 - DNA, 459 bp, Homo sapiens
cttatccttactgaggcacagtctcgctctgttacccaggctggagtacagtggcatgatctccactcactgaaacctccacctcccggattcaagcaattctcctgcctcagcctcctgagtagctgggactacgggtccctgttaccatgtctggctaatttttttgtatttttaatagagacggagtttcaacgtgttggctaggatggtctcgatcttctgacctcatcatccctccccctcagtctcccaaagtgctgggattacaggcattagccaccatgcctggccctaattttgtatttctagtacagacagggtttcattatgttgcccaggctggtctcgatctcctgacctcatgatctgcctgcctcggcctcccaaagttctgggattacaggtgtgaaccaccatgtccggcccagtttttcctgttctaaggaaacagttgag

SEQ ID NO: 626094 - DNA, 424 bp, Homo sapiens
agcaaagagcccagcctttctacccagacgttacctgtgatcaagtgctttgggcagacttcaagactttttgcttcctccactttccagtcaatcagtgactccctcctggctgtgagcccataactggcctctctccaaaagcctttgcccaggagcatgggcatcagctccctcacgggaaccagcctgctgttcagaccagtttgaccccctacccctttcaccctgtccctcctcaaagtattttttgaagtggttgcattataaaaatgggtatttgtagggccggagggatggtagtgatggggaaaaggtaaggaagggtccccctctgtcccctgtttgcctggctggcccctcatatttcagcaaaaaagccagtggtggccccccacccttataaagcaggttttggttttta

SEQ ID NO: 626095 - DNA, 229 bp, Homo sapiens
aatttttatttattaaaaatttggggttttggttttaaacccaaaattccggctagcccctaccctttcaccaaagggccccttttagccccaaatggcctgttaaagggttttttttttaaaattaaaagattaaataaaaaatattaaataaaccctgcccataagggtccgcctattaggaattgaaaaggggggccccctaaaaaaaccaaaaaagtctttctta

SEQ ID NO: 626096 - DNA, 974 bp, Homo sapiens
  misc_feature (24)..(24): n is a, c, g, or t
  misc_feature (181)..(181): n is a, c, g, or t
  misc_feature (195)..(195): n is a, c, g, or t
  misc_feature (390)..(390): n is a, c, g, or t
  misc_feature (561)..(561): n is a, c, g, or t
  misc_feature (727)..(727): n is a, c, g, or t
  misc_feature (731)..(731): n is a, c, g, or t
ggtgggggatgtgggaaaagatgnggctgccgcacaatcccgggttgtccgggtcctgtcaatgtcacgttctgccattactgcaatagccacatctgtgtgtcacggcccaccctgtcgccagcttcatcatgccctcatgcctcatgggaaaggtggacgttcctcagtcagtgggatngtggccactgtgtnaggagcaacaggattcctggggcgatatgttgtcaaccaccttggacgcatggggtcacaggtaatcataccctatcggtgtgataaatatgacatcatgcaccttcgtcccatgggtgacctgggccagcttctgtttctggaatgggacgcgagagataaagattctatccgacgagtagtacaacacagcantgtggtcatcaatcttatgtggacgagactgggaaaccaaaaactttgattttgaggatgtatctgtgaagattccccaagcaattgttcaatgtccaaggaagctggagttgaaacaattcattcatgtttcacattctgaatgcgaatattaaagctcttctagatatngagaaataaggctggtggcagagaaagtagtgagagatgcatttccggaagccataatcgtaaagccgtcggacatctttggaagagaggatagattccttaattcttttgcaagtatgcatcggttggtcctataccccttggttcttgggctggaagacagttnaacnagcagtatatgtcgtagatgtatccaaaggaattgttaatgcagttaaggatcctgatgccaatgggaaatcctttgctttcgttggtcccagtcggtacctccttttccacctggtgaagtacatctttgctgtggctcacagattgtttcctcccattccccttgccgctttttggctatcgatgggtagcacagagtctttgaaaatagcccatttgagccctggataacaagggattca

SEQ ID NO: 626097 - DNA, 297 bp, Homo sapiens
tttttctgacccaccacggctcattgtagcttctagcctcctgtgtgctcactgcaatcttcccacctgagtctactgagtggctgggactgcgggctcttgacaccatgcccggttgatttgtgtattttttgtggagacggagtcttgccatgtttcccgggctggtcttgaattcctgggcttaggagatctgtccaccttggcctcccaaagtgttggtgattacagtgcgtgagccatcacatccagacaggactgaggtgttctgtttgtgaggcctttaagggtcctatt

SEQ ID NO: 626098 - DNA, 191 bp, Homo sapiens
ggttgttgtatgtaataacagaggcagtatgtacagacaaagtgggaggtttaatttcttggtctcttcctccttggataaaagtcttgattgatctcctaccttcttgggctgggaggcgctcttcacgtgcgcttgcgtgctatcctgtggtccttagaccctgcggggcctacagccgtggtcatgcc

SEQ ID NO: 626099 - DNA, 403 bp, Homo sapiens
aaatcccagctgaggaacattctaccaaatacctgaccaatactccttgaaatcatcaagatcatcaaaaacaagaaaagtctgagaaactgtcacagccaagggagacctaagaagacatgatggccaaatgtaatgctgcatcctagaacagaataaggtatatttaggttaaaaaaaaaaacgactaaggaaatctgaataaagtatgaacatagtttaataataatgttaatcttgtagggctgatatcaatagcagtttattaattgtggcaaatgtaccgtactaaatgtaagatgatgataataggggaaattgggtgtggagaatatgggaactctctgtattatttttgccatttttctttaaaacttttctgaagtaaaaattttatatcgaa

SEQ ID NO: 626100 - DNA, 375 bp, Homo sapiens
ataagacatagtttatatggacatacacttggtatacatagctgtaacacattgtgggtgatgctgtagtagcagccagaattaagagctccaggaccctgaaggagagctaaattcttgccgtggagcccttgtccaaatgctttttttgaggagccttcatttagagttgggccttacaggagtaagtaggagtccctttgttttagggtggaaaggaagtctagacagagatacagtgtgcgcaaggacataaaagtggccatgtacgtggtgtcagtcgcagtactgggaagtcgccactagattagcagcaaagtctgcttggcaggcagcagcaaggaggtaggacaggacatgcaggttggctccaga

SEQ ID NO: 626101 - DNA, 1679 bp, Homo sapiens
  misc_feature (1)..(1): n is a, c, g, or t
  misc_feature (1177)..(1177): n is a, c, g, or t
ntgtggtcccccatgtgggttgggggcgctcctgcactcgttttctcgtggggtgtgctgttgggttgtgcgctcacgcgcagcgccgtatggtggggttgtggcgtccagtcgtgtttttctcacacgatgttgggattggggttgagtatgtgggtggctggcgaggtgtatttgtgtcgctccccgcgtgcgggtgtgccgtccgccgcacccgcctacgtggggtggtttggttgtggagtgtattatggtgctgcctacaccgtgtgtgttcgtgcttggactagtttgtagcacgttgtggggtgggagggtgtgtgtctcgtctgcctccgcgccgcggtatgttctgtccttttcttcgtgatgttgccagcttttgtgggcgtggtcgcctccctatgagggtgttgtttgttgattggcgtcgtccgtgactgttttttggggtgccgccccagactgcctcctgcctctgggtgtctctcaccctttggtggtgtgcagcagctatctccgcctcaatagtcgtccgcctctcgacgcgccatcattgtgcgtcttcaccagcacgagttggtgctctcgacgctgttgcgtcagcagctcacgcacgcgttgtcgcgactgcgttggtccatcacctggcgtgttgtgctctctctgctggggcgttccccgctggtgtggagcacctccttcttcgcgtctggttctaccgcgggggtgtgtttgtcctccccccccttcctgtttgtatgagtggggggttgtttatatgggtggttgtgctccacacagctgtttttgctccccaccgctgtggggtgagagatatattctcagcggcggcgcccttcgcggatgatgatgagtgtgtgtgggccgcttgtgtgccaccgacagtgtcgttccgtagtagtgaacaacagcagtgtggtgttgttaccaccaccaccacagtggtgaggactcccctcctcaggagtagagcacctctctgggggcgcatataatattagtggtggtgtgttgggagaaccaccacccttgctctcacacaaggagaggagatagaggactacaccacacttctgtttctggtgggaggacaccacatcggcgcggctctctgtgagaagagggcaacacgagagatctctatagagagggnaacacactacaacacgggtgagatagagagcacacacgactctatcacgcgagtggacgtgttgtgtctcacacgacgagagagagtgatataagaggagatagaggggggactctctggtggtgtacacacaccacacggagaggagatagagagggcccactgagagtttctctcgggattcaccatcaacccctcttcaacacggtattccccaccacctcatattcacagtcttctcccacaatgttcccctctttcaattccacctctttccttacacacccttatccgcgccaccttccccaccacccccaccccgagcacaccccaacccccactgggaatgtggctccagaattcccggcagcgtggacatttgttcccaagggggccatgatttcccattgaaggactgagaccccttgaataataaaaaaataaaaatatacatcgagcattaatgtcggtctgagaagagtatgttcacctctgttccctg

SEQ ID NO: 626102 - DNA, 944 bp, Homo sapiens
  misc_feature (6)..(7): n is a, c, g, or t
cgatcnncccggtagaggagacagggtgaagagagggtggtacgagaccgaagcagagcatatcaatggctcgaggtggcgtgggcgccatttattacatgacgtgcgcggctacatggtgtccccccgcctgtgcccaccactgtgtgcaatgggcctgggtctcccagaggtaaacggtcctctcgggggctcccgccgccgatgggccccgcccgctggccgatgtgtgcatacgcgggcgaagacccgcaaacacaagggggtcgtaaaaacctggccgccgttcgtcggaggattaaacaagctgttaaaaaaagaagcatccacaacatgtgtgtgaggcagcgccccactaaccggggcggtgtttccgcgaacaagttcgcgtggggcaaccagaacggtaggagaggggctgtcccccctgctctcgccctccagctggggtttggtactcggttgtccccaccccacctggggtcttgtttttaaggggttgcacatcgactgcccgccagtctggaaaagcaacaagggtttataattcaaggctcgccaaaacatctgcgggcttatgtgcttgtcccgcgcgacaacttttaagtggcgttaggagcccaccccaatgtgtgaaaaacttgaaaatagaaatgcttttcggacaaatatatgagtttgtgacacttggcctcaaaatgtatgcgaattgttttttaaattgatggacttgcatttacgccgcctaacatggcatgtcatggtgctattaacattttcacaaggcgccatgtgttattagaaacctttgtgtttgcaaacatccggcgtgagtcacccgtgtaagacagtggtgggctaaaaggtagccccgggaagacaataaaaaattatagccaagatcggagaatttaaacaaaaaggttttttcttcaacaaaaaca

SEQ ID NO: 626103 - DNA, 362 bp, Homo sapiens
taccagggcagcctgcacatgtggctctggcttagctctttgtaagcaccctaaggttttggaaataaattttccgcatttgaaaagtgctgatcgttcacacttagtgcccagatcatctttaataaagctcattcaccactgtaattcacgttgccttggaaactggccgggcaccgaggcccgggtatgtaaagactcctgaaccatggttaagagggccgacatgctcatcaccgaggttcttactggtcaaatccgtgtcactgagagcatcacgctcaatggtaccactagtttgccacatataggatctaatgcatgagtccatgcatgataactatgtactccgggagaccgtg

SEQ ID NO: 626104 - DNA, 952 bp, Homo sapiens
  misc_feature (1)..(1): n is a, c, g, or t
ncggatatgtaaataataacattacacaatcgcccgaggaccctttcatatttgcgagagcatcctcggtgccactatgttcccgtgggggcacgaattcctatcagggtatactccaaagtttcatttgagaggcgtcccgcagggggtgcggacacacccctgagggcatggaaatttatctgctataaacgagtgtcgtgatgtgacaaactggataattccgcgtcccgaaggccccccgctcgtgtttcttcaagaggaatgcttcctcccgccgcctcccaaccgggatctctcctccttggaccgacagagtaatatctgcgtcaagttggaactcttcgcgctcttgccaatggtgttaagaaactgtaagataattccggggaataccgccaaaatagacgttcgtcctctggtggcacggaaccaggaaggtcccccaccaagggtctgtatattacatttccccccccgggcaagatgaatgcgtcagttataaacgacccggaacgttgctcccgtcggggagccagcggaactgttattccctggtctggccacttcccccggggaagtatcacaaacgcgatatcgaccacacccgagtggggagagagtagcgagttatcttatccacccacatgaatattaaagaggatgaataaacacccatagtgtacccaaagacggcgtgtatactattcttgtgttgctcagaacgtgccgcctccccactgggatgtttgcaaaaagagtgcatttactcggagcacgttctgtaaaatccgggcaaaagaacagctggggaagacataaaccccactcctggcgatgggggagccccattctattccgggcagacttgtacaacataccgttttatatcattatagccgcggccccgtttttcaaaacaattctcacacccttcattcttcaaaaaaca

SEQ ID NO: 626105 - DNA, 228 bp, Homo sapiens
tgccatgtacccaggctggtctcgaactcctgagctcaagcaatcctcccacctggcctctcaaagcgctgggattataggcatgagccaccgcacctgagcgacaaccttcatttctgactagctttatactgccaacgacctctgtcaactactacacgcggccactacctcactggcgctccctggcggcggctcagcgcacactgcaacaccactcctcagctg

SEQ ID NO: 626106 - DNA, 128 bp, Homo sapiens
ggaggacgacaacgaacggacggaccgtgggccggtggtcggcactcgaccctggggaccacctactcctgcgtcggcgtgttcaagaacggccgcgtggagatcatcacaacgagccacgcaacggg

SEQ ID NO: 626107 - DNA, 966 bp, Homo sapiens
ggtggtggcgggtacctgtagtcctagctacttgggaggctgaggcaggagaatggcgtgaacctgggaggtggagcttgcagtgagccaagatcgtgccactgcactccagcctgggcgacagagcaagactccgtctcaaaaaataaaaaaaaaaaaaaaattatgggtgaaaattccttattaaatccaggatgggctcttgagagaacgggggagaccattccgtggcctaacagtggttgaaaccccatttttccttacttaaaaattccaaaaaaaaaatttagccgggggttggtggcgggataccgtgttagtcctaagctaccttgggagaggcgctagagggcagcgagaaaaaatggggcggtagaaacctgggagaggggtgtggacgctttggcagtggagcgccaaaggatccggtgccactgggacctcccaaggcctgggcggcagaacaggaaggcaaaaggaactcccggtcctcaaaaaaaatctgtccatgcagcacgaacagaacacaacactgcgggggtggggaaacaactcccctataaaaaatccccagaggggatggggcgactcctgggaagacatcaagtgagggcgaaaaacccaatgctgggggtctaaacggtgggggggaaaaccccccatgtttttctacctaagacaagaggaggagcaaacaaaaacaacagagcaacagcaacaaacaaaaacaatgttgttgtgcagccgccgcctactggtggcgcccctcgagtagaaaaaaagctggttttattagaaaccagaacgagttgagtggtgagggagcgccgggggccgccaccaaagtgtgctagtagtggtacaccaagcggggcaaaacaagagggtgttgccacaagagaaaaagctacgcggtgaaaaacaaaaggagtgggggggagtactccccccacaagataaaagtcg

SEQ ID NO: 626108 - DNA, 666 bp, Homo sapiens
gaaactatcaaggtacgacagtggcatgtcatcgacactcaatttcatgtgaattttagcaaacaggacaaggatagatcatcagaggatcggcaatttatccgggtggaccggaggagtggggtgggctcaaggatctggcgtgggatggatgagctacctgtagagtagtctgctgccgctggtagtagtgacagtcaggtcagatcagtgccaacccagtctctgtttactgcttgaacagaattcttccttcccatgcttgggtactcgggtgacctgttgtgcagatgccggctgacctgaggagcaagaggtgagtaagaaaacaatctgcagggtccaaaagccagtcacagttcagattggcctgcccttcaacatctgggcagggctggctcctgggcagggtggggagaatagagagtgaagagttgacagaaagggaggtgggtctcagagctcgaacagaggccgatcgccgactctggagggtcgacgagaagagagccggtcagaagcagagcgtagcgagagcaggaggaggggggcaccagggggcgagaccagcaagcgaaaaacaaagacgacacaccgaggagagggggagagaggcagcgcacaaaggtcaaaggtcaaggggacaaagaacagaacgggaagccg

SEQ ID NO: 626109 - DNA, 207 bp, Homo sapiens
  misc_feature (8)..(8): n is a, c, g, or t
gggtgcangtaaggatagatggcgttggtaagggagtgcactctgagtgaaacctgagcatgacacagctgccgaggaaaagactgcacatggtcaggggcacagagtgtgccggctgtagagccgctttcaggacaatggaaaacattttcaagcaatactcttgaatacatttggactcaaagagggggcggcgagactcttgga

SEQ ID NO: 626110 - DNA, 698 bp, Homo sapiens
  misc_feature (100)..(100): n is a, c, g, or t
  misc_feature (179)..(179): n is a, c, g, or t
  misc_feature (199)..(199): n is a, c, g, or t
  misc_feature (223)..(223): n is a, c, g, or t
  misc_feature (226)..(226): n is a, c, g, or t
  misc_feature (235)..(235): n is a, c, g, or t
  misc_feature (262)..(262): n is a, c, g, or t
  misc_feature (275)..(275): n is a, c, g, or t
  misc_feature (312)..(313): n is a, c, g, or t
  misc_feature (341)..(341): n is a, c, g, or t
  misc_feature (353)..(353): n is a, c, g, or t
  misc_feature (362)..(362): n is a, c, g, or t
  misc_feature (368)..(368): n is a, c, g, or t
  misc_feature (464)..(464): n is a, c, g, or t
  misc_feature (486)..(486): n is a, c, g, or t
  misc_feature (506)..(506): n is a, c, g, or t
  misc_feature (561)..(561): n is a, c, g, or t
cgggcgcctcggatccgcccccgggatggcccgcctcctcccgccccgcgtgaggcacgcacagggcagtgcgcgggtgggtgggtcctagcagcgcggnctgacgggaccaaggcggcgggagtctgcggtcgttccctcggctgtggaccgggcggcacgcacgcggtgcagggtancatggcggatgcggaagtanttattttgccaaagaaacataganganaaaggagcnggaagtcattggcagaagaagatgtangccgaaatacaanacgctgaagaatttcttatcaaaacctgaatccaaannttgctaagttggacacgtctcagtggcncccttttgctanaagaatttngataangctgaatgtaaggacaacacactatacacctcttgcatgtggttcaattcctctgaagagagagattggggactatatcaggacaggtttcattantcttgacaagccctctaacccntcttcccatgaggtggtagnctggattcgacggatacttcgggtggagaagacaggcacagtggtactctggatnccaggtgactggttgttaatcgtgtgctagaacgagccatcgcttggtcgaagtctacaacagagtgcaggccaaagagtactgtggggatcgtccggctgcacaatgctattgacaggggggacccagcttcctag

SEQ ID NO: 626111 - DNA, 142 bp, Homo sapiens
gtctatacgtctcatactctgacgttctgctgccgctccttggtcttctgcagttcatcctccttggcctgcatctcctccgtccgtgccgtgtgaccgtgcagcagtggcttcactttggtgaaaacgcctccacgcaggg

SEQ ID NO: 626112 - DNA, 310 bp, Homo sapiens
cccggcgtcgcgccatccttgatacgaggagctgaggatggatctggtgaccatcggtcacattaattcccatgaggtggtgaccttcctgagcaactatgtgatctgcgcttgggacagcctgcgtctcgtgtgtcttgccttctggaagactatttttccaaactgcaggaccgataatccgcaccttcaatatggattgctgctcctcctcgcagaaaccgcatcattgccatagtctccatggtttcctggaacatatcattatcctgtgctgctgtcgatgggcaccaagtccattgggggttac

SEQ ID NO: 626113 - DNA, 215 bp, Homo sapiens
tcgggtaacaggatatggcagaaggatataccgggactctaacgggacaggcggattaaaaaccgggcagccggaagcctatgtgcgcagggatttctcatggactaacaacatttcccccgcatcccccttccaaacaacaatcccccgtctagctaaagactcacagacccacggcgggtcacatgttcctaggagcttctagacaggcccgt

SEQ ID NO: 626114 - DNA, 479 bp, Homo sapiens
gatgtacacacgcttagtctggtgcgtcctgtcatcgctcctcatagtccctgctcagtgagagagctacggcacgagaatcgcttgtccctgtgatgcggctgttgcagttcgccatgatggcgccactgtactgcagactgagtgacagcgcaacactccgtctcacaataccacaaaatcactcaaccaaacggattttcactgaacactgaaagcataaagaggaaaaaaacacgataaaagggaggagatccttttgaagcatttaaaaaataagctgatcgattaccttgtgatctgtccttgaatggctaccgtataggcctctgcgaaaacggtccagcatggtgcaattaaagtagtgagtgaggctataagggtaccagagcaaattagcaattgcattcaaaaagagatagcgacctagaaattacgaaaccttgacttaggactaagtctgaaaggccttaacaatg

SEQ ID NO: 626115 - DNA, 224 bp, Homo sapiens
caagcgtttggtcgaaatgaagaattagaaatgtcgtccgagcaagaaataatgagtgacgaggggtttagacgggttgcaaagggcccgagatgtttggagatgccagaaaaggatcgaaaagtcagaattgacaagagatttcgggccatgtttcatgacaagaagttcgagttgaactatgccgtggataaaagagggcgcccattagccatagcactaca

SEQ ID NO: 626116 - DNA, 150 bp, Homo sapiens
gtaggtggtccgaggagatagcaggagtacattcaaatattaaacaactggtatacaggaaaggggacagacactggccgtgagcagtggcgagaaatatgctcagcttcaagctgatctgtagctcccgcatctgtcctgcttattcct

SEQ ID NO: 626117 - DNA, 316 bp, Homo sapiens
gcaagtagtaacccttcatttcttttgggttttaatttttttttttaaataaatggaaatgggttctccctatgttccccaggctggttttgaactcctaagctcaagtaatcctcctcccccagtttcccaaagtgttggaattgtaggcatgaccccccatgcctggctgcaattagtaagtcttcagatgcttccatccccaccccccatccgatgccacccccatgaatgcccctcaccaaaaactccctagttgaatccacccaaactccagccccatgaaaaaaaaataaaattgttgtttgagtcccta

SEQ ID NO: 626118 - DNA, 126 bp, Homo sapiens
cagacctcggaggtgcttgagataatcatccgctgagggtggaaggggatagagcacacactcgtgaaggtgtctatgaggctcagtggagttatcaatatatagaaatgtagtttgagtttggag

SEQ ID NO: 626119 - DNA, 1699 bp, Homo sapiens
tcggactcggcgcccagcgcgcgaagcgctaacccgctgagagtttctgcagcgaagatctcaggtacgatctggaccccgctgagaggaactgcttttgagtgagatggtcccacaggcctggatggagcgtgactggtaagcatgcgggagggtagtgggagttgtgcttctgacttggtgccttgaacaaggcttccacggatcattcgctatgagatcccggaggaaacgagagaagggtttcgcgtgtgggcaagcgtggtcgcgaaccttggctttggatctcggtagcctctcagtcccgcaggttccgggtggtgtctggtagctagccgaagattctttgaggtgaaccgggagaccggagagatgtttgtgaacgaccgtctggatcgagaggcgctgtgtgggactactggcctcttgcactgtatactctggagtcggtacgtggagaacccgcgtggagctgttcagcggtggcaagtggtgatccaggaccgtcatacgaacaagcaatccgtgctttacctacccaggatatgacatggagattagcgaggccgtggctccgggggacgcgctttccgcatcgatgagcgcgcacgatcccgatgtggcgaagccaccgtcttgacaaaaccttatgagcctggaggccgccacgatggaactacatatggccgccaatcgaggtggcagaacacccgagaagagacaggagccacaggtacccggcaccacctagacgcttgcgagcgcggtcccccggatacgcgaaaacggcgaagacaaaactacacacaaacgaccagacagacgctgataccggcacgcgaccccacacgcgactaacaccacgcgcagcgcgccgttcatctcaatctccggatgtgtgagtcgcaagatagatcaaaccgtcccgcgatctaatcacaccacgcacctcagattatctcaggctccactcacaacatagttatgctcacttaccacatggttgcatacactatttatactcattgcagttagattccaccgccatcattatagtacatctattacaacagcagcgcgacctctctattactcaactctagttaagatatattactttccgactcagttcactagtcacacaaccgacacgtctagcagaataaacaaatcaataagagaagagtctagatcgaagagactgacagctacgaaacggacgatacgaaaaagcaccaacacacggagagaaaagatacagaggagagaaacgacagaacagcactgacaagataaaaacaagcaagaaccaacaaacagccacgagaacgacgcacgacagagcactagcagaaagcacacaaaagaacaagagcaaacaagacaaaggcaacaaaaaacaagcagacacacaaccgacgacaaagaaaaaaacgacacagaaagaaaagaaacacggacacaaaaagaaacaaaacgcaacagagagaaaaaatcgagacacccaaagaaaaaaaaaacaaaaaccaacaacagcaaggaacacaaagagaaaaaagaagaacaaaagaaagcaaacaagaacaaaaagaaggaagcacaagaaaaacagagcaacacccacgctaacaaacaaaaaacgcacaaaacagacaacaagacgagagaacacgaaaaaacagacggcacaaagccagag

SEQ ID NO: 626120 - DNA, 149 bp, Homo sapiens
ctgagggaaggggtgtaactgctaagtgtgggtaatctaggcagttcctacaaattcacaaacacttaagtacctgggcctaggccctctccctataggaatgagtcctagcaaatcggcttacccctagcagataatgctttgcacct

SEQ ID NO: 626121 - DNA, 1239 bp, Homo sapiens
agcagctggtacgagccggaattttgggcatgttgcaagtcttttgctggtggagggtcttaccttgatgctgatggctgctgactgatcaggatggtggttgtcgaaggtgggagtggctgtgatgacttacccactgaagtcttgaatccctcaaagtcattgatgagagttggactcagcttcttccagactcctgtgaatcaacattttgaaggatatttgaccttctcccatgaatcacaagtgttcttaatgacataaatggtgaatcctttccaaaaggttttcaatttgcccacatccatcagaggaatcactatctatggcagctatcgtcttatgagatgtatttcttaaataagatttgaaagtcagaattactccttaatccatgggctgcaaaacagatgttgtattacgacaggcatgaacaataacattcactctgctgtgcatgtctatcagagctcttgcggtgaccaggactaaatcactttcgctacttgtacatatcacaatctgcgacagtacatcatagaagtctggcgacgcaacgggatctcggcaccacaatggactgccattatcggcattcctatgcagctaaaaccagcaacgacgagtatctctgtcaccgaaggtacccttcttcgattcccctctgcttccatcgctcttgcgcttgccctctgctgcttgctgcttcccctcatcgagcttgcctcttcggtcttaccctggacccctcctgactctctgcccttactttcccttgtatggcgccttccttgtccctcctcctcttccgccatccttcgccgtcgctataccgcgctctcccgtatccgtcactgatgaccgactccgcttaccacccgccggctctccgttctgctactgcttgagcctcccgcaccgacgtcgctcgtcaccgcgccttccctgccccctgctgctccttcgccgcctcgcactgcttcggtctgcgctggttcggtttgtgcgttgtctctgcgctcggtcggggtgcgcgtgcactcggggatcgtcactcgctccgcctcttggcttgcttcgctctggtgccgtgccgagctctggcctgagctcgctttgggctggctcctggctctgcgctcgccgccgtgacttcgttattcgctctccgtctgcctctgtctggctgtgccgtgtcgcacggcttcttgttggctcgtcttggcgcgttgccctacc

SEQ ID NO: 626122 - DNA, 1575 bp, Homo sapiens
ctacggctaggtagcgaggcctgggttgtaggagagactagtctcagtttctatttttgtttaattgtacagtgaagggcaatttattaagcagaaaatattgggagggaatctgggtcacagacggggaccgacggtgcgaccccccttcctgcgagggctggtcagaggggagtggggggtgacattccttcaactccgcccgaatcttcaatacccgaggcgggcaagtggctcgtgatgggccagacgtgtggcccacaggtccagggggtctgggatccatagtttccctccgtggtggccgcggagtttggagtggtgtatagggcgggggaataccacagctctccttgggcacactcttggggccaaatgtccgtggggcagcgcaacatataggcagcatatagtgggtgaggatttcatcttgcgggtcgtggccttatacctttcattccgcaccaggtcacagcgggcagagtgggttctccttgggccaggaaagactcaggtgacagtggaccaaagaggtggtcatgtgaagggagtgcaagagaatagtggcagaaaaccaaattacatttctcttcctttcgaggccaccgtggaggttccggaggcgtgagatgaccgtggtatctctcctatcgtttgtcctttcgcccttcgcggagggtgccactttctgtgcacgttcgtactccagaacgtccggaggagaaacgtagggtctctcgaaagggtattatatgaagtatacaagtgattgtgtctatctattgttttgtaatttgtatgttgtatgtgttattatcattctatttcatctctcctttgtggctgtagtggagaagaaagaggaggggaggggagagcgcgacaatatacgacgaggggggcggacgtaacatcgccaaaattcatgatgagacaaaagggagcgaggaggacaacctcccccccagcaagccggacgaagaggcgcgcattggagtgccgggcgcgaccgagggaccaacccacccacacacatgagcagagaccgaagacaccaccgcacaggaagtaagagggcacgagtccacatacaacgagagagacccataccatcgaacgaaagcaggggagaccgaagtagagtgagagcgacactgcggagacccaccccacccagcggggtgaggggaccccaacagcctgtgaggaccaaacaacgcgcaggcggggagaaagcacaacacggcagcggcgagaacgaccacccgagggaaagagaaacacacgcagggcaacgacacgggggggaaccacaccacccgatgggggcgaggccacccaccatcggatgcagcacgacgggggccacgatacccgccggtgtaaaacattcacaccgcggcaccgcccgacgcgggcctcgagcagatcgcactgaaagggaggagagagaggcccaacggtgggggagcaagccgcgaggcagaagaaaaaaccagcagcagatcgtggaggaggacgcgggacaccacagtgcggagaacaacctagcacaacgtgcgtgggcgaagccgt

SEQ ID NO: 626123 - DNA, 110 bp, Homo sapiens
agatgctctacaggtgtctccgatggtgtttgttgagttggcacagatcgagattaggagttgtcacttcgattgtcgaagaggtatctctaggccctctcggtaatgca

SEQ ID NO: 626124 - DNA, 762 bp, Homo sapiens
atcggaggtggcaccctgggatgccggcagtgagcggagctgcgtgatgccgactgtgtctccgcgtcggtcatcggtccgatgcctgcgtcgttctgtccttccgaacgcacatcttcaggagcagccgcgagggtggcatggtgaagcgagcacagacatggctggagctggaggagatgcttccgacaaagtttgccatccatggtgaaccccaaggccagtgggcaagaagatgaatggcgaggaactgggccaagctgtgcaaggactgcaaggttggctgaccggaacatgtccgtgacatgggaccgaatgtggacagtcgtcttctccaaacgtcagaggggaagtcatgctctgggtcatcaactaatgagggagttcaaggaaggcccatggaagaagctggacgagcaagcagattcaagggcgaagacgcaaggaggaggcctatcgcatgcccatctgccagctggatggcatggcacaagagcccagccaagtgtgggcgtcactaaatgcaaaaaacagtggggtgctggtagaaccggcctgacggaccaccagcagaatacaccgggctcccacaaggaagcgcttcgactgagagcggcaatggtcaagggcattagccgggaacggcatggacaatcctgggacgaacaggtgtgctaacgttgagcgccctagcaagaacttgccagggcaccttaccgatggccaagggtgacaggaccgttgagggcttgggcaagaacc

SEQ ID NO: 626125 - DNA, 677 bp, Homo sapiens
gctgaaattctttcacaatcagggtgtagaggaaacaacttacaaagaatcaagaatcacctctcagtcagagcatggtggctcatgcctgtaatcccagcattttgggaggccaggccggaggatcacttgagcctaggagtttgagaccagcctgggcaacatagtgagaccctgtccatacaaaaaatttaaaaattggccaggcatcgtggcccacgcctggaatctcagcactttgggaggccatggcaggcagatcacctgaggtcaggagttcaagaccagcgtggccaacatggtgaaatcctgtctctgctaaaaatgcaaaaattagccaggtgtggtggtgcacgcctgtaatcccagctacttgggtggctgaagcaggagaatcacttgaacctcggaggcagaggttgcagtgagctgagatcatgccattgcactccagcctgacaataagagcaaaactccatctcaaaaaaaaattgtttttaattaaaaaatcagccaggatggtggtgcacgcctgtagtcccagctactcgagaggctgaggtgggaggattgcttgagcctggaaggttgaggctgcagtgagccatgattgtgccactgcactccagcctgggtgacagagggagacctggtctcaaaaaaaaaaccaaaaaaac

SEQ ID NO: 626126 - DNA, 175 bp, Homo sapiens
  misc_feature (49)..(49): n is a, c, g, or t
  misc_feature (69)..(69): n is a, c, g, or t
  misc_feature (152)..(152): n is a, c, g, or t
taaagttgtcatccttccacagaaaatgatagaccactagaaatacacngttattttcgtaatgtaaanttcaagtgttacgcttttagaattctgagattagcctgcttttaggatgagtcgagatagccgtcgttgttgtgaaatgatgntagatcataccgtttgggcgttt

SEQ ID NO: 626127 - DNA, 126 bp, Homo sapiens
tccagctgatatcgtttttgtctctttctaaactgtttccctctggtgtgtcctcactacctggcatagtgccacgacacacaagtagttgctcaataaatgtgttgactggctgttgcagaaacc

SEQ ID NO: 626128 - DNA, 130 bp, Homo sapiens
tggtgattagaggatctcgggagccttaccctggtctagttctcggtagctgggtaactgggcaagtcacttaaccctttgagcctcagcttcctcatctgcaaaatgggaacagggtaaggtctcccgg

SEQ ID NO: 626129 - DNA, 365 bp, Homo sapiens
cgcagagaatcgctgggcccgggaggcggaggttgcagtcagcctgaggtcatgccactgcactccagcctgggcgacagagcgagactctgtctcgcaacaaaataactacgtaacttcacaggcttcactactggacattactcgtgtgacgatcagttctcacttctctgagcttaaattcccaggaactgcaatactgggtcatatcgcacttacgagctgctgaattctactaagaaaactgtcaaatcgtttcctagagtggttttaccattttacattaccactaacaatgtgtatcagttatccagttctctgtatccttgttggcatttagtgttctcactgcttttttattttag

SEQ ID NO: 626130 - DNA, 683 bp, Homo sapiens
  misc_feature (666)..(666): n is a, c, g, or t
tctctaatttaaacctttatgggaagcttttaaagttttggtcaaaacatggagtgcttggcccaatcactggatagggatatgggcaccaatggagggggtaatcaatggaatatagtctccataagaactattttccagaagtctcttctggtggtagaaagcagtcacgagttatcttaagtggtcaaccagtttatatacctaatcgggtttttaataacttctggtgaagagcataatcaaacgggaatttgcttttctcaggggataatacaccagagaaaacagatgtggcccaaatttttaaaagaagtttattcctggagaagtctcatattcgggtggacatctggcatggatttcaggtatacactggatgggtacctggtatatccataagtcatattaaaccattctctccgggaaatcagggtacagtcactggcccagaaggtcactgaggaaacaagccacatatgggtccggcacaatggctgggtggtacaaaggaatctacaagggaaggtgtggtcaaaattatgttgctcctgttggtcggcatcactatcgtgacgttactgtgttcgtagaacgtgccaaaaccgcttatttcacaaactggcactttcttgggccaattgaatttatgcttccaaattatcnaggctgttgaacagcag

SEQ ID NO: 626131 - DNA, 315 bp, Homo sapiens
ttcttctttcctcctcccacccttctttctgtcattcttctcccctcatccttcatttttcctccctccctctccttgacttattttgctgagcatgataatgcccagtttaatttgtttccgtttcatctttctttgtgttgaattcactatagacacattatagacacatttgtagacacaccctgtttccattatctgttcacccttgatggacttgcagatcccataccctaattattgtgaatagcactacaataaacacaggcattcaatattatatttctactatgtactgattttgattgtcgacgc

SEQ ID NO: 626132 - DNA, 687 bp, Homo sapiens
attctaagtggagacgaggtcttgctatgttgcccgggctggtctggaactcccagactcaagcgttcctcctgcctcagcctcccaaagttctaggatttacaggtgtgagccactgtgccctaccaaataagcagtcaccctcattccctcttttccccagacctggacaacccccaatccgcattctgtccctgtgggtttgcctgttctgtacacttcatatgaatggctcatacaatgtggggctttttgtgtctggcttctttcacctggcttcatgtttttgaggttcgtctatattgaggcatgtatcagtaatccattccttttaatggctgaataatagtccgttccttgcgtggatggaccacaatttatttgttcatccatccatctgtatacattgtttttgtggacctgtgtggctgtcataggcaccgggccctctagcactgttatgaacaagtagcgcgtgaatctttatctcaggagtggggaaacaccaaccaaacactcccatacgcaaatatcttggacgaaaaccacggtagaaatgcagagtggggctgagcgcggtggctcacgtctgtaatttcagcgctttgggaggccgaggcaggtggatcatctgaggccagcagttcagaccatcctgggcaacatggcaaaaccctgtctctattt

SEQ ID NO: 626133 - DNA, 419 bp, Homo sapiens
ccacgcgtacgcatccttctaaaaaagtccattaaaaatgtttcttgccaggcgcggtggctcgcgcctgtaatcccaacactttgggaggccaaagcaggtggattacctgagatcaggagttcgagaccaagcctggacaacatggtgaaacccttgtctctactaaaggtgcactgaattgtgctgggcagttggtcggtggtgtgccttagtgatccctagcgtgagtcccggacggctgcagacaggcagaatcagcttgagaccttggcgaggtcgcagggctagcgacgtgaaagctcaggatcgatcgccagtagcactcgactcctggactaggtcgacgagcagcggacgacatcgcagcgtacgacatccgttactacaataaaagggggactaaaaaaaaaaagggg

SEQ ID NO: 626134 - DNA, 219 bp, Homo sapiens
tgcatactgggcgttggaaagcacgtctcaagactgtagctgttccagacttagctgcagatgcttacctaccacggcgtctccaccagaaaaccatcgccaggtcgtgcgatcagcttgtgacttacaaaccgttgtttaaaagctgcttacatggacttctgtcctttaatagcttcccctcggttgtggggcgctctgtgtatgcctgggatcctt

SEQ ID NO: 626135 - DNA, 303 bp, Homo sapiens
tgaaatatgacgacatttttaacgaaattgtataaactattttcttaaagcacacttcctccactgccagagatcttgaatagcctcttggtcagtcatccggaaacaattcttcacataattcgatgaatttggcttcccctttgggatgagaaccacctttgtctatacttgtcttgcatatgtgcgttaatgtcttctacataacttacgtcctttcggtgtcttaatggcacttctttcctgtctcttgaaggattcttgtccttttgatcttgtgtgttgatatgggtcgacgatccg

SEQ ID NO: 626136 - DNA, 928 bp, Homo sapiens
gcactgggaccaggtaaaactgccgcctttgccctgcctgtttggagcgtctgatttataaaccccgccaggctccagtcacccgcgtgctggtgctagtgcccacccgagagctgggcatccaggtgcactctgtcaccagacagctggcccagttctgcaacatcaccacctgcctggctgtgggcggctggatgtgaggtctcaggaagcacgtctctgcgggcagcgtgatgatcactcatcggtcgccacccgagggccggatcgatggatcacctccatgacggcccttccttccacctgagcagacatcgaggtgctcatcctggacgaggctgacaggatgctggatgagtacttgaggagcagatgaaggaggtcatccgaatgtgtcccacaccgcagaccatgctcttctcggcaccatgacagacgaggtgaaagatctggcttctgtctccttgaagaatcctgtccggatattgtgaacagaacacagatgtggctccctttctgggcaggagttcatccggatccggctaatcgtgaaggagaccgggaagacatcgtggcagttgttgacgaggaccttcactgacatgtgatgctgtttcacgcaaaaccaagaagcaggaccacgatgcaatcctacctggggctcatggggctgctcggtgggtgagctccattggaagttgtcacagacgcagggtggaggcctccggcgtttcaggatgacagattgaatctcggtggcatgatgtggagccggggacttgacatgaggggtcgaaccggacaatccaatgctatacatcaagctatgtcacggggggcaagaagggtggaggaggcgcacctggtggacaacaacgagtaccagactcaaggagctgagagcggacccaccgccacggacacgaag

SEQ ID NO: 626137 - DNA, 128 bp, Homo sapiens
cgagaaagagatattactaggcatttctgtcactttccccctagagatccgattgcacccctgtgggcccgtagggccctctcgcagaccctgggtgagggtgtctttgtgaggctccactgcggtct

SEQ ID NO: 626138 - DNA, 603 bp, Homo sapiens
ccatggtatcagcagagaaggccgtgatgttaccaagaaggtgaaacactcaaggacagtgaatgccacaggcctctgctcatagctgtacccatgttgctaaagatgggaatgagctatcaatgtctaccctatctccttgttacatcctttttacaatatccttgggtgatgcttcttttcatggggctattggaaaggctccaacaccaaagagccagaccagccatttacgaatagccattcaccatcggactgaggaacctactgggagagtgtgaatatgttggtgtttcctgacttgtgctcagagcccagatcaaaacactggcttgatcttactttgaaacatcgacctcaggtgcagcagtgtaaattctacaccaggaggtgggttggactcaggaagtccactacaagagcagcaggccatggtagaaaatgatctgccatacccagtggcaaaatctgggccagtatcctaaggacccactcagtagcccacagaccgattcttaataccttcacaatccaggcttgttggtgctacttcaaattcacaaaagaaaggggcttataataagacaagcactgatacactcc

SEQ ID NO: 626139 - DNA, 340 bp, Homo sapiens
  misc_feature (123)..(123): n is a, c, g, or t
acattcctaaaaacatattttatggatattatttcctaatcctcccaattatcccatagtcttgcaaggtattaaaaatgtcttttgtggccgggcgcagttgctcacacctgtaatcccaanactttgggaggccgaggcgggcggttcacgaggtcaggagatcgagaccatcctggctaacacggtgaaaccccgtctctactaaaaatacaaaaaaaattagccgggcgcggtggcgggcgcttgtagtcccagctactcgggaggctgaggcaggaaaatggcgtgaacccagcgggggggagcttgcagtgagccgagatagcgccacttgcac

SEQ ID NO: 626140 - DNA, 256 bp, Homo sapiens
tattaaaaagaggcctggaactcgaaatgggtggagtccaccacatctcagcaattgcggatacccctccacctgccaagctgcagttcatggcaggtcaatctcagacctgctgcgctagaagggagcaaggctcggttgctttggaacctgctcagccaggcaggggaggaatattcccgggtctgccgattgcaaagacttggggaaaagcgcagtatatattgcaggagtgtaccatttctccaggtacaga

SEQ ID NO: 626141 - DNA, 796 bp, Homo sapiens
  misc_feature (531)..(531): n is a, c, g, or t
  misc_feature (795)..(795): n is a, c, g, or t
gttgttgttgtttttgaggcagagtctcactctatcgcccaggctggagtgcagtggcgctatcatggctcactgcagcctcaaactccccaggctcaggtgatcctcctgcctcagcctcctgagtagctgggattacagatgcctgccaccatgcctggctaattttgtatttttagtagagacggggtttcactatgttggccaggctagtctcgaactcctgacttcaggtgatctgcccgcccggcctctcacctgccaaaaaaaaaaaaaaaaaaaaaaaaaaaaaaaaaaaaaaaaaaaaaaaaaaaaaaaaaaaaaaaaaaaaaaaaaaagggggggggggcccaaaaaaaaaccccggggggggcccaagccccccgccgcattttttgatacaaaggaagggccccccctagagggggcgcacaataaaaaacaacgagaccgaggggcgcgaggcacataaaaccaacgacggcaggcaagcgggaaacaaaacagcagtgacaacggaggcgagccacnattggggagagaagaaagaccacccccacactgccgagggggcggagaaacacaaaggggggagacaacacacctcgcacagagaagtatatcacacccccccggggagcggcaaacaaacaaccacggacagacggatcataagatggcggaacaaaccaccaggcagcaatcagtggagtgcgaggcagagaaagacataggtgcgccaacagcgaattactagtgtacaacaattttcaccgacgggggggagataagaana

SEQ ID NO: 626142 - DNA, 1462 bp, Homo sapiens
ggtcggccctgcctcccggaccaccctgcggggcgccaccagcgatctggaggtgcggggctcggacctccctgcgctcctggctgacggaccgagaacgtgacagctgtccaaggctctgatacctatgccctgcagccatgagggcctatgaagctggggctatcccatgggagctggatacctaaggttggagctgatgcccctggaagacaccgcaggacactgacccaccgcatgcatagatccagtggatacatttcatggtaagcaacatgagccagtccaataccatacatcaaaagagacctagtccatgacacagtggcacaggcacgcaacaattacagccatgagaacaccaaagatagtgacacatggatgacacaccagggataatcagatctagatagggcaattgacggaatcaacaaataatgatgcaacatcagcatgatagttacaagtcgaattgggacaccacgtggagacttcatagagcagagcaatgagacattaccccatatacatatcaccgacacttgaccaaaattaggagggatgagtatcatagaagcatcacaaggggacaaataacatagaagtgaggcatatcccaatcccatttcacccataagaataacattcaaacagtgaaggagcacacgattgcacaagacttaccgacccgcgatatgcgccgacacaaagtccccacattttcgccatatgtgcgctgggattgaattgcaaagacgaccagcaggctgtcacagcgattaggaccccaaaggcgacgaggtttccaagacgcaacagggagggaggaatccaaacaagatagagataatacaatataattagaaaaggcaatattatacaaaggttaacaagcaaagagatagaataaagaaaaataaagagggcactcatagacgaggagttggaacacaacgcacggtaaaggacacagggaaacaagtgatacaaatagcgtagtatactcgtagccgagaaagtacgggacacaacgaggtgaacaaaacaacgcagaaatacccatgatgggaggcgaacgaaaaaagatgacaagaacaagcccgaggaacaactagaatactgaaacaagaggccacgggagagggctgtaaggtgttgatggatggtgggtgagatcgatgagcatggtgtagttatagtaattaactctaaaataacaatatatagaaatctatggctactacaattactaattcaccattcacttaacaccactatagcatagtcagcaaatactgagatatagacataaacacaacactattacaatgagtataatatgataagaaaacacacgaatacaaaagatagtagataaatcaacaatgaaaaatacactcctaatgcaaaccgcatcataagatcaaaccgaatcataaacaacaacattagcatacacaat

SEQ ID NO: 626143 - DNA, 550 bp, Homo sapiens
gcgtcgacgaaaatcatagtgcagtcatccctcactgctattggtgagtgttatttacgttttactcttttgtgctctataaaacagtttacaaacatgcagttaagtataaaagttatttaaaataatgaggctctgggaaaacagataagaatagaaagtccaaaacttggtggaaaattggagcacaggaaagttggccataatcacacatgtggtttttaaaatcaagcaacagttttgactcttagcttcttgaacacttattgtctttaaagaaaagtaataccagcttggcattaggtttgaaagagttttcacatagggagtggtgagggatagagtaggtcccagcagcgtccctttaacactcactcacataccatgtttctgaaagttatagattttggcatttcttgttagaacttgccggcatgctgggcgcagtggctcatgccttaatcccagcactttgggaggcaaaggtggatgatcactggggtcaggagtctaaccaacccaacaacatggcgaaaacctctcactaaaa

SEQ ID NO: 626144 - DNA, 264 bp, Homo sapiens
ataatcccccactctttataaggggctggtaaggcagagtattggacagcaggacttctttggccagttagccctcttaggagttacctttgtttaaatagacccagaacttgtatgaagggaggaaataatggttaatcttaattacaagcggatttagccatgaatggtttaggcttttcctgggggtattcctttaggcacagttgaggttggacagggccagcatgcatatgtctctctaaatgtctgccctgggtattt

SEQ ID NO: 626145 - DNA, 429 bp, Homo sapiens
  misc_feature (157)..(157): n is a, c, g, or t
ggaccagacttgcagcctaaacgtgatcatgttctccatgtgacattccccaaagaatggaaaaccagcgacctttaccagcgttttcagttgccgtgtgggtaacattcagatatcctgggattgagtgacacatcaggcatttgtttcccttagnccagcccgaggcaagtagaagagttgcgtgtcaataccaggcaagatatggcagtaaagcttatcggatccgaaatcctatgcttggaatatatggggagcaaatacaggcaaggagacagctagatcgaaatcagaaagttggactgggaagattagcttggagaggcacggctgtacagcgaataggggttaaacgccccagtgcgatacccgtacaaccgctgcacgaagtcactattacgcgcaacaagtagttttgacagctcgccc

SEQ ID NO: 626146 - DNA, 477 bp, Homo sapiens
tcccagcacatcaaagcaatcagttagtcactccaacacaatcattcatcatttcaagcatgctcaacaagcacacacaacaatgcaaatgtcacatcatttttttccaacattcacttcctttattggcactgtgtcccagaatttctcacacacagtctggccttaacccacttttcaagataaacaaagcttatttataaaaaaatctcctagaattctcccaataaaatttcactataggatctatcataagtggtcatagcctaatcacaatggggacacattccaacagagaccgaaaatatattagggcccaaaccaggggcccaagcaagaagctgtgggtgaaacacatgggtaattaaatagggtaaagccccccaaattttaggccctgtgtgggacacacaagacacacgcgttttttcacaaaacattttttcaaagcaaaggcggcaaaagaaacaggcccaa

SEQ ID NO: 626147 - DNA, 102 bp, Homo sapiens
ccctctatccttagatgctttgaagctgtggggcgacctactttcccttagcctttaactggacttggcgtcactgtagcctttatcgggggttaggcttta

SEQ ID NO: 626148 - DNA, 161 bp, Homo sapiens
tctgaggatctcaatttcatttcccaaaggaacctattcccatcaggagtattctccccattcctcccatgctccaggccctgtaactactaatctgctttctgtctctattgatttggctgttgtgggcatttcagatcaactgggattatatcgctgtg

SEQ ID NO: 626149 - DNA, 1187 bp, Homo sapiens
gttagccggcagaacgacaggtgtcgtgaaaactacccctaaaagccaaaaagggaaaggaagaagactcatatcaagcattgtgcgtgcactaggacgtagattcgggcaataggtccaccacctactggccgagtctgatcgtataatatgcggtggcatcgatcgataaagaacctatctgaaagaatttgagaaggaggctgctgcagatgggaaagggctccttcaagtatgcactgggtcttggataaacatgaaagatgagcgtgaacgtggtcatcagcattgatatctgcttgtggaaatttgagaactagtaagtgactaggtgactatgattgatgtccctaggaacacatgagactttagtcaataaaccatgattaccagggaccattctcaggctgacctgtgctgtcctgactcgtggctgctgagtgttggtgaagttcgaagctggtatctccaagaatgggcgagatccgtagagcgatgcccttcgtggcttcacacactggtgtgtgagaatcgaattaattgtcgcgtcgtcacacgataatggattccactgagccacctacagccagaagagatatgaggaaattgttgaaggaagtcagcacttacattaggagaagttggtagaacgcgagagagtagcatttgtgccaagtttctggtggaatggtgacaacatgctggagccaagtgcttaacgtggcctgggttcaacggcatggggacaggtcacgcgtcaggatcgggccacgccagattgggaaacaccgctgctatgaaggcctggggcaggattccaaccacacaacctcttccaaagaaagagccttggcaacgcgcatccacgcaggttacaaccactgcggggacatgtcaaggcgcatcctgcacgcagggagcaaaggggcgccaaccggagggcgggggcgaactgcgatacaaaaacgaagaagcggagacacaactagagacgtacacaaaggtagtgagcccacgagaaaaagagagcaagccaaaaagacgccagacggatgctgcacagaggtagaacgccaacacagggaaggtcgacacgaaactaaaccaacaacgactgactacaaaaagcgcaagccacacaaaaacaccagctcgtggcatgcaccgctcgtcgcgccagcactact

SEQ ID NO: 626150 - DNA, 1364 bp, Homo sapiens
ggacagatctgagagagcagtgagttcgtcgagttcgtgctccgtctcgtccatgacttccttgagctatcgccagtcgtcgggcacggtcgttccttttcgggagtgcctgaggctggcggctccgtgccggtggggggccagcggggtcgccttgacgctgctgccggaggcattcatcgggggcctccgttgggcggctggcgtatcccgtgtgctcctgcccgcgtttgtgtcctcgtccgtcctcgggggtgcctacccgcggcggcttagggcgagcagatccatgaaccagcgttccgcacggtgtctgcctggcgtggcaacgaggagagcgtaactcaatgccaggagagcttcaaacgacgcgacatgagatctccataccttggcaccacacgttgtcgcgccctgtgaaggcgggcccaacagagacatcctaagaggtgctgaaatgaattccgcaaagtctggctacccgagagagcaaggggcggccaatggtgccccttcgccgtccggaactacaagtcgctagttacttacacacgacacaagtccaaggtcacccctgcgcgggaaagcgtggagttctatgagatggcatccgatagaggaacgttccaagtggaattaggtgcccttggcggaatcggcacccatatggtgccgcggtcttgggctgcacgattgcacgtttccctgaacccaggagttttgacccacgggagaacaagggcttacgtgccaggcaattgacctgttggaagggacccggacggatcacacctggtgcccatgcagcagacggcttgcctttgggacatgaaagcgtagcactcccttggggccacaggaaccagaaccatgggaggatagccagcaattcgaaaagagcccactggcgcagggaaaagcatgcttgggcctaacccttgaatgaaacgcaaccgatgagggaaggaaaactcaagtagcgcttagaagtggggcccatgctgtgagaaggcccaagggtcacagtggctaggacaggctaggaataccggctccgcggacacaccgggattgttcaggcacgaaatgaattcccctgggtggttgaatgattgcggcacaggccccaaatacttaaagcgtccagtgagacccgaacacattaacaccggggcaaagggattgccctgaaaggccctgtggattacacccatgaccacggtaccttacaagcacatatttggtaccccgagagatggcctcgttgatgccctagcatgcagtcagattccccaggaatgagacgctgataccgacacggttatcattgtatcgtgtggagtgccgccccatcacaggagtgt

SEQ ID NO: 626151 - DNA, 298 bp, Homo sapiens
ggtcgacggcagtcagaacaaaaggagaaacatgctcggtttctacggcacctattaagatgaagaagtaggccgggtgcagtgactcatgcctgtaatcccagcactttgggagaacgaggcgggcggatcgcttggggtcgggagtttgagatcagcctggccaacatggagaaaccctgtctctgctgaaactacaaaattagccaggcatggtagtgcatgcctgtaatcccagctacctgggggggctgaggcaggaaaatcacttgaacctgggaggtagaggttgcagtga

SEQ ID NO: 626152 - DNA, 202 bp, Homo sapiens
acctgtgacggaatgggcatgggtagggagaagcagggtatgggatgtgggtgcaggggtaggggctggagtaggcaggcaggtccctcacctaacctggcttagtcatctgagatggcatgtctgctgcagatgggcaggcgtcttgagtggtccaaggtcggggagtctgagccactgtggctgctgctggagctgctca

SEQ ID NO: 626153 - DNA, 436 bp, Homo sapiens
  misc_feature (300)..(300): n is a, c, g, or t
gctcgactgggcggcattgatgtagcggattacgtttcggggttggttcatcgcggcacacacgtcaggattgttatcggtccgttatgctaagttggcggcaaaacgcatttctgccaacaaactcatcaaaccagacagacttgtagaatcagacatgctaatcagccacttcctacacggcccagtcagcgcctatccccgcgactacgtcgacggcgcacaccaggaactgcacgtccatcaggaagcgcagttgctctatgccgtgtgcggggtcatgcgcctggtcaccgccgnccggtggtatcatcccgccaacccgcgccgtgtggattccgccctgggtcgagcatgagattttcatgagcggcgaagtgcgcatgcggtcgttatttatcgccgccgagtattccccggccaacctccacggttg

SEQ ID NO: 626154 - DNA, 230 bp, Homo sapiens
gggccccccgggccccacaggggccgggggggggccttttgccccccccctgggggggggattgggggtttttttgcccttggcccccttttgggggggggggaatttcccccctggggttgggccttctgggggggcccccccccccccccccttgggggggtccccggcccctttttttcctttggggcccgggggggcctccttttttaaatttttttgggttttga

SEQ ID NO: 626155 - DNA, 469 bp, Homo sapiens
  misc_feature (53)..(53): n is a, c, g, or t
  misc_feature (68)..(68): n is a, c, g, or t
  misc_feature (103)..(103): n is a, c, g, or t
  misc_feature (107)..(107): n is a, c, g, or t
  misc_feature (120)..(120): n is a, c, g, or t
  misc_feature (132)..(132): n is a, c, g, or t
  misc_feature (174)..(174): n is a, c, g, or t
  misc_feature (438)..(438): n is a, c, g, or t
  misc_feature (454)..(454): n is a, c, g, or t
ggttgcggggttcggggtttccccccaggtaaaatgaccctggaaaccgaagncttgtggtcccttgnaatttacaacaaaactggctgcaatcccaaggacncggnaacgccctgaggnaaggcccctgancgaatgtggtgggcgacccacaatgtcgtgtgccccgttgcncaagctggctgggcgactggctgccccagggtgcccgggtctaagcctacgtctttgaacaccgtgcttcccacgctctccctggcccctgtggatgggggtgccccacggctacgagatcgagttcatctttgggatccccctggacccctctcgaaactacacggcagaggagaaaatcttgcccagcgactgatgcgatactgggccaactttgcccgcacaggggatcccaatgagccccgagaccccaaggccccacanatggccccgtaccccnacgggggctcagcag

SEQ ID NO: 626156 - DNA, 682 bp, Homo sapiens
gggcctatgcccgggctgcggtggtgggggttgctgcgcgccgggggtcgctcctgctgtgtcttccgctccagcttcgcccacttccccttgccagctggggtgggcgcggagaagacctgccggagccatggaggacgaagtggtccgctttgccaagaagatggacaagatggtgcagaagaagaactgcggctggagcattggatttgctaaaggagcttaagaatattcctatgaccctggaattactgcagttgtgcagctgacccctaatggctgcttaatgcactctccactttccaagtccacaagaatcggaatgtcagttaatgctattcgcaagcagagtacagatgaggaagttacatctttggaaagtctctcatcaaatcctggaaaaaattattagatgggccatcaactgagaaagaccttgacgaaaagaagaaagaacctgcaattacatcgagaacagcctgaggcaatgagacagaaagtacttccagcggcaatgtaagcaacagaaaggatgagacaaaatgtcgagaatacttatgtttcatcctttactcgggcaacaagcacttactgattctgtgcggttgaagtgtagggagatgcttgatgaagtcttcgaaaggggatggactacattgcaattggagctgatgaggaagaa

SEQ ID NO: 626157 - DNA, 90 bp, Homo sapiens
tcagcattttcagcagcgacttgtctgcccgggaggatgcaacaccatctgcctccaccggccacctttcagtggttcctgctttccaag

SEQ ID NO: 626158 - DNA, 282 bp, Homo sapiens
aaggggaattccatgccgtctacaaggatgacctaagaaattgctagagaccgagttcctcagtatatcagaaaaaaggtgcagacgtctgttcaaaagagtggatatcaacactgatgtgcagttaacttccaggagtcctcatttctgtgataaaagatggcgtgcagcccacaaaaaaagccatgaagaaagccacaaagagtagctgagtttaacggcagaggctgggccactggacatgtacctgcagaataataaagtcatcaatacctcaaaaaa

SEQ ID NO: 626159 - DNA, 981 bp, Homo sapiens
  misc_feature (11)..(11): n is a, c, g, or t
  misc_feature (62)..(62): n is a, c, g, or t
  misc_feature (72)..(72): n is a, c, g, or t
  misc_feature (87)..(87): n is a, c, g, or t
  misc_feature (102)..(102): n is a, c, g, or t
  misc_feature (124)..(124): n is a, c, g, or t
  misc_feature (162)..(162): n is a, c, g, or t
  misc_feature (271)..(271): n is a, c, g, or t
  misc_feature (682)..(682): n is a, c, g, or t
tcaacgtgaanatgcccctggatgtggagattcccacctaccggaacctgctggagggaaangagagcggtntcaatctccccatcnagacctactctgccntcaacttccgagaaaccagccntgagcaaaagggttctgaggtccataccaagaagacgntgatgatcaagaccatcgagacacgggatggggaggtcgtcagtgagcccacacagcagcagcatgaagtgctctaaagacagagaccctctgccaccagagaccgtcntcacccctgtcctcactgctccctgaagccagccttcttccatcccaggacaccacacccagcctcaatcctcccctcacaacctctaacccctcctcactggccatccctcgtgtccccaacagcgacatagcccatccctgcctggtcacagggcatgccccggccacctctgcagaccccatcttttaaccttggctgttggcagtgagtgagcctggctcttgtgctggatggagcccaggcgggagcggtggccctgtccctcccacctctgtgacctcaggcaatagcctttggctctggagacagccccagagcagggtgttgggatactgcagggccaggactgagccccgcagacctccccagcccctagcccaggagagagaaagccaggcaggtagccanggggactagcccctgtggagactggggggcttgaaattgtccccgtggtctcttactttcctttccccagcccagggtggacttagaaagcaggggctacaagagggaatccccgaaggtgctggaggtgggagcaggagattgagaaggagagaaagtgggtgagatgctggagaagagaggagaggagagaggcagagagcggtctcaggctggtgggaggggggcccacctccccacgccctcccctcccctgctgcaggggctctggagagaaacaataaagagattcaccccca

SEQ ID NO: 626160 - DNA, 193 bp, Homo sapiens
gttacagtgagcactgtctatcatgtgactacccacagtcacagtgaggacactgggccccaggatggggcggcaatgccaagaggaccaggttaccctggcaatattggtcccgtatggtgctgcaagtgcacctaggtcctcatggacccgtggatcctgctggcaaacatggataccgtgaatggtcgct

SEQ ID NO: 626161 - DNA, 822 bp, Homo sapiens
  misc_feature (100)..(100): n is a, c, g, or t
  misc_feature (166)..(166): n is a, c, g, or t
  misc_feature (195)..(195): n is a, c, g, or t
  misc_feature (228)..(228): n is a, c, g, or t
  misc_feature (236)..(236): n is a, c, g, or t
  misc_feature (239)..(239): n is a, c, g, or t
  misc_feature (241)..(241): n is a, c, g, or t
  misc_feature (276)..(276): n is a, c, g, or t
  misc_feature (301)..(301): n is a, c, g, or t
  misc_feature (331)..(331): n is a, c, g, or t
  misc_feature (342)..(342): n is a, c, g, or t
  misc_feature (484)..(484): n is a, c, g, or t
  misc_feature (553)..(553): n is a, c, g, or t
  misc_feature (662)..(662): n is a, c, g, or t
  misc_feature (677)..(677): n is a, c, g, or t
  misc_feature (711)..(711): n is a, c, g, or t
  misc_feature (812)..(812): n is a, c, g, or t
ggaggcgggcacttggggggaaaggtgagacgtgattaccgggtggggcgggccccatctgggaggggtttgtgggtgaacccggggtccaccgcccgcngaggagatggatgaggacgggcatccccccaaggggtcaggcaaagacccgaccaaggtgccagcnaaacaacagaaaagaacgggggcatcccnaaaccaataaggggggcacacggaacagtaccncaaccgcnaancnacagaaagtgaggagaaacaggcagaccaaccacnccgaaaccaacaaaaagaaacaacncccaaaaaaaaagaagcaaagaggtcaacnaacccaggccnagaagaagtcacagtagaagaaaccccctaaaaagtcaccagtgtcacaaaaggagcacaacccgaagccaccacagagcaaccacagcagaacagaacacaagacacaggaccacaggaaagtgaaggatcagcagaaaanaacccaaccgtagccaaggaaccaagacaagccagacatcacaaaacggttcaagtgggtgtaccagtnatggcaataagaaacaaaatgatatcagaaggactagacccagatcttcttgagaggccagatgctccagtgcctgatggcgaaagtgagaaaactgtagaagaaagtncagatagcgaatctncttttagtgattaagcttaattttgataagaatnacatatgcatgcataggggtacatttacattctgtaagagattgagcctgaactctctcagtcataaaaacatcaaatggccacatgtccactaccaagcntctgctatgt

SEQ ID NO: 626162 - DNA, 108 bp, Homo sapiens
tgtggtgttctagaggatccgccgtgtaaatctattttcccccaagaagcctgcacgacaccagtgagtgagttctaaaagatacccttggaatagctgctgtagttg

SEQ ID NO: 626163 - DNA, 118 bp, Homo sapiens
atacccgagctatgcctgcaccagactaggggagtcccacctcccctgtgtcttatgcatgtgccatgcatgtttctgcttccgtgcctttccacatgtgccctgtgcaggcatacct

SEQ ID NO: 626164 - DNA, 402 bp, Homo sapiens
tggggaaaggaaggtggcacagaccatgttccctggttcctccctgccccttgccaggcttccttattccttactatgggaagaggtcatatcccttccctgcccctcgctgtttttagcaagcaggtttcactgcttcattagaagaggacaagtcaaaagtgaatctttttcactattaaggaaaaaatccaaagctttccaaaaatggctgctgccaccctgggaaagtttgggccaaaaacagggccaaagcatctgtgttttaatctccaaacaaaacatctatgggagttcatcgttcatgttggggtcagtgcttcgtggcaaatggctgtactggatatcccagctttgctgcccttgttttgctgcatgttaaataaaaccattttccctgta

SEQ ID NO: 626165 - DNA, 355 bp, Homo sapiens
ctctgcgcggggctgatggcatcctgcgtgcccacaagcaccatgggcaccttgctggcgttgcggaagctgcaaaaacccacgaagtagttgtacaccgtctggaaactgatttcatccttcaggctgaacacaaacaccactggattcacccaggcagcaaactggagcttaggggggcctccttcattttggatcaacagcaggtaactttggccattcaccacaattttctttttaaaccgccccccttcaggggactcctcctggacataagtccccgtcaaaaaacggggcaccaggggtgacttcccgctaaaaaggttccccactatgcccactttaaactccggta

SEQ ID NO: 626166 - DNA, 583 bp, Homo sapiens
ttcgacggtgtctgtgcgagtctccaacagctgcccctgattcagttcagttcagttcaacttgattcatttacgttgaattcaactcaactccaaaggttcaggctagagtcttccttggggaaggattgtcacgattcctttcttagagctctcagtcctatctctgaagcccagggcactctgcgtgcaggaggcacttaatgtttagaaagagaagtggaggccgggcgcggtggctcacgtctgtaatcccagcaccttagaaggctgaagcaggtggatcgcttgagaccaggagttggagaccagcctggtcaacacggagaaaccccatctctactaaaaatacaaaaatcagcctggtgcgatggcacacctgctaggcctagctactcaggaggctgaagcataagaattgtgtgaacccaggaggcggaggttgcagtgagttgagattgggccactccattccagcctgagaggcggagcaagactctgtctcaataaacaaaacaacaaaaaactgtccaggtgtggtggcacagccctgtagtcgaacaccgtcgaaggggtccgagct

SEQ ID NO: 626167 - DNA, 361 bp, Homo sapiens
atgatactatttaggcttattcaagaatagttcacagtactttgggacatgaacatcatcatctctatgcccacattctatattcagtcatggcagatggagcctaccacgaagacactgatgaatcttactcaagatgttgcataatcctcaactatatgagagcatgcgaatttggctgatcacgagtaccaagcttaagtgggaaatacaggacttatttatttcgccattcttcactgaagattctgatacttaatctatgttgttcattgaattccatggttaaatctcataacatatatactttattgaatcatccaaccgcataggatacattgacccagaacctgaccttggt

SEQ ID NO: 626168 - DNA, 529 bp, Homo sapiens
acatacaagaaaaggcagtaaatccgagcgtccatcaacaaatgaatcaaaaaacaaatgagatatatatgtacggtggcatattattcagccttaaaaaggaaagaaattttgacacatgagacaatatgaatgaaccttgaagacattaattatgctgagtgaaataagccagccacaaaagaacagatattgtataattcctcttatattaggtacctaaaatagtcaaattgatagaaagtagaatgttggttggcaggggctggcaaggagagggaaatgaagagaaggtgtatgaagggaacagagtttcagttggggaagacgaaaaagttctgacagtggatgatggtggttgttgcacagcaacatgaatgtacttaatgccacagaactgtatgcttaaaaatggttgaaacggtaaatttgatataatgtgtattgaacctatttccagatcaaaacagagagatctacattccttttggtggtgtcaaaataaaccattatcttgaaatagcctaaa

SEQ ID NO: 626169 - DNA, 1112 bp, Homo sapiens
gacgtcttccttttttttgtttttttgtgtgagacggagtctggcactctgttcgcccaggccgtggagcgtgccggggtgcgaatctcagcatcgcgtgcaagctccgcctcctcccgggttcacgccattgctctgtgccatcagcctccgtgagtggcgtgggactacagggccccgtggccaccatgtgcccagcataatttcttggtatttttatagatagaagacggggttttcaccagtgttaagacaggagcggtctcgaatcctccgtggagttgggtgactcgtgcccggcacttgggaccttccccagaaggtgacgtgggattatacgacgggtggtgacagtatacacgcgaggccccgtggacactctatttattattataattatattatatatacagcgtgtgtattgtccattatatttacatcctgggatatttagagggacccactacgagctctcccatacagagtgtgggcctctaacagagtctaggtgtataacactaccagggtgagcacgtctccggcactctatatctctatatgtgccccagagggcctgttgcaaaggttttcacacaatctgtgtgtgctgcacgcggcgcatgtggggcaccacaatgttgatccacacggggcgtgaaaaaatcaccagaattcgaaaacgaggcaaatcacacagggagggaatttaacacaaaggggtgcgggggcgcacatataacactaccaaataacagcgggggagcgaatcagtgcacaaggaaacgattggcccacgagggtgggtgccaccaaaagaaaatacgtgcgtcaaagggcacccacaagcaggaagcacacaaagaactcacgcacgagtgaacaagggggctaaacctcacccacgcccagatagaggacacgacccgggaaacgggcaaccatcaacccaccacaaaaagacaaagaaacaaaaccctcactacaaaccggtgggccagcaaaaaggctcacaacaatatggcccgacacagggagctcacaaccacaaaaaccaggtagacacacgagaacaaacagatgcaacgccgaaccaacaagccacaccaatagtc

SEQ ID NO: 626170 - DNA, 210 bp, Homo sapiens
tcctcgctcccctcccagcccctagcagcagcacttgtcacgtgggtccgcccgttctggaaatttcctgcgcaaggaatcggtgctacgcggcttttggcctgctttctttgccgagcaccaggtttccagggccccgccgccggcagcttcgtcactctgcgctaccgggcgacctaggggttgccaccacagtgagccgggggcctg

SEQ ID NO: 626171 - DNA, 919 bp, Homo sapiens
tatcgtcgacccacggcgtcgcatccaaatggcggatgacgccggtgcagcggtgtggggcccggggtgccctgtgtggccctgtggatggggaaccgcggtggcttccgcggaggtttcggcagtggcatccgtgggccggggtcgcggccgtgtacggggccggggccgatggcctgtggagctcgcggaggcaagggccgaggataaggagtggatgccctgtcaccaagttgggccgcttggtcaaggaccatgaagatcaagtccctggagggagatctatctcttctaccctgcccattaaggaatcaagagatcacttgattttcttcctggggggcctctctcaaggatgaggcgtattggaagaattatgccagttgcagaagccagaccccgtgccggacgaggagcaaccaggggttcaagggcatatggttgctatacgggggaactacaaaggggccacagtagggaccctgggggatggttaaaagtgggcttcccacaagagacaggcgtgtggcacaacacgtgccaatatccgattgtgtaaccatttaatattccatgtgacccaaagcgatcttaccaaattacgatcaccccacgataagcgacaaaacagcgcaataattgggtggagaaaacaagtgataattacggcaaaagacacacataaaaaagtgtgtgtaccccttttgacaaaagaggttggtaaaaacgaaggcaggaattagaaggaacaactatgaggatataagagaaatactgcctatagaaataaccactgagagatccaccaaggcgtggcaaaaaagatcagtaaaaaggaaataaccgcgaaagcacaagagtggtacattaaaaaaaaaccgtgtacacaataaaaaaggaagtagaacatcaaggataa

SEQ ID NO: 626172 - DNA, 605 bp, Homo sapiens
  misc_feature (39)..(39): n is a, c, g, or t
  misc_feature (111)..(111): n is a, c, g, or t
  misc_feature (124)..(124): n is a, c, g, or t
  misc_feature (147)..(147): n is a, c, g, or t
  misc_feature (160)..(160): n is a, c, g, or t
  misc_feature (180)..(180): n is a, c, g, or t
  misc_feature (188)..(188): n is a, c, g, or t
  misc_feature (203)..(203): n is a, c, g, or t
  misc_feature (205)..(205): n is a, c, g, or t
  misc_feature (211)..(211): n is a, c, g, or t
  misc_feature (248)..(248): n is a, c, g, or t
  misc_feature (254)..(254): n is a, c, g, or t
  misc_feature (259)..(259): n is a, c, g, or t
  misc_feature (279)..(279): n is a, c, g, or t
  misc_feature (293)..(293): n is a, c, g, or t
  misc_feature (300)..(300): n is a, c, g, or t
  misc_feature (318)..(318): n is a, c, g, or t
  misc_feature (325)..(325): n is a, c, g, or t
  misc_feature (337)..(337): n is a, c, g, or t
  misc_feature (354)..(354): n is a, c, g, or t
  misc_feature (550)..(550): n is a, c, g, or t
  misc_feature (587)..(587): n is a, c, g, or t
accaacacttatgtgggtacactttgtatatcacacttngatacaacactttgtatcggaatacagagaaagaagaacacatcccacagtgcataaataaccatatttaanacctctcaaagantttgtatagatcaaaaaggttancaagcagcagganatttccatcttctgtgaaangtttaggnggcagaatgtgtgancncaaggntttatagacaatgtgttccacagtccacttcccggcntttggnatggngccaggggcttcactctgcngggctgggggggtngggtccncaggtatgtactgcttcngggtggnatagaacatagngctttctttactggggntttcgaaacattccttttcttcgtcccaattcacctcagtggctagtcgaagaatgaagataggcagtccctccaaagggggcacatagttgtcaatcagaaggggtaatccaatcaggttcccttcctcatcaatttccaaagagaaatagtctgcaagcatctcagccttcttcttcagaaactcaacaatgtnttcagcaagtccttctttgggaccatcttcctctgtncagccactctctggacta

SEQ ID NO: 626173 - DNA, 718 bp, Homo sapiens
taaatgaagtaagcctttatttccttgattttggcaaataaaacgggctaagtgggtctgcttttgggtgattagtcaaagagaccaaatcccatatcctcgtccgacctcttccgactcattccttggcattcaaccttagcttggtggctgcagccagcagcatggatgcagcttgtgtgtggcagcatgccacaggggcagcagccacaaatggcagatgtgatcagccaagaaggccattgaccatttatcaggcaagatgtgagaatgagttgtaatcctgtctccacagcacaaaggccaggacctcgtttgtcaccctgttgattgataggaatgggggtcacttgtatgcaacatgttgggtgtaaccccaatctggcaaacagaccactgggcaactattgcggacaaccctccgaggacagcgaaaatgcagatgttccctctgtgatcatcaacgccctctcacgggtttgtccgatcgctgcccattggtcgaacaccttgcttggtttgacctaggccccatagaggccgaacgcgcggcgcgattgcttgacgctattgttcagccagctgtggtctttcggcttggctccccccctatgtgccctccaagtctgtgaatccagctgtcacatccactccatgggattcactttggtgccccctgagaaattcgctcggtgtacctaaacgctcgcacactggc

SEQ ID NO: 626174 - DNA, 225 bp, Homo sapiens
gcatggcggatctcaagtggctttctcaccccaggccattatttggttgcgaagccgatttaggccacagaattaggcatctccccccattggagcagctagcatccttaactgattcgcccgtacgtgtagagcgtaaacaacctcgtcctcgtagcacagtagtatctccatgccgtcggtgttggggaggaacgatgatggcatggggcgtgatctggctct

SEQ ID NO: 626175 - DNA, 893 bp, Homo sapiens
gtcaaccgcaaaagactcccttctgcccctcttcagagcagtccttcagctatttcatggctctcacccgtaggtttagatctctttttggacacttattatatattgccagggggaatatcatggcgcgcaaggttgtgcggagtgcgcgacaaggcatctcatggcgaatgggttccccttggttgccctccatatggtctcaaacatggcgccttagccacacgtgagtgtcatagacccattggtgctacacttgagtcacgcgcttaagaggtccccgaggagagctataagctgtggggtgtctaaccccacgattttctccagacactcacgcttagtgtatgaagctctgcgaagacacatatattgagcactaaacgcaagtttcaacacccacacatatgtggggcttgaaaattctcactacggagagaggagattagaaaccagattctcctaccctatagtgtgttgggccccaacagcagcgtgtggcgacaccctcagaacactcctcctgtgtgggcccaatcaacatgacaatagctcccttctcgcgcaggctgtttacaaagccatatttcacacctaacaattgggaccagcgcgactgtatcattgagggtacatgtgaacggcgacacccgaaaagtatctgtgttgaccatctgtcttgggacacaacgccaatttttagcgtccgtgcacaacctgcttacataccttttgaacaaatcttacacgtgatcacgtacccgcacggggcccttattactgtattccccaagcaattatgggcgtctccttgtacctaatcattgtgcgcccataacaaacagattcaatcattccgccacacgatgaccaacgccccggtctacaaatgt

SEQ ID NO: 626176 - DNA, 115 bp, Homo sapiens
tgccaccaaagccgacatacaccacacagcattaggggtagaatcaagattgccttcctgtctaatgagccaggaccttccccatccctggccctggggatcccccttttcccca

SEQ ID NO: 626177 - DNA, 255 bp, Homo sapiens
tgctggtggtgggagtgtaacaactatcgtcctccagcctgggcaacaaaagtgagaccctatatctactaaaaatacaaaaattagccaggcactaggtgtgccgcactgccgtctaataccagctactggagaggctgaagcgggagaatcgcttgagccagggagatggaggtagcagctgggccacagatcacaagcactgcactccggcctgggcgaccagacaagagaccccgtcttaaaacgaacaag

SEQ ID NO: 626178 - DNA, 395 bp, Homo sapiens
  misc_feature (372)..(372): n is a, c, g, or t
tgcataaataaaagtatgtcagcgggcatggtggctcacacctgtaattctagtactttgaaaggctgtggtgggaagatagcttgagcccaggagttcaggactagcctaggcaatgtagtgagacccagtttctacaaaaaatgtaaaaattagcagagcatggtggcgtgtgactgtagtctcagctactcaagaggctgaggcaggaggattgcttgagcctaggaggtcaaggatgcagtgagccgtgatcatgccactgtactccagcctgggatgacagagtgagaccctgccttttaaacaaacaaacaaaataataaatactcatttgctggcttacttggttagaaaataaaaaataaggantaaagagaaaaatttttattaaa

SEQ ID NO: 626179 - DNA, 146 bp, Homo sapiens
caattagagagagataagtacggaagagtatacgcgaccagagcacagaagcacaggaagatataagagcccaaagtaagggcgtactacataccgtaccggacgcagcgaggacatacaagaaaaggaacataagagggacagct

SEQ ID NO: 626180 - DNA, 532 bp, Homo sapiens
ataataccttggattctcttacagctattgaaaataggagaggaactctccctgggctctaggtcgaggttgagcctgtacgtactctgctggttggctgccctatgtccaccttcccatctcatcttacctgtaatcacgcccggatggacctgggtgagaccagacaacactgcaagggattgtatgacacatttactcagggcagaatatggaaccttcagcctggccaatatctgaaataggatccagttagtgtctgaaatactgcgtttctcaagtaacaaatatgaggaccgaactctcattcaacatccaagcccttgcagttcgtgcaagatatatgtttagcaagcaataggagcagacagaatccatcattacgtatggctttttactggaatgtggtgcattgattcattcgttctatggcttggagagcaacattctagatatttacaaaaccactatttcatgggtgtcggtggaaacggattctggactgcagagcaatgccagtcagtggccgttc

SEQ ID NO: 626181 - DNA, 269 bp, Homo sapiens
gtgacccagaggattcctcgaatcgacggtttctcagctacaacagccatgccctgtgtgctttgaagtaacagaggggaggctgcagagtggcagaagggaccctctgcgctcactctgcaacttttctgtaaacctaaaattatcccgacaatacgtttattttttaaacataaccattcattagccgtggcacgggtggctcactgcctagtagtcccagctacttgagacggctgaggcaggagaatggcatgaacccaggaggt

SEQ ID NO: 626182 - DNA, 499 bp, Homo sapiens
tccatagggtgtgccagcctctacaagcctccttaaatgtacccaattttagtgcaacttcaaaatttgaagtagaattatatccacatatgagaaagagctgagtgaaataagtcactaccagaaaaaaacaagcaaaaacaatggtcaagtacctatccctgtttcaatcacttctgctatgccgaacagataaatcatgtgcaagccatgctgccctgtctgccattgatctcagcttcaatctccaatgcccactcctactaggaaaagacacacaatattagttcaccatcagccctcaaaaatgcagcagatagtattctatcatacatttcttccgtcttctcccctcccctattctctcctttcctctcctcctctcccttcttctcattggtggtctccaaactcagttagcctatgcctgagagtgaaaaacctttgaatggcttgccaccactggcttgggtgacaaatatttgacatataatgcctt

SEQ ID NO: 626183 - DNA, 119 bp, Homo sapiens
  misc_feature (17)..(17): n is a, c, g, or t
  misc_feature (56)..(56): n is a, c, g, or t
  misc_feature (79)..(79): n is a, c, g, or t
cccctcccgcttgccgncttagcgcacccctgcagtccagcgtgcatccacccacnacacgccccgtgctgtggtcacntgcccctcccatggcctcaataaactctctgcttggtgtg

SEQ ID NO: 626184 - DNA, 125 bp, Homo sapiens
tggggacactgattattatgcgaactggtcagatgcacagcctccggattactatagtggtattactatgaagaagattattacaaatgcataggtagtgacgatatacgttagtagatattggt

SEQ ID NO: 626185 - DNA, 399 bp, Homo sapiens
aagcctgtattatgcgcgtgtacgcatcaggctctggcctttacttcataatcgcgagtcatgcagcagcaggctgttacctggacacacactagtccatggtcgcacaatgcttactgctatagtcgccgtatcatggcagtgtatgagtgagacatcgatgggatcaaatcgcgtctgtcaggccctggcgtcagaggggcacctgctggtaaggctgagatcctcccctctcaacctcccacccaaacccatccctcttttgggaacttggcaggcaatgaggatagggccttaattaagtggacgcccagtatgtgtatttcacgtgcgttattccactggggcctcacccattatcaggacaccagttctattttaacccagcgctgaggctct

SEQ ID NO: 626186 - DNA, 802 bp, Homo sapiens
  misc_feature (413)..(413): n is a, c, g, or t
tcccccccgggagggtttttttgtagggcagcacagcagagcaggacatggattgaaatactaggaatatgcacagtggggcagtgtgggggcttctcagtaatggagaacagcttggtgaaactttttttttttttaacctaaggcatttataattatatctgtgcattttttctccacttttacaaaaattgatttaggtctataaggcataattaggagttgtgatcccatttcaacacttatttctttggtacgcaggttaggagaatctttttggacgcttattttttctcctcattacgagatatactattaggctcccaggtttttacccaaaaagttcttctttataaagatcgctcctagaataaaactctttgaagatttgatttgggcgttataccttttanaacagggggtttttacgcaacaggggggatctcccctttttacacatttttctttttgcggacacaacttctgcaacacatcttagccgcgggtgttggaacaccacgtgcaaaatttaaacgagtttttccttaaatcctttaatcgttgtgttccccaacacgactagcataaacacaaagacacatactaacacaaacaacaatacaccacaaatcatctgtgtctgcgttgcgcgcgcgcgtctcttcttgtgcggcctcttgtgcgcgaaaaaagagcgctttttttttctagagcagcaccacctcttctttcgtgtgttgtgcgggcggcgcgcgcgcggggcgcccccccgtgtgttgtgtcgtcatcgggtgttcacacc

SEQ ID NO: 626187 - DNA, 384 bp, Homo sapiens
gagcccacctcaagtgaacttgaaagacattatatccataagcctatattacgcacacatgtgggccagcatctgggcatgacttagtcatcgcaagatgggcatgtacgggctgctctcagggcactcagaagatcgcgtctgaagacagctcactgatcacgtcgacctagcaagcgagcgcacgctggagaaaacgctgggatctacatgcatctgccaggcccagacggcagagtgagcaccgctgggaacttggcaggcaatgaggatagggccttaattaagtggacgcccagtatgtgtatttcacgtgcgttattccactggggcctcacccattatcaggacaccagttctattttaacccagcgctgaggctct

SEQ ID NO: 626188 - DNA, 117 bp, Homo sapiens
cccccaacgcagttatacagactcacggtgaaggctatgtaatgcccactgacgggtgctatcgtgaaggttgcacttgcaagtgtgtactacaacggacaatgctctttgaccagc

SEQ ID NO: 626189 - DNA, 1545 bp, Homo sapiens
ttgtagaatgtaatctctggtaacactgactttaagaggcaatgagtgtgtgtgtgtgtgtgtatgtgtgtgagtgtatatatattcccataggctagcaaatgaaaactgacagtgaacttttcctctagctctgatagagtgactggcattgggcatttcctcctggcatagacaactctaaagctggtaaaatgtgcatgacaaatgttttaaggcattaaacaacaggcagcacagaactgtaattcttgagagaaaggaaacatgagaggtgaggctcagtttgccccagtgctctgcctgggaccgtttcctgcacatctccagcagaactgtggcctcactgacctgaggaggagattggagctgtggtctcagaagcagctgagatttggggagccaagtgcaagagcagaagctgaggacaagggtttccagaagtcttgatgaagactcattgctggtttttggctgaaggctgcccacaccatggcaggcagtacacagggcctagcagtggttgccttctgcagggctgggaatgaatgaaggcattattgctatgcaccaccaggagatgctggagctccagctcagccagaatggagagaactcattgagcatctcagtcaggcattcagttgaaacctcagaaagtccacaccatagcagtaaaagctataccctcaaataagggccacaccttagcccataactagaataagttcatgtccatgaaaggaaagacatgaagcctggtatgaccaaaaagatcagttggtgatttccctgctgccaaaacaaaactcagagcacttctaatttaaaaagagattatctagaatcatgaaaacattttgtctatagtatccagaataaaatttttttaaaaaattgctagagtttcaaagaaacatgaatataagacccatgatcaaggaaaacaacagtcaatagaaacaagccctgagattaaatgcctttgatgttgaaattttcagacaaggattttaaggcagttataaatatagccaaggaattaaaggaaaacatggtcataatgagtaaacagagggaaagttgcagtagagaaattataactgtaaaaaataaaattttagaactgaaaatatgtagtagatgggtataataatagttaagaatggcagaagaggccggggcacagtggctcgtgcctgtaatcccagcactttgggaggccaaggtgggcagatcacgaggtcaggagattgagaccatcctggctaacacactgaaaccccgtctctactaaaagtacaaaaaattagccgggcatggtggcgggtgcctgtggtcccagctgctcgggaggctgaggcaggagaatgatgtgaacccgggaggccagagcttgcagtgggccgagatcacgccactgcactccagcctgggcgacagtgcaagactccatctcaaaaaaaaaagaaaagagtggcagaagaaatgctagccaaactgcaggcagatcaagagaattatttgacctgaaaagcagagatt

SEQ ID NO: 626190 - DNA, 317 bp, Homo sapiens
  misc_feature (233)..(233): n is a, c, g, or t
ctcgggaggctgaggcagaagaatgggttgaggccaggaggcggaggttgcagtgagccaagattgcgccattgtactccagcctgggccacaagattgaaacttcatctcggggaaaaaaaaaatgagctaaatacaagagatggtaatgcaggaaatgagagagaaagaagctatagaatgcaccatcagtctttgctgagaggagaagctaggacacttatgcgcatgtncctgtctgccttccttcccgtcccgcggatggttggagcaggtctttgtttgctgcagagcatgccatgtcatcctccttgtct

SEQ ID NO: 626191 - DNA, 443 bp, Homo sapiens
aaacacctatggaaataattttgtttttttttttaaaaaaggaatgagatcatgtcctttgcagggacatggatgaagctggaagccattatcctcagcaaactaacagaggagcaggaaaccaaacaccacatgttctcacttgtaagcggaagctgaacaatgagaacacacggacacagggatgagatcaacacacactggggcctgatgcaggggccgtagcggggagagcatcaggataactagctaatgcatgtggggcttaatacctaggtgatacgttgataggtgcagcaaaccaccatgggacacgtttacctatgtaacaaacccgcacatcctgcacttgtatccagaacttaaaatattttaaaaatctttagagaatacaaaaaaaaaaagattcttcaatgcatacacaataaaattgcagttcagtc

SEQ ID NO: 626192 - DNA, 150 bp, Homo sapiens
ctacagcgggggacgggagccgggcgggtacggctattggaggttagtcttacttttgggaaaaacttcttgggaaaggggcttaaggttgtgtccttacccctctctccaaggtttctctaagcgcattggctctgaaaattcccgcgc

SEQ ID NO: 626193 - DNA, 376 bp, Homo sapiens
  misc_feature (360)..(360): n is a, c, g, or t
gctcgacggagtgtcagggacctccctgctctggaggctgacagtgaagcctagtggggaattctctggtctccctaaaaacattactgggccagatgtggtggctcatgcctgtaatcccggcactttgggaggctgaggtgggcggatcacctgaggtggggagttcgagacaaccctgggcaacatggcgaaaccctgtctctgctaaaaatacaaaaattagccgggcatagtggcacgcgcctatagtcccagctacccgggaggctgaggcgggagaatcgctggaacctaggaggtagaggttgcagtgagccgagatggcaccattgcactccagcctgggcaacagagtgnagactccgtctcaaag

SEQ ID NO: 626194 - DNA, 409 bp, Homo sapiens
  misc_feature (313)..(313): n is a, c, g, or t
cgtcgccgcagggtcccctcgccgcagaccccaccctttccctctcgggggcacgcgcctcctcgccaccctcgccgggcttttcccaggctcgcccttctccccacgccccctgcgtcgggctgcaggtcctataggaagggcattaccattcctttcccacaccttcccgactctacgctctttccccttccccttctgtgacttcctcttcttccccggttgggccctctggtcctctgcgactcttcttcccaggtcgcagatttccggccacactttcggcttggctagccgcgccacagctagcggngtgagctttccccccctctggtaggagttggtgaagatatctaccgcaaagagatcggtggactcttcccccttcgtgctggttctggacaccgcg

SEQ ID NO: 626195 - DNA, 116 bp, Homo sapiens
ggcaagaacaagcgccttacgacaggcggcataaagggagccaagaagacagtggttgatccattttctaagacagattagtatgatgtgaaagcacctgctatgttcaatataag

SEQ ID NO: 626196 - DNA, 538 bp, Homo sapiens
  misc_feature (34)..(34): n is a, c, g, or t
  misc_feature (68)..(69): n is a, c, g, or t
  misc_feature (73)..(73): n is a, c, g, or t
  misc_feature (97)..(97): n is a, c, g, or t
  misc_feature (102)..(102): n is a, c, g, or t
  misc_feature (145)..(145): n is a, c, g, or t
  misc_feature (150)..(150): n is a, c, g, or t
  misc_feature (163)..(163): n is a, c, g, or t
  misc_feature (167)..(167): n is a, c, g, or t
  misc_feature (173)..(173): n is a, c, g, or t
  misc_feature (183)..(183): n is a, c, g, or t
  misc_feature (222)..(222): n is a, c, g, or t
  misc_feature (294)..(294): n is a, c, g, or t
  misc_feature (303)..(303): n is a, c, g, or t
  misc_feature (305)..(305): n is a, c, g, or t
  misc_feature (313)..(313): n is a, c, g, or t
  misc_feature (373)..(373): n is a, c, g, or t
  misc_feature (379)..(379): n is a, c, g, or t
  misc_feature (386)..(386): n is a, c, g, or t
  misc_feature (389)..(389): n is a, c, g, or t
  misc_feature (412)..(414): n is a, c, g, or t
  misc_feature (416)..(416): n is a, c, g, or t
  misc_feature (419)..(419): n is a, c, g, or t
  misc_feature (453)..(453): n is a, c, g, or t
  misc_feature (468)..(468): n is a, c, g, or t
  misc_feature (521)..(521): n is a, c, g, or t
  misc_feature (526)..(526): n is a, c, g, or t
tgactagtgtctttataagaagagaagattaggncacaaacacactcagaggaaagatcatgtgaagnnacanggtggagacagccatctacaagcnaacangagaggccttagaagggaccaaccctgataacaccttgttctnagacntctaacatctganactntacganaataaagttntgtgtttatgtcactcggtttgtggtacattgctgtggnagccctagtaaccaatacactgagaggtaccatgttctctccaatcaaggttatggctttggacaattcctnacttgtgtntnttgttttntgagttctcagtgtcggtgacctttggttcctgaggttgcaccttgtggaagtgtagganagcgtngtggacnctnctgctcattttctgagatggggnnngnttnagctgggtggtctgatactatgcttgtttggtantggtgctgatgattnctggtgattgagataatgaaggggttaaaataataagtgttttgaaatggctnggctnctttcttccttc

SEQ ID NO: 626197 - DNA, 555 bp, Homo sapiens
tgagctcggtaccccccctctctatcatgcagctatgactccagtgtccatgcagcataccaagctcatctctttatcttgagatagggtcccgctattgtcgcccaggctggagtgcatgtgcgcgatcttggctcacctataatctccaactcccaggttcgagcaattctcctgcgctcagcctcctgtgtagctgggattacaggcatgcgccaccaaacccggctaatttggtatttttagtacagatggggtttctccatgtgggtcgggctcatctcaaactcctgacctcaggtgatccgcctgccttggcatcccaaagtgctgggattacaggcgtgagccacagcgctcagccttttaaaattttttgtagggatggggatctcactatgttacccaggcagacctgaaactccggggttcaagcactcctcctgcctcaacctaccacattgctggtattgcaggtgtgacccactgtgcccagtctggcctccatctttttggtgacaaatttactctcattggtgtgtcggtttctctgta

SEQ ID NO: 626198 - DNA, 242 bp, Homo sapiens
tgggggccttccccgccccccccccaatgccttcccagcttggaagccaaggcagcttatgaagggagctcaggaaacccgttttcagctgggctggggttggggctgctgtgaggaaaacccccccttgtggccctggagagtcccccccagctcttgggaaggacttgctgggaggctgaaaaaggctttgggcccagcctgctgttttttccctttcctaaagttttcttcattgtcca

SEQ ID NO: 626199 - DNA, 169 bp, Homo sapiens
gggaaacaaaaaagtgtttgatggggccaaaaaggggctgctttccagaaaggtaaaatttaattttttttttcctttgagttttggacttcaaccaccctacaaggtggcacttggtaacaaatcagaaatatgacaattaatgattaaagactgtgattgcccccca

SEQ ID NO: 626200 - DNA, 112 bp, Homo sapiens
taagtcaatgcagcatatacatgaacagttaggaatacaagtaagttcggcaaccagtgtagaccagtgaggacgagctactctacttctaaacaataggcagtgacgaaag

SEQ ID NO: 626201 - DNA, 137 bp, Homo sapiens
tgtatatgcgctgactggtcgtaggattggtcacccatcagtactgcggtcgagaactttgtcagtggcgaaggtattggtcaatgtacttgtgtcgagggcacatgggggccgcggcacagagtcttccatggcca

SEQ ID NO: 626202 - DNA, 402 bp, Homo sapiens
gaagactatgctcgtatcaagttaaagcaagacattattgcgttacaggaagcaattaacgctggcgatgcggcaactgctacaagcctagccaagattgtcgaagaagactataagcgtgtatgggcttaccaagcacaaaatatcgctctaggtatccagaacggaactatccaaaatatccaaaatgcggctaagttaattccgcaggatatgaacctaatcaatttaggaaacttaaagtctgctcttgattatattaacgaaatgcttgctaagttagctaaggttcctaattcacaggataacgcatccgcaaacgcgacaggtaaaaaccctgtagtcattccgccagtcgtcgtagtgccaccgcctgtatcagctaatcctaattgggatcct

SEQ ID NO: 626203 - DNA, 868 bp, Homo sapiens
agcggtgtatattttttttttttggcacagtctacttggtgacattaagtacctcttttccaaaaaaaaaaaaaaaggtgtttaatgtggcttacctgaggatcacagtccattatcaagaaagaattcgtgtcgctataattggaggcatctagggcagcatttggagaaatggcgtgtggataagatccacgtgtttcttttcatagaaacagtgatcggtgtttggtatgacgtcttcccaaagtgttaagttacagattctgtcaaatctcctggtacagtatcgggtttggcagttacaaaggtggatcttaagggaccattagtggtaatggcaaatggctggcatggccactggtttcccatcatgtcataaaaacaaggctcctaaaatccctaaattcctttaaaaactggcctggtggttctcatttataaacaaatgtgggctctggtggtaaatctacaccggagccaatacaacctaataaagggtggaaaatacgtgggaagatttcagggaccccttctgtgctcctaagtcacaatccattgtaaacacatgtggtaccccaggatggaacaaaaggtcccatggggctggacttggtcacaacttcaccatggtaataacatggactgggtactgaaatccctaatggtatccgtgtgcccatgttgggggcccaacgcagagcctgtcatatttccccaacattatataaatgtccaacatacaatttcgtgggttatgggcccatggacagaacctctatgggacagtgctgccctttggtcaaagcatagtgttcaacaaacgcccatttacaaaggggttattttgggcgtggcaaagcggaaacac

SEQ ID NO: 626204 - DNA, 236 bp, Homo sapiens
atctattggggtctgggaggggaagaggacactgggcggcctggggtctagcaggtgactcctcaagcccagggcaccatgtctgtgccaaactgtgccccaggcagcagtcctcctcctcttctgatgaggcaggtgaccccaatgaggcacccagccccgacaccctgctcggtgccctggcccgcagacagttgaacctgggccagctccttgaggacacagagtcttaccta

SEQ ID NO: 626205 - DNA, 599 bp, Homo sapiens
gaatgccttaatgtccccaaaacctataaacagccagcttattttcgttggactggatcccccaccaatagttgaataacggcgtttttgtgacacatccccacctcgggggctaaaaaatggttccgcccaccctttctacattggcgcaacacagcaccggcccaatccacgcatgctggtttcaaaggcgcaatttcccgagccacagttcaccgcgccaattgttccggccgcaaaggcctttcctggcaactggtaaacacgggcgaagggcactggacgcaggattggaggttcaccccgagggccgagagagcacaacacatgagatgaccctggtgtccgaggtatccacgcacgtatccacggatgccaccagccgaggaggagggcgagtttcgagcgaggaggctgagtgagcgaaggtggcctagagccttacagtcaactcggggaaaaccacgggaaaccacgtgtgaatctctttattcactcccacgcctgtcctgtggcctgtttcccctgtgtgcacttgctgttttcctggccacaaccatgctgtacagacaccacccattaaagcatttttatagtga

SEQ ID NO: 626206 - DNA, 191 bp, Homo sapiens
ggatagttaaccacacctgggtcctgcaacactcggcctctccagtttccctggcctatactctagatccgctctgactccaatgtcacgggacaccagccttgcttgaagccatgtcctgtagtgggcacgataatagcaactgagctgtcacagcctaccagcaggctggtaacaccaccaggaattct

SEQ ID NO: 626207 - DNA, 1001 bp, Homo sapiens
ggacgcgtgggattcataagttgaagccctccccagatccccattggggagcctctgccctcctccagcccggatggctctcctccattttgagtttgtttcctcttgtttgtcatcattatttttggcgtgcttgggagtggctgccagccctgtacccgggacctgctgtggaggtgacaatgaggacctcccccaggttagaagagcatgccctttgccgttgcagtgcaaccagcccatgtgattccactgtgcagatcccagcagcctgtaggggcaggggtgccaagagaggcattccagaaggactgagggggcgtagacggaatagtggcgtcgactggactgtggcccaggaggcggcgtcgcaggggccaactcacagaaggggactgacagatgggcaaccactcacatcccactggactgcctgtactgcaaaccatctgatatggctattctgagcgttcgcgctgggctggcggcactgctcatattggccacatctgccagcatatggactatgcccgagttacttgaagctgctctcgaagctagagctgacaatacctggtgctaacatcccaatggccgatccctacgtcacgattgcaccccaccgacactgaggcgcccggacctagagaactgcatacgtaggcgcactaggaccgcacaggacaatgcagcgggaccacataacaacaccactatcccaccacatgcgccccaacaaactaaaacaacagcgcacaaacccaagcaggcctagccacacagaatcgcgacacgggacacatgcacccacgaacaccactcgcgcacccgcgccctccaaacacaccgcccaggagagaagagcaccagaggacggaagtaccaacaaacgcatgagaccggaccgcaagacaacgccacacccggagacagggcgagctgccaccattcgagccaggacacacaacgacgagccagccacaaggcgcacacacccccag

SEQ ID NO: 626208 - DNA, 1273 bp, Homo sapiens
tggttttcccggtttaaaaaaggaccccaaatataaagggtagggaaggggacaagagggaacattacccctttaggtgtcgaaaaatgtgggaaggaaaaggagaagcctcaaaaggagagggtgggaggggaagtgtcattaaggcagcaaagttaatctcgtgttgaagaaaagatgggagggagggacctctcacaatagcctacaagaagataaagggcaaaagtattggcccttctacggtggtgccaaacggggaaatgggcaagtcttatttctatccttcacagggacagccattcacatggggtaaaaatccgggagaatataacctttaaattctctttattggtaaatataaaaaaagtggcgtgagaaagaagttcagaaagggggaaaaagatttcggctagagagaagggggggtaaaaaacagaggtaaaacaaatattaccacaaaaaagaaacgacgtggagaaatcccagcgaaaatactcctcacatattaaagagggcattaccacacgcgaatggagaccacgtgggagaccgagggggaccccctcgaggggggaggaaaaagaagggcacatcccacaacagagaggcagaacgacagcggggaaactaaccaaattactatacgaaaagaggaccaccaagagaacaaaactcccccttcggtgagagaggaggacacacgtaccccacgaaacacataacacagggggcacaaacacaaaagaaaaaacattctagtaagagggcgaccccaaaaaagccgggggggacaacggagaaattaatacaaagaaaagagttattctcgcacacatcgaagccaacaaaagttacaagacaggcagatgatttaactagaggaaaagaacaagaaacataagaaagctattacaatttacatgattggccagaaaaaatcacgaggataattacctcaaggcgacacaaaaaaacaaatattcttcgacaaacgatggatgtggtgtaccccacacagaaggcggagtgagattagcgagcaaacaataaccagtggcgctagcgaaaacacgcgggaagagagaaacacaaagacacaaaaataaataaggaggagagacaaacaaactacacagagaaaaaacacccaacaaacaaaaccaatgagacaccacaacaacaaaccaacacaaacggaggagagacaaaaaaaaaaaacagaaagacgcagccaccaaaccacgaggggagcacaaacagcatagaagaa

SEQ ID NO: 626209 - DNA, 194 bp, Homo sapiens
agtaaccagatgatcacagagatacaaccctagccttgcttgttaaaaatttttttttttaagaatatctgtaatggtactgactttgcttgctttgaagtagctttttttttttttttttttttttttttggcaaataccctgtgtttttaagtgtctctctccggttggtgtaaggtttattgggaaattcg

SEQ ID NO: 626210 - DNA, 219 bp, Homo sapiens
aaaacttttaaagggggggaggggggggggccccaacccctttcccccttttggttttgaaggggcaaaggtttttggtttttcccccccgccccttggaaccccgtttttccacccttcctctttttttttcggggttttccttgtttttttcccccaaacccctggggggaatttgaatcccgggttttttttttttatttttttgggaaaacccca

SEQ ID NO: 626211 - DNA, 227 bp, Homo sapiens
tgagtggccagtgcgtgtgcgtgtgcgcgtctgcgtgtgcatgttcgtgtgatgtgtgtctggtgtgtatgttcacacgtgtgcgtgtgagtctacatgtgggtgtgtgcgtgcaagtgtgccatgtatgtgtgtgcatgtgtgcagtgtgcgcgtcattcagttctcatgtgttcttcatcaccatggccactccaatcacgagggctcctctcatagtcgcactg

SEQ ID NO: 626212 - DNA, 701 bp, Homo sapiens
  misc_feature (199)..(199): n is a, c, g, or t
  misc_feature (207)..(207): n is a, c, g, or t
  misc_feature (522)..(522): n is a, c, g, or t
gaatagatctatcataaacttgagagccaattcatcttcactctgggagaataggcaaagggaaaatccaagtagtatgtccagcatgagtagataacttgctgacctacttgactatcctctcatgaatgcttcttggtaggtctccacctgattcccttcagttctgttctgaatagctctatactgagggaccccnaagctttnaatccctttgggatgggtgtagtgccatggtgtgcgggaggagttggtgatataatatgcattcttgctcagcaggtatcttgtcattttcccagtgatatttaatcagtgcctctgagcacatggagttattttacatcttctccagagtaactcagatcaatataatgggtatgtcatttggtactgctgttagtattaatagatgtgaagcaatgctaaatggaatttgacagaggtgatatattgccatattcattggagttcctcacaagaccagattccagagtagctggactgtggctgctgtggganctaggattgaaaagtgaaccaagccaacctttcagtgtgtccatttataagaaactattcttatttgggagtagaggatggtgccaggctggggtagggaagattttagcttgacttgcctgttaagaaaagttttccaatcagctctagagtgatgaaggaactgtgaccttcagcct

SEQ ID NO: 626213 - DNA, 164 bp, Homo sapiens
tgtcccgtggtttcctaatacagttatgttgcagagaaaagtagaggcctgcagaaaagactgaaggacgaggacttagtggagtcctaaatcatgagaggtggtgcgttgtactttctgggaaggaaactgtatcacagaagagacggtaacaccacagtagg

SEQ ID NO: 626214 - DNA, 110 bp, Homo sapiens
tctgcatgcatgcctgagtcgacgtgtattcaccactgcgggctgccttctgtcaagttccgtctacacgtgagcaccgggctgacctcaaatatcgttagctggagcct

SEQ ID NO: 626215 - DNA, 301 bp, Homo sapiens
ttacagagacctgggatacatacctctttctatctgggtgccttaggtcagttactccagttctcacctgtcaaatgaacaaattccaagcactttggtcatggagtgaggattacattcgagaacgcagattacgtgctcacttattagcacactgtctggtgcaaagaaaacggttgggacatgacagctgtcatttaacaatcccccagggtcccataagggcccagatcagatttctcagtttgtcacctttgactggcccttacagtcacctgtggagcttcacctggtctgacgt

SEQ ID NO: 626216 - DNA, 874 bp, Homo sapiens
  misc_feature (30)..(30): n is a, c, g, or t
  misc_feature (62)..(62): n is a, c, g, or t
  misc_feature (73)..(73): n is a, c, g, or t
  misc_feature (87)..(87): n is a, c, g, or t
  misc_feature (107)..(107): n is a, c, g, or t
  misc_feature (523)..(524): n is a, c, g, or t
  misc_feature (526)..(526): n is a, c, g, or t
  misc_feature (552)..(552): n is a, c, g, or t
  misc_feature (554)..(554): n is a, c, g, or t
tgctagactgagaattgtggtgaacttgancagatggtttctgaggacgtcccgctgaccancgcgttcacgnccgcatcattggtnccctcgcaaagccattcgcnaaatcatggacgaattcaaggtggacattcgcttcccacagagcggagccccagacccccaactgcgtcactgtgacggggctcccagagaatgtggaggaagccatcgaccacatcctcaatctggaggaggaatacctagctgacgtggtggacagtgaggcgctgcatggtatacatgaaacgcccgcagcacaacgaagaggccaatgggcactcttccagaggctttgtggtgcgggaccgcactcctggaatcgcagcagcagtgagaaggctcctgacatgagcagctctgaggaatttcccagctttggggctcaggtggctcccaagaccctcccttggggccccaaacgataatgatcaaaaagaacagaacccgtctccagcctgctgacccgaacccaaccacnncnatggttgtctcaatctgacccagcgntnggaccctccgtaaattgttgacgctcttcccgccttcccgaggtcccgcagggagcctagacgacctggctgtgtgtgcggcgctcctccaggcctgggcgtgcccgctcaggaactgttccacgtgtttaaacactagaacaaggtcatgagcattcgtgctaagataacagatccagtcctggtccaccctggcatgtcagtcagcactctggccttcatcacgagagctccgagccgtggctaggagttccacttccctgtgtcatgacctcaggaaataaaccgtccttgacttttataacaaaacaacagaaaag

SEQ ID NO: 626217 - DNA, 769 bp, Homo sapiens
  misc_feature (30)..(30): n is a, c, g, or t
  misc_feature (62)..(62): n is a, c, g, or t
  misc_feature (73)..(73): n is a, c, g, or t
  misc_feature (87)..(87): n is a, c, g, or t
  misc_feature (107)..(107): n is a, c, g, or t
  misc_feature (418)..(419): n is a, c, g, or t
  misc_feature (421)..(421): n is a, c, g, or t
  misc_feature (447)..(447): n is a, c, g, or t
  misc_feature (449)..(449): n is a, c, g, or t
tgctagactgagaattgtggtgaacttgancagatggtttctgaggacgtcccgctgaccancgcgttcacgnccgcatcattggtnccctcgcaaagccattcgcnaaatcatggacgaattcaaggtggacattcgcttcccacagagcggagccccagacccccaactgcgtcactgtgacggggctcccagagaatgtggaggaagccatcgaccacatcctcaatctggaggaggaatacctagctgacgtggtggacagcagcagtgagaaggctcctgacatgagcagctctgaggaatttcccagctttggggctcaggtggctcccaagaccctcccttggggccccaaacgataatgatcaaaaagaacagaacccgtctccagcctgctgacccgaacccaaccacnncnatggttgtctcaatctgacccagcgntnggaccctccgtaaattgttgacgctcttcccgccttcccgaggtcccgcagggagcctagacgacctggctgtgtgtgcggcgctcctccaggcctgggcgtgcccgctcaggaactgttccacgtgtttaaacactagaacaaggtcatgagcattcgtgctaagataacagatccagtcctggtccaccctggcatgtcagtcagcactctggccttcatcacgagagctccgagccgtggctaggagttccacttccctgtgtcatgacctcaggaaataaaccgtccttgacttttataacaaaacaacagaaaag

SEQ ID NO: 626218 - DNA, 253 bp, Homo sapiens
aactcagggcgagctgcagaaatggaggggcagagggaatgcacatcagtgtgggagggacagaggagctgcagaaatggacagcagagggaatgcacatcagatgtgggagggacagagatgctgcagaaatggattgacagagggaatgcacatcagtgtgggagggacacagatgctgcagaaatggaaagcagagggaatgcacatcagtagtgggagggacagaggagctgcagctcgcccctaagtt

SEQ ID NO: 626219 - DNA, 408 bp, Homo sapiens
tgggcaacagagcgagactccctctgtataaaaaaaaaaatttagtaacttatgaatttggaccatgtgaacctattgcttgttccaggtaaaactgaacagttgaaaagtatgctgggctaggcgtagtggctcaagcctgtaattccagcgctttgagaggccgaggtgggaggatcgcttgatttcgggagtttgagaccagcgtgggcaacatagacccctatctctatttttaaaatatactctaaaggccgggtgcggtggctcaagcctgtgagggccgggcaccgtggctcccagcacttcggagggctgaggcgggcggattgccagaggtcaggagtttcagaccagcctggctaacgtggtaaaccgcctctctactaaaaatacaaaaaaaaaaaa

SEQ ID NO: 626220 - DNA, 825 bp, Homo sapiens
gaatgagaatgggatttactgtactgtttgaaatgaggattggcttcagaatccattacagttaccttacatagcacttgatacgtgtttagatgaacaatatgaatgtaatttatatatttcctagtaattgtaatgttactttgtgagattgggggctgtccctcaaggccagtttaggatttctttgtgtctatatcttgaaatgattataaaatagagttttgatgggaattttaaaaatcgttattcaaaggattttgggagcgatttgaaagccccatactacggaagtatacgaaatgcacacaaaacaatccaagtttcagcagttttagtgctcactcattaacaccaactttgcttgtctcatgaaataatctttggtgatagttttgtactacaaggtacacataacacgttactttctgagatatataagagggctgtaagcgaattgtggggtcgtagtaagtagcagtaagtgagatgtgagtgatgtttggaagttggcgtgtgttgggtatgttgatctgggattcagcttcttactcatgggtctgtactcgaggtgtaatttcgtttatcaaatgcccttgtaattaccaattcgtgaagtctgtgactgtgtctcttgaatcatacttaggatattctggatcgttatggaaaaaaggtaattttaagaagtttcctggtctagtaacctgtagatatttatgacctcgtgggaagtatctatatttattaacaactgtggtacattgttcattttaattcacgatttcttatgaagtatggtaacagggaagggaagacacagag

SEQ ID NO: 626221 - DNA, 614 bp, Homo sapiens
  misc_feature (506)..(506): n is a, c, g, or t
ggctttcattgccattttaaaaaaaaaatagaaactccttttttacaaaattttttgggttttgatgtcacaatggaaattttacaaacccaaactttataaaagggggttaagccaattccagatgaagcaaagacttgaacccggaaagttctaaaaaaagtctaaataaaggttttcatattctatgggggaaaaagataattcaaaaggatttccgtaaggctgggcccagtagctcacccctgtaattccagcccttggggagggtgaaatggggggacctgcttaccccaagagtttgccccccccctgggcaacatggggggaccttgtttttccaaaaaaatcaaaaattattccggggggggagggcccccctaaagcccccaccttctgtggaaactggaacaaaagggttgttttgactcaaaagggtgaacctgtcagggagctgggaaattggacttccctccaccctgggcgggaaaaaggagaaccccttnctcaaaaaaaaattaatttccaagggccccatttttttaaatttggtgtaaactccctccaagggaattttttaagggttccacaaattttccctgtttttaagaccc

SEQ ID NO: 626222 - DNA, 197 bp, Homo sapiens
  misc_feature (176)..(177): n is a, c, g, or t
ttggataggaacgtcactgctagtgggaagtacaggtgcaaggagggtaacaagatatcaagtggctgggtgtggtggctcatgactgtaatcccagcactttgggagaccaaggtgggtggattacctgaggtcaggagttcgagaccagcctggccaacaaggtgaaatcctgnntctctactaaaactacaaaa

SEQ ID NO: 626223 - DNA, 873 bp, Homo sapiens
  misc_feature (28)..(28): n is a, c, g, or t
  misc_feature (66)..(68): n is a, c, g, or t
  misc_feature (98)..(98): n is a, c, g, or t
  misc_feature (106)..(108): n is a, c, g, or t
  misc_feature (113)..(113): n is a, c, g, or t
  misc_feature (124)..(124): n is a, c, g, or t
  misc_feature (126)..(126): n is a, c, g, or t
  misc_feature (138)..(138): n is a, c, g, or t
  misc_feature (144)..(144): n is a, c, g, or t
  misc_feature (146)..(146): n is a, c, g, or t
  misc_feature (160)..(160): n is a, c, g, or t
  misc_feature (163)..(163): n is a, c, g, or t
  misc_feature (171)..(171): n is a, c, g, or t
  misc_feature (183)..(183): n is a, c, g, or t
  misc_feature (205)..(205): n is a, c, g, or t
  misc_feature (212)..(213): n is a, c, g, or t
  misc_feature (217)..(217): n is a, c, g, or t
  misc_feature (240)..(240): n is a, c, g, or t
  misc_feature (260)..(260): n is a, c, g, or t
  misc_feature (267)..(267): n is a, c, g, or t
  misc_feature (302)..(302): n is a, c, g, or t
  misc_feature (305)..(305): n is a, c, g, or t
  misc_feature (320)..(320): n is a, c, g, or t
  misc_feature (331)..(331): n is a, c, g, or t
  misc_feature (337)..(337): n is a, c, g, or t
  misc_feature (343)..(343): n is a, c, g, or t
  misc_feature (411)..(411): n is a, c, g, or t
  misc_feature (446)..(446): n is a, c, g, or t
  misc_feature (539)..(539): n is a, c, g, or t
  misc_feature (685)..(685): n is a, c, g, or t
  misc_feature (717)..(717): n is a, c, g, or t
  misc_feature (853)..(853): n is a, c, g, or t
gtatgaacatgagggggttttctcgggngaatgagggttttatgttgttaatgtggtgggtgagtnnnccccattgtgttgtggtaaatatgtagggngagtatannnctgtnactagtatgtngnctcctgtaagtnggagantnatatttgatcaggngancgtggttnctagcacagagngttctcccagtaggttaatagnggggggnngggnggggttagcgaggcttgctagangtcatcaaaaagctattagngggagtngagtttgaagtccttgagagaggattatgatgcgnctntgagtgcgttcgtantttgagtttgntaggcngtttanttttgaggttgttagtccgtgggcgattatgagaatgactgcgccggtgaagcttcagggggtttggntgagaatggctgttactacgagggctttgtggctntttgtttgttttttgttttttgcgtttttaggtctgtttttcgtaggcagatggagcttgttataattatgcctcatagggatagtacaaggnaggggtaggctatgtgttttgtcagggggttgagaatgagtgtgaggcgtattataccatagccgcctagttttaagagtactgcgcgcaagtactattgacccagcgatgggggcttcgacatgggctttagggagtcataagtngagtccgtaaagaggtatctttactataaaanctattgtgtaagctagtcatattaagttgttggctcaggagtttgatagttcttgggcagtgagagtgagtagtagaatgtttagtgagcctagggtgttgtgagtgtaaataagtgcgatgagtaggggaagggngcctactagggtgtagaata

SEQ ID NO: 626224 - DNA, 158 bp, Homo sapiens
aggaaagactaaggctagagacagactacaaggatgtcgcagcagaactgcttgtataggaaaaacctgggcgctccatgagggcaatgggtaaataaatcatgctataatatactctttttttttttttttttttttttttttttttttgggggatc

SEQ ID NO: 626225 - DNA, 165 bp, Homo sapiens
tgtcagtgtgaggaccaggctgtactcgggggggggctagggtggcctactaccgcagctccacatagttggctgggaagagcccgtacctggccctatgcacaccccgtgccaccagcctgatgtcaatcatctcgatagtatggtgatgatgtcatcatgtgg

SEQ ID NO: 626226 - DNA, 230 bp, Homo sapiens
aaactactagcgactgtatcctttctgcagaaagtataaaaatggcctggctgaggaaattaaatatacgttcaagtgctatttctttacagcgtcagggaacaagcatttcaaacatagtcatgcaccaacacacccagctaatttttagtggagaagtgctctcactgtgttgcccagggtggtctcaaactcctggcttcagaatcatcctgccttgacctccttga

SEQ ID NO: 626227 - DNA, 1021 bp, Homo sapiens
  misc_feature (218)..(218): n is a, c, g, or t
gaactgccttcatttgttggctcgtgtatatgttcaggttgagttgacaaacccatttaagtatggaattgatttatatggggtcaggtgctccacgaaatagacctatgagaccaaaaatgacctaggctatgtagacgacagcatgaaacttccacgttaggttctcagtctatacaaggcacttaccgagtgctctgcgtgatgggtatgtaccncaagtacgacaacgaccgttagtacgtattgcattgtgtgacgctcacttatgggacaacaataatctgcctttctaattgttctgcactagcgttaaaatgataaatttgacattctttgaacctataccagattgtggtgtccgagtgacccggcacactgtctgacacacagtcagtgtgcacgtatttgtctgagtgaatgagcgagacctgagaaaccggtgacgtggcacagggaagccagctggtcccaggattccgtaacatggccgcaagcagactaacgcgtttgacgctaatttaagtgtattttacctcacactaaggtcatgcttgataaagacgttcaaagtcaacttgtgaaaatggtagcccagtgctatgcacagagtgggtgctcattagtgttggaatgaaccatttgtaatactacatgtagttccagtctgactgctttgttaaattttcagtttaacgtagcattctggttgaagtcccaacaccaattaatctgtcgcctggaagtttggctcaaaatactgttgaaaactgtccgactggttgaatgtcccatttcaagacatggattggggtgtagggccctggcgctgtaatcacggaaaggcgcggttcagaggtggagaccggagagaatcgggcgaatagccgggtaggggcgggtgttagcccaaacagtgtgttgttgaagaagcggctgcgagaggtgggttatgaacggcggcaaatgtgtggaagagtcactgtgcttgtactgtacggcgactacgtctgtcgtgggg

SEQ ID NO: 626228 - DNA, 933 bp, Homo sapiens
  misc_feature (933)..(933): n is a, c, g, or t
gccggagactcgcgcccccgccggatcccacctccggccgacgaggggtgagtggcgagcggggccgaccccggcgccacgatgtacgcctttgtgcggtcctggaggacgagtctgctacgcgctgccgtgtgtgcgtgcgcgattcagccccgctcgcggctggattttgacaaccagaaggtgtacgccgtgtaccggggcccggaggaattgggcgccgggccgagagccccccggcgccccccgcgactgggcgcgctgttgctccacaaggtccagatcccttggcgctggagaagacaaaatctgacttgaaaacagttgtgatgccgaagaaaataaaaatgcccaagcttttctcttaaattcatgtagaacgaacgaatggacgaggttaacagacttactggggacaacacacgaatttaacaagcttagaccccacttcaaagagaacctgacgggcggaaagtccgaagcagaaagtgtggcacaacagaaacattcgaagggcagtggtgtgactcggagtagaagaacgtaggaaacggcctgagcctgggggcatatacacgttgtccggaaagagagttccgcgggacagcctcgccaaggatcacgacgggccatggggcagggtctaaagatgcttgtgtgtgacccgggatcctgtattgacggcagctggtgtgcaacattatcaagagagcaaccggaagagatagtgacactccacgaaaagacatgaaggcaggatttgaggagggttgtttcaacaagggcccaacgtcacggagtcagggcgatgttgttgaataagagatcgggaacctaataggagggcccagacgtctggcctaggatgcaaaggctccattgtttaacagattatcaagtttatcaacaccagtagggaagttttagcgaagn

SEQ ID NO: 626229 - DNA, 253 bp, Homo sapiens
ggtggcccaggccagagtacaaggctgcaataatagctcacggtagcctcaaacttctgggtcaagcaattctctcacctcaccctctggtgaagcggggactagaggcagtgtgccatcagccgtgcgttactttactattttttttttcatagcaacagggccacactatgttccccaggcgggatctcaagacagtcctcccacgggcgaacccccataagagtgttcgaacatatgaggcagtgagcca

SEQ ID NO: 626230 - DNA, 832 bp, Homo sapiens
gggcgcccctccctcctcgcggacctggcgagtgccgtatgcccggagtggccctttaaaaggcacgcttattgtcctgtgatgtggggctgggcggggtggcgccgacctgcggcctgagggccctggcccctcccctctcactccctctgtacccgagtcagcatcgctggcatagctctgcatggcctcgcatcagcccagtaacggctacactgctccgacatccgtcagattgtgctccgcatgtcaaggtagcagcgagcagattggaagctggcagacctagagtctaggacagcacaggcacagtggatcttgacagagggcatagataaagcaggccggacatgaacgcccaaaagaatacatcccacaagcagccggacgaaagccgggcacccactatgacccacccaggagccaaaagagacaatagaggacccgagaaattgagcacaagaagaaattgaccccacagaacaacaagagggcgtgcacacgagacagacaaaaaaagcaaaccaaacaaaagcaaaaacagtaatgcaacaccacaacaacaggcgatcaaaacacacaaggaagaacagcccaacgacaaacaaaagagaggatcatacacaacagaaaaaaacctataaacaaagcaacaagaagacaaagaacaatcgcacacaaccaccacaacggaaaattaaaaacgacaccacaaaaacaagaaagcaaacaagaaatgccagatacaccaaagaaaaaatagaatcaacaaaaaaacagacacaaaaacaagccacaagcaaaaaaggaacaccccacaagacaacaaaga

SEQ ID NO: 626231 - DNA, 109 bp, Homo sapiens
atcgagctcttacccaattccattccagcgtactatgcactacctgaggagggaatgcaggaggaagagctgatatcagaagaaaaaaattatcttgatggcatagtgt

SEQ ID NO: 626232 - DNA, 344 bp, Homo sapiens
aagcttaatttcagtccataatctcgtttgacttagtttcatgacggctatcttttaaataatgaatgtgctgtacggaggactccattaatcacatgcaaatctccactctgaaagtgattcaccatttctgtcagcaagtcaggccatttctgttgaaaatcttctctgccattaatgctaattgcattatttaactgcttctgaatttgctctgggctgctcagcatcaagtgcactatgttggctttatagtggccactcgatcggcttcaccaattttgtttggttcatcttcaacaattctccagttccttttaatatcgtttttgaatgttactgaa

SEQ ID NO: 626233 - DNA, 414 bp, Homo sapiens
tctctatagcaatactttaatatcccaaaaaaaaatatgaactgaaaatggttttatctacccaaatggttttactgtgtaagggctacagataaacttattggacttggcaaaaatttagggaaattggtcccatgagtcttttttaagggaacacttattcaatatctattattattccagctggcacccaagagtattaatatggggatattgtttgagagttcccaaataactatttaacacttgtggacactaagaatatgtgaggtatgacacacagatatgtcaatattattattatgtcctccacagaggtagggaaattgattacacaccaaaaattgtgagaagaaacagggaaaagaaaagtgtggaaagttttccacgtgattaccaaattacattagtttg

SEQ ID NO: 626234 - DNA, 365 bp, Homo sapiens
  misc_feature (6)..(6): n is a, c, g, or t
  misc_feature (267)..(267): n is a, c, g, or t
cagggncaatctaagagttattggcataaagaggaggtagagaaaaagataggagtagaaagtttaaagagataataacagagaactttccaaacctaaagaaagatattcatatcccaggtaccgaatgttatagaacaccaagcagatttaacccaaagaagactacctctcgggcatttaattaattaaactccccagaggtccaaggattttggttgagggatttttggcattccattgtttatcaagggatattgggtcccnaagttttcttattttggttagttggttgttggtcttttcccaggttttggttatccaggataattgcttggccttcataagaattgagttaggacaag

SEQ ID NO: 626235 - DNA, 84 bp, Homo sapiens
cagccctgtacttctgtgccagcagcttagtagggggagccaaaaacattcagtacttcggcgccgggacccggctctcagtgc

SEQ ID NO: 626236 - DNA, 217 bp, Homo sapiens
tgtttatcgatgcacggtgtttatcgaagccaaccgtggactagtggtgtttatcgatacaccggtgtttatcgatgccaccgccgggcgcggtggcgcgtgcctgtagtcccagctactcgggaggctgaggctggaggatcgcttgagtccaggagttctgggctgtagtgcgctatgccgatcgggtgtccgcactaagtggcatcgataaaca

SEQ ID NO: 626237 - DNA, 157 bp, Homo sapiens
ttttaaaaaccccccccccccaagggggggggggccaatttttcccaaaggccgggcttttgggttttttcccggccctttaatttttttttttccccaaaaattttttttatgggggggggggccccctaaaatttttttttttggtgccccttta

SEQ ID NO: 626238 - DNA, 420 bp, Homo sapiens
ctaccactaaacagcatgtcgtataacatcactaagtcactaagcatgaagggggagcctttatgtactaatcaccttccaaatacctcacctcgctaatatcatcacacttagggatgggatgtcaagatatgaattttgatggaacacaagcataccattcacagcagtcatcctcatataaactttcaaagaaataaagatcattgggatgcgatatgaacagagtggctgcttctgcagggaagaaaaggtagttctcaaacagtaccattaagcataagagaaatccaggtaggaagcattcaaattctacctttggagacagttgaatgagaagtggggtgatagtgcgggaaatattttttaacctgaatttggatgctgggctgttcccatcagacaggtgcagcgtagaat

SEQ ID NO: 626239 - DNA, 345 bp, Homo sapiens
acagcagctggacactgccatatagattacaaatgggtctccccatccacagaattacatatacaacaagccctgtcggatatgtagctatttcctgaacaaatacattaatacactttttgtatcgacatttgtaaaaattcacggttactcataacattacttcgcaagacatttggtataaggtggtataatacatattaggaaacaaacactgtaccaaaatggatatgacttgtgaataaaccctaaataaagtggctttcggaagaactggattctgcagcaaccaactttatcacgaggtccatccgctctcaatggaaaacacccaagcataccatt

SEQ ID NO: 626240 - DNA, 114 bp, Homo sapiens
gctcgaccaatgaatcaaactggaaaccaatgacaagaaagataacagaaaaacatttcaacaaatacaaactagacttcctctttgatcatcagttgttttaaaggttctgtc

SEQ ID NO: 626241 - DNA, 350 bp, Homo sapiens
taagatgaatgtatcacggatggccgtttttgtatccggtgctgcaactaaactttcgaaattgtttcaaagtcgccaaatgggctactttgatgtagaaaacggcccctgagtcgcccacgaactcaacctcttttgcggcgaaaggagacgctatgctttttccagtactcgatggtctcaagctgcacaaggtgctggtacgcaccatcaaggaattcgtcgatgacgagatgcctacctacgcctcggcactggcctaccagatgctgttctctttgtttccgttcctgctgttcctcattgccctgatcggcttcctgcatttgcccgacttcttcagttggctg

SEQ ID NO: 626242 - DNA, 123 bp, Homo sapiens
tcgtctttatgaacatggataggacagatctgacacttcctttccattgctggcctgaacagactgacctgtttaacttaagcctggagtccatgcctcgtcttcctttgttcatgctgttac

SEQ ID NO: 626243 - DNA, 861 bp, Homo sapiens
  misc_feature (16)..(16): n is a, c, g, or t
  misc_feature (27)..(27): n is a, c, g, or t
  misc_feature (48)..(48): n is a, c, g, or t
  misc_feature (52)..(52): n is a, c, g, or t
  misc_feature (90)..(90): n is a, c, g, or t
  misc_feature (105)..(105): n is a, c, g, or t
  misc_feature (109)..(109): n is a, c, g, or t
  misc_feature (114)..(114): n is a, c, g, or t
  misc_feature (140)..(140): n is a, c, g, or t
  misc_feature (154)..(154): n is a, c, g, or t
  misc_feature (161)..(161): n is a, c, g, or t
  misc_feature (165)..(165): n is a, c, g, or t
  misc_feature (174)..(174): n is a, c, g, or t
  misc_feature (178)..(178): n is a, c, g, or t
  misc_feature (180)..(180): n is a, c, g, or t
  misc_feature (204)..(204): n is a, c, g, or t
  misc_feature (211)..(211): n is a, c, g, or t
  misc_feature (213)..(213): n is a, c, g, or t
  misc_feature (217)..(218): n is a, c, g, or t
  misc_feature (220)..(220): n is a, c, g, or t
  misc_feature (241)..(241): n is a, c, g, or t
  misc_feature (248)..(248): n is a, c, g, or t
  misc_feature (252)..(252): n is a, c, g, or t
  misc_feature (265)..(265): n is a, c, g, or t
  misc_feature (267)..(267): n is a, c, g, or t
  misc_feature (272)..(272): n is a, c, g, or t
  misc_feature (278)..(278): n is a, c, g, or t
  misc_feature (288)..(288): n is a, c, g, or t
  misc_feature (298)..(298): n is a, c, g, or t
  misc_feature (324)..(324): n is a, c, g, or t
  misc_feature (348)..(348): n is a, c, g, or t
  misc_feature (351)..(351): n is a, c, g, or t
  misc_feature (356)..(356): n is a, c, g, or t
  misc_feature (364)..(364): n is a, c, g, or t
  misc_feature (368)..(368): n is a, c, g, or t
  misc_feature (423)..(423): n is a, c, g, or t
  misc_feature (764)..(764): n is a, c, g, or t
  misc_feature (766)..(766): n is a, c, g, or t
  misc_feature (843)..(843): n is a, c, g, or t
caggagccagccccanccttagaaaanatgttttccatgaggatcgtntgcntggacctaagtgtggtgggcacagcatggactgcaganagtggtgaaggtgantttntagcngaaggaggaggcgtgcgtggcccaanggttgtggaaaaanatcaatntgcntgcaaaaantcanantggcccttctgctctgatgaagantggaacnanaaanncncttctggctgcaggatgaaanggttgantgangaagtcaatcaanantttanaaaaanaaaaaaaaanctcaaaaaancacaatttgaatatcagaagaacaanaaggattctcattcgttgaccacnaanataanggaaaaantganaggcgatttttcctcagccaataaccgtgataatacctacaaccgagtgtcagangatctgagaagcagaattgaagtcctgaagcgcaaagtcatagaaaaagtacagcatatccagcttctgcagaaaaatgttagagctcagttggttgatatgaaacgactggaggtggacattgatattaagatccgatcttgtcgagggtcatgcagtagggctttagctcgtgaagtagatctgaaggactatgaagatcagcagaagcaacttgaacaggtcattgccaaagacttacttccctctagagataggcaacacttaccactgataaaaatgaaaccagttccagacttggttcccggaaattttaagagccagcttcagaaggtaccccngngtggaaggcattaacagacatgccgcagatgagaatggagttagagagacctggtggaaatgagattactcgaggangctccacctcttatggaa

SEQ ID NO: 626244 - DNA, 442 bp, Homo sapiens
  misc_feature (15)..(15): n is a, c, g, or t
  misc_feature (36)..(36): n is a, c, g, or t
ccaatcaaacgcctngcattcggaggcatcttggcnggattggtcatctcatataatattccaccaaccagcattccagtcctcacaataccatgatttttaaaaaccacagcccttaattatttcagtattaggattcctaatcgcactagaactaaacaacctaaccataaaactatcaataaataaagcaaatccatattcatccttctcaactttactggggtttttcccatctattattcaccgcattacacccataaaatctctcaacctaagcctaaaaacatccctaactctcctagacttgatctggttagaaaaaaccatcccaaaatccacctcaactcttcacacaaacataaccactttaacaaccaaccaaaaaggcttaattaaattgtactttatatcattcctaattaacatcatcttaattatt

SEQ ID NO: 626245 - DNA, 413 bp, Homo sapiens
  misc_feature (259)..(259): n is a, c, g, or t
ctgtaacaggggcagggcctgaagagttttccccaaatccttttccacctttacctttcccttttgattataaatttccatgtttaaagtcatttttcccttcctaaaagcttaatgcattccccaggcatagtggctcatgtttgtaatccctagcattttgggaggccaaggcaggagagcctcttgagctcaggagtttaagaccagcctgagcaacatagggagacctggtctggacaaaacatttaaaagttcncctggcatggtagcacatgcctgtagtcttagttacttgggaggctgaggtgggaggatcacttgagcccaagaggtcaaggtgccagtgagccatgattgcgccactgtactctagcctgaaagacagagagagaccttgtatttaaaaaaaa

SEQ ID NO: 626246 - DNA, 104 bp, Homo sapiens
  misc_feature (4)..(4): n is a, c, g, or t
cggntcgacggggattatgggaattgagtgtctatgaaaaccatattccagacaagaatatagtctaaggacacagcaagaggcaacattttggaagcagaggg

SEQ ID NO: 626247 - DNA, 126 bp, Homo sapiens
ccctcttctgatccgtcctaattacagcagtcctacttctcctatctctcccagtcctagctggtggcattactatactactaacagaccgtgaagctcaacaccaccttcttcgagcccgccgga

SEQ ID NO: 626248 - DNA, 158 bp, Homo sapiens
gtatgctatgtgttgtcaggggttgaaatgagtgtgaggcgtttataccatagccgcctacttttaagagtacatgcggcaagtactattgactcagcgatgggggcttcgacatgggctttagggagtcataagtggtgcccgtttagaggtatctt

SEQ ID NO: 626249 - DNA, 175 bp, Homo sapiens
gagaagttgatggcttggcaagaggactcaattgctgcatcacctattaagcatttttgaagcacatcatgtccagctaaacctcgtgcccaggaagcccagggaaggcctttccaggcacgtctaatttccaatgtgtaatgctgacaccagcgccttgagtcgtgggaaggag

SEQ ID NO: 626250 - DNA, 603 bp, Homo sapiens
aagcagtggtatcaacgcagaggggccattacggccgggggcggggcgcggtggtcacgcctgtaatcccagctctcagggaggctaagaggcgggaggatagctggagcccaggagttcgagacctgcctgggaaatatagcgagacccccgcttcctcccagacacaggaccaacacacaaacaacaaaaaacaccaaggggcacaaaaaaaaaacaaaaacaacaagaacacaaacactgtggtgtgggcgcggcccgggcccgagaagaaagttctaaaaacacacactgggtggggggggcgggggggcccccagagtgagggtagactggagacagagtgtgggtcaacaggaggggtgggtcccaacaggaagaagaaaccgtgggaaccatgaaacaagaggcgcggtggggacttccccccacccacaagaaaaaaaaacggcgcgggagggaaacacacaagagtggtttcgtggaacaacaacactccagaagaggagtccgggagggacaacaacgcggggcgatctctccacgagggagggatcacagggaggagccccaaaaagaaaataaccccccgcgaggggggcg

SEQ ID NO: 626251 - DNA, 196 bp, Homo sapiens
tgtggagcgggggtctcacaggccggcaggatggtctcaatctcatgacgtcatgattcgctcacccgggcctctcaaagggctgggattacaggcgtgagccactgtgcccagccaagagtttttctggttgaattatctgggcaccttggtggaaatgaatggccaccacacacacccggtctccacagggtac

SEQ ID NO: 626252 - DNA, 186 bp, Homo sapiens
ttttgaaaagggggggttttttttccccccctttttttctggggccttggtttcccccccattttttttggtcccggggggttttttttccaaacccccccccccctttttttctggggggtttttgggggttaaccccctcccccggggggtttttttttttaaaaaattccccttttcccccca

SEQ ID NO: 626253 - DNA, 462 bp, Homo sapiens
ctcaagtgatccacccaccttgactcccagagtgcctgggattacagggtgtgcagccaccgtggctggctgagatttcctttctaagaaaacttgaaaatgtctgatagatgatccttatagcattggaaagattatgcctttagatctgctaatactgaattctttatttatttttatttatttttattttttttgagatggagtctcgctctgtcacccaggctggagtgcaatggtgcaatctcggctcactgcaacgtccgcctcctgggttcacgccattcttctgcctcagcctcctgagtagctgggactacaggtgcccaccaccacgcctggctaattttttgtgttttttagtagagacggggtttcactgtgttagccaggacggtctccatctcctgacctcatgatctgcccgccttggcctcccaaagtgctgggattaccagtatc

SEQ ID NO: 626254 - DNA, 263 bp, Homo sapiens
tgcaagttttttgttctctctcaaccagtttttccatctggcgaatgggaataaagtatatgttctatgtagtttgtggtggtgattagccaatatcttgtgtgcaatactatctgcacttaggaagtaaatgcaagcttaatgatgatgattagatgacacaagcaacaactctacttggctcaacttgtttttggtaaacaaatgtaaaacacttaaagaaaacttctccgtttttgacaataaagtatttaaacatgttg

SEQ ID NO: 626255 - DNA, 167 bp, Homo sapiens
  misc_feature (75)..(75): n is a, c, g, or t
  misc_feature (94)..(94): n is a, c, g, or t
gggaagagaagagtgactactaaaagtctgtaaacaaatctgcattcggtttttaaagtatcttattaataccanaatcaatttttggccaaanttttaagagttctgtcaccttttcttatccaatttttacatagttacatttttatgcagctaggaaaatacac

SEQ ID NO: 626256 - DNA, 510 bp, Homo sapiens
agacgagaatctctgaaccgggaggcagaggttgcagtgagccaagatcgagccattgcgctccagcctgggcaacaagagtgaaacttcatctcaaaaaaaaaaagaaaaaaaagtattcgggtgttgtgccttgtacctttagtctttgctacttggaaggctaaggtgggaggatcatttgagcctcagcaggctgtggaaagccatgtatgcgccattgtactccagcctgcatggtagagaaagacccgttcttaaaataacaaaacaaaacaaacaaacaaacaaaattacccagatttaattgaggttacatagatgtttaagtttctgtaagcgggcaattttaaaaggtataagctgaaatgatacagtcattttatcatatgcttaagataggctattttcaacgaattttgcccttttggtatatttgggcatataataaagtcttaaaattttagtgtggatttagagtaaggcccgtgtatttaaaaaaaaactgaa

SEQ ID NO: 626257 - DNA, 245 bp, Homo sapiens
  misc_feature (232)..(232): n is a, c, g, or t
  misc_feature (238)..(238): n is a, c, g, or t
agaaaactaaagtccaacttgcccaaagccacatagctagtaaatgatagagcacatattctaacctaggtctgactacaaaatccttgttctttccactgtacctcaaaaaaaatgagaaagctggtatatactcacactgatccatctattatttctttaggtactaagttcattatccagaaagttctacagtcaggttacttattaaggtttgtgtgaaagataaccnaaaccnccctacg

SEQ ID NO: 626258 - DNA, 1229 bp, Homo sapiens
tcccttttgtcttgctgtgtcttttggggtactttgtgtctttattttcttgtctgctcagcctttctgtcgtctttgtagcattgtgtgggttgtccctcagcctctgtcagtcttgtgttttcgctgttttttattttgtttcggggttcgcctcccgtgcgctgcctctgtggggctcccttggatagtttttttttgctcctgataatgtcccttttttaaaatcggttttttttcccactaaatatggtttttctctgtggatattcatgccaagtttatatctcgtcgctagtgtcaggccctgtgagtgtgcttcctcccctgtctgggcttccagtcattggggctacttgggccacagtctattttcgtctccttggtagttcttcgctcgaaatttcttcgaggagtttggcggctcttggggggctttcccagctcagtgttctctgaccaagtctttcctgggtttaacccccctttgtcggtcctgggcccccttctttgggcttgcccccgtgtttccccagctctctttcctggtatgtccagcttcctgtatgggccgtcatgtgggtcttctccgatgtttcttgttgcctccggggtatgttttatcccgatagacctgtctcctgggctcccctatggtcctctattctgtggttgctctcccatggtgtcccctgcgggccccatctccgtggggattttccgcctgggccggtctttcttgctccattgctctttcctctgggtccaatccggacccacttttaccgctccttatactcctcggtatttaggccaccccgcccacgagtgatttccgggcacctttccgggagcccattcggactcctggtcttccttctggggatgcttcgccggttctgttatcgccgtcacggaggaaagaattggctcccaaaaatctgtcaccccgcgagtcgaaacacgctttgaaaagggatctgaggctcaccccacggtttccacgcacaaccggaggactgtatactggggagagtcacccctgagccagcccttccctggactgccggaatcccacgcacttagcttcctgctgaatgtagtatttggcatttctctgaatttatttcctctccttcccccactccccgctttctttttatggcccccgggggagggggagagacccaaggagatcggtatctttgtaataaaactgcaattttata

SEQ ID NO: 626259 - DNA, 859 bp, Homo sapiens
gatggtggtactaatctctgcaaggctacaagaatgcagtatggttttgggttggctggtttttctagatagaggcaggtaagtggcttccactttatagcgtaattgccctcactcttcaggtcaggaaaccagtgtagggattctggctaattgtggagtatgtctattccaattattctggcagctacagagataacaagacgacccactgcaagacagacctaaactaaaactccatgtgatcacctaacctccctaagcccctactctcacttgtgaaccagagtgatgcattagttttcctgggggtaccctgagtctggagttcagaaccaatgtccagtaattcccccaaagtctgattattcccttttccccaatgcacagtcaacttggtaaagtgctataggtcccttgggggaaggctgagagaacaacatgaacagtatacaatttgtggtaatgcagtggggaacacatgctcctcattgtatttaacgggagatatgggtctgcaaactgggccaagtctgggaattgattccaggagctgtgactccggatgaagcgagttagactttattcactgaggctctttaaaccggacacgataaaattgaaggttcccccttatacatgggagatggcggtatggcaaaatctgaacgctcacccaaggggtgcggctaaacaaccctgctgcggaaagaatgcgcccgggagactctatacacggtccttctctctcctctacgtcacactgcctacacggtcgtctgtcactccgcctaaaacaaaccacgaacgacagaagcagagggaaacgacaaacgaagcgcaggacagagagacgagc

SEQ ID NO: 626260 - DNA, 108 bp, Homo sapiens
gcggccgactactactactactgctcgaattcaagcttctaacgatgtacggggacatgccactgcactccagacctgggtgacagagtgagtctctgtctcaaaaaa

SEQ ID NO: 626261 - DNA, 485 bp, Homo sapiens
  misc_feature (1)..(2): n is a, c, g, or t
nncgacagatttcctatgttgagaacactgagaacatttttagtgacacaccaacagagtatgccgtatggggggggtacttgatcaggctatgccctctctgacacaactcattctcaccaataatagtctcgtggaactgggggatctggaccctctgccatctctcaaatcgctgacttacctaagtatcctaagaaatccggcaaccaataagaagcattacagattgcatgtgatttataaacgttccgcactgtcagagtacctggatttccccagaaacgctgaaacctaaaaagagccgtccacggaagcagtagacaaatgtttcatagggccaaaccggggttgcacaagccttgcaaaggatattgccaggagaagctctccagggcatgtagaagcaatcaagaatgccatagcaaatgcttcaacttctggctgaagtgcagaggcttaaggggttgctccaaactgatcac

SEQ ID NO: 626262 - DNA, 757 bp, Homo sapiens
tggtcgttcggtcctatgtcgcgccgggccctccgtaggctgagtgggggaacagtcgcgggcaggagcccctcgggacccgggccttgatacgatctccgatgatgacgatgacgcggacgaacaacgggcccaagcgggcatcttgggtgtccggcgtcccgggggcgcagtgaaggcccggcgtccgagtcaccaaccggttcgagctgataaacattgacgatcttgaggatgaccctgtggtgaacgggcagcaggtctggctgtgcgctcacagacgctgtggccccagggaacaaaggcacggggtcagcgtggaaacacagagagcaagacggatggagatgacaccgagacagtgccctcagagcatgtctcatgcaagtggcaaactccggaagaacgcaaaaacaaagcagaggaaacaagaaaagcagcacgggagaagcatcggaaaaccggactagaagatatcgatcgcatcctagagaggattgaggacagcactgggttgaagcgtcccggcccagatcccctgatctccaggaacgcacgtctctacgtggagcacagacacttgaatccagacacagaacttgaacaggtatttcggtgcccgggcaatccttgggggacgcaaaggccacggagaagacaaccgttgtgtaccccaagtgcacattgggtgaacacccttaaaagccgttggccccggtacagcaaaccaggtccggccctgcggtcgctggatcca

SEQ ID NO: 626263 - DNA, 139 bp, Homo sapiens
gggggcccggggggggttccccccccccctttcccccggttggttttaaaatttcccccccccccggggtttttttaaggccaaaaaggggttttttttttccccctttttgggttaaagtgtaaatttccggggccca

SEQ ID NO: 626264 - DNA, 131 bp, Homo sapiens
agccccgggcagtatgcatggcatcatctgccagcacattcggcttgtggtataatgctgcactggttccagcatacgtcactccaggcgccatccatctcaacccagccttcgggtttagtgagactctt

SEQ ID NO: 626265 - DNA, 466 bp, Homo sapiens
cacgccgcacggcggtcaaaactggcctgggcaacatggtgagaccctgactctacaaaaactcaaaaaattagtgaggtgtgacagtacatgcctgtagtcccagctactcaggaggctgaggcaggaggatccctttagtccacgagttcaatccatcagtgacctatcattatgccactacactccagcctcggtgacaaagcgagaccttgtctcaaaaaacaaaaataaggccaggcatggtggctcacacctgtaatcccagcaatttgggaggtcgaggcgggtggatcacctgaggtcaggagtttgagaccagcctggccaataggtgaaaccctgtctctaccggaaaaaaaaaacaaaaattagccgggtgtggtggcaggtgcctgtaatcccagctactggggaggctgaggctcaagaactgtttgaaccggcggtgcggcgtgcggtaccg

SEQ ID NO: 626266 - DNA, 119 bp, Homo sapiens
cccagaaaaggatctggtgatgtgttgggcccaggaacgataagctgatcaggtcactgctagtgacaatggccttcatcatccgaaagctgcatccggtccttttctgggtgagagag

SEQ ID NO: 626267 - DNA, 667 bp, Homo sapiens
  misc_feature (391)..(391): n is a, c, g, or t
  misc_feature (408)..(408): n is a, c, g, or t
  misc_feature (410)..(410): n is a, c, g, or t
  misc_feature (435)..(435): n is a, c, g, or t
  misc_feature (445)..(445): n is a, c, g, or t
  misc_feature (477)..(477): n is a, c, g, or t
  misc_feature (490)..(490): n is a, c, g, or t
  misc_feature (496)..(496): n is a, c, g, or t
  misc_feature (513)..(513): n is a, c, g, or t
  misc_feature (533)..(533): n is a, c, g, or t
  misc_feature (552)..(552): n is a, c, g, or t
  misc_feature (579)..(579): n is a, c, g, or t
  misc_feature (585)..(585): n is a, c, g, or t
  misc_feature (638)..(638): n is a, c, g, or t
  misc_feature (661)..(661): n is a, c, g, or t
ttaagccattttaagaattttttatcctaaagacatctggaagccaatgacattttaagcacaagatttgtaaacatgttcagatttgcatcttagaaagataactcttctacctaaaaaggcttccaggcagagattactttggactgagtattacaatgaaaaaaggtcagggtcatttatgggtaaataactctttcaaaggtacagagacataaaacaatcttaaagtatgctgaaagaaaaaaaacaaagtaaaccaatcagtaaataataatattttcagtgtctcaaaaaaaagtaggtcccttgatcacaatttcttcataaatggttttaaagaacattaacttccaaggtcatatattgctagtctaaaaattatttcttnctctgaattgctgctgncnttgcacagagaatctttaacttggnggcatggtancagaaacctgacctttttggggccaaacaagngacccaattgggncacggnaaacccgggcttgggcnttaccctaaaagggcttctnaaaagggtccccgaaattnacttaaagtttttcaatcccttttccngaaccnaattttttccttaatggcctttttggaaatcttattttccaggggaaaacccntttggaattaattggtggccccncccaaa

SEQ ID NO: 626268 - DNA, 266 bp, Homo sapiens
ctttccgtgagaactcactaagggtagtagggatatctagcctaggacgtaatatacaggagcatggtacatgaagacgtatcctcgaaggccctctaatgcccaggacactgagccatgtcgacttaatagggcagtatgataacagtagtcccagggtggcattctccagcagcccggagagaaggaggcatagtcatccagtggagtgcaccagaagagaaataccatcgtagcagcagcactcgacgcgggcatctagagtc

SEQ ID NO: 626269 - DNA, 188 bp, Homo sapiens
ggggcaaacccatttttttttcacgggttgggcggcattggttcagctgtttgggtcagaagaaaaaccccctcccgggccccctttgaattctgggccatgggcctgggggggcctttttgacaccggggggttcctccttttgggggccccccctttttttccccccctttttggcccccttccca

SEQ ID NO: 626270 - DNA, 234 bp, Homo sapiens
tttggagcccttttcagtcaagtttgccggaagtctttttttacccaccccccagttttcctttaaacgggccccccactttaaaaagggttaaaaaaaatgtttcttgggtaatgggttttttattgaggattgtttgggctaagccttgtgttaaattttaaaaaatagtgggttggcccccctttgttggggtgttttccttgttgaaaataaaaaaaactttggttttca

SEQ ID NO: 626271 - DNA, 513 bp, Homo sapiens
gaggatccgaaaatgaatagaggcggtttgaaatgaaaccaagtagaacttcttgggaaacaatatatcaaaatggaaaactcagtggatgagttacacgtcaagttaattagagttaaagatacatctacataagttatctagaatgcaaagagataagagatacgatggaaacattaagagagacaaagcaaaggaggagatggttcaaattctgtctcattggagttctaggaaaaatggagaaatcaggagtgaggcacttaaaaaagatggctaaaattttctggacttcatcaaagccacgaaacctcaggttcaaataattcaaacaaacaaaaaccttcaatcagcaaaaattaaaaagaaatccagagctatcaagccatgaaggaattttttttttttttttttttttgggggaaatagagttgggctttggtgcccaggggggggggcaaaggcattgtccccagcacagggattcctaaaacccgcgggtccaggggttcc

SEQ ID NO: 626272 - DNA, 343 bp, Homo sapiens
tcgcagacaacaggatctgtaggtgctggctgtcaaacaagagaacgagcacctgactggaggactacgagaagctggccagcgacctccatggagtggatccggcgcaacatccccatggactggaggaccgtgtgccacaaaagactatccaggagatgcagcaaaagctggaggacttccgcgactaacgagacgtgatgcacaagcacgcccaaggtgcaggagcagatgcacaactgaagatcaaacttcaacaagccgaagacaaagctgcgccatcagcaagccggaccgcctacatgccctccgagagaaagatggtctcggacatcaacaatgg

SEQ ID NO: 626273 - DNA, 914 bp, Homo sapiens
tccaaaccagtctgttttcaatttaagccaagttaaataagttgaggtggggtggagcggggatcatcaaaaggctgacttgggcccgctggatttggcaactcattaccagtgtgaggtttggcaaggaggaccaacccccttctcaagacaaggcacaaacttattgtggcaaggaaaagaattgagggggtgggcaccctcacttgctcaagtggacattgcctcaggaagcgccaggtgcgtttcacatgtgcacacaggcaggactcatttcagggacacacttctcgagccttagtagagcgctgtggcgcctctctgtgcatgacaggcgctagaagagctctcgaggcgtgtctctctcacagagcgccttgctggaatctccacccgtggggaaaagtgctctccaacgcctgtgtatgaagtttctattttcccacaactctctctctgtgtgccgaccggcgtagtcttaacaaatgtgttcccacgtatccctctctcccccacaaagtctccaccttgtgtgggctgtcggcccccccatgtgtggtttcccctattctgtgtcccgtgtgtggaactcaccctgcggtgttgtttgatctcttatatctgtgcggcttagaacaggtcatcaaaaggggggcatccccaacctgttgtaattcttctcttcgctcattctgtggcccccaactcttgtggagggcccaaggtatctctctctataacccacgctgttgttccccgggctgtgaaacgcaggccctctctttgtgcgtaataccacgctgtggaaaaacgggccctctctgtgccctattctgtgtggccccatctctttgtcttcgcacgccctcttcgtgaccactcgaggagctcttcggaggtggccccccctgtat

SEQ ID NO: 626274 - DNA, 943 bp, Homo sapiens
aagcagtggtatcaacgcagagtggccattacgggccgggggggggggacaaaaaaaaaaaaagaaaaaaaaaaaaacaaaatgtgttcgggcggcgccctgagccctctggaaagaagagttttccgtaaaccatgtccgttgggggcgagcggcggccccgacgagtggtcaagggaaacgggctcacacagtggtccccagaggaaaaccgcgggcccagaagacgggctggggctttctcacacaacataaaaaaaggcgcggggggacaaccgcgcgagggtttcgtgaaacaactcccgaagaggaggtccgaggaggacatcaaggggagtcttatcaaccgggggggtcccaggggaagcgcggcatattcaaatatgagcccccgccgcgcgtgggaacaagcaacaagacagcaaaaacaacaaactcgccaggcagtggcgagcacacaaaaggaaagcatagcggaaccgaagaaacaggtcgagagaaagcaatgggaagcgaccgagaccagcgcacgatgacaagaagcagccagagacagggcgaagcgcggcagcacacgcaggaaaacgacgcgacacgagccgacgagcggagacaagacagaagatgaacacagaacgaaggggaaacctgaagaaccacgaccggacaccacacgacaaaacgaacagagacaaggcagagagaacacacaaaaacaatgagaggaaacaggaaaaggaaaagagacaagagagaaacggacacacaaagcaaacctagggcgaggcaacagagaaaagaacgggaacaaaaaggaggagacaagagacagcacgggaagcacagaacagagaaaagacgaaacggaagaacatcagagagcaggaaaccacagcgaagaaaggagacaaagaaagagagaaaagaagcaacgcgagaagaa

SEQ ID NO: 626275 - DNA, 884 bp, Homo sapiens
ggccgctcgatggccagcagcagctctgcaaggaaatgctcagccctatcagcactgtcccgtggtatgcctgtgtactcttgcctttcgtgggcttgcgtttctctcctctagatgggtggggatgacatttcaaatgactgttcaagtacttcccacgtgaaggaatgaatgatagaaggagaaatgtcgtgtctgagggagatagggcttttgagattacgcgcagatactgaagaagttgtgtttgtgactgatggagaatttcaggaatgaatgagaaagacctttgcgaaagatatgacaaggagtttagatcagtcatgtgaacgtattgagtctaagaagcatgagcgaaactgaagaccaaattattctcactgttgatggtccgtggatgggagatttaaagggaagaaccacaaaggcttgcataagataggagaggcatccatctctacatgcagtgtagaagctccttacgggtgcccatcaagagcatagcttggaagccaccatgctgtgcggaactgcgtcagggcaaatgtcacaggcaggatttccccaatccagctccatcatcacagacacagagagctggagggggaggccgtgccacggtgttgtcgactctgtcctcctctgggcagccatagatccttaggtgctcaagtaaaggtgtggctgtactggaaagcacaaggagcacatcatgcccgctataacagggttacacggacgactcaaacttcagaggagacgatgcagcttaaaggaaagatccccagaagggggccaccagaggtgagacgcgtgtgccacaaatatccgggggccacaaaaggcgcccgcacttgatgagacaaagggtggcgatgggcacc

SEQ ID NO: 626276 - DNA, 911 bp, Homo sapiens
taaggtaaaaaaaaaatacaccttcagttcccgtggtttgattcctggttaaaatggatgatttttctttgaaagtttgtgctgattaaccaattaaaggtgggatgatatttgggcaaaatccatttatgaaagtagaagcaaaaatcagtgggtttgctcaccacataaagccatgctgttttgggtcaacactgtgtaacctggaaaaattcacatcatttctgagtttaatccactttaggatattattccactattgtttgggtgaatttgctcgaataggaattgtttttcttctctcaaatctgtgatctcttttcttaaatccgtgcttcccttgtgtcccttgtgcgttggcttctctaatttttctctttggtcccattctttctctatactttttccccctttccctttttgggggaggcttggctagttagttgtgtgcggaacaaagaattacgaccgtgaacctttgccttacgtggacctgttcccgggcaccatacccacgtctttttgaaggtagcttatacttagccccttttgaccatcttccgggccccacaaaattgttggtcccgcattttaacgggcgttataactttcctggcttaagcccatatttggtgcctagggtttcctacctattgtggaggcgattgccttttgtaacagtcctggataaagcagattctcctgttagatggacgctacagattggaaacttgccggcggttcacattcatgccagggttcatgaaggcgccccggcttgaaaaaagggatctcggtaacatacgtataggtaaggcacattagactcatgtatgaccgctgaagaggctactcacacattttcccgcagtacccaccaagagagcagtgttgtgctacagttatccaga

SEQ ID NO: 626277 - DNA, 627 bp, Homo sapiens
agcggaaagttattcaccatgtaatctagcacagcatgtttgaagcatcttggaatgaaaaaaaagaagaatcaggctgttatttcctgaaatgttatgagagataacatgttgaaaggtaagaactcaggttgatattaatcatgtttttatcaatcttcattttaaagttgttttgttctgtatattctaaattccttttattaattcctggcttgatcaagtgggcttggatccatatgatttttttttttttttttttttttggaaatgaaatctcgctctgtttggcccagggcgggatgtggcaatgggaccagatctgggctcactggcgaactctggttccccagggtgtcaaggtggattctccctggcgctccggcctcccaaggatacgctgggagatatcacagggtaccttggccaccatggcccgggctaattttatatatttttaatagaagaagggggtttcaccattgttgggccaggctgggctctcgaaactccgtgaccttcgaggggaatccacctgtgcctcagtctccttcccaaaagtgcggggatacggggtgtgagccacgcgtgccgggccaggtggtgttttttcccgttaaaatatat

SEQ ID NO: 626278 - DNA, 192 bp, Homo sapiens
cagttatctagtatactaacatcatcttatgcacctataatacaagcatagggaacttccaacaaatgcataaggtcaaatgagggtggtgccaaaaggctacaactttgcattagattttatacatttgaaggtccaataagtcccataaaatggctatgtcttagtattattcttttagtcagagcaggt

SEQ ID NO: 626279 - DNA, 775 bp, Homo sapiens
  misc_feature (405)..(405): n is a, c, g, or t
ggaggcagtgctgtgccggagctgcttgtgccgatttgcacaagccagttgtcaatcttcaggaattttgcaaacacgttgttaaacaactgttaactgttacttacaattaaattacataaacttataattaaatatattagactaaaagtgggtaacatatattcacaatgtataacttcctaattattacattttattgtatttgtgcttttttttgttttttttttttttgggagcacaggagttctcactctgttcgccccaggcttggagtctccaggggcgcgactctcggctcacgtgcagagcctccgcctccgtgggttctcacgccaattctccgtgcctcagcctctcccgagttacccgggacctccgggcacccgttcaccacaccgtggncctaatttttgtggtattttcttagtagcagagtggggtttcccaccatgtgtttagccaggaaggtggctctcaactctgaccctcgctgatcgtgcccgccgagccttcgctgattctgcccgccttcggcctcccaaatgtgctcggattaacaggcttgagccaccgcgcccagcctgttttggtcgccctggaggtatcttttggcctgttgtactccatcggggggaaatatgatatacggatgtgcttatgtgtcccggtggcatctcttcccatgaccagtaattgtacctgttggtacgctttgaaactccagaatttttctcaccctccgggaatgggccttccccccccatgttatgcg

SEQ ID NO: 626280 - DNA, 170 bp, Homo sapiens
gcacgagatacattctaccttaaatgtttattttgtttaagaaaacatagaggccaggcaccatggctcatgcctgtaatcccaaccctttgggaggccaaggtgggtgggtcgctggagcccaggagtttgagaccagcctaggcaacatgaggaaacccttctctcca

SEQ ID NO: 626281 - DNA, 387 bp, Homo sapiens
  misc_feature (22)..(22): n is a, c, g, or t
  misc_feature (52)..(52): n is a, c, g, or t
  misc_feature (60)..(60): n is a, c, g, or t
  misc_feature (82)..(82): n is a, c, g, or t
  misc_feature (111)..(111): n is a, c, g, or t
  misc_feature (220)..(220): n is a, c, g, or t
aggggggtgcccatcccctatnattaatggttacctttttcctttgggaaantgtagccntccaaagtctttaagcccagantctgaaattaaaatttccataggccccangcacctgcccataaagattgaagcacgtgaaagcacatggccatttgtctaacagaacctaggtcacatatgaaacccttttgctttgacaaaaaattagctgggcatngattgtcacgcctgtagtctcagctacttgggaggctaaagtgggaggatcacctgagccctggagattgaggctgcattgagccacgatgggccactgcactccagcctgggtgacaaagcaagaccctgtctcaaaataaataaataaaaaaatatttttgatga

SEQ ID NO: 626282 - DNA, 221 bp, Homo sapiens
ggcactgttaggacctacaaggacattgtatgccatgcacttacgaagatatatgttgactggccatacagaccaacactctgacacgcacatagacacagacacatacacacatgctccgttaactccttatagtaagattctgttttaaatgttccaagtaaatccttgcccaccccgttggaccttgaccttactttatgctgcaagctcttgaccag

SEQ ID NO: 626283 - DNA, 114 bp, Homo sapiens
  misc_feature (47)..(47): n is a, c, g, or t
actgtgtcgtggtaagggcagcatagtggggatctaatcccagttgngtctagctattgtgtgtcagatatgtaagcactttcgtagtctaatttgtgtccacctatgagtttt

SEQ ID NO: 626284 - DNA, 326 bp, Homo sapiens
tcccgtgatcagtgatcctcacaggagctctaaacatgaaaatgaaagaatgatactgtaccacaaaacacactttagtacatagcccaacaacacacctaaagtacatatggcacacagtagaaactaacaagcagctagctaataacttcatgataggatcaaaacctcacatatcttgcttgagcccaggtattttgttaccagcctagccaacatagagggatcccatctctataaaaaatacaaaattagctgggtatggtggcacacaccggtggtcccagccacttgggaggctgaggtaggaggatcacttgagccca

SEQ ID NO: 626285 - DNA, 1112 bp, Homo sapiens
gggctgcagcccgggtagtggccaggagagccggtccacgtttgcaaacgcagcgaacgcccagtgcctgacccgtgcctgcccgagcgccgctgctgcgtcctgctgccactcttctcgcctgcccctgatggcgttcctggggctggaggcccccgctgccaccagctgctcctgctgctgctctgggtgacctgggcatggcagctgccctgtgtgctgggcctgtggctccgacgctggagcttgcagactctgagctgtgccgcttctgtgccctgactgacgtgccctgcgccacctgtgctgcatgctggcgactttctgtgctgctacccatctactgtgtggcgacgttctcccgaccggcccagaagttcagacctccagcttatgaccacgacggactccaccttctcaccctgtcgtcctcgctgcgcgacaacaggacatgcgtgactccaccagggcattgtgaccccaccggcatctttggtccggcgacttgtcgcccgttcaaccacccgcacgcacgacgctctctccgtcgacgcgcattgtcgcaccgccacaaacatgcctctgccccctaaccgcgcacaccttgcacacggcacgttttccactggggttgcttgagtaccccccgccccatactctcaacggtgggcttccacttctctgcagtggtaccttatctgcactgcgcactaattcgcgggaaactttaccttcgaccaggtaccgaagggggcttccaaagaatttgccactcgactccctattactcacacagcgcacgccacgcgcacgttcatgcccccctaccggcgcaaccccaattccccccatggggtggctccttgcgactctctctgcgcagcgcaaccggttaaaccccaccgtctaccccacaccacgccgtggcacacccgctctctcgccgctgctgtaccccgcgtcaacccctctcttggctcccctgtgactagcctgtgacggcctttcacgccaaaccttcccgcgcacggttcctcacgccacgccacttgattgcaacccaccacgcctacacttgttggacggcggacaactcttggcgtcgcgtgcag

SEQ ID NO: 626286 - DNA, 430 bp, Homo sapiens
ccttgtacatcaggtttagagaagcatggtatattacatcacatccatttactatcagtccgtataaatattttaatcaccatattaaacacaacccatgtctaatgaagaaagttaacctcttttaaattatttgctaatattatagtctactttgaataattattttcagacaaagacaagccctgtggttgcactagctaagcaagcccagcttatagtccaggaatttcaatcagtgcattttttataggtatgctaattctgagttggtttattatgattaatcttggagatgatttctcagccatcaatgaatttctttaagacgagttataccgttgagatttgatattcggattctgttccctttctagttaacaagctttcttctaagtatttttcatgtgtgtgatctgtgatcataaga

SEQ ID NO: 626287 - DNA, 619 bp, Homo sapiens
  misc_feature (31)..(31): n is a, c, g, or t
  misc_feature (483)..(483): n is a, c, g, or t
  misc_feature (490)..(490): n is a, c, g, or t
  misc_feature (520)..(520): n is a, c, g, or t
  misc_feature (540)..(540): n is a, c, g, or t
  misc_feature (542)..(542): n is a, c, g, or t
  misc_feature (569)..(569): n is a, c, g, or t
atccaggcacccttccgggagcccggctttntggtgtgtttgccccggggggggccccacgctttcccggggggatttttgttttaccccccccccatgggcggggggaaccgagtttctcctttgggggtagggggactggcctccccacgccacccaagggaggtccccccagggggttttatggggtggaaggggctcggaaattttggggcggggggggccccatttcccgggaccccccagggggggtcagccctgtttggttttttcacaaagtccctaaaaagatttaaaaaaaagaccgggcggttgttgaaagggcggtgcccaggggggattttcggggggaaggggcggcccccccccctgggttccctgctaccccccccgggggtgcaaatgggtttaaggggggcggggcgcccctggggccttttaagaaatcccccattgaagaggggggggcccccccccccccgnaaaaatnggtttgcggcccccccggcccgggcccctnaaggggggggggcccccccngnggggttttaaggggttttggcaagggnttttaaccggcagggaaaaaggggggggggaaaaaaacccccggttttta

SEQ ID NO: 626288 - DNA, 607 bp, Homo sapiens
  misc_feature (11)..(11): n is a, c, g, or t
  misc_feature (75)..(75): n is a, c, g, or t
  misc_feature (105)..(105): n is a, c, g, or t
  misc_feature (134)..(134): n is a, c, g, or t
  misc_feature (143)..(143): n is a, c, g, or t
  misc_feature (176)..(176): n is a, c, g, or t
  misc_feature (180)..(180): n is a, c, g, or t
  misc_feature (275)..(275): n is a, c, g, or t
  misc_feature (277)..(277): n is a, c, g, or t
  misc_feature (282)..(282): n is a, c, g, or t
  misc_feature (294)..(294): n is a, c, g, or t
  misc_feature (312)..(312): n is a, c, g, or t
  misc_feature (340)..(340): n is a, c, g, or t
  misc_feature (343)..(343): n is a, c, g, or t
  misc_feature (353)..(353): n is a, c, g, or t
  misc_feature (591)..(591): n is a, c, g, or t
aattgatttanagattggggacggaggacgcgcatgagacgaacaggggaaatgaataaccccgcccccacccgnggggagaggaacattagtgcaaaacctagngccggccccggggaacctgcccctcctgngctgattgnccagctaaatggaggcaccggagtggatggggngagnctgcgggccctgaccggccgactcactgaggcctaccccagccagtgcattccaggtcctgtcattgggcgacgcgtaaaatagacaccgccccncngccancccggccgggtnaggagttaggtggcaagngtcaggactgagccctgccgcgcgtganggncggccccagnaacagacgccaggccccgccctcattgatcaggcactaccgcgcgggacgaacccattttttctttaaccgtgacgacgcgccaccttccagcatcacgtctggtcccatgaaagcgagcgcaatcctgagacggggccagggcccctgccaccacaactctagcagccaggccacaccccctagctcaggctccgcccattggaatgtaggcccgccccggcggtaccaagcttgtntagtttcagggctccg

SEQ ID NO: 626289 - DNA, 765 bp, Homo sapiens
acaagacaatcttctaatctgcacctgctctcaatacctgctctcaccatgagcctccgcctgcagagctcctctgccagctatggaggtggtattcgcggggtggcatcttgccagctgagagtgatgtgccgtggtgtctctacctgttcacctcggtttgtgtcttgggggactcagctggcgggctactggcgtgcggctgtgacgctgtggtctcctggttggacgcgggctgcgtacgtggctttggacgcgtggctactcgacggtggcctctggcacggtggctaatggaagcgctggccctctgccgcgtttggcctattgcgccggcgcggctctccgccctgcgctcgcctctcgatcgcacctccgcgacgccttgctgcacttgcgcgagcgctcgcatccacttgccccaacctgcggcccagactcacccactgcacgaaaccctcaaatcgaacccgcacctggcacttccgcataccccctgcggagcaacagggggctgccagcgagccccttgcccacggcgcagcgcgcaaaccagcctcgacacccccaggccacagtagttgcaaccaacatcccctggctgaccctcggagcgacccgtatgatccagccacgcacgccccccaagcgctaacggccccatagacagccagcgcgagcctacccgagaggtatccaccatcacgctcacacacaggaggcccagtctaagacaccgacgccgtacccagaggccgcaccggc

SEQ ID NO: 626290 - DNA, 982 bp, Homo sapiens
gcttctctgaccggcatcttgcctgttgtggcaggctcgcatgggaagcgtgagaatttctagagaaggaaacctatgtcctgcagggctgtggtccactgctgttttatgccatggctataaccggtgtctccgggaaccggagggagcacacagctcttcttaaaattgaaggtgttcaagcccgagatgaaacagaattctattagggcaagagatgcgcgttgatgtatatagagcaaagaacaggacagtcactcctggcgggaaccaaggaaaaccagagtcgatctggggaacagtaactcgggcccatggagacagtggcatggttcgtgccaaaattccgaagcaaatcttccgtgctaagggccatgtggacacaagaaatccggagtgatgctgtaccccctcaaggatttaaacctaggtgaaggagaatcaataaactaacattgtgggattttgtccaacacaaaaacatacaagacaacacaaaaaaaaaaattttttgggcgctttggccccgagaaaagcttttttaaagcaccaattgcttttgggggggcacgcggccccacagggtaggacaacactggggacaagccggggcccacgagaaacctgcgacacaatacgtggttgggtttccaaccccacaaaaaaacacccgggcggaagcgacggtttttcgaaaccaaatccaagaggcgatttccagcgacatgaggtgatttctaaccaagggggtcccagaagactgaatattaattaccccgagtggcgggagaagaacgagaaacagaaagaggaacagacagcaaaaaaaacagcggaaggacaaacgaagaaaaagctgaccgacaagaaccagatagcacgcaagcaagaaagagacaaacagcgaagacgacgagcacacaagccgagacaggacaacgacacagagcagacacaacgagaagacatcagagcaagacaa

SEQ ID NO: 626291 - DNA, 731 bp, Homo sapiens
gttcttagatagagatagtatttccaatttcttgttcatagtaacatttcaataaaactaaaaaatctattcaaaaaaaaaaaaaaaaaaaaaaaaaaaaaaaaaaaaaaaaaaaaaaaaaaaaaaaaaaaaaaaaaaaaaaaaaaaaaaaaaaaaaaaaaaaaaaaaaaaaaaccaaaaacccaaaatcacagaaaaaaaattgaaaataaaaaccataaaaaaaacaaaaaacaaaataaaaatctaaaaaaacccaagacaaaagcaaattaaaagaaaatggaaaccctctgcaaacaaatattcagaaacttaaaaaacagcaaataacaaaaatgtgaaaatctctaaattattctgaatagaaaaataccccagttggatataatattacagacaacatccaactctctagttcttgaagaaccacataacagatctcgagaagagtgcactgcaatacaatcccactttaacaaaagatatcacaataactaatctaccctacatcaactagacacactatataaacactttaagttttcacaaaatttatacagaaacaaacgaaagcgcgagctctatctgaatataaaaaatagcggacatctcctgatactataagaaaatatcaaaacaatatgccgtgctatcgaaatacgctagtcatccccacttagcgattaagccacacacaactgataagtcatttttgattaacacccctc

SEQ ID NO: 626292 - DNA, 343 bp, Homo sapiens
ctggtcataagaactcttcagttccctttctccgggggtcacagccaaggaaaaaaagagactcctgggcctctgggcaaacatacatcccctgacgcggggctgggtcccccttcagcttccctctctaaggaacaacttgaacatagaaactccaacctcaccggtaatcccagcactcggggaggccagggggggcaggtcattggaggccaggagtacaagaccagggtggtcaagagggcgaaagccgggctctactaaaaatggggggggggggcgcatgcctgtaatcccagttactggggaggctgaggcacgagaatcgcttgaaccagggagg

SEQ ID NO: 626293 - DNA, 480 bp, Homo sapiens
agtgcagtggacgaaccttgctcactgcagcctcgaactcctgggcttaggtgatcttatgtacctcagcctcccaagtagctgggaccacagatgtaccaccacaccttgctaattttattttttctttcttttttttttaaagtcgagacaaggtctcactatttttcccaggtagggctggaattcctgggctcacgccatccacccagctcagactcccagtgttaagattataggtgtgagccaccatgcccggtctcaaggactgtaataatttgctgtactctcatgcctgtataatggctcctccagatcttataacggctcactctttcgccgcattcaaagtctctctcacatttaacaccttagcagagagaccattcctggccaggattgttaaaagtagtgctcagtttgcaacctcataccccaaagtactgtttaacattctttaatggcacttatccctgaatg

SEQ ID NO: 626294 - DNA, 298 bp, Homo sapiens
aatacctcccaggaaggaaggaccggctcattcttccctatcccccgccaccgccacagccaccgccacagccacccggcttgacctccaggctcctctatttgcatgaagacaaaggagcaggtttgtacaacgtggccggcatctgtctcactttacaaaacaaatcgttgaaggcacagacctctctctaaccaacagaacaccccacccacccagaagcttcaagaaggaaggtgatgaatagcagttcttccaccgctggctaatgtgcacaggcagacgcgctcacctccac

SEQ ID NO: 626295 - DNA, 367 bp, Homo sapiens
  misc_feature (67)..(67): n is a, c, g, or t
gagggtgtttttggaagacactgagataaccatgacccaatgtggatgggcactgatatggtttggntgtgtccccacccagatctcatcttgaattgtagttcctgtaatacctacatgtcgtgggagggacccaatgggaggtgactgaatcatggtggtggttaccgccatgctgttctcatgacagtgagtgagttctcatgatctgatggttttataaggggcttttcccctttgggtcagcacttcttgttgctgccatgtgaagagggatagctttgcttccccttctgccatgattgtgaggcccctgcagccatgtggaactgtcagcccattaaacccctttgttctttataaatta

SEQ ID NO: 626296 - DNA, 353 bp, Homo sapiens
tgggcacatcaaggccagctgaacgacctccgggccgccataggtttcaagggtgagggctttcatcgcgggacaactccgtttgcggtgggaatgcaccatggtaaaaggcgctactctgtacgagaattccccaacacctcccaccctccgtgcgaaaataacccgatgttcgactggcaggatctgtatttcttcaccgtactggcgcgcacccagtcgctgtcggctgccgcccgcgagctgcaggtggaacacgccaccgttggccgccgcatcgatgccctggaaaaagccctcggcgtaaagttggtggatcgcctgccccgcagccgaccgttgaccgaggaagg

SEQ ID NO: 626297 - DNA, 174 bp, Homo sapiens
  misc_feature (35)..(35): n is a, c, g, or t
  misc_feature (122)..(122): n is a, c, g, or t
gtgaatggaacacaggagtagaaaagaggcgtttntgatagagaaattacagaaagcaccttttgaagaaatagcagcacagtgtgaatccaaagcaaatttgcttcatgatagacttgccnaatattggaactcaccttacgtcctcctcccagtccatcaggaacactgacc

SEQ ID NO: 626298 - DNA, 192 bp, Homo sapiens
gaccctggggcagaaccttgtcactgtctcgtagatcccgacatgccaatgtcttccgctgagcctctgagcatcctggctgggtgggaagttcttggctggtcacgcctgtccgctttcgctccaggtcacacttgagtggctccgttgggggaagaagccgctggaccatggcaggctgatgaccactgt

SEQ ID NO: 626299 - DNA, 898 bp, Homo sapiens
  misc_feature (748)..(748): n is a, c, g, or t
taggcgtgattatggatcctctaggtcaaggcgactatacgatgcaaatatttctcttattaggcggcgtggtagcaaattagaaaagcgtaaagggtacacaaagttttctgaggcataggttatgtaataggcaagacactgctatggcctggtgtgggagtagaagaaaaaacgagaagtggttgtggacgtataagcgggttgtggcctacgttatcaaagggtgacaggagtcatggaggcgatgatagatacgaacggatagacaggggcgggcatatttaccttgagagggtggtgagtaagcgtaagcgggtcaaggagttttgatgtagtggagcaggattgatcacttgataaggaacgtgagacagggcgtggaggcgaagggtgccggtgaggggctgtgtgccgtagggcttggtgatgtgcgagagaagggaaggaggagagaagacataggtagggctgatgcaggagttggagggcggtttgtttggggaagagagatgtgatgccgaggtgtagagatatcagtggagggggcgatgaaagagctggggaaagtgagaggcagttggccttagtggaggaaaagcatagtaccaggagagtaaggagcgaccgtatcgagatgcgacggtctgtgatatgtgagacccgtatgttatggtagcgggacggtcatgattgtgtgagcgtgggagcgaagggttatagcgatagaggtggagacgcggtgggngaatgggggaggagtaggagagaggggcggtgcgcggtgtagtaagcggatggaatgtcagggagggtgcgaggaggggtaggagataatggcgcgtggaaatggcagtgtgtgagatgcggtgtggaggcgtagaccaagtgagccgtg

SEQ ID NO: 626300 - DNA, 663 bp, Homo sapiens
aggaattcggcacgagctgctcagtgacctggaggccaagggcgagaaggggtctgagcttgtgttgtataagccaggcacgtgcgtgaaggggctgaccatcgagcccccacctgcagacccccgcctacgggaggacatggcgctgatggccgagtgagccctgaccccagagctccgaggggatctttgggagctgcccttcccttgtcctgacggcttcaacagctgccctgacatctgctttcgagaggctggctgcagcttcctctgacacaaggcctttttttgtggccgcagagactactttcgagccctgctggatgaccactttccggagagcgaggagccagcgaccctaaggggccccccagcccgcaacctgcatggcatctcacccggacgcttcactcacgcgctctaatacatgtacagggaccacacctgggtggtccccgagggaggccatgatgtgctgagcgctccgccaagtacccgctgccaggcctgagaggctgtgctggcgcaacctggctaaatgctcgaggaccctgtggcggagccggggacgcgcctacggcttcccctagcgcggcctgaggaccccccctgttcccgggccccggccctggccgccgtccgccctcctctcccctggccccg

SEQ ID NO: 626301 - DNA, 353 bp, Homo sapiens
aaacagcagccaggcgtgagtgttaaccacccatttcacttccatcatgcccgaattagtgaccttcaatgcaggaacatgcttatatcccgtctacagaaagatgaaggacccttcattccaggtcctagtcaacccctacagtcctagtgccacctcaaaccagccctctctgataggacttccattctccctgcctccccaagcccgcaatacctcatacaccttctctagcctctcagaagatgtgtcatacccttgatccagctcgtccctgaagccgccgctcctcttccagaagcttcaatcgctatgtgtcagctcgaagaacagactggactgctgtagtctgc

SEQ ID NO: 626302 - DNA, 633 bp, Homo sapiens
cccagtttaatgaaagcttaaatgtccctgcgaaccccccatctctgccagcagaactggttttgttctgaatagtacagattgatgtgaaccaccaagcattttgtgtaaggagaacccctttcttgttaaaagaagtgtgtctatttcgaggggagttacaacggcccagtttggtaaaagttaagctagtatcatagtcactttaaaattgtaatagattcttaagccacttttgccccctcacccctaagctgcttcttatttctgccggcccaccacatgccacaggcactatggtttgtaatgtgttttcgcttatttgcgctctttttggagaatgtatgtgattctgtattctaccgtatattctataatgtgtgtaatacatatatgaatataatacacccaccacgatacccagtggtaccacaccaccacccaccaccaacccaccaccaccacccccacactggcacgttctttgtggaattaggatgggggtgacataattttcttgagtttaacacggagtgctttacccaccagtcagtcatggatatgatatcactgctctttatttaaaagtaaactttgggcacaggaaccatatgggaacattcagcttgttta

SEQ ID NO: 626303 - DNA, 1426 bp, Homo sapiens
gcggagtgacgccacggtcagttgggtagtgagtgggtcttttgtctattttctattagtgatctagtccgggtctctgtcgcgtgagtacacaaattgtgtgtgtgtgctgtccttgctgtcgccgggggaaccgggtttgccacaccccacgtgtgggggtccccttgtgtcccacgtacatgttttccccgcgtgtgttattttgtgcgggggccgccccctgtgcgtttttgggtgtgacttttcttctccgggggacacctattgtgggctttccacgtggcccagggaatgtgttccgcgtccaaaggtgtgtttattttcgggggaactgttcgctgggtggccgcccccgcgataatgggcccctcccccgattggggaccccaccttggggttttcacctgtcgttccacggctggattgttttcccttgggggtcgtctttctccgcgcgcccataggttaggcctccccgcgcgtaatagggcccccctcgtaaattggggagtttggcgcacacccaccgggagttcaacacaactggggccaaacgcaccaggtgtgtgctcggagactctggatagcgaaacaaaggagttggaatttcgcccgctgtttcgtcgggttataagaagaccttgggagtaagtaatggggcccccgtaaaaatttctttggaaaaggtcttgtggtgaattcccctgcccaccacttggtgtgaatatatgggggtttccccaagggggcaaaagacccccacagttgtgtgttgtctctgagagaaaagcttttttgtccacagagacttatgtcccacccccctgtttggggggtgccccttttggtctggtttccgttggaattatttgagagacccacaacccacagttttgaccgggtggggtgggttcaatctccacagcgccacagtggggaccccacagaaaagggctggcctcgggagagtctctggccaaaagggtgccacacccacaagtgtcttggccccccacggaataaggtcccacgagaaggctataaaatggagataattttagtgcccctgatattgaccctggcccaccccccaccttgcttaaatgtcacggtgtggttggaaagagaccgggtgtcttcaaagagaactcgtgtttgttgttcacaattggcgccacatcttaaccgctttatgtagtgtaaagaactggtgtataatgattaccacatgcacttcgttaaacctcttcacgaaggaaaaggagaatgttttgtggagccacactcttggtttttcttttttgcgtgtggcacgttttaagttaattagatttttataaatccgatactttttcaactggaaaccacttgacccaaaaatttgtccccagaagtttgagaccccatttaaaaagtttaatga

SEQ ID NO: 626304 - DNA, 101 bp, Homo sapiens
aacgcaccctcgctgaagaactctttaacagcgtaggcaagaccctatggatcaccgaagaagcgttaatggacgccgtgactgccgtatcagggagcggt

SEQ ID NO: 626305 - DNA, 118 bp, Homo sapiens
cacaacgtcggctgctgggaagatctggattctcgttgtcagggcaccaatcagaaaagctaaggttgctgtatagtgaggatcaagagaatctgatcccgagtggcagaaccctccc

SEQ ID NO: 626306 - DNA, 518 bp, Homo sapiens
  misc_feature (31)..(31): n is a, c, g, or t
  misc_feature (99)..(100): n is a, c, g, or t
  misc_feature (128)..(128): n is a, c, g, or t
  misc_feature (159)..(161): n is a, c, g, or t
  misc_feature (213)..(213): n is a, c, g, or t
  misc_feature (219)..(219): n is a, c, g, or t
  misc_feature (224)..(224): n is a, c, g, or t
  misc_feature (231)..(232): n is a, c, g, or t
  misc_feature (234)..(234): n is a, c, g, or t
  misc_feature (247)..(247): n is a, c, g, or t
  misc_feature (260)..(260): n is a, c, g, or t
  misc_feature (264)..(264): n is a, c, g, or t
  misc_feature (274)..(274): n is a, c, g, or t
  misc_feature (289)..(289): n is a, c, g, or t
  misc_feature (297)..(297): n is a, c, g, or t
  misc_feature (313)..(313): n is a, c, g, or t
  misc_feature (341)..(341): n is a, c, g, or t
  misc_feature (347)..(347): n is a, c, g, or t
  misc_feature (351)..(351): n is a, c, g, or t
  misc_feature (499)..(499): n is a, c, g, or t
ttcctctgtgtaaacatatccgctaaggcgnacgccatccgggtccggggctgctgcgctgggctcggtgcctcctaatttctgccgattctcaggccnnaccatcccccctctgccagtccgcgtanttcccggcctcctgggccttttcctaacctnnngggttatcgggtttcacccgccgtgccgtcgttctgccaccccctgcccgtngcctcnctgtngcctcgnngncccctcccttgtntgggctgggtggnggtngcggtttcgnggcgcggcggcgggngccgcccnccggcgcccgcctgtncgccagcccgtggggggctgtggcgggncccggncggnggcctgggcctggccccggcctgtctggtgccgggcgccggggtgttcgggtccccctgcttcctcggggggtgggcgtggcaggcgggtcgctggtggcagggcggtgggcgtcgcttgggggggggtggcgggggagggctgggcnggcccccgctgcccaaaac

SEQ ID NO: 626307 - DNA, 299 bp, Homo sapiens
gtgtgtatgaaaagatacagaagatacatttcgagactgagaagaatgttgatatggtttggttgtgtccccatccaaatttcatcttgcatttatagctttcataatccccatgtgccatgggagggacctggtgggaggtaactgaatcatgggggtgagtctcttccatactgttctcgtgatagtgaataagtctcatgagatctgatggttttaaaaagaggagttcccctgccccctgtacacattctcttggctgccaccatgtaagatgtgccttctacggcttcgtcggt

SEQ ID NO: 626308 - DNA, 1653 bp, Homo sapiens
ggagcagagtcaatccagcatgaccgagcgccgcgatcccattctcgctcctgcggggccccagactgggaccccattccgtcgatctgggtatcccgtcataggcgcgtgcttcttgcgaactcgattggcactgtcagaggctgctcgccagggcgtgtctcggtgagggaggtgtgtcgtcgaggtgagattagcgtcgcgtgagggcaggcatgtggccagtgcataacggtgacagctcgcccatgtcgcgcctccagacctgttcgcactccgatgacgaccacgcggcagttgagcacaggcgaccacaggctctaatcatgtctctgggagtccgactacaagacctggacagatctacatggacagagcggcgtgttctacggcgagactaccggagcagcaacttgacgaggaaacccggatggggccgacgtttgttccccatgaggacatgcatcaagcacaacacttcaggcctccgggcacacgatggcatgatgcggtgtcaagtggaacccaaaaggacatgaggcgatggtgtggtaagagtcatgccgggcatacgtaacgagaggaagcagggcagtgaacggagcgcaatgggctaaacaattcctcacacgggtgggctattcaccgacggggacaaataacaccggccttggcacacgcgctcgagatggttggggaccacgcacaaccaacaaatgctcttccactcacgttcccccatgtgttcccatgaaaggtggaagtacatgtgagcccgttggagacgggaaccccaatttgtccgctaaaggcctagtgcccgaacgtcgaggttcactaaaacgaaggattcaagcacaattcccactgttcaaccctgtttcggaaggtcaggcacgggaggcccccaggtgcttagagggagggccccaagtaaataggccttgggaaaaaggtccagaattgaaagaagttgggccgggtcccaaaaggttagaaagggcggtgttaatgagcctccgggatgttggccccatgcacccccgttggcgttgggcctggccacctatgggggttatgattaggcctaatccacaccaggaggaacacctcatggagtgtgtgggttcctttactctctgagcgtaccacatttttgtactcactatcgccgtggatagaccacttaccaacgtgtcacaagcgccgtcacgggggaggaaatcgcaccgcaaaaaacaaacaaccacaatagactatcaagcaaaaaaaaactaactgtcagggagctctatcattactcgccgggggggaggcaacaaggggtgtgactgaaaaactgggcactaggggagataagaggtgtctactagcacacaaatattttagtaacagcgggggcaaacaatatcggagcacctaataataagacagatagcaaagaggaaacaaacggtctgagaatgtacacagataatactagtcaggatacagaagaaagataatagaggaaggatgtgaaaagtaggtaggagatatagccagcaagcgaatcagcatgatagtaagcacgcagctagaagagaaaagatacacaatagcaaatcgacgtaagctagctagtatagtaatagtcaagtggtagataagtaa

SEQ ID NO: 626309 - DNA, 550 bp, Homo sapiens
  misc_feature (10)..(10): n is a, c, g, or t
  misc_feature (103)..(103): n is a, c, g, or t
  misc_feature (114)..(114): n is a, c, g, or t
  misc_feature (138)..(138): n is a, c, g, or t
  misc_feature (184)..(184): n is a, c, g, or t
  misc_feature (197)..(197): n is a, c, g, or t
  misc_feature (216)..(217): n is a, c, g, or t
  misc_feature (231)..(231): n is a, c, g, or t
  misc_feature (279)..(279): n is a, c, g, or t
  misc_feature (372)..(372): n is a, c, g, or t
  misc_feature (388)..(388): n is a, c, g, or t
  misc_feature (390)..(391): n is a, c, g, or t
  misc_feature (403)..(404): n is a, c, g, or t
  misc_feature (475)..(475): n is a, c, g, or t
  misc_feature (550)..(550): n is a, c, g, or t
tgttgttggngttctatgtgtgtggcatttcactgttgctcaccgcgtggtagtgctcctagatatctttcttcttctagcttatgtgctttggttctgcccntgtctttccgntgtctgcctctgtcctgtcatgcnctgtggggtggctggcaggtcatggtctacgctttgtgttccctanacatatattatcnatatttacgttatattggnnattaatataacagnaaaagtcacaatccacctagcccctcaccagccaagcgcagccttgcncattcctgctttaccggtatgatctcgtctaaacaaacatttcatttcagaaaatctgcatcaatctacacggaccatacacagtgcacaaantgaaaagggctttaancnntttttttctagnnccaccatctctgcaacttgccaagatgcggcaagactatctgcaacaaagtaaaatatacaggttttttantccaccagtgcctcagataggaaaaagatatgattacggtttaaatccatacatagcagcttacaatacttaagn

SEQ ID NO: 626310 - DNA, 1001 bp, Homo sapiens
cgcagtggcacacgcctgtaatcccagcactttgggaggccgaggtgggtggatcacccgaggtcaggagttggagaccagcctgaccaacatggtgaaaccccaactctactaaacacaaaaaattagccagggtggtggtgcatgcctgtaatctcagctacttgggaggctgaggcaggagaatcacttgaacccaggagatagaggttgcagtgagccgagattgtgccattgcactccagcctgggcaacaagagtgaaactccatctcaaaacaaacaacaaaaaaaaaaaaaccaaaaaaaaaggattcaaaaggcaggattctttaaacccaaaacccccttgtgttcacaggaaggtctttatctccaaattccccatacgggtaaagggcaaccccaggtgtttccctgtgggttgcgtctaaattacaccaaaaccggtgtttattcaccctctggcattacttacgatttcttattaattcccagcggcgcaatttttattccaaggccttttaacaaggcgcaagaaatcttcggattctgtggtcgcccacaacccgttggccacgaacctctttgaggcaccctttagtggccacggtgtgaattaccccaagttcccacaaggggacccaaaatactctctatggaatttcctcctcttaacgcggtttcccttagaagtatactcacaactttttctttagaggaacccaacaagggtcttatcttacaaatgtgcttctgggcaacgcgccacggaatctcagggcgaagcggggggcacacgacatctcagagacagcagtcaactcggcgtcgcataacgtgggaacccgaagaagtgctttcccagggttgttgggcccacagatttctatcacacacacactcatcacacctcatccactacacaacactcttttcttctcgcgccgcctcctcctcgggcgccctccctgcgagaaaacagctttctttaaagacacc

SEQ ID NO: 626311 - DNA, 84 bp, Homo sapiens
ccccctgttggcccccctggggggccccccggggggtttttccttttttttccccccccggggattaattttctttccccccca

SEQ ID NO: 626312 - DNA, 385 bp, Homo sapiens
  misc_feature (352)..(352): n is a, c, g, or t
aactgccatgactatgattgcggagtcccggtccgctggatgacaccaatgaacatcttacatatattgatcgatgtctcgggtctccctaaaatgtataaaaccaagctgtgccctgaccaccttgggcacatgtcgtcaggacctcctgaggctgtgccacaggcatgcagcctcaaccttggcaaaataaactttctaaattgactgagaccagtctcagatattcagggttcacagtatccaaaaatccaatcacatctgaaaccgcctttgcaaaaattatcacagtgagaaaataatggcagtgaaagaaagctgatctagccaacctccctcttgcctttagctntcaagctgcttttacttattcctgggtttaagc

SEQ ID NO: 626313 - DNA, 292 bp, Homo sapiens
ctggagatggattgtagcagaagtaaagttgaaatcaagtagggtgagcccctaatccagtatgaccagtgtccttataagaaggggaaatttccagccggagtgcggtggctcacgcctgtaatcccagcactttgggagcacaaggcaggtggatcatgaggtcaggagttcaagatcagcctggccaacatggtgaaactccgtctctactaaaaatacaaaaattaaccaggcatggtggtgggcgcctgtaatcccagctactcgggaggctgaggcagaagaactg

SEQ ID NO: 626314 - DNA, 781 bp, Homo sapiens
  misc_feature (139)..(139): n is a, c, g, or t
  misc_feature (350)..(350): n is a, c, g, or t
  misc_feature (362)..(363): n is a, c, g, or t
  misc_feature (377)..(377): n is a, c, g, or t
  misc_feature (381)..(381): n is a, c, g, or t
  misc_feature (384)..(384): n is a, c, g, or t
  misc_feature (393)..(395): n is a, c, g, or t
  misc_feature (398)..(398): n is a, c, g, or t
  misc_feature (402)..(402): n is a, c, g, or t
  misc_feature (407)..(407): n is a, c, g, or t
  misc_feature (410)..(410): n is a, c, g, or t
  misc_feature (417)..(417): n is a, c, g, or t
  misc_feature (425)..(425): n is a, c, g, or t
  misc_feature (431)..(431): n is a, c, g, or t
  misc_feature (433)..(433): n is a, c, g, or t
  misc_feature (438)..(439): n is a, c, g, or t
  misc_feature (443)..(443): n is a, c, g, or t
  misc_feature (446)..(446): n is a, c, g, or t
  misc_feature (458)..(458): n is a, c, g, or t
  misc_feature (465)..(465): n is a, c, g, or t
  misc_feature (469)..(469): n is a, c, g, or t
  misc_feature (485)..(485): n is a, c, g, or t
  misc_feature (517)..(518): n is a, c, g, or t
  misc_feature (616)..(616): n is a, c, g, or t
ctgggcaaggccggggcgccgggcctgagccacctcttcccctcccccgcttccctgtcgcgctccgctggctggacgcgctggaggagtggagcagcacccggccggccctgggggctgacagtcggcaaagtttggnccgaagaggaagtggtctcaaaccccggcaggtggcgaccaggccagaccaggggcgctcgctgcctgcgggctgggctgtaggcgagggcgctgccccagtgccgagacccggggcttcaggagccgtgccccgggagagaagagtgcggcggcggacggagaaaacaactccaaagttggcgaaaggcaccgccctactcccgggctgncgccgactcccnngccccaggcctggnatcnagnagtacgggnnngancccnggtgnatngagcccnccttgggnaaggcngncacannggangcntgggtgccgggnctccgcnggancccatcgggtagacanagaagctccggaccttccggcactctggacannccaggatgctgttggcaccctcctcctcctcctccttggaggcgctctggcccatccagaccggattatttttccaaatcatgcttgtgaggaccccnccagcagtgctcttagaagtgcagggcaccttacagaggcccctggtccgggacagccgcacctcccctgcaactgcactggctcatcctgggcagcaaggaacagactgtcaccatcaggttccagaagctacacctggcctgtggctcagagcgcttaaccca

SEQ ID NO: 626315 - DNA, 928 bp, Homo sapiens
gagccgggacttgagtgcctcctggtccctgtctgccgtgcattcgcagtgacgtgcaggtcgccctggaggtgggactggcttccctgtgtgccagcgagggcgggtccggacagccttccccccagtcgcggctgcaccatctccctgccttgtggctggatggcgccgctggaccccaaagggatgggacaaatcccggtgaagcagccccgagagctgtgaatgtgcaagaattggcttcctcgagagatgtacagtgcagcctctaccagacactgggggccccagtgggcgtgggtgcgacagcttgcctgggctaagcgaaggaggttgggcggaaatgcacttgggaacctccttttaatacaggtgttcacgctgctgcacacctttttacctttgaatctgcaaaacatgacgttaagctggcccgaacaaggaacagcccaggtatacgacgcaagcgcgtacggcgcaggtcgccgcgcggttccatttcaatgggccgcgacgactcatatcctttgacttagacacgatattttgtagaaacgtcgtatttagagcgcagggaaaccattgagcctttaattgggccagaagccccaccttttaacttacctgaagttgggcgagaattacccacgaattaccccatgttgacagacatttttccaccccgtgtatgaacccaccaacttggaaccatttttacatctgtgcccatttttccctttgggactattgagcgcaaaagtacccccctaaacagttgtcaagtgttacacaacaagaccccttaacttggagggttggcattaatgaaacaaccgtggcaacttcagcttgtggcccatgtagacaccaccatgaccatttccacctaaattcacactccacggtgaaagcatcgctttgcctccag

SEQ ID NO: 626316 - DNA, 234 bp, Homo sapiens
gtcttggccgcccaaagtgctgggattacaggcatgagccgccacacctggcctatttttctttaggtatatacccagtagtgaggattggtgggttgaatggtagttctatttcaagttctttgggaaatctccaaactgctttccgtagtggctgaactaatttatatcgtactacacagttatatagcgacatcccctttctctacacaccctaaccaaacatctgtatat

SEQ ID NO: 626317 - DNA, 129 bp, Homo sapiens
ggtgatgctgaggtgatctagaggatcccgcaagttcagtcgggactggatgcgaccggcgatgcggcggcgttattcccatgacccaataccaaacgcccctcttcgtctgatccgtcctaatcacag

SEQ ID NO: 626318 - DNA, 287 bp, Homo sapiens
  misc_feature (17)..(17): n is a, c, g, or t
gtttttggggcctgaanccgggaaaaatgttttgtttttaccccggggcccccaccaatttttttttggggttttggggaaatggcccttgaaaaacccctgggggggttttggggtttgggtaatttttttgggggggcccctggccccccttttttttcccccaaaacgggggcccttttttgggaatttgtcccttgggaaaaaaaaaggcggggttttccccgggggggggttccccctttttaaaagggttttttttaaggcccccctcctttttgggccca

SEQ ID NO: 626319 - DNA, 177 bp, Homo sapiens
atacagtgcgcttgttggcatgtcagcagactttgtggtggaggctataggggacgacgtgagcacgctgggcttctcgtgtggaatgggccatcgcgtggctaatgatcgaactgtgactgacaatgggcgacggctcctagtgattgtgcgctacttggcctgcaggaggcttgg

SEQ ID NO: 626320 - DNA, 877 bp, Homo sapiens
caaaactgaagtcaaaaggaaataatataagaaacacaaacacatatatgacagcaaccttcaagatctgggttttcagctttctgcaaccttgttttcactgaaatgttgaaactactcgtctgagggcaaaggaacctcctcacaaatgctatagctgccaattggacacttggggcatttcgaggtctggccctaagaatttactttctccttttccttttttctatttagaccaaaaaaaacaaaaacaaaaacaaaaaaaaaaaaaaacaaattattacaaatggaaaaaaaaggaaagaaccccggttaacacacaggcgcaacacacacaacaaaatctggtccattggcggggagggacatggtttgtttgtaggtgggaggggtataaaaattcaggtttaatcccaaagatttaaacttagacttggatttaaaaacatttgtgggagccctggtgtgctggacaatctcgtagttctcggagggattggagtggcatgtgggcccggccacatcaaggggcgtacacgggataatatggaatgtgggggaatcctcgggatgacggttggggagggccctggaacccagtgtttaagggtggggctccagcacagggcctaaaatgaattaagaaagcccgaattggtggtccttctctaaggtagaagccagatgatgagacagcaaggagggtttagcatggcccacggtggcaggtcccccagggggctggcccaaggaaaagggaaaaaaaagacagcaggaggtaagatgagcgaaaaaaaaggggggcaaaaagcaggagaagatgacgcgagtaacacagtagcgagacccacgcttggtagcccccctcccgacgcgg

SEQ ID NO: 626321 - DNA, 1220 bp, Homo sapiens
gagcggagcgaggccctgcctgccagccgggaaggaggcgtggttataggagctaggcggctgcaaccccggggcccgcgccgctagcctagcgctatcccgggggctactttggtggactgcgctccccctgtctctgtcggctacggggaacccgtaagagcccggtcgctagtgcagcggttggccctatctacccgtgctccgttgttataccctacctgcttcctacctcattggcagctggtaatcaggtgcctggagcagggcctagaccaccgactggcagggccaccctgacagaccatccggaaacggcgtacataagatagacacgtaacctgaacgccgccctatgggacctacctgggggaggctgagggacggatactctggcccaagtaataacatgccagtggaccggatactaaacgcctattttcccaccgtacatggggttgataaacacccttaccccacctgacttggcactgtggcttcctccaactgtgtttagggccgttacattctaaacacatttgggtatcctcttatccctgggacaaagttgttagcaaccttagacactgacccaggtggctatgcagaaacttgtgggcataactcgcaaagcacttggactggtgcatgcacgacatttcccaggttattggccttctcccacggaatcgtgggtgatcgaaggtacaggacaacacacctaaggaactaactttacgccattgttcacgggccttgttgcaaagcaaacactgtgaagcccattgagactcgaccccgtggcttaatacacattaagcggtagtgaaacaccagaaatctgggccactccaacctacgcccccaagacacgcagttcatactgacatgaacacagactgctcttataaacgacgacaaagctaagcaacacactgggtgaccagttgcaagtccgtgagcgaaaattaacgttgaacaaaccacacctcaaggttttacccaccgataaactaccaacttacctcttgtgcaacacaacacgaaccccacacatggaggcaaagcacgaaccacaatcacaatagtaagcaaaccacattatcacacagaacctcccctcacagaacagctgatacatcgccgcgacgctactaactgtgatgcaagactacacaagaaaatatgggcccgtaaaaaccgatgaatcaccagtaagt

SEQ ID NO: 626322 - DNA, 193 bp, Homo sapiens
cttgcttactcctcaagtttgaattgattttaaatatatttcaaatacaacagtttaggttaaagatgaccaatgacaatgactacctttgcagataagtaaactgattgaaataaataaatctccgttttcttcaatttatttcaagtgtaattgaaaaaggttgcttagttatttaatgagggaaaattct

SEQ ID NO: 626323 - DNA, 156 bp, Homo sapiens
ctgagatcgagcctgtactccagtctgggtgacagagcaagactctgttcctaaaacaaaacaaaagagtgtggcatatcctcatggagctaacagacaattaaacaacgaggttcaccaacagctcggagagacgcataccagagcagcaggcat

SEQ ID NO: 626324 - DNA, 101 bp, Homo sapiens
cgttttacggttccagcaagccgacgcggccagcgcgatcgggcactactggccgccgcgaatgtggaagtgaaccggcctgccgtggaggctggcttgct

SEQ ID NO: 626325 - DNA, 861 bp, Homo sapiens
tgcctcgcagttagactgtcgttctgtggatgtggcaacaggatggctcggacaaggcactggagagttgcatgtggaatggcatatctggcaagtacttcgacaggaccagcataccggagtgttctgccatcatgagatgatggcgagtccatcagaaggctctgtctgggaggcaatggcctttgcttcctactacagatctggacaatcttgtggcaatctttgatgctgaaccgttctgggacacagatggtgcattgcccgccgaggcactgcatacacatctatcagaggacgcatgcgaagcactttgggtggaacacttatgtggatggacggacgaggacgtggaggcactgtgaccaggtattctggacagagaccttctcaggatgaagcacaagcccactgctgtggtggccaagaccttcaagggccggggcacccacaagtattgaggatgcagacaagttggacatgcaaagccaatgccgaacagaaagagcagatgcacattatcaaattaattgcagagaccaaatacaagaccaggcaggaatcttgagcccaagaaccccgcattgaggactcacctgagagtcaaaccattcagaggactgttaagggctaccccttctcgcaccttggatttcaccgacgtttggtgcacaagaataggatactccggaacaacatgcggtcatggattctagggctcagctgagatacgcgaacacaacagaagtcgtgagactgacatggtgacacgggaactctatactatgaaatatccagaggagtaccctgcgcccacgcagggattgggacacaatgttacgttctgagttctccggatga

SEQ ID NO: 626326 - DNA, 155 bp, Homo sapiens
tctgtggcacacatcatgatcatctcagagttagctgcacgcactgctcttgggcacttgctccatggtcacaattcccaagggtcattctaaacagtggtggccaccaccccttagaagcaagagaaaaagaaaaaaggcaaataaatgcagaa

SEQ ID NO: 626327 - DNA, 130 bp, Homo sapiens
gatagcgttggcgacaaggcgtgacttgagctttctccttctcatagacattctggatgggcatgagaaggagaaagctcaagtcacaactgaggagaagaatttcagagcctttgctagttgctgcatg

SEQ ID NO: 626328 - DNA, 493 bp, Homo sapiens
agcgggggtgggtcggaggcggggcccaggtggtgttgatacacaaagagaaggcgcccgggcggccgcggtcccgcccactgacgcgtccccggtggtgccgctataacccgccgctcgcagggctgctccacagccgcgcgacgccgccgccttagaacgcctttccagtactgctagcagcagcccgaccacgcgttacctgcacgctcgcgcctttcccttgacacaggcggacgccggaggattggggcggcaatttgtcttttcctttgtatcaaacattatttttcctgcctgctcgtacggatctggggaacatcttcacagctaccgtactcatcactgattcgtattctgactgagagaaacccactgaagacgtctgcgtgagaatagagaccaccgaggccagactcgcagggccgcttgcacccaaccggcaaggacaaaacggagacccagcgactactacgctgccccgattcctcca

SEQ ID NO: 626329 - DNA, 503 bp, Homo sapiens
agaaagaaatgtagtttggcttacttttgtagtgagggaggcaaatttataatattgtataaattatttaagtaccatgttttctgcaagtttaaaattaagtgcttttataaatgccagattaagactacaattcccttaatatgtaaaacctgtgaacatcgtggagcagttcacctgcagaatacaactaaagaaatcaaatgcttctaggtagcaaaagctattcacaagctaaattgtttatacatataaagctgtagcttataaactttatcatccttggctttacttagtaaattttttgctaagtggaatatgctttgcaactgagattctgctaataatggtttattaatttatcaggaagtatattccaactgatccaaagaacaaattcaaatattttaaaattttcaattaagcatggcataggttatcaaaatagcaataatcctttatctttacagaaacagaataatagatacctgttttttgagggg

SEQ ID NO: 626330 - DNA, 368 bp, Homo sapiens
gaggagctatccccaccctagtatgctttcactctgtatgtttgtcataattttctgtcttgttaggtaggctggattttacatgcaccacagatgttactgaatgcgcctatccatagacagacacctacttatttgcaactagaaggcactgcacctaggttctgggactataagaacaaataagacattggttctgccctcatgacatctcctggcctgctatgaagacagagagggaaacagacactccacactcgagagacgcagagctcagcacaactgacctactcgggaaagcaagagcgctgccgcagagcgaggggaggaccatggcgacgagcagctgctctcctgccccaacactg

SEQ ID NO: 626331 - DNA, 399 bp, Homo sapiens
ggacggggctcagcatattctgggaagatagaaaggggatgaagcatgataatgaaagagtgaagaacctttcagataaaaggtacgctggatctgaacaacataaccccaaagagacttgcgcaccgtgaaaagctggtctactggaagaattactccagtggtaagatcgagcccatctcctactctcccccaacttcttatgcacagaacacaggcagtctccactatggataccagttaaaaatttctggtgatggtggctgtggtggttggtataagggaatggaacaggctgctcgcagagagataagagtgggtgctccagaaaaaactttctcttctagtggaaatacgtgcccctacccccagccggtcagctaattctctacggacagc

SEQ ID NO: 626332 - DNA, 418 bp, Homo sapiens
atgacgggtattgcttggagctaacagggagacggaggttagggagaagtggtgaaacgtgcattatgatagataagtgtagtcggtcgtatacaggtctgtcgcgagttttgcttacgtatattgaagcgatgttggttaggtgtgtaactatttgaaatgtcatcttgttggtgattgaccattttattattctgaactttttctatctctgactcacttttttttatttgtttcgagatggagtctcgctctgtcgcccaggctagagtgcagtggtgcagtctcggctcactgcaacctgtgtctccgggtttcaagcaattctctgtctcagcctcccgagtagttgggattacaggcgcccgccaccataccctgctcatttttgtatttttagtagagacaaagggaaaca

SEQ ID NO: 626333 - DNA, 480 bp, Homo sapiens
gccggttgacgcatgccagaggatctcatcccctcagcatacctggttgccttgtcttgcgcattggattctcctccagagagctgaaatggcgggacctgggtctaggtcagtgctggtgaacctcaatagtcacccagcctttgctgcctcctctgtaaagcaggggtagaaacccaagctctctaggctggagaaaaactgaatcacacctagaccaacacctctcctcatatttcctagccacctccctgccagaataagctgaatccctttgctcattcataagcaaccaaaagtactcccagctcaacatttcttgagcgaggcaatcgaaaggtggggcttctccttaccttttccacttgcatgcaaaattctcttatcctactccttagtacagccctcactttaccttatagcctgcccaagtcatggaaatagtgattcttagctatacttaataattttctattctca

SEQ ID NO: 626334 - DNA, 353 bp, Homo sapiens
cgacacaggaccaaatattggtttggtgttgtctttgtactagtatacaccatgaattcttagacatacaagtcaataaagtaacagtcttttgcactgtgggaaaggttgtgacttggaaaacccctggggatagttgttgggattttattatgctgttgacggtttggtttgtgtggttttgtttgctgttgattttttctctcttgctaccagcatggctatgccagacaaaccccccagtcccgggagctaggaagtgtttaggacgggtctggaatacacaccttggtagtacgccggctccagggctgagggctcgatggggctcctggtggtcaccgaggcgctgc

SEQ ID NO: 626335 - DNA, 409 bp, Homo sapiens
ccccccccccaaaatttcccaaaaaacccccctttccctttttcccaaatttttttttggggccccccttttgggtcccaaacattcccccaaaaaggggggtccccagggaaaaaaacccttcccttttttttccccttccccttaaaaaaaaaggccccccccctaaaaaaaatccccggcggggggcgcccctgtgggtttaaaatcctttcccccccggggggttttttgggggggaaaaaatttttccttcccttttttggaaggggttttttttttgggcggggtaaagggccaaaaaaagggcccccccccctttggtaaaaaaaaaaaggggagggccctaaacaaaacccaactgggggttttttttggattttttttaaaaaaaacccccttcccttta

SEQ ID NO: 626336 - DNA, 924 bp, Homo sapiens
ggctgggatgaagacttggcagcctatgcagtacctatgtactcatttgattctcttactgtgagtcagcatgtcttcgactgtttcatgagtggccaagttctagctggtcttcctagaacctctaggcaagttcacagttctacagaatcttactacaaccatatgagagtgtgctctggcagccggtaacaggtgaccttatcgtgaagaaaaaacaagtccattttactgtaaatgcatctgatgtcgacaatgtgaaagtcccattgtacatgtgagcggaattccatgcagtgtcttgcgtggcagatgtggatagatcttattgcgaacagcagatttcgcaaggagacagtcagcccacgagcctccggcatcgtactatgaacagtatcactcactaaatgagaatctattctctggatagaatgtatagactgagaggcatcctgatatgctgtacaaataatccatattggatcctcatttgagaagtacccactctatgtattacaggtttctggacataagaactgagctagcaaaaatgccatatggattgactgtggaatccatgccagagaatggatctctcctgcttactgctgtggttcataggccatagcatctgttgccaacttggccctggaaatcgaacattaaggcagaaatattacagaggttgaaacagaatatgttttctcatatgtcataatagggaaattgatccggacgaagggggtatgggatacaagggacaggcataatatcagaacaaatggtgatgtgggaattgtaaaagatataaggattattgggttcctggatgaatggacaaagtacaagtatggtatagattcagaataaaaagagaaagaagtaaaagaacggggggacgaaagtacgaaagagtttagcaga

SEQ ID NO: 626337 - DNA, 202 bp, Homo sapiens
gcagtctgtctagggcggccgaagtggcttggctcatttaagatgaggcttcttctgcttctcctagtggcggcgtcttcgaattggtcccgagccgagggccttggccaaatcttgggcggcggttccccagcaaagggattaaaagttccagatacggcaacgggggccccttcttcaaagttccaaatttttgttttcc

SEQ ID NO: 626338 - DNA, 317 bp, Homo sapiens
tgcggatcccctcggctctaccttgtctctcggctctaccttgttctctcggctctaccttgtctctcggctctaccttgtctctcggctctaccttgtctctcggctctaccttgtctctcggctctaccttgtctctcggctctaccttgtctcctctaccttgtctctcggctctaccttgtctctcggctctaccttgtctctcggctctaccttgtctctcggctctaccttgtctctcggctctaccttgtctccttaatgacattaacactattctcaccagacctcctaggcgacccatacaaggtaga

SEQ ID NO: 626339 - DNA, 336 bp, Homo sapiens
  misc_feature (289)..(290): n is a, c, g, or t
  misc_feature (294)..(294): n is a, c, g, or t
  misc_feature (296)..(296): n is a, c, g, or t
  misc_feature (305)..(306): n is a, c, g, or t
  misc_feature (314)..(314): n is a, c, g, or t
tgcggatcccctcggctctaccttgtctctcggctctaccttgttctctcggctctaccttgtctctcggctctaccttgtctctcggctctaccttgtctctcggctctaccttgtctctcggctctaccttgtctctcggctctaccttgtctcctctaccttgtctctcggctctaccttgtctctcggctctaccttgtctctcggctctaccttgtctctcggctctaccttgtctctcggctctaccttgtctctttaaagctagtggcatacctcacagtcnnatancnagtggtcanntctcgacnatgtgcaaacagtaacctatag

SEQ ID NO: 626340 - DNA, 425 bp, Homo sapiens
  misc_feature (413)..(413): n is a, c, g, or t
tgcggatcccctcggctctaccttgtctctcggctctaccttgttctctcggctctaccttgtctctcggctctaccttgtctctcggctctaccttgtctctcggctctaccttgtctctcggctctaccttgtctctcggctctaccttgtctctcggctctaccttgtctctcggctctaccttgtctctcggctctaccttgtctctcggctctaccttgtctctcggctctaccttgtctctcggctctaccttgtctctcggctctaccttgtctctcggctctaccttgtctctcggctctaccttgtctcgaatattttgtcttgcatgggcatagtgctcatgcctgtaattccagcacttcgggaagctgaggtgggaggatcagtgagcccggaggcagagnttcagtgagcaa

SEQ ID NO: 626341 - DNA, 126 bp, Homo sapiens
gatcccctggtgcatgctgtggacatctcagacacatacacttactactacagctcaactacgtgaatgtacacatcgtccagtaactcaggtgacacaagactccctgtaccaagagctctgcaa

SEQ ID NO: 626342 - DNA, 387 bp, Homo sapiens
  misc_feature (376)..(376): n is a, c, g, or t
tgcggatcccctcggctctaccttgtctctcggctctaccttgttctctcggctctaccttgtctctcggctctaccttgtctctcggctctaccttgtctctcggctctaccttgtctctcggctctaccttgtctctcggctctaccttgtctctcggctctaccttgtctctcggctctaccttgtctctcggctctaccttgtctctcggctctaccttgtctctcggctctaccttgtctctcggctctaccttgtctctcggctctaccttgtctctcggctctaccttgtctctcggctctaccttgtctctctcttcttgccttccctctaccattctctcctcacctccaccccctcctgtcaccgntacttgtacag

SEQ ID NO: 626343 - DNA, 372 bp, Homo sapiens
tgcggatcccctcggctctaccttgtctctcggctctaccttgttctctcggctctaccttgtctctcggctctaccttgtctctcggctctaccttgtctctcggctctaccttgtctctcggctctaccttgtctctcggctctaccttgtctcctctaccttgtctctcggctctaccttgtctctcggctctaccttgtctctcggctctaccttgtctctcggctctaccttgtctctcggctctaccttgtctcggccgggtttgaagtgctcggatcgctctgtggaatatgtcgtcgtatgaaatttggggctggtgctagtttctggtgtggtggtggtagcggaggaggaagaagagccaaa

SEQ ID NO: 626344 - DNA, 242 bp, Homo sapiens
ggatcctgcccgcctcagcctcccaaagtgctgggattactggcttgagccaccgcacccagctatttatttttaattttttttttgagacagagtctccactttctgggttctaacaattctcatgcctcagtctctgagtagctgggactacagctgcgcacagcatgctagctaattttttgtattttagtaggacgaggtttgcatgttggcaggctgggggggggggggggggaatc

SEQ ID NO: 626345 - DNA, 380 bp, Homo sapiens
tgcggatcccctcggctctaccttgtctctcggctctaccttgttctctcggctctaccttgtctctcggctctaccttgtctctcggctctaccttgtctctcggctctaccttgtctctcggctctaccttgtctctcggctctaccttgtctctcggctctaccttgtctctcggctctaccttgtctctcggctctaccttgtctctcggctctaccttgtctctcggctctaccttgtctctcggctctaccttgtctctcggctctaccttgtctctcggctctaccttgtctctcggctctaccttgtctcttcacacgcctgtagacaagatagagccgagaaaggtagagccgagacaaggtagagccgag

SEQ ID NO: 626346 - DNA, 117 bp, Homo sapiens
ttacaaccccacgatcactaattttgacattttcctatcttggcaatgtctagtaatcgctgctgtttgaatttatatactgacagacggcttgacacgcggaattttagaacatct

SEQ ID NO: 626347 - DNA, 510 bp, Homo sapiens
  misc_feature (294)..(294): n is a, c, g, or t
tgtggtggctcacgcctgtaattccaacactttgggaggccaagtctgacagattgcttgagtccaggaattccaagaccagcctgggcaacatggtgaaaccccatctctactaaaacacaaaagaaattagctgggagtggtggatcgcgccactgtactccagcactccagcctgggtgacagagcaagactccatctctccaaaaaataaataaataaataaataaataaataaaatttaaaaacatacaaacaaacaaaaaaaacagctacttaagaggctgaggtggngggatcacctgagactggaaggtagaggctgcagtgagccaagaccgcaccactgcactacagcctgggtgaccaagtgagaccctgtctcaatgcatagcatcagccatatcccagtacagacattatgatctaacgggcttttcttttcttgagacgggctttccctctgtggcccagactggagtgcaatggtgcgatgtgggcccctgctct

SEQ ID NO: 626348 - DNA, 231 bp, Homo sapiens
tactaccagcaacctatagccaaaccatttacccaaataaagtataaaaaaaaaaaaaaaaaaaaaaaaaaaaaaaaaaaaaaaaccaaattttttaaagggggcgggggggggggggggtgggacacacggggggccccggggccgggggaaaggggggggggggggcccggcccccaaaggggccgcgacacaaagacaacaagggggggaaaaaccccctaagggggt

SEQ ID NO: 626349 - DNA, 463 bp, Homo sapiens
actgtcaataaacagttaagcaagggcacaggacacaagatcaatgcagaaaaataaattgcatttctataacttaacaatgagcaatcaaaataaaaaattaaacatatgataatattaaaaatgccccaatggaaataaaatatttaggtataaatctaacaaaacatatataggacttacatgctgaaaaaagaaaatgctgatgaaagaaatacaaaggaatctaaataattagagaagcgtactgtgtagatggattgtaagactcaacacagtaaaaatattcctgtgaaattcatctacatgtttaaggccaaccagcacaaagatagagcattaaacaaccaaaactaaggatgaccctcacagagtccatttcaccccctgccacctccactggatggaggaataaggatgaggaatagaaggaaacttctatgaaaaacacacacctaacatc

SEQ ID NO: 626350 - DNA, 338 bp, Homo sapiens
cccttgtgatagtgtgaagtggctgtgtccccacacaaatctcatcttgaattctcacactgttgtgggagggacccagtgggaggtaattgaatcatgagggcaagtctttcccgtgctgttctcataatagtgaataagtctcacaagatctgatggttttataaagaggaggttccctgcacaagttctctccttttgcctgccgccatccatgacttgctcccccttgccttctgccatggttgtgaggcctcctcagccatgcagaactgtaaatccattaaacctctttttcatcccagtctcggttatgtatttatcagcaacatgaaaat

SEQ ID NO: 626351 - DNA, 107 bp, Homo sapiens
gaggttttgaacggaaagagtgtttccacactgtgaggagaggactggagggctacaatagtaatgtttaatcttgatatgcaccagaaggtccagtgtggagagag

SEQ ID NO: 626352 - DNA, 368 bp, Homo sapiens
  misc_feature (28)..(28): n is a, c, g, or t
tcggcacgagaagagagagagatttccnccccttctctcttttttctcttctttgggtcttttttatccttattcctcttctaccccccttgtttttcctttccttctatctactctatcattttatcatcacctctctcaccttttaacatacttcacatttgcctcttatgattatataatttttctcttttactactctcccttatattactcaaaccatatatatttcttttttttttacatttccataccatatttcatccatctactttcatcttcttttaacttctctctaatacatctcttataatcttttctatcttcttcctcccacattatcacaatttttctttcccttcttttcg

SEQ ID NO: 626353 - DNA, 601 bp, Homo sapiens
taggagtgctgagcccgggaaaccgagccatgactgaggctgatgtgaatccaaaggctacccccttgcgatgcccacctcaccaagaagctaatggacctcgtcagcagtcatgtacctataagcagcttcggaaaggagccaatgaggccaccaaaaccctcaagaggggcatctctgagtccatcgtgattggctgcagacgccgagcccattggagatcattctgcacctgccggttgctgtgtgacgaccaagaatgtgccctacgtgttagtgcgctccaagcagggccctggggagagcctgagtggggtctccaggccttgtcatcgcctgttctggtcaccatcaaagaaggctcgcagcttgaaacagcagatccaatccaattcagcagtccatttgaaagggctctaagtctaaacctgtttgcctcttgcaacgggtgctccctgccagtttcccccccctgtgagggtggggtggcctcatatccactcgtgtgttgaagcccatggatagattactttcccagccctaacctcctctaattgttactaacactcgtaggttcttacccagacacaaaacgcacaaa

SEQ ID NO: 626354 - DNA, 337 bp, Homo sapiens
  misc_feature (152)..(152): n is a, c, g, or t
cgaaaccaataacggatcaaagtgtctcagctaatttgaagagtacagaattaaaaagtgggagttgtaaaggggttaaacatccttagaaagtgaccatcccaatgattcacttgtagtactaaaaaataataaagaacaacagccatgcnaattctacataacaatagaataacaagcctagagttcccactatggtgccgtgagttaagaatccaactgcagagtctgaggtcactgtggaggcacatgttcaatctccagcctggcagagtgggtcaaaaggatctggtgtgttgtggcaactgcgtaattaggtgtgcgggatcctcaatgt

SEQ ID NO: 626355 - DNA, 888 bp, Homo sapiens
catgcgcttgccgccttgccacgtagtctatcgtcctaggcccagggcgctgccgacacagctcccgctcccccggcccctctttgactctccgccacgggcctccgggactcaggctcccgcctcccgattagaggccgaggaggagagattcccacgccaccgaagggtcctccgggctgccccccggcttcctgagggtccgaaggtgagctccagcccctcgggcccggtgtggatcctccccgcccccgtgccccgaacctcggcctcccccgggccccgtgccccggctggagcgccacccctttggtccgccgcgcccgagacccctgggagtcccccacctggcatctcccttcctgagtttctgaagctgatttgtcgcttgcgaaatttctcggttcttcctctgagcctccgaggtcccccctgcacaccccggggtgtgctctggtctcctgtccggccccgactcttctgtgtggcgccgcccgggagccccccttatgcgcgaggctgctccgcgttgccctgcccccggcctgcgtggctggggccgagtccccggggccccaccgcgagggcacccatctcctgtcaacaggctcgcgagaggtcacggagagccgagccccccccctgactttggagagaaaagtgggtttgctttttttaagggatcctatatttagtcctatatatccaacctctaactgacctttcttttcgaggaaatggcttggtgggttgccgcccccccccgttcccttgacgctggcaccctctgttgattttttaaacccccagctatgatggataaactgaattattttctacccatactgaaccttaggaccacaccaaattaaaaaccaaaaccccgac

SEQ ID NO: 626356 - DNA, 120 bp, Homo sapiens
ggacaactctaccttcttgtccaatgtacaaggagtagtctaaaaaaaatgcatattaatttctgccccaaagccggattctaaatctctgtacaacaacaatttcaggacccaaagggg

SEQ ID NO: 626357 - DNA, 574 bp, Homo sapiens
aggcggatacgatattttggattttgtgggcacaaggcctgacacaatgtgttatgatggtgcagctctggatcctgaaaaattcatgatgctctggactgacgctgcttcttatggtcaggacccgggttgaaatgtccagagactattcatcactgataatggattgtgtgcgacctttccatctggaaagctttcactgtttttctagagcttactcctgctaaaagcatgcaggtcatcccagaactaccactggcaataaagttattcgtgtcctgcaggtaggtgcagatggatgtttaattaacacaactataccagagcgccccatgggagttaacttgccaaatggccctatatggagaagtacaacaattcaacgtccgtggctttaaagttgcagaatggaaaactccttagttcacaaaataatttgcttgcaagaaaccgctttctcctagcttgagaacagctgaactgcccacacccattcgcgctttccataacaaaggctcaacttggttgccgaagggaaattggttggtttaatatattctatagaaaacaggtt

SEQ ID NO: 626358 - DNA, 350 bp, Homo sapiens
gagcagagtattgctctgtcacacaggctggggtgcagtggtgtagtctctgctaactgcaacctccaccttctgggttcaagtgattctcctgcctcggcctcccaagtagctgggattacaggtgcataccaccatgacgggctaatttttgtattttcagtagagacagtttcatcatgttggcgaggctggtcttgaactcctgatccgcccacctcaacctccaaaagtgctgggattacaggtgtgagcgactgtgcctggccccaacatgtcttttctcccatcacgcttcttcttcctttagcctagaagcttgccaccttacacccttctgtcgtcttctc

SEQ ID NO: 626359 - DNA, 898 bp, Homo sapiens
  misc_feature (44)..(44): n is a, c, g, or t
  misc_feature (85)..(85): n is a, c, g, or t
  misc_feature (101)..(101): n is a, c, g, or t
  misc_feature (324)..(325): n is a, c, g, or t
  misc_feature (333)..(335): n is a, c, g, or t
  misc_feature (338)..(338): n is a, c, g, or t
  misc_feature (340)..(342): n is a, c, g, or t
  misc_feature (385)..(385): n is a, c, g, or t
  misc_feature (388)..(388): n is a, c, g, or t
  misc_feature (398)..(398): n is a, c, g, or t
  misc_feature (400)..(400): n is a, c, g, or t
  misc_feature (466)..(466): n is a, c, g, or t
  misc_feature (469)..(470): n is a, c, g, or t
  misc_feature (511)..(511): n is a, c, g, or t
  misc_feature (528)..(528): n is a, c, g, or t
  misc_feature (589)..(589): n is a, c, g, or t
  misc_feature (601)..(601): n is a, c, g, or t
ttttttacaacccatccttcttttacctttccttcattcccttnctcccgcctccgctcttcagcatcttttctctttttaaacnattccatgctccttcnaaccctttccctttttttacttctccctccattatctccccccactcccagtccatcccaccccttcttacctttcccctctctcccattctattcctacttttattattttcaccttatttatatcttttcccacttcctctctcacctttccaaccactactacctcatctccaattccttccacttcattcattttctttcctacctcttcaactcagtnntgaacgtnnnctncnnnccagcctattatctttttcttcttaccttcctccattctttcnccnacatccactncnagaacttcaataccacttttttctttaaatattaacattccttttatatcagccagaattacaaanagnntaattacatcatttaactcaaccacattatcaaatacaacntcttttacttacccccnctccccctactcatttttctccatcccttcctttcctccatttatctccactttcttcccnccaccctaatantctctttaccctcatatccccttcatattacttatctatctcctttatatatattttatttcattcacttttaccttttttttataacataatttttactactccccctcacctccttcgatctggctggcttggatctcgtttttaacccgttcctgccccacctgccctatagttatggcctgtgttctgctctcctggtcccagtgcaccgtctgctctgtgaactcctcccaccaggcccttcttaccccacgcgtgtctgtccccctcgttctgtagcgtttgtacataata

SEQ ID NO: 626360 - DNA, 204 bp, Homo sapiens
cttagacgtagcgccaccaccgcatgcgtctcagtgtacttctcttctcttttcttctcacaggcgcagaggagggctctcgggtgcaggagctcaggcatggcgtctcagagtctgctctggggctctcagatgtcgtcttttcaggggctcaggcttgggaggtggtgctggggccttagggggtgggtggagagcgggggt

SEQ ID NO: 626361 - DNA, 1109 bp, Homo sapiens
tatccggttcagtctaattcgcttttgtgggtagtcacttcataggccagaacttagggctaggagtgatgattaaataagagggagtgacattaactatttaggggacaggttagtggttggatagggcctcagggataggggataaagggggggacaattctctatagaactcaaatataattaagaagaggataatatagccctacataagaaagaaatttttagggggaaaagagggaccgcggggcggggagaaataatggggtccgtaagcgcgccaactgcatagaggggggggcatttttctcatagtgttagccgcggtggaaaggtggggggggtagttcgaaagaggtggtaaataactataatatagcatagttagagggcataggagaggggtggtgggatatattttaagagagggggattcatagtgactcggggtgtggagagagaaacagaagagcgacaacgctgcaagagggggccaccaaggggggctcaaattagcgcgtgggttatcccgggggagcccacaaagcttttatccgtgtgtccccaaagaggggggcaaaaaaactcgtggcgcgagagttcgctccccaataaataggtgaaagacgcggatattctacatttccccgaaaatagagcctccaagggtggtcacacccgtggctctctaaggaacccccgcggaacaaaaagggacacaaacggaaagagaaccgcccccagccacgcgacaaccccaccaacgaaggaaacaacaggcagccaacagagcaggggaccacaacgacagcaacaaaagaggacgacgccacaccacagtacgcggcacacaacaaaaaaagagacgaaatcaaacaccaagaccccccgggaaaaaaagaaagaagggaacacaaaacgcacaagcaccacgaagcacacccaagccacacgcacaatgaaaaacagagacagaacacagcgacagaaacgaccaacaaataggagaccacaagagaggccaaccaacggcaaccagacaacacagcgagaagcgaccaaccatactagtggcaccccaccagaagcacaggctcacctgaacacaa

SEQ ID NO: 626362 - DNA, 108 bp, Homo sapiens
gcgaacagacgagctactagacagctaaagagcacaccgtctatttagcaaatagtggagatttataggtagaggcgacacacctaccgagcctggtgatagctggtt

SEQ ID NO: 626363 - DNA, 110 bp, Homo sapiens
ctagaggatccgtactgttatcccaacactgacatttagacaattttgcatggactctgaattcctgcagggctatatttggatactgtaaaaaaaaacaaaagtaatag

SEQ ID NO: 626364 - DNA, 834 bp, Homo sapiens
  misc_feature (11)..(11): n is a, c, g, or t
  misc_feature (121)..(121): n is a, c, g, or t
  misc_feature (130)..(130): n is a, c, g, or t
  misc_feature (161)..(162): n is a, c, g, or t
  misc_feature (200)..(200): n is a, c, g, or t
  misc_feature (207)..(207): n is a, c, g, or t
  misc_feature (222)..(222): n is a, c, g, or t
  misc_feature (247)..(247): n is a, c, g, or t
  misc_feature (256)..(256): n is a, c, g, or t
  misc_feature (269)..(269): n is a, c, g, or t
  misc_feature (284)..(284): n is a, c, g, or t
  misc_feature (287)..(287): n is a, c, g, or t
  misc_feature (296)..(296): n is a, c, g, or t
  misc_feature (300)..(300): n is a, c, g, or t
  misc_feature (302)..(302): n is a, c, g, or t
  misc_feature (311)..(311): n is a, c, g, or t
  misc_feature (314)..(314): n is a, c, g, or t
  misc_feature (327)..(327): n is a, c, g, or t
  misc_feature (357)..(358): n is a, c, g, or t
  misc_feature (372)..(372): n is a, c, g, or t
  misc_feature (397)..(397): n is a, c, g, or t
  misc_feature (436)..(436): n is a, c, g, or t
  misc_feature (443)..(443): n is a, c, g, or t
  misc_feature (451)..(451): n is a, c, g, or t
  misc_feature (478)..(478): n is a, c, g, or t
  misc_feature (487)..(487): n is a, c, g, or t
  misc_feature (490)..(490): n is a, c, g, or t
  misc_feature (495)..(495): n is a, c, g, or t
  misc_feature (544)..(545): n is a, c, g, or t
  misc_feature (554)..(554): n is a, c, g, or t
  misc_feature (564)..(564): n is a, c, g, or t
  misc_feature (568)..(568): n is a, c, g, or t
  misc_feature (570)..(570): n is a, c, g, or t
  misc_feature (587)..(587): n is a, c, g, or t
  misc_feature (591)..(591): n is a, c, g, or t
  misc_feature (596)..(596): n is a, c, g, or t
  misc_feature (618)..(618): n is a, c, g, or t
  misc_feature (644)..(644): n is a, c, g, or t
  misc_feature (707)..(707): n is a, c, g, or t
  misc_feature (780)..(780): n is a, c, g, or t
  misc_feature (793)..(793): n is a, c, g, or t
  misc_feature (826)..(826): n is a, c, g, or t
gcagcaagagntgcagcatattgattacaggtttaggtgcatcctgcagaacggccggtctttattggcaccttcaaggcttttaacaagaacatgaatttgatcctctgtaactttgatnagttcaganagttcaagccaaagaactccaaacaagcagnnagggaaaaaaagcgagtcctcgttctggggctgctgcnagggganaatctgttctcaatnacagaagagggacctcctcccaaanaaactgttnttgctcgagttcnacttgctggagctgncgngggcccagngatngncagcgctgntgncagaggaatcccngctgggttcccatgccccaggctcctgcannacttgctgggccantccgtggggttggcgggccatcccnacaggtgatgaccccacaaggaagaggtactgttgcagncgctgcngctgctgncacagccagtattgccggggctccaanccagtaccnccntggcngtgggggtcctcccccacctttgggccgaggagcaccccctccaggctnnatgggcccncctcctggtntgangnctcctatgggtcccccnatgnggatnccccctggaagagggactccantgggcatgcccctccgggaatgcggnctcctccccctgggatgcgaggccttctttgacccttggccacagagtatggaagtagtccgnagaggcgtgggctcgattcctcagggccacgttaccacagacctgtttgtttcttatgctgttgttcgtggantctcatgggattntctggtttcccttacagggcccctcccccgggnatgcgccc

SEQ ID NO: 626365 - DNA, 278 bp, Homo sapiens
gaaattttaggccaggccctttttaaagccccaaccgggggaaaccgggggccttttttaaaaatgccggaaattaaatcctttgaaaatttttttttggggggagacccccaggtgtgggggggggccgccctcccaacctaccttttgttggaagccccttcctttttttttactggtttcccccccctatggttttttcccaaaaggaagggttttgggcccccgggtttaccttttttttttttttttttttaaaattaacctttcggggggga

SEQ ID NO: 626366 - DNA, 101 bp, Homo sapiens
ctcgacaagctggctgccgccgtacagcagaaaggctatgcctgcgtctgcctgttctggtactggagcaagcacctggtcaagtgcgagatcgccctggg

SEQ ID NO: 626367 - DNA, 157 bp, Homo sapiens
ggttatccgcaaagtaatgccgtcggaagatggtgaaggagactcgaagtactctgaggcttgtaggagggtagaatagagacccagtaaaattgtaatgagcagtgcttgaaattatttggtttcggttgtcttctattagacttggccttatgag

SEQ ID NO: 626368 - DNA, 280 bp, Homo sapiens
gcggggccccatacatggcctgcgtgcgtgcgtggctcgtggccctctacgcgtcccggcggcggctgtgaggaggaagcgctagggcggtcgtggcggaggagtgagagacggagcgacggccgagaccgtagacgccgctcggccgctgtacttacttccccggttcagcatgggcaaaggtttcctagcaaggtgcagcgtcgagacggtatgccatatacgcttgatgaactcctagctgggctgtacagttgccgcggactgaccgctcttctag

SEQ ID NO: 626369 - DNA, 1464 bp, Homo sapiens
  misc_feature (58)..(58): n is a, c, g, or t
  misc_feature (260)..(260): n is a, c, g, or t
  misc_feature (267)..(267): n is a, c, g, or t
  misc_feature (610)..(610): n is a, c, g, or t
gctcaaggacaggtgccggggagcccctgtacaagctcttctaaggccagtccaaacnatccaggtgtgcaataagggcccggtgggatgcgggtacagacagagaggcccaagatacaacatctctaacagacgacggggtctgctgagcgggagtgatgtggaatacgcaccctctgaacggctgagcggtgatcgctgcagagtacgatgggagctgggacagccaatcccggtgaaagggtccatctaactggtgnacaccantgctcctgcagagtccaaggaggaagactcgagttgaccgagggtggtaccgtggggcagtgccctggctcctgtctggccacatggactcacatcatgcgttaggctccctgggatgctgtgcgttcccgaggcgtgcccacacggcaggcatggagtcctggtcagggcagcgctaggaaaccgtggagccgtcagcaaggccgtgggaagggcggccggtgtgaaagccgtcggtcagaccaccgctatgatagcgacttgacaaatcgtaccgggtgatagcgatgcccaacgcgtacgatcgctggtgacgagagggttggtgaggtcgtgcacctangcgatgcgcggagaaggggacgagagccaaaggcaaggacccttgccctagggcgaagcgccaattgcccttccttagggaagggcacggatgaacaccgggtggtggcaacctgagtgccggccagaaccgacagagagttggaacgagggcaaagtccaagacgaggccacgcgtgaacagagaaggaagcggaccgaaaggccatcaccgaggatctaacctgaacgcggctgctctcagtgcaaggggcaacactagcgagacagattggtggaacaacgttcttaccagaagcgtggctggtgcttgggccacgccggtgcaccctgcaagtacaagtacttcttcgacttcccttggacgaccaggccaaagaatgcgcaacatcacgggatgaagacacccattcacaattttgggaagaacgacacaggggttaccgggaccgggtccgggggggaaacattcccaaagaaaaccccagttacactatgtacagatgcattcccccagggggggacagccccgggcaagaaatgcgcgagcgcaagggtgcatacaagcgccagagcaaaacagcagcagatcccaacaaacgggtgcgcaggaagccccccaccaataggtcaataataaagaaccaccaacagaggaacagcaacacaacagtacaacaagaagcaaagtagccggccacaagacaaaaaagagtaggagcaacatcagccgcgtagattctgcacgtagcgtcggtgactgtctacgtgttgagagaatacatagcacaaacgaaaacaaacacagagcaaccaacaagacaacacacagcaacaccgaagcaacgacaccat

SEQ ID NO: 626370 - DNA, 165 bp, Homo sapiens
tatgcatttagactaggtccccactaaatactgaaatatcagaggctctgtgctcattaccctattaataaacagcccttatctatctctcaattgttattcttttcttttttcaagcgttcttttctttctttttctttttgctttttcctttctcttttttct

SEQ ID NO: 626371 - DNA, 439 bp, Homo sapiens
ttggcttggcccgtttgctgagctggctgtcgtggtcacatgcatggaagacaagaacagctgccccaactgctcaacttccaaacaagttccaccagctcagctgaagccaacaaaaaaccatctgcccaacaaagaggcaaggagcctatggacatccctggcaccctcagtccctgcccccaaccccctcacagaaagcatgtggtaaggactgctgacgtgaactcagttctccagacaccaagcttcagacaaatcctggggaatggcctcagggctaggagcagtcaggcttaagaggcagggccacctaaacgtctgctgagaacacagggtgccccctgctgccctgctcctgagagtgtctagaagtgcccatgacgtgagcccaggagtttgtggccagcctggacaacatagtgacacccctgtatcc

SEQ ID NO: 626372 - DNA, 770 bp, Homo sapiens
caatgtttagaacattttattaaagtacaaaattgttggaatgtagtctaatagaccggctagtggtcattctgcaccacgtactgtcaagtcccccctctcctccccccccatcgccccccccccccagccggcccccccgctcccgtccctccctcgtgtccatcgatcgcacacaaccaacacccatccctctcctgatcatctgcagccatccacctgtcccaacaccaacctcctatcaaagcatatgcacatcccccgcgcgcaacccatcgacacctctcaaccccctcctcctccatccgctcaccccatccaaccatacacccaacactccccaccccctcaccgccttcaccggctaatcactcacaaccccaccactctacccacccgcgtccccccctcacaaccccctcctcacttacctatcacatgactatccatccccatccttccacccctactccccgatttccacctccccctccctcaacctcaaacctcacctactccatcacttaacccacagaacacctccctccctccccattccaatccaccctcaacccaccacacccaccaaccagacaaccaaccccccaaacaataaaaaaatctgatccgtacttatcctcctccttcatgctctgataccgttcaccgtccactgctcatcaactccctgtctcctccacacgtgtagttgcctagcttccaactcacatcattgtcctctccccatacccacctcaaatacgccgtgc

SEQ ID NO: 626373 - DNA, 446 bp, Homo sapiens
aaaaattagctgagtggggccaggcacagtggctcacgtctgtggtcccgacactttgggaggctgaggcgggcggatcatgaggtcaggagttcaagaccagcctggccggcgtggcgaagccccatctctactaaaaatacaaaaattagcggggcatggtggtgcgtgcctgtggtcccggctactcggggggctgaggcgggagaattgcttggacccaggaggtggaggttgcagtgagccaagaccgcaccactgcactccagcctggggacagagcgagactccgtctaaaaaaaaaaaaaaagctgagtttggtggcgtgggcctctggtcccagctacttgggaggatctcttgaggccggaaggtcgaggctgccatgagctgtgatggagccactgtattccagtctgagcaacagggcaagatcctgtttccaa

SEQ ID NO: 626374 - DNA, 178 bp, Homo sapiens
atcacgctcggcccattctcggcccccaaatagctagcaccacaggtgtgtccaccatgcctggccaatttgggaggccgaggcatgagaattgcttgagccctgcagctggaggttgtggtgagtcgagattgtatcactacattccagcctgggctgcacagtgagactctgtctc

SEQ ID NO: 626375 - DNA, 763 bp, Homo sapiens
cgaccaagggcctccttgaggatggaaggcaatggtggagggaagaggatcagaaaaaataaccattgtgtactaggcctagctacctggtgtgataaaataatctgtacaacaaagctcccgctgaaatgatttgaattatataacaaaacttggcgacatgtacccctggaacctagaaataagaaggtgtacaattaccagaaagtaaccacaacttaatattagttaaaagtgattaaatataacttgcttcttctctttcgcaagattcttaatgcatcacactcaatttagggaagcctggcaggcatcttagaatggcagacaataaggccttttacttgttgcaatgtaagatatacttatgttaaggtgttagatgaccccatagatataactaatctaatagatgacagatattacatcacgagtatgagtttaatagagacattgattaccaattatgatgctagtctagccaagaaaccttcagagatatacacaattataatgcacacgtaaacagtaataatggagtgggcaagagatagtatcatgtataacacttaagtacaacaacgcaaatgcaggcagtgactatgctagctatcaggaatatagaaacagcgagtactgtcaggagaaaataaacacaattaccagagtacttagaacatttccagagctcaaaaatgttctgtacataagggccacatcttagccaagaaagatattagcagatcctacacgtacatgtacc

SEQ ID NO: 626376 - DNA, 318 bp, Homo sapiens
gaaaaagaagtttgacattcagaaacttatcaagaggttctactctttggatagagaccaaaatcatactttgaaaaaatgagaagagatggaagccaaggaagggtgtgtggaatcaagtagcagttctcaaaacagcatatatcaagacctcagcacatatcaagacctcagcacatatcaagacagtggcacaaaagcatcgtagtgttgtcattcaccactatgcaggagggaaagccaatttcatttcagaatgtcctcaattaatctgtagaaattattaattttattaaatcccaacccttgaaaaaaaaa

SEQ ID NO: 626377 - DNA, 165 bp, Homo sapiens
agcgctgagcattcacatggaggtgatgggggttcttagagagaagatcactgaagaaacttctggctttaatgggctttacaaagctgggcaatattacaatcctgtgacctcagtggaaagcagtcatcttcgagcattttccaagccctaatagccacccca

SEQ ID NO: 626378 - DNA, 370 bp, Homo sapiens
cagatatcactgatcactcgtgattccgaccgtcatcgacccataggcagagtgcatgtaagctggacttcatgttccctcaaagactctcccgttgcttacggctgaggactctgggctgctggaatcggactctcatgacttttgactgccattttgtttgttcagtggagactcctatttgtttactcagtatccagtatctacttcttccttactagcagaacgctaggcaatatgcattggataaactatacatagaattaaatacaactgcatataacagtaatccccaataacaattccttatatagtatataagttaataattattaaaaaatcagcttcgtttcacattttttacagaatt

SEQ ID NO: 626379 - DNA, 151 bp, Homo sapiens
gacacacaggtgaggtgatacgcattgcttcgtacttatgtaatgaaaaatttttttaatcttcgccttaatacttttttatttgtggtattttgaatgatgagccttcgtgcccccccttcccccttttttgtccctcaccttgtctctt

SEQ ID NO: 626380 - DNA, 1057 bp, Homo sapiens
ttaaccaggcggtcccctagctgcgcagtcgctggcgtgccttcgtgctgggtggaacctgggtttccacgcgccggatgaactgcccgcgtgcgtcaacgtggagggcgagacgcaccaccagtgtggtgcaaatggatcaaggctgtggaggggcagactctggctgctggtggtggaccaggagacagatgatggagctccgccgtgcggcaagctgacctgttacctgatggagatgtgcccagcgagggctcctcacctcggtccacgacccctgggatgccgaatgccagactggggcacacaccggtagctcacagctccaaagctggcaagataggatgtcagtgggcccctgagggagctgcgccctcggctctggcaactgcgaaagggacctcagggcttatgggttcaacctgcatagtgacaagtcccggcccggccagtacattcgctctgtggacccgggctctagctgccgcccgctctggcctccgggcccaggacctggctcattgaggtgaacgggtcagaatgtgggagggactgcgccatgctgaggtggtggccagcatcaaggcacgggaggacgagtgcccggctgctggtcgtggagccctgagacagatgaacacttcaagcggcttcagggtacagaccaccgaggagcacgttggaaggtctctgacgtcaccgtcaccaaatggaaccagcctgcccagttcagtggtggtcatggtgtcgtccgaagtgacatgctggtacgacaggacctgagatggaggtactggtaagaaggatccttcaggagagggctcaattgaccaatgagcgatgcatggtgaagttagcagtgagttaaaggtggcaaaatgataatgaagattgagatgaaaattgagaatatgtgaaaattgggtgttgagaagtgggataaactgagggatgggaaattgaagaaactaagataatagagagagaaaagaaaagaaaaagtagataagtaatatagaggaaaaaaagagaaaaaaatggaggaaaagattgtgat

SEQ ID NO: 626381 - DNA, 330 bp, Homo sapiens
caggcacataccagggagacccaactaattagttgtatataaaggaaagactagggtcatatatccatgtagcccagactgatctcgaactacctggagctacaagtagatctgcctgacctcagcactcccaaagatgctagagattacagagcataagccaccgaagcccagactgagttacatactctacacatactttcatgtatactaattaagtgttcttgtatttcacgcttgacagaactccctattagtatttctagaaaaggcaggtctagtcgttgatgagcctcctcagctttagttcatcaagaatatctttatatt

SEQ ID NO: 626382 - DNA, 124 bp, Homo sapiens
ggggggggggggggggggggggggttttttttaactttttcctttttttttgggggggggggggcccccccctttttacaagggggtggggttttttttttaaaaaaaaaaattttttttttta

SEQ ID NO: 626383 - DNA, 138 bp, Homo sapiens
tttcaaattacctgagacttctgatcataattgacagccagttcttctatggcctgtaaaacttctttcagttcttctttagaggcctcattggctgacttcaaggcgattccgctcagcttgcatattgtcttgatc

SEQ ID NO: 626384 - DNA, 179 bp, Homo sapiens
agcattgaagagaaaatcttagatatgcaaaaaaataaagccgaacttgctcaatctatcctaagcgccgaccacgaaggcgatatcaagctgagtgaagatgagctgctagggttgtttgacaagtttttatgatattaacactattatcattcagttttaaaacagtattacattag

SEQ ID NO: 626385 - DNA, 241 bp, Homo sapiens
gcccgagcaaaaagccaaacaggagcgggagaaagaactggcaaaagtccctatcaaaaaggaagatttggagctaataatgactgagatggagatatttcgagcagcagcagaacgcagtttgcgggaacacatgggcaacgtggtaaaggcgcttattgccctaaccaactgatgggtgctttttcaaaataaacctactgggattaatttatggccaataaaatttttttttgtttta

SEQ ID NO: 626386 - DNA, 109 bp, Homo sapiens
  misc_feature (29)..(29): n is a, c, g, or t
cgctgggaatatttatttatttatttggnctattaacaccaagatctgcaaaaaacaacctctaaacactcgataagaaaactcgtacattaacattcttcaattttgt

SEQ ID NO: 626387 - DNA, 111 bp, Homo sapiens
cgggtgatccacgctttgtctagtgattgttcatatagagcagttggaccactattgtgtgttgctcaatcattgactgtagtcccaaacacagccttgtgacccgacgtt

SEQ ID NO: 626388 - DNA, 318 bp, Homo sapiens
ggtaacccatgttttcctagaaacagggaagagtcatgaccaactttcacattgtctgctttgttcttggggtatcatccattgtgattaccattcccaagaagtttctctcccaaaacaggattacttcttttcctacccttgattcaagtgacctttcattacaggtatatctgtgtgtttatatgggacatctatgtatgggtctggcactcacgctgtatatggagacacatgcacattgggttcagtgatttgtccaccactgtcacacagctctctagagtagcgcgtgctcatatactcagtagagtatat

SEQ ID NO: 626389 - DNA, 81 bp, Homo sapiens
attcacttttgaaagaacatgttaccttaccttttgttttagaagttttcaagtattaaaatattttttagaaaaaaaaaa

SEQ ID NO: 626390 - DNA, 397 bp, Homo sapiens
  misc_feature (45)..(45): n is a, c, g, or t
  misc_feature (165)..(165): n is a, c, g, or t
  misc_feature (183)..(183): n is a, c, g, or t
  misc_feature (186)..(187): n is a, c, g, or t
  misc_feature (206)..(207): n is a, c, g, or t
  misc_feature (221)..(221): n is a, c, g, or t
  misc_feature (223)..(223): n is a, c, g, or t
  misc_feature (240)..(240): n is a, c, g, or t
  misc_feature (247)..(247): n is a, c, g, or t
  misc_feature (257)..(257): n is a, c, g, or t
  misc_feature (263)..(263): n is a, c, g, or t
  misc_feature (265)..(266): n is a, c, g, or t
  misc_feature (301)..(301): n is a, c, g, or t
  misc_feature (329)..(329): n is a, c, g, or t
  misc_feature (339)..(339): n is a, c, g, or t
  misc_feature (355)..(355): n is a, c, g, or t
  misc_feature (372)..(372): n is a, c, g, or t
  misc_feature (377)..(378): n is a, c, g, or t
agtgcattcgctgtgataatgggtccagttgtatgcttataattngtgtagttttcagcatgttttacttctctagagatgtttatagtaaaaaaaattaacatcttactattcacttcttgtgttcattgtagtttagaaagaataagaaacaatggttctgcngtgttgttgatgttatgnggnnaactgtttttaacgtttanngggagaaataaatntncagctgctaaaactaanttctganatcatttggncctctngnngggaggtcaacaccggcatcatgtagcactagcgncggggtgtcactactcagcaccaatcanccggaaatcncattttcttcctaccngtgtttctgtctgttgntcctnncttctttaattacactagg

SEQ ID NO: 626391 - DNA, 921 bp, Homo sapiens
  misc_feature (46)..(46): n is a, c, g, or t
  misc_feature (74)..(74): n is a, c, g, or t
ccctgctcaccctccgctaattcttactaaaaatgatataatatgnatgtgtattctattatgcacatgcgggnaaatggcaaggagaaaaaaaaacaatgctaaaaagcctagagatgaccacatatgaaacgaccatgtgtgtaaaggattgctggaaaataaatcacagatggcctggattctgccatgttaatcaaagaagagagggcctacctcagctgcctagcctggatcacctggaccccattacgatacaggatcataaacacctctattttcccttctaagagacaccagaaccacttggacttattccacctgcatcatacatgcgtgcgatcagcctgcactcattctttccctgtctatcccctttgataacacttctccttcccatctaccaccattaaagctattcactctgtctattgccactcatgttacacacctacccctctcctcccttacttttactcccctccccttcccattccttccattaccccatacatattagtctaacttcctaactctccccccactcttccccaactacattcggcactcgcacctacatctgccctcccgccctccgccggcttcactcgacactctcctctccctccccatctcccactcttcctcaatcgcccctttccctcccattcttttctccttcttgttatcttcgacaccctcgtcacctttctccgcatccttgcacctcgttctgtgtcccctctcctcactccctcctcctcatcatctttatatctctcgcctatcattcgcacttctcatatttatacttactctttccttatctctgaggtctatatcctttatcaacgcatttccccactccctcatgtcaccttccatgcacatctattcacctctatccgcacacctctcctg

SEQ ID NO: 626392 - DNA, 150 bp, Homo sapiens
tgctgctgatgactttagcagtgaggatgagacagagctggcatgcgccagtctgaggagaacgacatccatgggctccgcaaggtcatatgatagacaccaatatcacacgacagcagcaggaggaatagcagcaggaggaatgccgcg

SEQ ID NO: 626393 - DNA, 1060 bp, Homo sapiens
agcggggcgtggcggtggcccgggttgtagccgccgcgctgccgccgcccccgccgccgccacctcagaagcaggaaccgaagtcgtctgcctgcctgccgccactgcctggtgtcttctggtctggggccctgcagccatggaggatttcatctgtgatctcggacgacagcggctctgagagctccgggggctgcccgccctgtgggcccggtcgctggagtgccgcgcctgggcccttgtctgcgaacctccggcgctgcttgcccccgccggaaccgtggactttcattgactttaacctaggaagagaccaggaccaagggacataaagatcgccagttggactgatatgtcgattgacccttgaccaaggagccttgagggggagaacaatacgaacctaattggccaactctatgcaactttaaacttttagaaagcacgtagtcaacatccctttcccaggagacggaaggccagagccaatgttcttttcaagacacaatttgttgccaagcgctttcttacttgagccaaagcgcgggctggacttgggcaacagggtgcccaccggatttgtcaccaagtgacaggcattcatcaaggctctatatctatgccctacgtgggaagatcaaaattcctatttatatgccatgttgaattccgcttgagttacgaaatttcgtcgaggaacacctacggtttgggcacgagaacaagacacacccgttatcggctaacggtgttacccccacacaaggacccggcgagtcgttagaaacaattttccacaaatttccaaaggcttcgaggaaagggtgccactccatgggtagcattaacagttcaccatagaacgctacgtagagaccacatcaaagttattggtttccggcctttcatagagacgccacacaagaattttacagcagacaggtggttaacaagctcgcatttctaatggagctattacaatatcggggggtcaacaccgggttctctaacagtacagggacagtatggatcctatatccgcagggcaacgttaggaata

SEQ ID NO: 626394 - DNA, 987 bp, Homo sapiens
  misc_feature (63)..(63): n is a, c, g, or t
  misc_feature (363)..(363): n is a, c, g, or t
  misc_feature (645)..(645): n is a, c, g, or t
  misc_feature (667)..(667): n is a, c, g, or t
  misc_feature (736)..(736): n is a, c, g, or t
  misc_feature (825)..(825): n is a, c, g, or t
  misc_feature (927)..(927): n is a, c, g, or t
cccggcccgccgcgccccccggggagaggagacgcgaagaaggagaaacaagaaccatatatngagcacagggaaggagaacaaatgcgcgtgacacgcggcgcgagcgtggcagggggcagcgagctacgcgagcggacagaggagacgagctacagtagatgggaggatatggcgtgtactaaagtaactcatagggggcgaggtaagtgaatcgatccgaccaccgtgccgccgcgccgtgacacgccggcacgcacaacacgacgcactaacagcacacgtctgctcagcccccggaggaacgactcgccggcggcggacgaacgaactcaagaacctcaaacacacaatcatacacanaaacgagagaggagtagacagaggaacgcgaaacgacgagcgcgcgacactatatctctcacaccaattgtctaccccggcgcctccccacccaattatacttattccaagcgcacattgagcagtgtttgtcttattatatgaccaactgtcacatctagtcgcatcagaacccgatcacctagcctacgtatacatacttaatctagctacatacttttctacttactacagactctccactagcgctcataacgaacggtgcatacacatacacatacntacatctcctccacgttcgttntgtatgctatattatctttgttgttgtaatcgcaagtatcaatatacttaattagtattcaactaaatnatattattaagattagaaaggatagagaaatgagatgaattgaagatttagtagtataagtgacatagaagagtggcgaagaaagtgtnatatatgatagattagaataagtgttagattatttttataactgttagtcctaatcttattttctgtatacacaaccatctctgtgcggcactctgtctatncaatcacaacgaataacaatatcaatcattgcaatactcactacctatagatgtgagtat

SEQ ID NO: 626395 - DNA, 761 bp, Homo sapiens
  misc_feature (28)..(28): n is a, c, g, or t
  misc_feature (30)..(30): n is a, c, g, or t
  misc_feature (67)..(67): n is a, c, g, or t
  misc_feature (91)..(91): n is a, c, g, or t
  misc_feature (166)..(166): n is a, c, g, or t
  misc_feature (170)..(170): n is a, c, g, or t
  misc_feature (189)..(189): n is a, c, g, or t
aagctcaaaccattaataaaggcagtgnanaatgaggactttgacgaccagctggaaatggtgtgtntgatagatccaggctgtttcgggnatattgatgagctcatccgctgtgagaccaaaggaaagggaactcttgatgtgctcagtctcaaagatgtggagnaagnggatgagaaactcgaatanacacttcatttattttcacctgctttctttaacacattaaactactgctgatttattttatatgggctgctcgactgttggagtttgaatgtggccaaactattagcagctactgcatcagtatttcaatacattgttaataatagactctaaaatagtaataaaatccacattttattttctgtgaaaatggaatacatatttattttgattaataacagaagtcaaaatatgatattctgcaagagtgcatctttattattaatattattattttgctttcttttaaatctgaggtgccgaattcccattttcaagcagggttttgttaatctacgaagaaagtagaaaataatttaaaagttttaattgtctaatctgatgccagagaaactttatcttgtcacagttaagactccctttacattcactatttgtagtatttaaataaataagcatcaacctctatataaacctctataaactgtgattctgcttagactgaaggtgaaattcgttgttctttggtttaacactaaaataaataacattgttctgcgttctaaaaaaaa

SEQ ID NO: 626396 - DNA, 393 bp, Homo sapiens
tgcattgcaacacggaggatgagagggagagtctggctgtggtgcagaatgctcagcagccctcccagcaggcacatggaagactgggacaggaagaggggagaagcattcaagttcaggccaaaggaccaacgcagcacagcacactgaggtcacaccatgtgagatgtggaagagaattcctgagcgtggagcgatggggttaggtgcccggatgatagcccattcagcttctgtcaaactcttgactaaggatttctggttgccttttattccattaacagccagggaggttctatcacggtgagcacgcttccctgacgccgcctcctgtagcgcagccccgcgagactgtggaggttcccatatgactgtaggcctctggggccagga

SEQ ID NO: 626397 - DNA, 348 bp, Homo sapiens
  misc_feature (319)..(319): n is a, c, g, or t
  misc_feature (342)..(342): n is a, c, g, or t
gaggaacaggctggtcttgaactcctgtccataagccatctaccctctttggccttccaaagatctaggattacagtcatgagccaccatgcgcaggctgcctgcgtgtacaacgttaaacatgcaacataagaatcagcgcgtcctctaggacaagcatcgtaactgagggtcgtaaattggacgtatgggtgaggagaccacatcctgtttttgcaagtttgtgaattgatttgcaaacgtggttcttcctggagcctcatcacatcttaaccacccatgtgtatgtttctgaattcactgtcttctatgcagctgngtccagacatatgagagggacanaccagt

SEQ ID NO: 626398 - DNA, 361 bp, Homo sapiens
tgcttgcctcttagtagatctagaggatcccgcgcgttgtaagagctacttcaccaccaggacttatgggcgagccgagtctgacggtccgtccaggtgtgttccgggatacacgtgacttcattcccagcatgctgacgctcactcatcaccaggtgcatgatgacgatcttttgtcttcttctgaagaggagtgcaaggatagggaacgccccatgtacggccgggacagtgcctaccagagcatcacgcactagcgccctgttgcagcctccaggagctccctggacctgtcctattatcctacttcctcctccacctcttttatgtcctcctcatcatcttcctcttcaccggccat

SEQ ID NO: 626399 - DNA, 1904 bp, Homo sapiens
tgaatcggcacacggatccgtatctggggtcacgaatgaacggagaccagaattcatatgtctctgcccaacaaaagcaggatttcgttgcagcacttctcccagatcgctaacgcggtgactgcacatgatgggactgacgatggtggtcacccagagcactaggagatgctattgcccggcctcacaggagcgtccatggaagatacaaaatgccacttgacaggccaagtataatccggggattatgcacgagcatagagcatagatagacacttccagagtaagacatagaatgcgacaacccaagcacacaacagaggattgctgaaatagatctcacaggaagaagaccatgagaacatgaaaagaacctgacatgctgatgaaatactatgcatagcacacaagatattaatccttatcaccttgtgcacggacaaagaactagatcaagtacagatgccaagtccccaaatcccagcatattacacacccggtccagctgaaagacacatagaaatctttgccccttgcgggtcagtaacatgaaataaagccacctggtagccaagacatgcggaacataatccggacaatatagaccacaatacacaaagctagtacatatgacaatataaaatcacacttcaacacatgtggataacattcgtcataatgcataaactttcagttcagacaaccacagatacccagttcggtacatttggacaacaaattcccgttacattaacataatagcatccagagtgaggtaaagaccaaatgaacacgccgattacattatataacacccattgagatcaaccccactttggaaaatcacacagcaaaaacctatcgttaatcacaaatagtcagagagcaaaaatgtcacgcacaatatatttacacatcaacaaccatagcaacgaaaaaattctagggatagcaacagataacaccccccattagtgcgacacaccgtatacgccattcccaagctaacagcacaccaccacacactacaaagcgtgacaacacattcgtgattgtcgccaaatcaattataggagaccacagacaaagatatccacacacgtgacataagctcaataacatgcgactagcaatacaccaataaatctttatcactattagggaatcatatacacggataaccttcagtaggcacacacaaggacaatatattaccataaagctatacacaacctttgatcataagcaccatatcacagataaataagacacaagagcacagatcaccccacatgcgctacaaacagttggatgcaaaagagcgaacgaacttaatgcactttgctgacccatacagtcgatcaagcgacatcaacaaacgccgcagacacatggatccaccaacaaatacgcatacaattcacctgagcccttggacaacacactaccagcgcgaacagatcatcatgaaaacaagacttgacacacgagatcgaaacttacgaccctctgtaaaacccacacgttatggacattagaaacgcccaccagatgatgtgtaaacacgtaaacacacaaatatggaacactttgaaacacacttaccatagatacaaccaacaactaccatcacagttgcttcgtatgtgactacatacagatctagccacacagcagcaacacctacacgataacaatacatcaatgcatcatggacaggtcaaaacataaccgacgacacacacactgagacgaaacacaaaagtccaacggctagaaagtcacaactatttccagaatgaatatcatacagacaaaagaatgataatcaatcgatacgagcacagtatacgtcaatcattagctcacttatactaacaccacactcacgcccccacacagcg

SEQ ID NO: 626400 - DNA, 208 bp, Homo sapiens
  misc_feature (16)..(16): n is a, c, g, or t
  misc_feature (93)..(93): n is a, c, g, or t
ggtctcaatcaaacantagagcttctaagaagttaagggggctgggcacagtggctcacgcctgcgtctcgaactcctgacctcagatgatcnaccctccttggcctcccaaagtgctgggattgcaggcgtgcacacgcctggccaccattttactctcgtcatgtacagtaatctaatatccaaagtcttggactcagctaaagag

SEQ ID NO: 626401 - DNA, 438 bp, Homo sapiens
cgaccttgccctggagacacatggggacaggcatcctgtgaaaatgagttactctaaatatacttacatacggacatctattgaggagatctagactagggaaactggtgtttaaggtggaatagctcagctagaaatttccagatttcacctcggtgatgacgtggcacaccttgcccaaaagccgagtgcatcttttccatgtcaaacttcatcttggatcttcctggagtgctacgcatcttttcccacactgtagttacttctttaagaccgggagtactttcttcataatcgagcttcaggcgcttgttccgccaatcatattcagaggcttggagcttctgattttccttctccattctaagcagccgtatctgttgaagaatagccttttgacacagctctcggagctcacgagatgtccttttcttttcc

SEQ ID NO: 626402 - DNA, 489 bp, Homo sapiens
  misc_feature (50)..(50): n is a, c, g, or t
  misc_feature (93)..(93): n is a, c, g, or t
  misc_feature (111)..(111): n is a, c, g, or t
  misc_feature (113)..(113): n is a, c, g, or t
  misc_feature (144)..(144): n is a, c, g, or t
  misc_feature (160)..(160): n is a, c, g, or t
  misc_feature (172)..(172): n is a, c, g, or t
  misc_feature (182)..(182): n is a, c, g, or t
  misc_feature (212)..(212): n is a, c, g, or t
  misc_feature (248)..(248): n is a, c, g, or t
  misc_feature (258)..(258): n is a, c, g, or t
  misc_feature (266)..(266): n is a, c, g, or t
  misc_feature (292)..(292): n is a, c, g, or t
  misc_feature (344)..(344): n is a, c, g, or t
  misc_feature (351)..(351): n is a, c, g, or t
  misc_feature (359)..(359): n is a, c, g, or t
  misc_feature (472)..(472): n is a, c, g, or t
ccatgtagaaaaaaaaaaatacacaaaactaatagaatacaggatgatanaacacagcctaagagcaataaacaaaagatagaatagggaatnaaagagaaatagaagaananaaagcccgagaaaaaatccattctctttctntttctttctttctctntctctcttttcnttcttttttntgagacagggtctcactctgttgcccaggntggagtgaagtgacgcaatcatggctcactgaagcntccacctgcnaggatcangtaagtctcctaccttagcctcctgngtagtgaggactacaggcatgtgccaccacacctggatttttgttttgtaanttttttnttttaganatgagttctctctatgttgtccaggctggtcttgaactccggggctcaagtgatgtgcccaccttggcctccacaaagtgctgggattatacaccctctttttctaattggcnaatttcaacttattttt

SEQ ID NO: 626403 - DNA, 1095 bp, Homo sapiens
  misc_feature (379)..(379): n is a, c, g, or t
ggagacccggaggaccgaagcttccggacgatgaggaaccgtccaacatggtctcggagagtgggaatgctctggtgagtggcgcggatttgtgtggtgcatgtggatgcgccatcatgtgagaagttcaaagtcgttccatttgcactacggatctcggtcatcctttgtggagtgtggatgttcagggctagctaaagcctacagcaggggcctggacgaagggcaagggcttcgctcatcacaagggtcctgaaggatgtgatcgcatggagtatcatccagtggacctatgaccaatggatggctgaaggagtgaggcccaagggcaagcttcaaattgaactccaatgatgaggacattccagcagatgacaantgatgcgccgcgctgaacggagctcagttggtgcaacggcagggaaggtgtacacggtgacggatgccggaattgaccaggtggtcacagacctcaggctgtggatgcggcagacctgctccacgtctctcgtgggcatcctctgggagctcattaggaccatggtggatcgggcagaggcggaactgtgatgtactcgttcccggggtacacccatttggagagggcccagcccatccgcatggagccactggattctgaagacatgccgagggcacttgacccgagactctgagcggatgctggaggtgcggaagcggatcaatgtcctgcccctggggagtggggccaatgcagggctatcacagggtgtggggcgaagagctgcacgaccgaactcaacttggggccataaatctcaacagatgggggcccacacgagagcgaccatcgggtgccaactatcgggcagggggtgcccgtgaagtaccaaattcaacagagggggcagaaaaacatacctcggggcccgcgacactacctcggacgaccaaaggtcaaaacaggagagactgtgccccaaaaacccgaacaagaggcagaccacaggggactgtcgtgccgagcgccacaagtcacaagagacagcctacaacgtaccacgaacgacttgacgaagagcaagccgaaggggaaaaagataagccacacaatca

SEQ ID NO: 626404 - DNA, 333 bp, Homo sapiens
actacatacttccgactgaaactcttatcactataaaggattttacaggctgggcatggtggctaatgcctgtgatcccagcattttgggaggccaaggagggtggatcacctatggtcaggagtttgagaccatcctggccaacatggcaaaaccctatctctactgaaaaaaaaaaattccaaaatttagcagggcgttggggggcgcccttgtagccccagttactagggaggctgaggcaggaaaatcgtttgaccccaggaggcggaggttgcagtgagccgagatcatgccaccacactcaagcctgggcgacagagcgagactcct

SEQ ID NO: 626405 - DNA, 691 bp, Homo sapiens
acttcctcaacgacctgtgcgctgtcatgtggttcacctacctgctgctctacctgcactcgtgtgcgcgcctacatgctcccgctgtgcgctggtggctgctgctgctgctgggccaggtggcctgactgggctagtgcacacctgctctgtggtgctactgatgtgcctgacctgctgcctgccatgcttgctgcgccctgctactggccctgctgcaatggcctggcacctggtctggcacctgtctgctgtcctgctgtccttccccttcatcttcagcccctgccttgggctagtgtgtggtgctggccactgccctgagtgggcttgccctcctctactactgtgccctgttcatctgtgatcttccagtttgtgctgggcctccacacatgatctcccacctcagcctcatccctggagctctgtcaccaactgaccatgatgaatggtggatgctcactggcactcagtgtatgctgtcaccgtgagttggccaacaatcacctgtctacggctgccgcctggctcctgcttgcaccttgcagggggctcgtcgcgggtggatgcccacccaagacatcagcatcagcgaccagctggggggccagtgacgtgccctgtgttcctggaacctgtccctgctggtggtgggtgtcggcgccgtgtctcaactgtattcaccttg

SEQ ID NO: 626406 - DNA, 301 bp, Homo sapiens
gaacggtataggacatggtgggaatggggatgttgttacaaacaaatacagtgctcccctacaactggggtcctggggtgaacttggtctgcttcagcccaagaggaatcaaacagatcaaaagcagtttgggaaggccagaaccgtcaagcgatggagggagaaggaaaatccaggggggtggggggtctgtttggcaacctggggtggagggattgccctcccgcgtgctgtgatccccctctagtaccctcccgggtctggcaggaacggggggcaagccgtgaaagccccaatggga

SEQ ID NO: 626407 - DNA, 211 bp, Homo sapiens
ccatagaggatcccgtgatgttatcgcccaacacaacaaatgtgaaagtttcaggatctcggggactggcctggatagaaaactcatctctccagctatctagggtttttgcatgtgttgggggataacatcacggggtacccgagcctcgacattcgtaaatccattggtcataagcctgtatccctgtgttgaaaattgttatcccgct

SEQ ID NO: 626408 - DNA, 188 bp, Homo sapiens
ttggaacgatctctagcaggatccccaacacggcatcgcctgtttcctagtattaggctgatcaaattatcagtggaattcttggtttgatgattaccttattaattgaacattttttactgatgtgggcttctaaaagaaggtttcattttgtatactctttcagaactctctgtattttgatagaa

SEQ ID NO: 626409 - DNA, 448 bp, Homo sapiens
  misc_feature (312)..(312): n is a, c, g, or t
agttcgacggagactctctctggcggcaacagagcgagtctctgtctcaaaaaaaaaaaaaagaaagaaaaccagtaacatatttactggttggcggtatccagcaatatatttttaaagatatcaaattgggcggggattacaggcgtgagccaccactccgggccattagtgggagtcttcttatacgggggtgagacggaatcagccacagtggcacaacagaagggatgaagcttagaagtacggtggggtttaaagggccagtcccaggcggttacttttcccattggcaataccaataggacctanggtacctgaagattctaacaaaaactatgcaagaccggtatagaaaatttataaacctggatggaaagacttttaaaaattctaaataagagagataatacataatctactcttgggggatggagagtctccgtcg

SEQ ID NO: 626410 - DNA, 125 bp, Homo sapiens
agcggcttttagagttcccttctgaaaacatctgcctttggggtgaggttcatttaagaatgtccttgatgaagcagtaacaagttattaactgttattaaagcctcatatacagtcttttcaat

SEQ ID NO: 626411 - DNA, 261 bp, Homo sapiens
ttactcatgcgctctggggtcagggaaccagccgcactgttctccatttctagcgtgtgttgtagaccattcaaagtagggcatgcctgcgaagccggccaggtctttaaaacgtcttcgactctggacccacccgcagcaccatcttttgcagaggcccattcctacagccacccccggaaccctcccgcccctgcaggtgacagctcaggactgtgggcgcgggccattcaacgcctccgggcctattcaacgcctccg

SEQ ID NO: 626412 - DNA, 362 bp, Homo sapiens
aatgggtagtgaagatggttgtaggtcctaggtgattcctaatgcccaagacagagaggtcttgatcctcagaactgcatctcactgaggagagagactatagacaatataaccgagcttgaaagatacaaaatactggggctgggcatggtggctcatgcctgtaatcccagcactttgggaggccgaggcaggcagatcacttgaggtcaagggttcgagaccatcctgaccaacatggtaaaaccctgtctctactaaaaaatacaaaaataagctggtcatgatggtgcgtgcctattatcccagctactcgggaggctgaggcaggagaataacttgaacccagaaggcagaggttg

SEQ ID NO: 626413 - DNA, 389 bp, Homo sapiens
  misc_feature (1)..(1): n is a, c, g, or t
  misc_feature (40)..(40): n is a, c, g, or t
ntcgggcttgtgcttctccagtctcagccatttcacagcnccgcagagcacttggaactcaatgcctatgagtttcacagccagagagaagcccttgaccacgtaggcggtcacacaggttctgggtgcccgtttcacgaagcccgcaaagccagagctgggttgtctagagcacagctgctgggtgtaccccttcttgatgagctccaaggccccctgccgcttctctaggccgaccttctcccactgctccgtttcatccaggtaatgcacagctatgcccgtgggcgtcatcccgatcatgttctgttccccacagcccgagggggtcacaatgaggtgcctcacccgttccgcgtcggcggcatcctctgtcatctgggccactg

SEQ ID NO: 626414 - DNA, 217 bp, Homo sapiens
  misc_feature (203)..(203): n is a, c, g, or t
  misc_feature (209)..(209): n is a, c, g, or t
tctttcttgccttccttccctttcccttttttcctgactagccccaagtcccttcatttgcatttgctatgcaatagtccctctcctttcctttttcttccctcagatttagctgatccttcctccccccctggccttcctttcctctttcctcctccctctccccgtcataataccatctacacccgccctcaaaaaaaagnttaagnggaaaaaa

SEQ ID NO: 626415 - DNA, 228 bp, Homo sapiens
ccaaaaaaggggtaaacatgcccgggtgtcccccaggaggggggcaggggccctgcctttaaaccccggccccctccaggggacagttttttaaaagaggggccgggagcatttcccccctgttggggaggcaaagaccctgcaatggccccctttttaaaagggcagctggacaggggtaggttttttcaataaagtttttgtattaaaaaaggggccctgggttta

SEQ ID NO: 626416 - DNA, 224 bp, Homo sapiens
ccccatcaatgcacgtcacacacacactgtgatccgtattgcgcacattgaaccgcgcccgagccgcactcaaccaccctccaccggcctgaacctggagcggcatcgccgcattggcaaccacctcaacctccccctccaccaactcaatccccccctcacgccgactgatccgcgtccgggtattgagctccagccgaaccccctcacccaactccacccga

SEQ ID NO: 626417 - DNA, 1307 bp, Homo sapiens
cgtggctccacctgtgcgagctgtctgtccgtccagtgtggccgaactcagtgcacagaccccagtccagccactccaccccttcttcatgcacagctgcctttctataatccagtgcttgactcccttcttaccactgtatatctggacctactcccatgcactcaggctctggtattgagatcgtgctggggaggaacatggccactagcccttatcccatcggccatgtgggaggtatgaccatggtgcctggaaggttctccctctgaccctccactgggccacagtggctcagggacctgtgggcaactggagatggagctagctcttggtgatccttatgggtggaaaacgtgagtgccattctgtgtccccttggataaaacactcaccagatcacagaggctctctgtgtcctttgaataccactgccaccttcacaggactgtaccagcaggaataacacgtcgtacacaatcacgaaccattgtaccccatgtgcggagcacagaggtggccaaccaagatttgagacccattgaccccatacatcttggaatcatgaaagacttgatactacgcactaatcctcacagcgtgatagatcatatagaccacaaacagaccacacctatcaccattggtgtcacactctatcacgtggcaaaccccctatggataacacccaacgaagacacaataaacaacccgcattaatatgagaatatgatgttgggacacttagcacatatcactcgtcacaagaagtaggtatgaccacatatagatgattaggtagcagcacctgcaatatacccatagaagcactcacaaatacacaccgatggtggtcacttagcacacgcgtcatccaacattccacgcacccacgcctagcactattcagtagattatgactctctgctctattcgctactactagcatcgaccgaacattgagacatactagagaggcgaaggttctagtcgtctcacttgtcggtaacattgagctgatcatacgtacacgctgtgactatgcaaaccgatgccacctggcggcaactacacccctatcagccgatacacaacatcgatctcaggaaacacaatatcgactgtcctacgtcattccctaggtatcacgccatactattggctttcctaagtgcccaaagtactcccacagcgccgtgtatgagctccccctaatatgaactgtagtcatcgttctagaatactcctgcggagcaagacgaatggaaccacacctctcccaacccgctatccctaaatatacaaag

SEQ ID NO: 626418 - DNA, 490 bp, Homo sapiens
aagtgcttatttagtaccttttaccatttcaaatacttagactatctgaggccaagtgggagagattaagctttatgctgtaaacagttaaggattcaatttatcagcatttaacagttccacattattttccacctccaacatacatgattataccaatattaacacatcagcaataaaataaccataaaatgggaggcatgggtgaagaaggaattgtggtgaaaatatcttcatataaattataactataatctgtattatctattttgacagaaataattctcccactactatgccagaagttacgtatgatggtgctggatatttacagttatcagaagagtatctacttctatcttaactatagttgatggtagttttataattttgcatactttgtgcatgttccagtgaaaactccaaaaaaccataaagaatgtatctagaccatgggctttagtcatactttaaataaacctttaattta

SEQ ID NO: 626419 - DNA, 301 bp, Homo sapiens
agatacgaatcgagccggtaccggaagtacagacttctaggggataagaaacatcttaaggcaggcatggtggctcatgcctgtaatcccagcatttgggaggctgaggctggtagattccttgagctcaggaggtcaagaccagcctgggtaacatggaaaaccccatctctacaaaaattagctgggtgtggtggtgcatgcctatggtgtcagctagtcaggaggctgaggtgggaggattgcttgagcccatgaggtcgagactgcagtgagacatgatcatgccactgtactccaa

SEQ ID NO: 626420 - DNA, 236 bp, Homo sapiens
caggatcttattgctttgggacggcggatgacatactccgtcctgactcggtgagtggcacgggctcaggcgaggacttgaagaggggcccaagaccgcggaactctgtgcactgctgccaactgctcctggaagatctcctgcctggtagctgccactttctcaggctgtttgactgctgtgaggggggtactttctgttctctgctctgccatgggcgccgtcccaaagcacag

SEQ ID NO: 626421 - DNA, 375 bp, Homo sapiens
agctgggtgtggtggtacgcatctgtagtcccagctactagggaggctgaggtgggaggatcgcttgagcccagaaggtagaggctgcagtgagctgtgatcacactgctacaccccagcttgggaaatagcgcgagactgtctcgaaaaaaaaaaggaaaacactggacatggtaaaactaagcacagacatacacagaaacacacatcctgggtcattatgaacaacatagctctcggcgggatgtgtttaaaatcaggtaaagcgagtactttccacctatgaccatgtacccagagtctcccggtgctgcttgatcattctctatctcagccacctgccctttgcccgtggctccataaggctttaacttg

SEQ ID NO: 626422 - DNA, 179 bp, Homo sapiens
cggcacgaggcctatttgccaggctggtctcgaactcgtgaccttacgatccgcccgcctcggcctcacgcctgtaatcccagctctcagggaggctaagaggcgggaggatagcttgagcccaggagttcgagacctgcctgggcaatatagcgagaccccgttctccagaaaaagga

SEQ ID NO: 626423 - DNA, 402 bp, Homo sapiens
agaggatcccgctgatccgttagaaaaattgggtgatataattatacacataactgtacataaagctgattatcaaattaaaccataatgaagtctcacttcacacctgttagaatggtttttatcacaaagatgaaagataagtcttggccaagataaagaaagaaggagactcttgatacactgttgatgggaatgtaaattagtatagccattatggaaaatggtatggggaggttccttaaaaaactgaaaacaaaacaccacagaatccagcaatcccactactgtgtatatatgaaaaggcattgaaatcagtatgtcaaaggtatctctgtactctcacattcactacagcattattcacaataagccaagacatggcatccatgttaagtgtcc

SEQ ID NO: 626424 - DNA, 135 bp, Homo sapiens
tcactcatctgcagtgcagtatcaggcggcggctcaaagcttaagtgatgtttggatgtaaagtgaaatattagttggcggatgaagcagatcgtgaggaaagttgatgccacattatgacgctgaagtctcgtg

SEQ ID NO: 626425 - DNA, 1801 bp, Homo sapiens
cacggtctttattttggtctggtattacctctgggctgctaaccacccacgtgttaggacacttaccctgtagggcaccctcttactcgggaactgtcacctcgtcacttgcactagcaatatcgaacgtttgcttgtaactactatagcctggcttaactacggtctgtacaagcccaattctctactctgacacgttgtgacaacactgctacatctacgcggtttgccacgcacttacccacctttgctagcctattttactactacgcacgaacggtttcgtaacactcatattagactacacgaaaagtcggtatacacagcatctaacagacgggcactccgcttgtccaccctatattaacctactcctacaccctcatctgaacacgcaacacacttcacggttacacatcattttaacacacaacgcagacaacatagccttctatctccacgttggacatcggacaggtgtgcgcctactctggagcatacacttttccccccgactggcggagacgcttcgtacaaaacgcttgtacacttacgacctctggtggtatacagcaccccttcttaaccttgggactccgtacacaccataacaccttacacacggtatacacgcattctatgaccacgtatttgtaccttttaaacctatcactcaccggcattcaaaccgtgcattcttggtttcaacattctatctcccatagcataccgggtgacgccttaacttgggacctgagggggaccgacaagagcttacagcttcttgcgtccggcgagcatctcacacggcaaccttcatccaatcacatacatttcggtctcaccacgccctaacagccatgggcactcaacacccttgggacgtgtcacacagcaccgatggacaccaagctctacacacacactgcgtttataatcaccgcattcactccaccacagtcttccggggccaacaacacaactatgggggagctcagcacaacccccataccacactcacatttcacacagactcacacgaagcgtcaaacgagttcacacaacatctggccgcacacgacacacaccacagacaccatcaccccatcacagaacacagacactgaagccaaccagcaagaacacaacagcgaagccgaagaaccgaccaactagccgcaccaccatcgccagcacaaccgagttctcactacacacagcaccacccaacagagccagagcacaagcgcagcgaggaccccacacaccacgcgcctaccaacccaagcacacagcggcgcacacaccaaaccgtggcacacccccagagccagccgccgcctcggagagccacgtcaaaccaagcagacatgagagcaaactccacaccaccaccagacaaacaaccccccagggcgcgaccaacccacagaccagacctacatggcacacaaccacagacaacacgagcgacacaaacagagccgacaaacaacgagcggaaccaacacaccatcagcacgacccaccagaaccaccacgcacaacacacaaaccacgacacctcagaagagcacaaaagaaaaacacactgaccaagacgagacagaacacgacgcacccaagcagcagacaagacacgaacggacaagatcacacacaacgaacaaccacacacaagcatcaaccaagtaccagacgaagacgccagaacaccgacgaactagaccaagagacgaccaagaacacaccgaaccgaaaaacacgcaacgacagagcgaccccagccaagacccaccaa

SEQ ID NO: 626426 - DNA, 109 bp, Homo sapiens
gaagcgcacgatggcgcgccctagctgtaagttctccttgttttccaagcagctgtttggctttccagaagcccactttctgtctttaagaggtttaaagaaactacca

SEQ ID NO: 626427 - DNA, 616 bp, Homo sapiens
  misc_feature (346)..(346): n is a, c, g, or t
aggtcttagctccaaatgtttccttttataatgattagtagatatgtgtgttttcttattatctcctatttttccaacatcaaaagatagcgatattgtctgtgtaatgcacgtttggcacttaactgtgttcactggaaaatataccctggaaattattccatatcagttcatagaagtcgtcatcattcttttgtgtgtatgtacaccagttcattcatcttcttttctatgtttgtgtatccagatagtttctagcattttatagttatacagttctgcaattaataaccttgtgtcttttcatactgctggaggtgtatcttcaggataaatgtaggagtgnaattactaggtcgaagtggtaaatgcctatgtagttttgctagatgttaccaaattcccttccatagggtttgtactgttttgcattcccatcagcaatgtatgagagtgcctgttttcccacagccttaccaagtgagtctattgtcaagcttttgaatttttgccaatctgaagggcaaagaaatggtattttggctatagttagaatgtgcatttttcttattatgagtgaggtttaacatcctttcccgtctatcagtggccatct

SEQ ID NO: 626428 - DNA, 264 bp, Homo sapiens
gtgaactgctgaaaagaaccctgtctcgctatctcccatttcttccataagagaggctccatattctctctctcacactaatgtaacatatcccaaatggaaggacagaacatgctcattccccccacccaattctacaagtatctctctcttcttcagggagaagccagacagggaaagggagactagggaaggtcctttaaggcaaaaatgtggagtcctagaggtgtgtgtgtcagggcaggtgtctagcagcagtggcca

SEQ ID NO: 626429 - DNA, 742 bp, Homo sapiens
cgggtttcaccagtcgggccaggctggtctccaacaccggaccttgcgatctccgtccgccttggcctcccacaagtgcttggattacaggcgtgagccaaccgcgcctggccctgaaccacatttctaagtagcagatccaggttttagtgcagcttctgccgttaatctaggctaataaatcacatatccttggggccacacgttgccttataagtaaatgaagtagtttagtataaaatagataaatttccttatttttcccctggtggctgccctgtggaaatcagtttaggatacttgttttgtgagtaggaacctaggtgtgttacgtattacctgggtgttccacagctgatagcgaacttgccatgagataaagtcaagggcaaattacatcattctttactagggagatagaccgttacagcaatcaagatcatctttgtccatatccaggttagcatggtaagaggatttttttggagaaaaaaaatgattgatttagaaagttaatttgtaatgtccggaatggaataaaagactatatgagtagtgtaatcgtggtaggaaaagaggtgtgataatgttgtagaatttctcattctgtggacaacccaggggtaaactattattctcagtagtcagtacacttgttctagataaatcttgagtgaaaatccagcaatttctttttgccttgtggtctgattccgtgttctgaatccagataacccacccc

SEQ ID NO: 626430 - DNA, 396 bp, Homo sapiens
taataaaagggctaaaaaggaaaatcatgcttttcttccatcttcttactctgtacaaataaagaagttgcttgccgtctgagaagtttacccccgttgcttgttgttgtgcaggcctgtctacttgggcacccccaccgcctgttagctgtggttgtgcactgtcttttgtacctctggactggaggggtagatggggagtcaatcacccatcgcatggatatgaggcatttatcaggagtgttgccattttaatcagatgattttcttctggtcatcattaaaatacctgtctttagagagagtaaaatgggcccgcagccataggaatatctgtatgttggaggcctttaatgctacatttaaaaaaaagaaaataaagtaataatataactc

SEQ ID NO: 626431 - DNA, 125 bp, Homo sapiens
gcacgtctacaattcccaaaagacctcttactttgggaggccaaggtgggtgggtcacttgaacccaggagtttgacatcaacctgggcaacatggggacctcccgtttttctcggaataattat

SEQ ID NO: 626432 - DNA, 218 bp, Homo sapiens
aaaatttcaaagtggtagtacagaaaaacatttcccagtgtgattagtattatatataatagacagcctgggcaaaaagaacgaaactccgtttcaaaatgtatgtgtgtgtgtgtgtgtgtgtgtatatatatatatatgtgctcacacacacacattgcagttatatgagagtgtatgctatcctgggcatttttcccctcatccagcataacgcg

SEQ ID NO: 626433 - DNA, 881 bp, Homo sapiens
  misc_feature (690)..(690): n is a, c, g, or t
agcgggctcccggagatgccccgggggaggcgggcgcggggctcgaagagaaaaaggagttggaatagcggaatgccgcagtcctttccagcgtagaaagaccgactggaggtccagaagacgcaggtcgtcaggactagcaggggctagcatgctcgtctcgtctcatgaagcataggctcaggtggtgtaggtctgcagggtgttttctatgaacagctgtctgggcatttccggtcgtttagcgacgctggatagaggagctagcgatgggtattgagaatgcttgatgtgcgttgaacatatgggcctgatggaaccatggtctgaaaatgctttctcgtacatggatgcttcctggatgcgaatcgatagatggcatattagcggctttgatgtatatgtaaatgagctataagggccaaacttacatgtaggcattaacaggtaagatcatgaagaaatttaacatagggcaactgaatgagaggagcagggaacgatggtcaaatgtcgagagacgaaatgatgcactgatgtggtgtgaccgaaaataacaacaatggacgcacaaagcaatcattaatggtcgatggaatcaacaaaagactgatgaaatgaaagactagtgcttgtcatcccaaggtctatcaacaaatatgaactgtggaacgaaaacaacgcttaaanagacgggattgattatgtatattggtaaatggttttaatggcagtattcaactggggaaatccctgcatgggaagatggagcttagcgaaatcgactttcttaaagactttatcggaaatggatggatggaaatgaatgtatggtccaggattttcttaagggagaataagattgcggcatggggtagggc

SEQ ID NO: 626434 - DNA, 604 bp, Homo sapiens
cacacacacaaacgcacagcacacacaaacgcacagcacacacgcacacacagcacacacacgagcacacagcacacaaacgcacagcacacgcacacacatgcacacacagcacacacactagcacacagcacacacacaaagacacagcacacacatgcacacacagcacacacacgcgaacacagcacacacgaacacagcacacacagcacacacacaaacacagcacacacatgcacacagcacacgcacacacagcacacacatgaacacagcacacagcaccatatggcgcgcacacacacacacacacacacaggctgagagacaaggtggagatccagggagaccccagggagcagtgcaggtgtccgtggattctgctttcagttaaacccctgatcacttcacctccctgagcctcagttaccttatctgaatatcgggatcatgacggataattgtatgtcatctattctaccgacggcagccagaggacgcctgtgagcacctgagtcagggcccatccctgctctgcctacagccctccatggctcccaccttcctatgcgtcaaagcccaagtcctccctgcagtccac

SEQ ID NO: 626435 - DNA, 143 bp, Homo sapiens
tggtcatgtggttggcaggggttttatatggataatggtggtgatgaaatggatggccccttaagatagaggagacacctgctaggtgtaaggagaagatggttaggtctacggaggctccagtgttggaatgtagttcccgt

SEQ ID NO: 626436 - DNA, 1060 bp, Homo sapiens
gctgcgcccgccgccggccccacccatccgggtcgaggaggccgaggccatggctgagagggaggagcggagcctggacaacttctttgccaagagggacaagaagaagaagaatggagcgggagcaacctgggcggctgagtgccgctgggcgcagcgggcagcgccggcggaaagcagtggagccgcgggtgcggctgggctggggggcgggcgcggggacccgggcgggggtgccgggcgggacctgccagcgcgggggggcttggcgggcccaggggggccgccaccaaaggcttgtgacgaaagggacggaagattgaatgggaaaggatttggagcaaaaaaggagggttgatttaccggcgggaccttcaaggggattccaggggccaatgtgcatatttaaggcaaggtggacaagagggcaaagaaacgacgaatagattggaaagaggaagacgaaggtattccaggggttgattaagctgggggaaaggaaaagtgtgggacggtgtgacgtggggcgagaggaggcgattattgggacacaaaacttcttttcaggggtgtccccggtgggcaatattaaaggaacatgcttcccaggttaccaaagacaaccttcccgtgggccgtcccaggataacttttggttacacaggaaaagcccgcagaagaaacgcgaggcgtgatttaaacatacagggtggggggggttgtaatatagggggccactcgctgggggggcgccaaggggtttaacccaaaaaatcaggagggagaaaagcagacaaagagaggggaaccacccagaggaaaactccttaccgcgttgattaacccgaagttctaccaatttcccctgtgcatgtacaagtttggcaagggcatttgtaagaaagaggccgagaaagaggggtacatttaaaaagtgaagtgctaaccctggggaataaattgaacaacatttttgggccactctaacattttaaactttgagggggacgtgaacttttttaaacatataattacagggggggaagacagtgttacaaaa

SEQ ID NO: 626437 - DNA, 853 bp, Homo sapiens
  misc_feature (347)..(347): n is a, c, g, or t
  misc_feature (384)..(384): n is a, c, g, or t
  misc_feature (386)..(387): n is a, c, g, or t
  misc_feature (411)..(411): n is a, c, g, or t
  misc_feature (425)..(425): n is a, c, g, or t
  misc_feature (430)..(430): n is a, c, g, or t
  misc_feature (437)..(437): n is a, c, g, or t
  misc_feature (451)..(451): n is a, c, g, or t
  misc_feature (468)..(468): n is a, c, g, or t
  misc_feature (480)..(480): n is a, c, g, or t
  misc_feature (485)..(485): n is a, c, g, or t
  misc_feature (488)..(488): n is a, c, g, or t
  misc_feature (494)..(495): n is a, c, g, or t
  misc_feature (497)..(497): n is a, c, g, or t
  misc_feature (504)..(504): n is a, c, g, or t
  misc_feature (507)..(507): n is a, c, g, or t
  misc_feature (516)..(516): n is a, c, g, or t
  misc_feature (523)..(523): n is a, c, g, or t
  misc_feature (533)..(533): n is a, c, g, or t
  misc_feature (535)..(536): n is a, c, g, or t
  misc_feature (538)..(538): n is a, c, g, or t
  misc_feature (540)..(540): n is a, c, g, or t
  misc_feature (547)..(547): n is a, c, g, or t
  misc_feature (554)..(554): n is a, c, g, or t
  misc_feature (572)..(572): n is a, c, g, or t
  misc_feature (597)..(597): n is a, c, g, or t
  misc_feature (669)..(669): n is a, c, g, or t
  misc_feature (674)..(674): n is a, c, g, or t
  misc_feature (681)..(681): n is a, c, g, or t
gtgctggcccagtcttatctgtgcctttactgcttgcgcatctcagatgctaacttggtctttttccagaagccttgtattggttaaaaattattttccattgcagaagcagctggactatgcaaaaagtatttctctgtcagttccccactctataccaaggatattattaaaactagaaatgactgcatgagagggagtgtgggaaataagaagaatgaaagcctctctttctgtccgcagatcctgacttttccaaagtgccttaaaagaaatcagacaaatgccctgagtggtaacttctgtgttattttactcttaaaaccaaactctaccttttcttgttntttttttttttttttttttttggggtaccttctcatncnngtcaagtttggggtccattcttanaaccaggggaaatntgggnccccccnttggctgacgtagngctctcaggggctcacnggggcccaaggncacanccngggccnntntaggccnggntgttggccnggtccgngaaatgccgngnntncngttcctnacggggngatccagggcggggggtncaggagcattcctttccggggagtnatgaccgcgaagttgtcatgtgccggcccttttcggtccgggtatccaatggggggggactcggggtgacgngcctngggaaanatcagaaggggcgaggggggcccgggaccgtaacgggagatgtgtgctggcttaagcctggagaggtctccgctgactgccaggggggggggtctgcatagcaggatgacggctcatgcccagaaaccggggggggaatccgtcccgggtgccaaggggcttccatggtggg

SEQ ID NO: 626438 - DNA, 265 bp, Homo sapiens
ctgtctgtaagaattccatcgttgccagggagcagtggtgtatgcctgtaagtcccactcgcgcagtgaggcagaggcaggatcggattgagcgtgggagttccagtccatccgggggaatatagcgagaccttagtctcttgatcaaactgaaaagagaattccagtgtctactatcgagctcttgatttcccccttcaatcggttttgcccaggtgagttaaggatggaatcagagctaaacagctctttggtcgtgccgggg

SEQ ID NO: 626439 - DNA, 279 bp, Homo sapiens
ttgctgcctgtccaagacgacggtccatgaaagtccttgtagacggtcagatggcacattctcttatggagcgatgttgagtttgaggcattacagggatgtccagagacagacgtcttgaataggtagttcaaaacgtgcggctggagttgcagtgaaaggaagggaatggctggaaacacagttccttactttaccaggagccctgtgctgcgcgatgcatgggaggacatcaaggaacagtcctcaagttttcgtgagtcacacgggtaccgagct

SEQ ID NO: 626440 - DNA, 133 bp, Homo sapiens
tcaggtacacctagaccaaacctacgccacaatccatttcactatcatattcatcggagtaaatctaactttacttcccacaacactttctcgagctatccggaatgccccgacgttactcggacacaatccg

SEQ ID NO: 626441 - DNA, 410 bp, Homo sapiens
ctcgagtggagggccggtcgataactctctctctgtgtggcggccacactctggctcgaaaggaacctctcttgggctccatctggcaacttcacacctctctctaagagcgcattctctgtcaccgcgctccgcgcctgctggcggaaattcactgaggaagaacacaagatatgagacaaagactctccgagatgcgtgttagtggtcagcgctccctgtttttctctgttttctccaatcgtccgcgtgtgtgagaaagagcgcgcccgcccctccctctgtgtgtgagacaaacccatgggtctttctcttgaatccacctcttgcctccagtttgttctcctgaggcttccaagggaatatgcaaatggagaaaaacttttaaaaaaaatacaatagatccacaa

SEQ ID NO: 626442 - DNA, 110 bp, Homo sapiens
atcgtaatattagcagctctccacattgttcattctaatgcactaaatagaaaattaactacatactccaaataagaagcaagagatgatcacagtaggattcatgaaat

SEQ ID NO: 626443 - DNA, 1004 bp, Homo sapiens
gtccaggacccaaagcgggaggaaaggaaagcgtaaaggcaagaaaagctccatatcaggaagcgaacagggaaatattccagagtagaagttagaatcttcaaaagtccgttgcctgaatcagtgaagggattgatagagagagtatagtgacgtgcacaagggtttacgtgccaccgtccgagagaaagcgtcagctgcgcgaggtccgtaggatatcgagttctgcacttggtgcatgactgggcaactgtggttaacaagaccagagtagtgttctgtaacttccgtatgtcgctgagaggcacgagagcaagttgcttccgccggaagtagcatagaaacgcaggaaaggcacggtcagttggtggccagtggtcctgaggaggtggagttacagtagttcgcaacaaggatggattgagtgtagcagtgtggataatggagagagaaagaacgttggggaaggaggaggttggcgtgggccatgtacgttcgagagaactccagtctgctttctatagcataatgaagaagaaatgaaatttctggccagccatttgtaccttcctcatggattggtgtgtgtcgtaacagcagtcatcatccatgggtgacaataaatggttgggtttcaaacataagataacaagactcagataatgctgaacttaactgtgcagtgctacaaggtaaagtcgacttagatcaggccagtgtggatcttcaatgatatatcatgtaagcataagctttagaagtaaagcatttgggtttacagggcatcagatacatttgatagttcttaaaatagaaatttatgatgggttaaatctggcatgagtaggtataggtctaatacaaagtttaattaatattggaattggatggcaaaatataacgtaagaaatcttagaatggtgggacaatgggtaacagggattggggaaaaagactataaatagagtaagggaacataggagaagaaaaggaacgtggaaata

SEQ ID NO: 626444 - DNA, 390 bp, Homo sapiens
tagtatgcagtatagcgtagataaggtaaataatacaatacctagcggtcaaataccatacaaataatatctagtaataatcctataaagataaggatagactcattaagtagctagatagacgaacacctagctatagaagcatatcctgcacaaataatacatatttctatacaagggagacctacgacccccccatataaataatacaggatagccaccatactactaaccatacatagggataataataatactaactaaagtagtaaggatatactaatactagtacttaaataccaggactacctggcgaaaccggctaactaagtagaaaataactaaataggacaggcaacatacctaggccaaggcggaaaagagggcagg

SEQ ID NO: 626445 - DNA, 181 bp, Homo sapiens
ttgacgtacaggcatgcacctcagccctgctaatttttatatttttagtagggatggctttcaccatgctggccttaagtgatccgtccgccttggcctccaaagtgctgggatttcaggcaagcgtcaccacacccgacccctcactagtatttcagcatttgggtactacgctttggca

SEQ ID NO: 626446 - DNA, 552 bp, Homo sapiens
tgtaattcatgcctgcctgccttgccattggggcaggcagagagggaacctgctcactggccctggcagcagagcagggcgcaaacccacggacatcatgtgccatggcttcccagtgcgcctcccctcgaacgagtcgcctcatcgcttcagcccatgctgtgggcgttccatgtgctcatgccttgatgtcccacttcgccgctagggccttccagtgtccactacgcagctgccccactggagtgggccttcacgacatgcctcctggtggcgacgaatgcaagtatgccacttctcttctggtacaatctgcccgtttagaggcgagacacacggtcccttgtgcctgagagtttccatcattgcccccgtatcattgcttgggtcctcgccgaacacgggctgcatctcgcttcgccgtgtcccgtgctcacgttgcgccttgattctcggcgagtgaatgctcgctgccatcttgttgcatccgaccctttgcccacctgtctcttgacttgattgagatctgcgtcgtttcgtggactcgtgacc

SEQ ID NO: 626447 - DNA, 316 bp, Homo sapiens
tcgacgttgcgttaaaaaaaaatcgctggcgagtcatggttgctcagacgtggagtcccaacactttgggaggccaaggtgggaggatcgcttggcccaggagtttgagaccaggctgggtaacatagtaagatcctgtctctacaaaaaataaatgaaattagccaggcatggtggcacacacctcagtcccagctacttgaaagattgaggtgggaggatcacttgagcctgggatatggagactgcagtgggccaagatcctactccagcctaggtgacagagtgagatcctatctcaaaaaaaagaagaaaa

SEQ ID NO: 626448 - DNA, 163 bp, Homo sapiens
ttagatcatgctactgccctccagcctgggcgacagagtgagattacgtctcaaaaacaaataaaaataactaaaaataaaaagattttttacacaaggctgaagtttgggttactttggctcatacaccttggccttcactgtagaaaggtggttagtaaag

SEQ ID NO: 626449 - DNA, 1006 bp, Homo sapiens
  misc_feature (24)..(24): n is a, c, g, or t
  misc_feature (26)..(26): n is a, c, g, or t
  misc_feature (29)..(29): n is a, c, g, or t
  misc_feature (31)..(33): n is a, c, g, or t
  misc_feature (698)..(698): n is a, c, g, or t
  misc_feature (730)..(730): n is a, c, g, or t
  misc_feature (918)..(918): n is a, c, g, or t
  misc_feature (993)..(993): n is a, c, g, or t
aatgctagaggaggctcggttatncngcncnnntgcccgtcggtcgctagctcgctcggtgcgcgtcgtcccgctccatggcgctcttcgtgcggctgctggctctcgccctggctctggccctgggccccgccgcgaccctggcgggtcccgccaagtcgccctaccagctggtgctgcagcacagcaggctccggggccgccagcacggccccaacgtgtgtgctgtgcagaaggttattggcactaataggaagtacttcaccaactgcaagcagtggtaccaaaggaaaatctgtggcaaatcaacagtcatcagctacgagtgctgtcctggatatgaaaaggtccctggggagaagggctgtccagcagccctaccactctcaaacctttacgagaccctgggagtcgttgggatccaccaccactcagctgtacacggaccgccacggagaagctgaggcctgagatggaggggcccggcagcttcaccatcttcgcccctagcaacgaggcctgggcctccttgccagctgaagtgctggactccctggtcagcaattgtcaacattgagctgctcaatgccctccggtaccatatggtgggcaggcgagtcctgactgatgagctgaaacacggcatgaccctcacctctatgtaccagaattccaacatccagatccaccactaatcntaatgggattgtaactgtgaactgtgcccggntgcttgaaagccgaccaccatgcaaccaacggggtggtgcacctcatcgataaggtcatctccaccatcaccaacaacatccagcagatcattgagatcgaggacacctttgagacccttcgggctgctgtggctgcatcagggctcaacacgatgcttgaaggtaacggccagtacacgcttttggncccgaccaatgaggccttcgagaagatccctagtgagactttgaaccgtatcctgggcgaccaaaagcctgaganactgctgaaaaca

SEQ ID NO: 626450 - DNA, 212 bp, Homo sapiens
  misc_feature (14)..(14): n is a, c, g, or t
  misc_feature (37)..(37): n is a, c, g, or t
  misc_feature (91)..(91): n is a, c, g, or t
  misc_feature (97)..(97): n is a, c, g, or t
  misc_feature (112)..(112): n is a, c, g, or t
  misc_feature (123)..(123): n is a, c, g, or t
  misc_feature (136)..(136): n is a, c, g, or t
  misc_feature (142)..(142): n is a, c, g, or t
  misc_feature (160)..(160): n is a, c, g, or t
  misc_feature (173)..(173): n is a, c, g, or t
  misc_feature (178)..(178): n is a, c, g, or t
  misc_feature (200)..(200): n is a, c, g, or t
  misc_feature (206)..(206): n is a, c, g, or t
aaaccacccccttncccttccattagcagaaactctnggggaactttgtgtctcagtcctagaatctccccaagtgagtggaagtgacatnatgcantcttcctcatggggnacctgaaagancttagtgtgggtncttcgntctaccttgtctgtcagngttgaatatctcnttccnctatcgatgctgcttctgaaanttcagntttcgg

SEQ ID NO: 626451 - DNA, 1298 bp, Homo sapiens
gcacgccatcatcggagcgcacggccagcttcgtgtgcaggcaggcagcacagttcgagatcaagctgaaggccaagcaggcccgggaactcccagtttgactttcgtgcgcttcggaccactacctcaaccccgtactataagcttcagtcgcagaaagcctatgtaaagagggacgctacacatgtccatggctagtaatagatcgaaagagtgacgagaaaacaaagaatcaggaggtcagcttctgacaatgaatgatgatgatgatgaagaagatgggaattaccttacatccctcgtctcttggccgtccaagaatgtgtgaaccgccttggaagagctgatggaagcccttgagaggtagtggacctcgagatcgatcacccgtcgtcgatgctagcttgattcggtataaggcacgaggcatgacgagtttccgacatcgcgcagccactcacaacaatcggcatgacgggttgcggccatgatgcatggaccctcacgcagggatgtgagtcacgacggcaggatcgtcgaccgttggcagaccattgtaattgacaggctagcttacatggctaccgggacgggcactgtacttgcgcttgggcggcccgacccgctctaccgcgtggaaatccgatcggtgaactaacttaactgacaagtcaagccctttctctgacttggactgtggacctcgggtgtcttaactacaccctgtgaggtgtacagagccaaatcggctcgtaacacaccctttcatggagaaccatatacgaccaagcagagccccccataaggccaccgggaactcaccatcaatccgagctcgatgcagaaaagcatagagaagcaataccaaccaacaaacaaggatgggccccagggccgcagtcatcgacattgcagggataccacatggtcaacactcccggcgagtattcaactagatcagagcaacacctttccccgcgggccgaggaggcgccagcgaggccgcaacacagcgcaacaccaccctaagccaaacttacccggcacactcacaacacacggcagcaccgccacacctagcctagaccaaagcaaaaggaggaacccaaagagagaggaccacaccccatccggagagcaacaacagggagcaaagacctgaacaccacgcccgcaacgaacacgacacaacacaaatcccccacagccagaccaccacgacacaacacgcgacaaactccatcaaaagacaagaagagacgacacaagcgcccacgacgacagaacacatgagcaca

SEQ ID NO: 626452 - DNA, 752 bp, Homo sapiens
  misc_feature (24)..(24): n is a, c, g, or t
  misc_feature (26)..(26): n is a, c, g, or t
  misc_feature (29)..(29): n is a, c, g, or t
  misc_feature (31)..(33): n is a, c, g, or t
aatgctagaggaggctcggttatncngcncnnntgcccgtcggtcgctagctcgctcggtgcgcgtcgtcccgctccatggcgctcttcgtgcggctgctggctctcgccctggctctggccctgggccccgccgcgaccctggcgggtcccgccaagtcgccctaccagctggtgctgcagcacagcaggctccggggccgccagcacggccccaacgtgtgtgctgtgcagaaggttattggcactaataggaagtacttcaccaactgcaagcagtggtaccaaaggaaaatctgtggcaaatcaacagtcatcagctacgagtgctgtcctggatatgaaaaggtccctggggagaagggctgtccagcagccctaccactctcaaacctttacgagaccctgggagtcgttgggatccaccaccactcagctgtacacggaccgccacggagaagctgaggcctgagatggaggggcccggcagcttcaccatcttcgcccctagcaacgaggcctgggcctccttgccagcttgtgaggatgacctccagtactagcccggggggactcttatggggaactgccttacttaccccgaggggtgcgcatgatgaactgggagtctgcagaacattatcatacgtggtttaaagaagcttactccattaaccccattagaacaggctgaggaacattgagctacaatatgtcttaacaggtagcgtctaaattgccccccggacccta

SEQ ID NO: 626453 - DNA, 461 bp, Homo sapiens
caagtgcctagaggacccattcttcgctcatatctctccaagaccacgacttcaaaagaggaagagcttgagatttctatcgctcatatactctccctgggacaaaagtatagtctctagtaaatgtctagtgacctttggctccgtagtgaggagagactgagcatacattactccacgctaacaaataattaatctatctatttgattagactttcagtgtggagtgcagagctttttcactaaaagtgctaataaagccagtcctcattaaaaatatagtcagatgagtcagcaaagctaatgttatttacaaaatctgaagaaatgagacaaaacaactttgagagtaatactataacctatgaaaatttggcagttagcaatagaaaaccttgtactttatcatctgtcccttaagcatggcctaccattgaggagagacctatgaccgacgaaat

SEQ ID NO: 626454 - DNA, 103 bp, Homo sapiens
aaggtggggttgagcatctcgtaagacatgtctagcctcgccatgtcacataaaactatgatcaaattagtccgggcgcggtagctcacgcctgtaatcccag

SEQ ID NO: 626455 - DNA, 793 bp, Homo sapiens
cgcgccatttgaatgggacccggcaattcggccattaatggccggaggcctaagagccgggctgtgggaggcaacagcctatactgttcatctaccggcatcaccataggcagtcagcgaagcagcaaccatgccctgagcgcaatccccatacagcgaaggccaggcgtggtgtacagatccgttaatgctctgttggtagctcctattgcctggaacacgtcatgcaggactgggggggagcatgccaactaacaaagactattgtggtgatgtgacgtatccttcctccccactcttcaccacacaccaacgcccgccgacgccccccccccctcgcccggacttaggaactcgcgggccacgggcatgtcgggagcgggcgagggggggttagtggaggctttttttccgcggagccacgtggtgcaggtgcttagtagtttgggttgaggaccaacaccgatccgttcacccccgattcgtcctgtcctcatatacttccattctatctaacttaataataatgatgtatttacttaatatgagattttatttgaacacatacgttactcaagctcacgattgaagacaggtgttataagcttattagactgtccgaagacggacgacacaaggacaattacataacctttacgtacacccctctccacgtctctccaccctacccaccccaatatgaactaatagtttgaaatatgtttatcacgtacatcaccatgaggatacccatcctctatcggtacaccgcaagaacgcactccctcagtaa

SEQ ID NO: 626456 - DNA, 633 bp, Homo sapiens
tggagatagagtctcactctgttccgcaggcacgagggcgggggcgccatctgtggctaactgaaatttccacctcccaggttcacgtgattcttctgcctcagggcagttgagtagctgggactgcaggcatgtgccaccacaccgggtcgatttggtatttaagtagagacggggtttctccacgtgggtcacgcgggtctcgaaactccgcgacctcgggtgatctgcctgcctcagtctcccgaagggcggggataataggcgtgatccaccaggcccagccgtaacatagaataaccttaaaattcaagttgcatgttgactcggataacattgggagagggaatctcgctcggtccccatagggtgagtgcaggggccacgatcacgggaccccgtgcaaccttccactcctccgggggtgtgagcctggaagatttggcggcccaggtgtgcaactgtcacaaggctccgggggggtgttggaacccccaagggggggccccaaaaggggggggctcttcccaacaaaaaagttccttcttcccaaaaaaaaaaacacacacatacacaacacaaaatggggggcgcccggagggggcacccacgggattgcggggaagagcataa

SEQ ID NO: 626457 - DNA, 1041 bp, Homo sapiens
gctggctccggcattcgcgggacaggcgttgtggtgccagagaaacagtagtcagagcggcgcagtggcggtcgcgtgctgtggttgttccgcgtattcccccagatccgcaccttctcgcgcctctttgcggacgaatcgtgaccaagatgtggaacagtggattcgaaagctatggcgagatcctcatacggggtgatgccggggcgtacacgcaaatccccggggggctttggatctgacctgcagcttcggtctcgccgatactggaagatcaggagcccgagcccagcgacattgtgccctgtatctatatctcagctgctttctgccactttggttgatgaacgtgttcagaattgggaatgctgagatttcacaggctcacatactcgtggggatcatcagacatgcaggagaagtcctccagaccaagatggtgcaacagaaactagatgacgctgacggactgtaacccatggatcgttcagccatgtagggttgagcacagatgacgaaccagcagtgaaaacactgtggttcctccagaaacatatcgtgaaaatgtggcaggccacctgagatcttttcagaactaaaaagagcctggtagctttacgatcgtgccgctggaggatatgaatgagttcaccagcatattctggaagtgatcaagtgcgcacatggtactatgcaaaggccagagcagccctcagcagggagagcacctatcagcaatccaggagtgagtgaagcatggaacttggtgggaaatagctccgagcaagcaatgggctcaactgtggcctcagaccaggtgttgaacttgagtaagggttgtccggactgaggtgcacgtcggattcagaacagcgtgaaacatgttggcactcacacagcaggggggtacggccggggccctttgttcggggaagacctatcccatcaatggaaggccggcatacacgccgcgcggtccccagtgcggaaggggacaccccttaactctttgacacaggacgtttttaatctttcttttcg

SEQ ID NO: 626458 - DNA, 546 bp, Homo sapiens
tcagatcctactcttcttgctgaaagcccttgaattggctaacattactttctttgggttctctgactttattggtccatttctttatggaattttttcttcttcttaaatgtggtggtttcctcaggttctgttcttggctcttcctttcttcttgctatttgtctactactccctgatgaatttcatttcctaggtcagttccgtaatttaatgacacttctctttcccactggccacacctttagcaccagctcttcacctgagctccaggattgtgtttagtggccttttagacatcatcatttagtatttaacagagtcatgaagcctccattgcagaccctagctcctggacaacatttctagacacaccctaggccagaagggaacccactgcattgaaggaaaggacccagtcctggcaggatcaatcacctgctgactaaagagcctttgagccctgaataaccagcagcagtacccaggtagcatatcatgggccttgggtgaccctctacgatgtgctggtttaggtgtgaccta

SEQ ID NO: 626459 - DNA, 478 bp, Homo sapiens
  misc_feature (9)..(9): n is a, c, g, or t
aaggatctncgacgagttgtccgagttacctggtcactgtaatactgggtctccattaaaatgtacatgctatggctaatttcacttgaagatgataccattgagcttctatagctatgaactatcaaatactagtttcaagtatgttactgtgcctatatcatatctggtctcaactgggtctgattctcaactcattgtcaatcacagttgatgccttctttgccttgcttctttggcttatttctgccttcatctcccacttctcacccaactctgccactgttcaggagcagatgactaaacttttatccttcctttaacttagtctttttatccttctgtttttagttcttacagtggtgatcacatgagtttggcgatctaagatgtctttatgaagggtcaaacgttttctatttggagctgaatcttttatttcatgtgaaaatctacatgtgtatacaagaaatgtatt

SEQ ID NO: 626460 - DNA, 178 bp, Homo sapiens
agcttgaagaatctccctagagcgagaaaacctctcaccgagactccatctaccaaataataaaaaaagaaaaaaaataattgtattcaaagactaaaatgtggggttaagggggggttggataaaaaaaaccccctgttgtggaatatttcacatggccaaaattgtcaccattaag

SEQ ID NO: 626461 - DNA, 374 bp, Homo sapiens
  misc_feature (155)..(155): n is a, c, g, or t
  misc_feature (165)..(165): n is a, c, g, or t
  misc_feature (176)..(176): n is a, c, g, or t
  misc_feature (182)..(182): n is a, c, g, or t
  misc_feature (205)..(205): n is a, c, g, or t
  misc_feature (213)..(214): n is a, c, g, or t
  misc_feature (236)..(236): n is a, c, g, or t
  misc_feature (315)..(315): n is a, c, g, or t
  misc_feature (331)..(331): n is a, c, g, or t
  misc_feature (363)..(363): n is a, c, g, or t
  misc_feature (368)..(368): n is a, c, g, or t
gtctgcctcccaaagcactgagactacaggagtgagccactgtgcccagcctactctggttttagtgcattcaagaggaacaaaaaaggaagaaaatcactagtaaatatacctctttctggttagagtggatgtttggaaattatatatatatnatataatacntatcccccatntacccnaccatgtacatacatgcacacanatatatgnntttttgattataggatagtatnccaaaactgagaaatattatggaattaacagaatttagtaaggcagataagtagtaggtagaaaaatattaattttatnttccagcaggaagcantgtgaaaaattagacaacaaggcaaacatttncattnaaaata

SEQ ID NO: 626462 - DNA, 133 bp, Homo sapiens
ctgaggacccccagatttacattaccaatgtgtagaaggtcagaaactagacttctagattaggttcaacatttgtagggttagttcttactagaccttcaaacgtattcaacgaaggtttggattggcagct

SEQ ID NO: 626463 - DNA, 490 bp, Homo sapiens
acctggatatccttgtcactattctagtctctatgtatctgtctaatgttgacagtggggtgttaaagttttgcattattattgcgtgtgagtctaagtctctttttaggtaactcaggacttgctttatgaatctgggtgctcctgtattgggtgcatatatatttaggatagttagctcttcttgttgaattgatccctttatcattatgtaatggccttctttgtctctttttttactttttggcttaaagtctattttatctaatataagtatagctactgctgcttgtttcagattctgtttgcatggaatatctttttctagtcctctattttctgtctatgtgcgtctttacaaagtaagtgagtttcttataggcagcatatagttgggtcttgtgtataactcattaagccagtgtatttttttaaattggaaattttaatccatttacattcaaggttattattgacaagtgaggtctac

SEQ ID NO: 626464 - DNA, 956 bp, Homo sapiens
ctgcgtggaacgcgctgaagtctgccagaacacatgtgggtcgcagaccgagcataggatgaccgcccggtgtggcagggtggctcgtggcaacacagagggacgcctgtgacacgacagtgtcgcgacagaacaagatgcgggggccccataaacatgacgtgggggcgggtgccgccgcccccacagcccgggtaaaacgacccggcaccatgtagccagaggcagcggcggtcccaaaaatggggcaacgaaccgggcgaaacaggagacgttggtgccgcatcggcaccccgccggagccatgcccgcttaaaaaacagggggatgttggaaagccgctgggtgggaacacgacgcggagaatggacagtcccacggaagccgacacccaccacgttttggcgcacacagggggggaatcgcacccgggggtcataaaagggggggaaccccccccgcagtgtgccgcaggtatgttggcaaacgagtcttccgctccctgggttccttccgaagaagggtctgtgggattacgtgtgcgagctcgcccctgacctgtgtcaaaggtggttggacaacccgggcgccagcattttgtgcgttggatctaccccgagagctttaggcgggacgcggtcgccagccctgggtaacgtttttcccaccaaagttcgggcagtgatggactaccccttcgagaagagaagaatctgcgcagttgtggcccccactaagacagttaatgtgtgggttatctcctccacaagagatccagacgcgagcggcacatccttcggcaagaatactggttgctgatgaacatcgtgaccctaggacacaacccattttaaacgacggggacaaattccctcatgaacaatactgcagcttcggagcgatttacagaggacgagggccgcaacaaaaaaaacaaaaaaataacccacaagaca

SEQ ID NO: 626465 - DNA, 92 bp, Homo sapiens
ggatttgctggtgcagtacaactaggcttaatagggacatgtccctattaattcaagcttctaacgttagaagcttgaattcgagcagtagt

SEQ ID NO: 626466 - DNA, 296 bp, Homo sapiens
tcggcacggaggcctgatctacaagtaccagcatcgttcttttgccagccagtgattttcttttaaatgaaaatgatgggatgagatgtaattttagatcgggaagagagtgtgtgtctaattcttttgagtatgcctgtgccatcagagaagagatcccaccccagtaggaaggtatggggcagtccagtttataactttgcaaccaaacccaagcctgctctttttgaagcagctgattggagagtaaagattttcattcaataaaagctaaacctcagggctccaaaaaaaag

SEQ ID NO: 626467 - DNA, 536 bp, Homo sapiens
  misc_feature (1)..(1): n is a, c, g, or t
  misc_feature (77)..(77): n is a, c, g, or t
  misc_feature (94)..(94): n is a, c, g, or t
  misc_feature (144)..(144): n is a, c, g, or t
  misc_feature (300)..(300): n is a, c, g, or t
  misc_feature (310)..(310): n is a, c, g, or t
  misc_feature (315)..(315): n is a, c, g, or t
  misc_feature (319)..(319): n is a, c, g, or t
  misc_feature (328)..(328): n is a, c, g, or t
  misc_feature (334)..(334): n is a, c, g, or t
  misc_feature (340)..(340): n is a, c, g, or t
nttttttttctttctgtataatgcctattcttgaaagctctgaatcatgggcaagaggctcagtggtatctggaggncagggcactggccactncagttaccatcttctgccaggtagcctgcccctcaggggtgaattctttnccgaaatggatttccaaaacggtcaccagcccatttcccaggagcttgaagttctcaggatccacatgcagcttgttacagttcagttcactcagctgggcaaaggtgcccttgatatcatccaggtgctttttggcttctcccaatggttttttnctccttcttnccatnttcnttgactttngggttncccatnttggctgatgcagaagacaggttgccaaagctgttaaagaacctctgggtccatgggtagacaaccaggagccttcccagggtttctcctccagcatcttccacattcaccttgccccaaaggcttgttatagttgccttgttctcctctgttaaatgacccatggcgtctggtcttggagcttattgataaactc

SEQ ID NO: 626468 - DNA, 308 bp, Homo sapiens
ggttctaaatgtgttgaggaatcagcaagtcaaattctacaaaagaaagagccttctggaatttcaattgaaatcatgctaaatatatagatcaatttggggagaactgatatctgaacaatattgagtcttccaatctatgagcatagtatatctccccatttcactaggccttattgaatttttccagcaacattttgtagtttccagtgtagaagtcttacacaatttttcctcaacatttatccccaagtatttcataacgttttgactgctatcgataaatctgtattgtatttcacgtttca

SEQ ID NO: 626469 - DNA, 433 bp, Homo sapiens
  misc_feature (145)..(145): n is a, c, g, or t
  misc_feature (168)..(168): n is a, c, g, or t
  misc_feature (177)..(177): n is a, c, g, or t
  misc_feature (186)..(186): n is a, c, g, or t
  misc_feature (204)..(205): n is a, c, g, or t
  misc_feature (217)..(217): n is a, c, g, or t
aattgacatcatcaaaattttagatatattcagtctatttctcaaaaactcaaagaatactaataaatgtgcactcaggtatatgtccacaaattgctgtaacattataattttaaacaatttaaaacacactaagtttccaaanttaacgtacaataaaaaaaaacntggctaatntaaactccnaaaaactttcccaaaccnnaaaaacaacacnaaaccccacccacacacacacacacacacacacacacacacacacacacacagtttgggtatccctaatccagaaattcaaatgctccaaagtccaaaactttctgacccaccaacatgactgatgctcaaaggaaatggccactggaagatttcagattttcagatttggagtgctcaaccagtaagtatataatgcaaataatccaaaatacaa

SEQ ID NO: 626470 - DNA, 453 bp, Homo sapiens
  misc_feature (31)..(31): n is a, c, g, or t
  misc_feature (67)..(67): n is a, c, g, or t
  misc_feature (85)..(85): n is a, c, g, or t
  misc_feature (113)..(113): n is a, c, g, or t
  misc_feature (192)..(192): n is a, c, g, or t
tttccccccctctgtctccgtggtggttatnatactgcctttgaatccacacacaaaaattttaaanccagaaatattggagcanagtgaggggaaacacttgttgattttanccccggactgtgagtcacaagacctagaggtggagccctcagggatctgaagaaaaagggagtgatggcccaggtgtgngtgtcacgcctataatcccagcactttgggaggccgaggcgggcagatcatctgaggttgggagttcgagaccagcctgaccaacatggagaaaccccatctctactaaaaatacaaaattagctgagcatggtggcacatacatgtaatcccagctactcgggaggctgaggcgggagaatcgcttgaacccgggaggtgaaagttgtggtgagccaagattggccattgcactccagcctgggcagcaagatggacact

SEQ ID NO: 626471 - DNA, 325 bp, Homo sapiens
tcgggcggtaaccaagcggcgacgaaatagtgctggatcatcgcgagccacccatcctgcgcttggctcagatggtccgctttgccttccgggatcgctttgaaatcgatcttccggtacttcgtcgcttccgtatagatcgcgggacccgtatacgtatgtacgccgaaaacttgctgctcttcggcgggtttatcgtcacgcaagaagtgatagtacgtggtcagagggccgccaccgtcgatcccgtgacggacgtctatcaaataggagccacgcgcgaagcgcaaagtcttccgaaccgtgcgcccgtctgcagtcgaag

SEQ ID NO: 626472 - DNA, 119 bp, Homo sapiens
tcctgtgatgctttacatgccactggggtgctcctctcctgagactgaggcacacaggctggtgggccccgaatgccctatcccaaggcctcaccctgtccccccctgcgaacctatga

SEQ ID NO: 626473 - DNA, 344 bp, Homo sapiens
atacagagacatgccacagttaagcacgtacacgaatcccagcaggatgtaaccatcctcaatccagtaccataatgatgaacagacggacctcgaggacctgctcttaggttcagacagcgaaactcacgtgcaacactgaccggactgagagatgcctcaggtgtcagcttcaactggacgcccctcaagtgggaagagcgctgttcaaggaccaacttagcgttacctctgtggcttctaccgcgtgtccagtgtcctgccgggctgtgccgagccatgtaaccatgggaagaccttcaattgcactgcttgcctaccccgagtccatacttacctgggga

SEQ ID NO: 626474 - DNA, 216 bp, Homo sapiens
cctggcgtccatgagagcagacctacatgtacgacgtgccgccagtacagggtggggcggaaccacggtcttatggaccacctcgtcacggacgatctccaccgccggcttcatcgagttcgtcacgtcgcctaacaacccgtacgccctgatctgcgcatccgtcctctgcagctcggcggctagtcatcgtcgaccacgcgtattcctggccgt

SEQ ID NO: 626475 - DNA, 329 bp, Homo sapiens
tctttggcccccccaaagaccttcaaacagcagaaagttcggatggcaaatgagggcttcgaccccagccccctgtttgaccccctgtacgttttggaccaggctgtaggtgcctacctgcccctcccaactgcccggtacagggccctcctggcaggaaacctttgaattttagaacttccccccctgaggcccctgaaaaaggaactttgtggggtgggggccgttgcaggtgtactgggctgtcagggattttttttataccaaaactgcggtccctattttgtaataaatgtggctggagctgatccacctgtttttgcccccca

SEQ ID NO: 626476 - DNA, 404 bp, Homo sapiens
tcccttggggcctttggggcatggctcaagcttttggggctggttccatggttggggaagggccctttgctcaaaatttcccggggtctggggcccttttggtcctttgtaagcctttttcagtccccttttagcaaaggtttttgagcccctgttaggattcagccccgcccagggggggtattcaggtttttgtgattgcccccaggtttatttccctagattttctttaggggttgccggtttccccccaggcttttcattgttccagcccctgattaagctccagttttgtaatgttttgcctggaaagaaacaaaagccctttttcccctaaaggtagttggagggcatgctttttaacccctaaagttcagccaataaatgttacgttttagccccca

SEQ ID NO: 626477 - DNA, 876 bp, Homo sapiens
gagagtggacggtactagggttcggagtactgggctgcaggcatacattgagaatgagaactgtggacagcccagagtgcctcagatcaactccctatgaatcatgcattaggcttctcttcctcagtgctagttgactgtgataaatgtgcaaccaagatcaagcaaatgaagacctaatggaagatagtagatgcattgcggtgcttgatatgtcctagaataagcagggatgggtttattgcttgaataaactctgcttttggggttcatagcaaagttccatgatagatttggggattcgtattaggacattgggtggggtaaggtctgaagggttaaagatgttgattattgcaaggaaaccactctatgaaagatcgacaaacgaattgacttgatagcatctttcaggatctgaattattaatacacatagtatggattcatactgtgttcatcactctttgcatctgaagactgcttccttataacgtcgaggatatatggggaagagaaatgctagtagtatagaaagtaataatcagtcaattaaagggaatctgctaatttcgtgactttggtagtgctgggtcttaaagatctcattaaattcaacatagactgtttcctcacttgaaaagacgaaagcgtaagacacaagactttgaaaggcgtccatgctggccaagtgaaaccctctgccaaaaaagaacacccgtgtggcaaaactcccactgatagtcgacctggggaacaacgaacttgttcggacagtaaccagttggccctaggtagagcgcggagccttaatacccagaaggcgggggagctcaccgacggtttaatttaaaaccgtgcgtggagaggcttaaca

SEQ ID NO: 626478 - DNA, 261 bp, Homo sapiens
gagggttctcccaacctcactgcaagaaagatcttatattgtcctttccagcagaatctcccacacgaagttgtcacccctttttggcctggaccattgtgtattggagagaaggactgagcgatcttggcatgtatcctgtaaatgtaaaaaaaggacattttccccgaccggctggaccatatcctttgagcgtttcctgaggcttgttgcacagcccatgcaaacaaccatttggctgagaaaagacctaatcatata

SEQ ID NO: 626479 - DNA, 469 bp, Homo sapiens
cacagtcaactcaactccctgagtctaaataataagtcttatctcatttcagtcagttttccttataatgccctttttctgttctaggatcctagccaggatcccttatcacgctataccctctaatgacctccaatctgatgctttctactaccttcttagtctttcatgacctggactgtatgaagactactgtcagtattttgtagaatgtccctcacattatgagctccagatacttttctcatgattagattgaggtaatgcattttagggaaagaactcctcaggaagtgctgttgtgcctatcttagtatctcatgtagggctgcataagagggtatttgcttaatattaccttgagcacatcgtacaggtgatgtcagtcaggtgtcttctgctaaggcctgccgaggtagagtcatcatttggccttcagtcagttacacatatcttcgagaagactggg

SEQ ID NO: 626480 - DNA, 160 bp, Homo sapiens
tttcccccccccttttttgggggcccccttcctcttagggggaaaaaaaaaaaaattttttggggccccccccccttttaggggggttaaaaggccctttttttttggggttttttttgggccccccaaaaaacggggggggggttttgggggttcccca

SEQ ID NO: 626481 - DNA, 141 bp, Homo sapiens
tggaacccttaggcggtcatagccgtttaacatgctgaaagcgcaatccattaggaattcccagagtagccccaaacctgcagtgtaagcggaagttagcctgcagctagtacctcgagctagtgtaaacagcgccacctt

SEQ ID NO: 626482 - DNA, 626 bp, Homo sapiens
ctagttctagatcgcgagcggcctccatgactttttcaaaaaaaaaaaaaaaaaaaaaaaaaaaaaaaaaaaaaaaaaaaaaaaaaaaagggggggggcccaaaatttcccccgggggggccatgggccccccatttttgttgtgaaagaggggggtcccaagatagaggaggggatttttttatataagcatgaggggacggacggcgtcgtttttacaaaaatgtgtgaatggtggggaaaaaaaagctgtcatacagtggggattacttgtggtagaaggaaaacctataattgggggtgtggggaaacaatggtgggaacaacttatcctatgaagagataaatttaaaaactgctaacagggggaagaatattaaaataatatttgcagcgagtgttcatataaggttgggttgaaaccacatgatgctgtaaatattgagctgttggccgcgagttgaaaaaactgttgtgtgagttaatctagatgggatttatatgtattttaagagaaaatattattttatcacaacgagtgaaagaattgtagtataataaaaaagtagtaatagaaatcatgaaagtagtagtcatttagtacgatagtatgtcatataatcgac

SEQ ID NO: 626483 - DNA, 1023 bp, Homo sapiens
  misc_feature (476)..(476): n is a, c, g, or t
gacaaccttagccagaaccagtgttacccaaataaagtataggcgatagaaattgaaacctgggcgcaatagatatagtaccgcaagggaaagatgaaaaattataaccaaggccataacagtagcgaaggactgtaaccccgtataccgtatcgtgctactaaggtgacagttaacgttagcacaagtacacgatttgtgccaagcgcagcaggcccgaaaggagggccccatcaagaaatggaacggcgcccccgccagtgtaacaaacaccgcccaaaatggacaaccctggcaaaacggacccccttcaagcgcccggactttaaacaatgggcgaaataaaccccaaactgggccctgctttcaacccagcgcaagcaaactgggggacaaagtggggggcccataaaaatagcaaaaagacccccacccatagccatagggtgagagttttccccgctcttttaaaaacncagcttttggcggggagttttctacaaacagcggagtgctccccagaaatatataaaccgtgaaaacacaaaaacgcgtgtttcacaaaacgcggggagcccttttttagggggggcgcgggtctattggcggcgtacaaaaccgccaaaacgtcggcgcagcaaaaaaattgttttatgctattacgtgctaaaaaaagggttttccaacaaagtgggaggtaagtggggtgcacttatcaacaaggggagctccaaaacacaggagcgacagggggggaccccccacgggggcgaaaaaaaaacccacagtaaaacaccaacaccgaccacaacaaacaccccagcaccccggagtattttttaaaaaaggacacaggacccccaggggggggacaaaaacatgggatgagacgaccccaaggaccccaaacttttgtgtggggggggcgtatgaaccatttgttcgggtgtgcccaacacaacaactttttctcgcaccaacgcgggtcccaacacccacatactttttcttgtgcggggcgtg

SEQ ID NO: 626484 - DNA, 312 bp, Homo sapiens
tatggcttggggtctgtatgggatgggatgtaatgagatatgatggaatgggtgagatagaatagaatggaatatgaagggatgggatggaatagaatgagatatgatgggatgggatggaataaaatgagatatgatgggataggttgggattcaatagaacaggatatgataggatggggtggcatgagatgggaggtgatggaatgaaacagagcaatagtgacaagatctcttcaaatcacaatagagacacttgctcacagcagcatcagaaagacaaaaatatccataatgtggaaggcaaaacac

SEQ ID NO: 626485 - DNA, 206 bp, Homo sapiens
acccaggctggtctcaaactgtgtcctcttttaaaggacaagctgttcactcgctttttcttttcttttcttttttccatgtggagacggaggctcgctttgtcccccaggctggggggcaggggcacgatttccattaattggaggctccgcctcccgggttcaccccattttcttgcctaagcggggacccgggctcgaattcg

SEQ ID NO: 626486 - DNA, 101 bp, Homo sapiens
tcaacgctttatacattcctacaacgcttaactttctcaacgctttatacttcctccaacgcctttatacactccgtcaatcgctcttatactatccgtca

SEQ ID NO: 626487 - DNA, 395 bp, Homo sapiens
  misc_feature (18)..(18): n is a, c, g, or t
  misc_feature (49)..(49): n is a, c, g, or t
  misc_feature (190)..(190): n is a, c, g, or t
tttaattatcccttttanagatcctatctccaaaaacagtcacattctnaggtcctgggggttaggacttaaaataaaggaatttggagggatgaagttcagcccataacagatgcttttgctacattaagatttccctggccgggcgcgggtgtcacgcctgtaatcccagcactttgggaggccgagncgggtggatcatgaggtcaggagatcgagaccatcctggctaacaaggtgaaaccccgtctctactaaaaatacaaaaaattagccgggcgcggtgcgggcgcctgtagtcccagctactcgggaggctgaggcaggagaatggcgtgaacccgggaagcggagcttgcagtgagccgagattgcgccactgcagtccgcagtcc

SEQ ID NO: 626488 - DNA, 140 bp, Homo sapiens
ggtggtgtaggtgacacggggaaagcgcatctgctagccttgtaggtgtggggactgggccggatttggggtacagattgtgatctccgtatggccgtgtggtagtctctccagcttctctcccaacttcactgtgtggt

SEQ ID NO: 626489 - DNA, 375 bp, Homo sapiens
ggtatgaggccttaagctacgttatatttccaggagcaggtcggggttatattagccgctcgtaatttaaggcccatagttaggggtatataatccggagggaagagtagtttccctcccctcctaccgcggccccttacaggtttctctcgcttcctcttgccccgacctaccgatttcaagagcagtaccattcctacacgtagtaccaggcgaacgccaagtacccttagagattctttcaagaagccgccgccagtacctcctcgaagaagtcgcagaaacgaagcagtagagatcccagatcagcgataaaagtaatcattcaatagccaggcaccgatcgatcggggtcaggttacagtttcacctccc

SEQ ID NO: 626490 - DNA, 415 bp, Homo sapiens
agtcattttaggatttttgaaccaaaaaaggagggggatgatttcactttgcatttgtttcaaacattgggaaaatggtaccctgattacattaacaataaaaagctgacttgacccttgggggctgacctttgaaaaacacatagccggaactttagaaacatggccctttagggattaacaggtgtgtgctgaagtaaaaaaagggatgtaatgtttactctttaacgtgcccgcttggtaatttttggccaaattgttcactaacctgctgtttacttaataaaaatcttttctttaaattgactgttatttgcttgatagatgtcttcagaatgttttacttcttagcttcatcccatgtaattatgggtttgctgtgtgttttgtgtgtgtacctaagagagggaaggat

SEQ ID NO: 626491 - DNA, 135 bp, Homo sapiens
ctagaccagcaagcattcatttttaggtcgctcattttttaccatgttttccagtctgtttaacttttgcagggccttcactaccctgccttacataaacccaatcccaataaagttcattttccggcccttgga

SEQ ID NO: 626492 - DNA, 335 bp, Homo sapiens
acattatgaaggttaaatacagactacatttttcctaagacttatttaggctttccaacttctagctaatcttaccctaaaagtaaatgaatctttttttgtttgtttgtttgtttttggaaatggagtttcactcttgttgcccaggctggagtgcaatagcgtgatctcggctcactgcaacttctgcctcccgggttcaaacgattctcctgcctcaacctcctgagtagctgggattgcaggtgtgcgccgccacacccagctaattttgtatttttagtagagacggggtttcaccatgttgctcaggctggtctcaaactcctgacctt

SEQ ID NO: 626493 - DNA, 444 bp, Homo sapiens
ggcggtacggcccggagtaagggatattaagggatatgatactaaaatagtaatataagcaaggtgccggtgtacaagcggtgatcaggtcttttcagcacttgagcatttactggctcatttagtcttcctttgtagcgcatggtgggaggaaaaagtgcatgcatcattccgttcactcgttctcctttttcccggcacaaaaggcatcaagcttcgggacagtaagggggtagggcagctaaccatgcttctgtagtgacaagtgcacaggatagagtgggaacgcaagtgcaaagatcaccattaggagagagtagaagctatgaggaagagacatcgcagctagatcacggcgtcaaaagataataagtgcggccgcgaatggcagcagaagacaaaacccacacatgcataggagtctacaggacagtatgaagagtg

SEQ ID NO: 626494 - DNA, 926 bp, Homo sapiens
gaggagtggcagcggcaagggagccagtttcgcgaaggctgtcggcgcgccggggcccgaggcacccggacgcgcttccccgagcacccggacgcgccttccccgcgcagatgcccaaggaggaaggtcagctccgcgaagggccgcagggaagaagcccaagaggagatcgggcggttggtccagtaaaccctcttgcaaaaggtggaagcgaagcggaaaaaaggggcagcacgcgaacgggatcgacttctccagacaaaacagtctgccacccacacagcgacagcgggggaccacggggaacacggccgtcggggctttaccaaggaaatttagaggacgatttacctgggggaaacgcgggaaacacgaaagcactggaggaagagccacgcccttcttgattagagcggacagagaaaagacggcaggtttgattaaataaccatattcccattgtttaactcaagggggccgcgttggcttccctttttggtccactctccaagaaggatttttttacatcaccctaatggtcgcagcgtcgcacggttgtcagggacgctcgtagaaaccattttgaagcagcgggggactccccactcatcccattttgagcgtgcaactgctttcccaacggggtcgacctcctggggcggcttggtaattttgggtaccacccagacactggtgcggattttgcgaattattgacggcctgctggttcgggttgcagtacacatcccacaggggcggtggtttacttccaatatcaccggcttaacggcaaggggcgccctgtcggttgaactaattacctatcccagtgtttgcaactgctccagaacccttgggtggttcccaagggcctgaactgtggacgtcacatgcgcgagaacactttattaggggaccagttctcg

SEQ ID NO: 626495 - DNA, 1331 bp, Homo sapiens
  misc_feature (678)..(678): n is a, c, g, or t
  misc_feature (1016)..(1016): n is a, c, g, or t
  misc_feature (1144)..(1144): n is a, c, g, or t
gaagggtgttttttttctccccccggttattttgtaaggggattgttgaagttgtaaccccctctggtttggtggaaggagaaatatgtataaaaccttcggggggaggcctcctccacgggccgggttcctaaagaaaaaagattttctttaaagagtctgttttatattaaaggcggccacagacctgtgggtgcgccccggctgaggaaatagtgtgtacaaagacccgcgggtgtggcttaggacaggtttgttggtggcgcccacccccgctccaacggtcgtgagtgttatatttctaatgggcttattaatgtgccccgcgggagaaaccaactgggtggcctgtatcaacatctcctcgtctggggagaaattgctctgtaaaaaggggagagatattgtagagtggggggccttctctcgcggagagttgtaaaattgtttgggcccaccacttgtttatataataatatatatacttctccacatttggttttggggagcaccctcgccaactaaatgtttatagcgctctctttttgtgagaaccgcccacagctttgagatttctccctctggagagtgttctgtcacataaataatatataagagtcctcgcgctggccacagtttcacacacattcaccacacatatttttctcacagctgggngggtgagagaaattctcttgtgttttgtgtgtatacctgctcacattccccacatgtccccttttctgcggtttatagagattctacgagatataagaagatgtgtgtatatgtctcaacacaatatatgcttatagagcacacaggtgagaacttcacattccctcgtgtgtgttatatataaatatgccacattttgggagaaaaccacactataaagatataggggagagagtttatatatggccacatcggttataatatattgtgagaattgccctccgtggctttgtatatacacacctataatgtgtgtagaatattctatatctggggtntataatattgttccgcctcatatgggttatatttttggtacacacatttgtagagccacatgtcacacaccacacacctcgagatgagatgacacacggtgccacagccacgctatattctatatttnggttatagaaagggtttaacacatggtgtaaaataattatagtcgcacagttataagctaaaagcacgtggtttgctccaccctttcacatatcttggctataggtaagggtcacacctatagggaagcacacttgctccaaatctgtgacctgtccagaatataaaatttggtttgtacaaatcca

SEQ ID NO: 626496 - DNA, 818 bp, Homo sapiens
gatctcagctcactgcaacctccgcctcccagttcaagtgattctcctgcctcagcccccaagtagctgggattacacagtgtgcgccaccacacccagctaattttttatttttagtagagatgagatttcaccatgtgttggtcaggctggtcttgaactcctgaactcaagtgatccacctgcctcgacctcccaaagtactgggattacaggcgtgagccactgtgcccagcctgtactttttttttttttcatggtagctcgtgtatagcactgggataatgtcgggggtgtctctttaaccatcaaacgtggtccttttatttaaaagtgttataattaaccgttataaaaatctctagtcctcaataaggtgggtggctcagtgctatggtgtgttcctaaagctaagcttggctgggacggaaatgacctatagttctcttaaagaatcattaatccttataggattcctgagttacggtttggttcctccccacggtgttcccattcctgagtttggtgaatcctaatccttctataatttctattaccttcaccatggtcatctttccttacgcaaagcccagggaatgagctgtgctactttaacagtggggtcattatgatgcatgtgtgacaccgaggttggggactgtgtcctaaataacttttataccagctatgtggggtaccaggaacaggtgggttcacatattccaaaaacacaccgggtcattgtgaacacgtggcacatacacagggggactctatacatcttaggaattaagactactttgactggatattattac

SEQ ID NO: 626497 - DNA, 407 bp, Homo sapiens
  misc_feature (21)..(21): n is a, c, g, or t
tggagaacaaagaaggctcancctggtgttgattgcccatgacgtagaccccattgagctggtggttttcctacctgctctgtgtcgaaagatgggggtgccctactgcatcatcaagggaaaggccaggctggggcacctggtccacaggaagacatgcaccaccgttgccttcacacaggttaactcggaagacaagggtgctctggctaagctggtggaagctattaggaccaattataatgacagatatgacgagatccgtcgccactggggaggcaacgtcctgggtcctaagtctgtggctcgaattgccaagctggaaaaagcaaaggctaaagaactcgccactaaattgggttaaatgtacactaaattttctgtacctaaatataattacaaaatta

SEQ ID NO: 626498 - DNA, 350 bp, Homo sapiens
ccggtggccaatggaacctgaaaacttcacagacaacatgctgccaagtggtagtgggcatggtctgcgctctttgtggtaaccctggtacacaggcgtgcgtgggaagtggggttcccttcagaatgaaacacttttattttccctttttgccctgggggtcccaagctgttctcctggtgaggtgggctggagggacacctcagtcttcacattgtgtggcgggggggagaaacttgcaatatgacagagcaccactgctcgaagaatcatcacatagaagatatggcgccccctcttttttggttacttggcttggaccgctgggacaggacccgtcctccttcatg

SEQ ID NO: 626499 - DNA, 348 bp, Homo sapiens
ggctgtgctggcggttgcggcggttggcaggcggagaacaacaaaccccggagcctggagccaggtgaggctggacgggacgtggatgggctgacagcggtgcgcggactccctgaatgcccagacatgctcctccccaaatccccttccccagggaagtccactcctcgcattcatcctcactgaggagcaggggcataacgcctttatcatacaaactcacagacctagttgagtagagcgtacacatatatacatagaaatccgaagaaacgacaaacagtaaatagcgcaccagcactagaacacacacaaccagactacaaagacaaagaccaaccacacaca

SEQ ID NO: 626500 - DNA, 882 bp, Homo sapiens
  misc_feature (7)..(7): n is a, c, g, or t
  misc_feature (61)..(61): n is a, c, g, or t
  misc_feature (390)..(390): n is a, c, g, or t
  misc_feature (407)..(407): n is a, c, g, or t
  misc_feature (583)..(583): n is a, c, g, or t
  misc_feature (662)..(662): n is a, c, g, or t
  misc_feature (724)..(724): n is a, c, g, or t
  misc_feature (765)..(765): n is a, c, g, or t
  misc_feature (790)..(790): n is a, c, g, or t
  misc_feature (806)..(806): n is a, c, g, or t
  misc_feature (870)..(870): n is a, c, g, or t
gcaacgntccacaccagagattagataaatgcactaaaagataaaaatacaaacctatcgnctatataaaaattgatataaaattcgcccccgatgtttcgtgccccacgttccgggacggaacattatcacataaacgagatcaaatcggaaatgacgcgacgcgtatacgcacatcataggccaatggtggggcggacgatcgtcatctcatacgaacgaacgccgtctaacgtaaatccgccaggcttgaaaacacctttaaacggaaatgcgttgatctctcttaatattaattcatgatgtttgtgcaaaaccgccggcgcaattggggaatgggaatgacgaacggcgaccgccataatggacgtgctttgcgcctttcttcgngtttggatcgtgttttnccggaaacggactaaaaaccccccgaaatggtggtgggcgtccctttacctgaaaatctttcccctgtcatgctccacttcccacgcttccgaacgattccaaccctgaacgcctccacatccgatgtcccgccggcggggtaggcaatgattcataacggaacgcagaccctganacacgcgcccaaacggtccgcgtgtaccccccaccataccggcacatgaaacggggggggcccgaatctcatacggcgnaaatggggtgcacggccgacccgcccgcccctcacaccgtattcctccaaccccacgcccgnaccacgacgggcccaatgcgaatgcacgtgatgaaacaacnaaataacggaactgaaatgccaaangcacgtaaataaaaanatcggccctgtaataaaatcggatcgctcgccacactacacacgaggcgtttcgcccgattatnctgcacgttact

SEQ ID NO: 626501 - DNA, 229 bp, Homo sapiens
attagatggctgctgacctgcttagggtggtggttgctagaaggttgggtgacagtggtaatttcagtgattatttgtttagtatttgtatctttaagagacaggtctcattctgtcactcagggtggagtgcagtggtacgatcatagttcactgcagccttgagttcccgggctcaagcaatccttctgcctcagtctttccagtagctaggaatatcaagaatcgg

SEQ ID NO: 626502 - DNA, 93 bp, Homo sapiens
ggttttttttaggggggggggggggccaaaaccccaaaaaaccctaaaaaaaagaaacccctttaaaaattttcctttttaaacccgggggga

SEQ ID NO: 626503 - DNA, 426 bp, Homo sapiens
gaagatgtaggtgagaaaatattcctgaaagtagaactgaaagagacaaagagaaaagatgaaagccacagaagacaaatacaggggtcaaaaccagactaacagttttagaaagtgaaaaaagttaaaaaagaaatgggggcagtgggttattagaaataacataaatggctggtatggtttgtctgtgtcctcacccaaatttcatctcgaattgtaatccccataatccccatgtgtctagggagagacctggtgggaggtgattggatcatgggggtggtcacccccccagggtcccctgtgcgcgggtgagttgaacaagacctgatggttttatatagggctttacccatgttactacatactcttcttctgaggtgtgtgaacaagggatgagctgtccctttgccttcccccgtgatg

SEQ ID NO: 626504 - DNA, 342 bp, Homo sapiens
  misc_feature (86)..(86): n is a, c, g, or t
  misc_feature (105)..(105): n is a, c, g, or t
  misc_feature (107)..(107): n is a, c, g, or t
  misc_feature (282)..(282): n is a, c, g, or t
ttagaggatcctgttatcccaacactggagatacagaataacttcaaataaaaattaattccaggccaagcacggtggctcatgcntgtaatcccaacactgggngncaaggagggaggatcacctgacgtcaggagttcgagatcagcctggccaacatggtgaaatcccgtctctactaaaaatacaaaaattagccaggcatggtggcaggcgcctgtaatcccagttactggagacactgaggtaggagaatcgcttgaacctggaggtagaggtttnagtgagccgaggtcatgccattgcactccagctcgggccacaagaaggaaactctgtctc

SEQ ID NO: 626505 - DNA, 93 bp, Homo sapiens
tctgaggacacggccgtgtattactgtgcgagaaggggattttgtaaagatagtatctgctactcggggggacttgactactggggccaggga

SEQ ID NO: 626506 - DNA, 570 bp, Homo sapiens
gttctggtgtgctaaaatctctttaaaattagaacttaccccaactaagacacatgggtccctttgattcaattttctcttgtgctggagccattggtcttctatgggagtacaatgcaataactctatttatccatagttgacaattatgtgacatacaaaaagacatagacaggagctcacattctaaagcgctggcagtggcccgaaattgactccagagctggaggtgggagggcaatcagagaggagacatcagctcactcatctcctctgccttgccccctatgcacagaaggtgacaccaggtcctgtcagttcagcatggacaagctctctcttcattcagtccctacctccttgctccctgctaaccctcattaattccacgtcttcattctctagcccagattagcaaaatgctaaggataaggaacacagaagctctttaaggtctttggtgcaactacttattccaccctctgcaagttccacccactccttagacctggcattttggtctcatcctgtctcagcactgcagagcaaacccattcttcctatgtctgt

SEQ ID NO: 626507 - DNA, 342 bp, Homo sapiens
aatatcggtgagctgtcacatatgatgtaggacagtgcttcctctgtacacgcacaggattcccgtgatgattgtgactatgagagcctgtctgatacgatgtaggacagtgcttccctgtaacatgcacaagattcccgtgatgatggtgactatgagagcctgtcacatatgatgtaggacagtgcttccctgtaacatgcctaagattcaccctggaagcttattaaaatgcaaactcatagaccacactttgactagctaagacaagagcatttaaatggatgtccaggtgacagtgctaagatcctactgttcatgtgggcattggctcaccaatat

SEQ ID NO: 626508 - DNA, 957 bp, Homo sapiens
caagtgtcccatggattaagattaggtcggggggctttaggtgatccgaatgcctccagaattctgggcgacaacttaatttcagagtttcaatggatggtaagagttttaatgaagacaagttttaaccttattcggaagttaaatattaatactttagaaaattattgtactaaacttatcgcaagccttttgaaagtagcagagtttcatcataccacatatattaccagagccataaaattttctataatcaggcaccttttgctgcttcttgagtaagactgttttcctgtttaagtgttaagcatcgccagacataaaaatctattctctcctctcgattgtagcatagcctgacagctctagatacagcatttctatgatgaaaaatgagtatccatcaggaaatctagaagactagccgtgttttctcagactccacctttgtttgcactctgttgcctgtgaggagctttctggcatgtgattatttacttcaaaactagagttccaagcacctacattaattattttatattgtgtgcagaatagtatatcttttaatgtcagatatgatacactgcacatattgcttttgcactcttaaaatttttgtactaaataatagaaaatatttatattctttgagtgtgagctttgaatagatggcattaccacgggatggtttttattaacagagactcgtttcatcgatcacgtcctagttgcacactgtgtagatccgagcacagtgcctatgccacatacttcttgtataactgctctggtactcggaacgcagtcacactcgtgtactcttgctgtggtaagacgcgaatctcagtacaatgattatataggttggaagtctgagtatccccagcaccaagtccagcagatctattcagaaatccagttgctgtcatacatgttatatgtctccatgccactatt

SEQ ID NO: 626509 - DNA, 295 bp, Homo sapiens
  misc_feature (56)..(56): n is a, c, g, or t
  misc_feature (60)..(61): n is a, c, g, or t
  misc_feature (157)..(157): n is a, c, g, or t
  misc_feature (199)..(199): n is a, c, g, or t
  misc_feature (219)..(219): n is a, c, g, or t
  misc_feature (270)..(270): n is a, c, g, or t
  misc_feature (289)..(289): n is a, c, g, or t
acctgagctgaaatggcagacgatctcggagacgagtgttgggagaaccagccgantggnncaggcagcagcccagaagcatcagatggtgaaggagaaggagacacagaagtgatgcagcaggagacagttccagttcctgtaccttctgagaaanaccaaacagcctaaagaatgttttttgatacaaccaaagganagaaaagagaataccaccangaccaggaaaagaagaaagaagaaaattactgatgttcttgccaaaatcangaaccaaaaccagggtttncctgga

SEQ ID NO: 626510 - DNA, 368 bp, Homo sapiens
gtgagccgggcgcagtggctcacgcctgtaagcctgacactttgtgaggccaaggtgggtgaatcacttgagctcaggagttcgagaccagcctggcaacgtggtgaaaccccgtctctaccaaaaacaaaacaaaaacattagccaggcctgtggtgtgcgcctgtggtcccaaatacttggaaagctgaagcaggagaatcgcttgagcccaagaggcagaggctgccgtgagctgagatcatgccactgcattccagcctgggcaatacagtgagaccccatgtcaaaaaaaaaggaaaaggaaaaggaaaaaagataaaagcagctttaccctgtaatcttagttctagtcctatctggactag

SEQ ID NO: 626511 - DNA, 248 bp, Homo sapiens
atagttttagaagtttcaatagcatcaggaaaatggctactgcatgcgggcttcatagctacgcgataggttgatcagtgcaggaataaatcgacagcacatgtctacctatgtaacaacactgcacatcctccacatgtgccctgagaaattaaaattaaaaaacaaaaccaaaagatcctagagttactatggtatacaatagagctcttgaacttcttcctgctattgcaccttctaaaactagg

SEQ ID NO: 626512 - DNA, 184 bp, Homo sapiens
tgaatgtaaaccaaacatgcaaggtgataagcttcatcattttggtggacatttcatcaggaacagttcccaaagttataccaagatgcctcctctcccagtccaactgcccagtgggcacttctcatgccccgttgtgtcagcaatgccacatggcgtgtcacccaagcactccagcactcgc

SEQ ID NO: 626513 - DNA, 138 bp, Homo sapiens
acagtctcgcggagacgagttaaagtctgaacggctgtagagctgtgcgccaaatgaatccacatatccgtggtgacaagcccaccagaaccgtgtgggtgctgacacggagcgcatctatgatgacgactatatacc

SEQ ID NO: 626514 - DNA, 224 bp, Homo sapiens
gctcagtagacagtttcttctcccaggtctgcacccacctggacgccctaaagtagcatcgctggaggcggtaccccagctcagagccccgtcccaccccgtcctgattagaggtcctcctggactgagagcagcgcctccaccctggcctgcgtgagcacagacggaggaagccgcttatcctgtttacatagacagctgagcactaaaggaatttctaagga

SEQ ID NO: 626515 - DNA, 195 bp, Homo sapiens
cccaactgagatccgatgagctcctgggaagccctgctgctgctggagacggccactgctccctgagtgtcccgtctcctgagggctcctgctgtccccatcccggtagttctccatgctctcctggtgagacaaagcgataataaaaggaagtgtttgtaatcccagcactttgggaggccgaggtgggcggat

SEQ ID NO: 626516 - DNA, 134 bp, Homo sapiens
cacgagcgcccagtacccctgaatttaagccagctgaaatgtactccggaggaagcagagttcacaacagcatcataatgcgaggtacagtccctttaccacacgcgcctagatgacttgtgggcgctcgtgcg

SEQ ID NO: 626517 - DNA, 192 bp, Homo sapiens
gagcagaggttgtgctggttgtcggggcagaggttgtgctagggtatagaagcaggggttgtagctagttagtaggggctagaggtatgagctaggtctagtgtagtaggaggttatgcgtgcttgtcaccacaagtggttgtcctggatttctagccaagaggaggtgctctgagcttgggactgatggct

SEQ ID NO: 626518 - DNA, 509 bp, Homo sapiens
cacatgtggtacccgctggtggtagtacgatgactgtgcttacaaggcatgtggtatcatagctgctcggtacagtgacagagcgtatacagtctagttgattccagttggtggagcaggcaggatctcgaagtaatctggtacgacttctgcacgatctcaagcctaacacagctatatcagcaatgtgttgagtgccaggcgcacaacaacgcgcagtgcatttgcatctatcttaggcagaagagtcctctcaacatccgaactatacagattcagcaaatgatgctaccaacaggggtggtgtttctatcttttactttcccaaagcagagtcctcccaccacaaacgtgggatccgtgcacgttaacgattactaggactatgcagaaaacctttgaagattatttgcaacttctgtttgttcaccgaactgtgatgatctagagtggatacagtttgtgcctgttcagagcaggtatcatatgacgatgcttttatgacttta

SEQ ID NO: 626519 - DNA, 772 bp, Homo sapiens
ggcttctcccctgatgcagagaccgcaccacagaaatgcaacggctctaaagttagcttcttgcctaagaatcatcgagcgatttggtctacttcctcattggcttctattctgatatcaggctatagcttttctcgctactggtattgtatgctccctcttcgcgtcttgactacccggtcattcaggggtaactcatcacgtcttcacacagtgcgatctaaatccaagaaactaaattggctcatgtgaacattccacacatttctcttggttctcaataccctatttgaatactattgtgagggcaaaaagaggggagaaaaacaggagtgatgtcatttctttttcatgtattccaagttaaagaaacaagggcaggctcgtatacatggcatacttaactacacttagacttaatctagaacccctgtggcctttttgatgtgttttatttcttatctctttgaattcctgtttggttacttggcttccaatggaggtgaacttaacaaccatacttgaatattccgtcttgactttgtaaactgtggctacttgaaatgaagtcatctggggttgatggatgactggtagatttttgcaatgtctcaaggcaataggatgtgtattaaactgtagatattcttagtacagtaaatttatgctgataattcattttgtataatttttacctttacagttactattttttccttccactttattggtttgctcctgagctaccctccttacctcccttctccctcag

SEQ ID NO: 626520 - DNA, 254 bp, Homo sapiens
aaggctttagaacacataattttcaaagactaaatctagaacccatagtagacatcagtgctcagagttagcataatttggcgctatgcaggaattgccgataaatgcgttttcacagacatcaagatgtaatctatgtatactatatcacttagacaactgtgtttcatttgctgtaatcagtttttaaacggtcagattggaacggccccattaggagtccatagcaagcatagaaattgtcaatttccaaa

SEQ ID NO: 626521 - DNA, 218 bp, Homo sapiens
aaatacgaacttgagtaatcagcatgatcttccacctccctgacacatggctgtttccgaactcaattacgcatttaaaggaccaacatttgttatgaccctaagtagttcaaaagaacatcccccaggctccgggctgactccgaaagaggaatcccacaaacgctcggcacagtgacatttccggaagccggggagagcctccccccggtgagtac

SEQ ID NO: 626522 - DNA, 428 bp, Homo sapiens
acaaaggcgctgatgaatctggcgtcggtttttacgaccacatctcctatccgttgaacatgtactgcttttacgcgagggcgtgttacgtcgggccgaggctcacggatttcccgacgccccgtatcatgatgacgtcgagccttccgctgctagaccgtgtattaagcggtaaggagaagggcgtatccattcatagaatccaagtcttgtttccaacagatacctgctccccattagagggggactacgacatcggacgcgtgatgcgagtgacgcgtcttaaggcttccgggcggggcaagccgagatatctagtcgaaagcacgtcgggagtgatactggaaggcgatgtaaacgtgctgtgggctacatacgagagaacagtcctgttcgattactacccaaggtcgttagctggcgaagat

SEQ ID NO: 626523 - DNA, 786 bp, Homo sapiens
gggtgaggccccgggaatgaaaaacccatatgtaataatcgaattcatttaacatgaatcttgagtacgtggaccattgcttgcatgttaacttctggtttgttgggtatgtatgttttgcatttttaagtccagatatcctaaagctcaatgtttggtctctggttttcatccttagagaagccatggagaacagacttgaaaagtttaggaaatcatagatgtggcagaggtggtgggaagaagaaagttgagctttttccccttgtagtaaacttctgcatttagtgttctatctttccatgggcaaaacacaatgtggttattcttgttcatacaaccattttcaaatgaaccttagaaaagtcttaacattttaaggtatttctatgctcagagatacacttagattgagtaggaaagaactcgtaatggagtttgagtaaagaaaatgactgatgtactaaacccagtaaaaccttgtggacagatgtttacaggtcaggatgttctaaattgggaatctagagtatagctttagattttcctatggggcttagagtatttgctataacaaatggaagtgggatgaccaattataatatttcctactgcggtcgtacctggactgggttcgttctcttaaatatactcagtaatgagctcaagctctgggtattaaaataacctagatggcgttttaattgccagagccaaattatctggggttcctggcccttttaaggggcgttaattcaccttttgggggaccctgttttttcgggg

SEQ ID NO: 626524 - DNA, 109 bp, Homo sapiens
gtggcctcgagcctcccaatgtaggtgggattacatggcatatgccaccacaccgtgtctaatttttgtgtattttacagtacgggactggggtttcactcattgttgg

SEQ ID NO: 626525 - DNA, 848 bp, Homo sapiens
  misc_feature (4)..(4): n is a, c, g, or t
  misc_feature (121)..(121): n is a, c, g, or t
  misc_feature (144)..(144): n is a, c, g, or t
  misc_feature (176)..(176): n is a, c, g, or t
  misc_feature (224)..(224): n is a, c, g, or t
  misc_feature (233)..(233): n is a, c, g, or t
  misc_feature (235)..(235): n is a, c, g, or t
  misc_feature (262)..(266): n is a, c, g, or t
  misc_feature (285)..(285): n is a, c, g, or t
  misc_feature (296)..(296): n is a, c, g, or t
  misc_feature (298)..(298): n is a, c, g, or t
  misc_feature (300)..(300): n is a, c, g, or t
  misc_feature (308)..(308): n is a, c, g, or t
  misc_feature (316)..(316): n is a, c, g, or t
  misc_feature (319)..(319): n is a, c, g, or t
  misc_feature (343)..(343): n is a, c, g, or t
  misc_feature (358)..(359): n is a, c, g, or t
  misc_feature (420)..(420): n is a, c, g, or t
  misc_feature (439)..(439): n is a, c, g, or t
  misc_feature (443)..(443): n is a, c, g, or t
  misc_feature (453)..(453): n is a, c, g, or t
  misc_feature (514)..(514): n is a, c, g, or t
  misc_feature (527)..(527): n is a, c, g, or t
  misc_feature (843)..(843): n is a, c, g, or t
gaantcctgatctgtttctttattaaaaccgctgggggaaacaaatgttttacgtaagtgcctacatttccagtagattgcacctggcatcaaaagctcagcttcatcttagggtcctgcntgatattacaaaagactaatttnaagtcctaggactcaaaataaacatgattttntgaataatagatatatacatcaaaaatacatctaaaaaggcattgggnagggcgatnanggggcgctatgggcgcgggtacatttnnnnncttacaggcaaaagccagngggaacatttntntncaatttcnaggaattnccnctcggggaaagtcggtcgaaagtnacctgatcatattcnnccgcttcatctccactgtccatttcaatatccatctcttctgtatcagcagctcgcgacangatgtctgccatcagtgcntctnccaatttccngcgtacttgctgtactcgctcttcctgtttcttgatgtcttcatctgtgacaataaaagcnttgccgaggggtngagatgtgttaagccaaacagcagggttctttgccacagcagcggagacttgccctgtgattggcgcagagcttgtgtgcaaagcctggcaacagcagataaaagggtctcatcattgctacctggaccaactccttgaagacctttgggtagttccatggtttttataatttgttctgttacatctgatgcactaagtccttgtagcctcttctcccagaaaagctgacgtggctgttcattcattcgttgtgggtctgatttcactttattactaggatgatttgtgactttggttaccggttgtttgaaaatngatgc

SEQ ID NO: 626526 - DNA, 182 bp, Homo sapiens
tagaggatcccggcggtattgctgagagccctcgcggtccaggccccagccaggtggccggccttgtcccgcctcatcacagaaagggaggatgggcgatgacggtggtttctatgccttctgacccatgtttcccatgtttataacttttggtcgcagctgtttaattcaatcccacgccc

SEQ ID NO: 626527 - DNA, 1365 bp, Homo sapiens
  misc_feature (536)..(536): n is a, c, g, or t
  misc_feature (690)..(690): n is a, c, g, or t
  misc_feature (757)..(757): n is a, c, g, or t
  misc_feature (763)..(764): n is a, c, g, or t
  misc_feature (770)..(770): n is a, c, g, or t
  misc_feature (772)..(773): n is a, c, g, or t
  misc_feature (792)..(792): n is a, c, g, or t
  misc_feature (799)..(799): n is a, c, g, or t
  misc_feature (803)..(804): n is a, c, g, or t
  misc_feature (814)..(815): n is a, c, g, or t
cttagattgcacgaggtcgggatgtcagaaggcttcagcaactgttcgagtcgtagagtaagcaagcaccttaagtagctgtgttcaatgtagtgagacagacttgtcacttcgcgcttcgccgatcgtgcttcagtctcgtaaagatactacaggaaagctggtatattgtacccttaataaacatatgtctcatccgtaaacacacaaaacgagcagaaagccatagacaccataacagacgagcaaaaagaagatgagagccatagaacgtgggcgacaagaaaggcaagatcgtggacgccgagatacaggagcaccagccctccgtgctgctggagctgggggcctactgtggctactcagctgtgcgcatggcccgctgctgtcaccagggcgaggctgatcaccatcgagatcaaccccgactgtgccgcacatcacccagcggatggtgcgatttcgctggcgtgaaggacaaggtaccaacccttgtggttggagcgtccaggaatcatcccccagctgaagaagangtatgatgtggacacactggacatggtcttcctcgaccactggaaggaccggtacctgccggacacgcttctcttggaggaatgtggcctgctgcggaaggggacagtgctactggcatgacaacgtgatctgcccaggtgcgccagacttccntagcacacgtgcgcgggagcagctgctttgagtgcacacactaccaatcgttcctggaatacagggnaggtgnntggacngnnctggagaaggccatctacnaagggcnccanngcagcgaagnnagggccctgaatgccccccacgcgggcccccctctcgggctctctccacccagccgtgggtactgaagggtgccagaaatgtgcttcctgctgaaccttctggacggtccgggctgtgtccctaaaatgcaaagcaactctcggccgaggggccttgcgcccctgaccaatgcttaacttcttctggaactgccaacacttggattgggtaccttctttaaagacttccacatcatagacttcttttactaaaccaattggctaaggctaattagtgacctcttctattattacctacaatattccgtggtcgtacacgacttataaacttacgacacattccggccctcctaagcaagacgccaggacacacgcaccaacagccgacgtcgacaacacgactgtggtgcggcgccgccgcccctggaaacggcttctaccaaccagtcagggtggagggagagccccaaaaggtatgtccaccggcgccaccgcgcgtccgcagaaaccgggcgacaaacagagccggcatccccccaaaaaacgccgg

SEQ ID NO: 626528 - DNA, 361 bp, Homo sapiens
  misc_feature (31)..(31): n is a, c, g, or t
gtaagaagtggggcagcgaggagcggaaganagcatgcccttcaaaaagggtgccgcctttgagctggtcttcatagtcctggctgagcactacaaggtggtggtaaatggaaatcccttctatgagtacgggcaccggcttcccctacagatggtcacccacctgcaagtggatggggatctgcaacttcaatcaatcaacttcatcggaggccagcccctccggccccagggacccccgatgatgccaccttaccctggtcccggacattgccatcaacagctgaacagcctgcccaccatggaaggacccccaaccttcaacccgcctgtgccatatttcgggaggctgcaaggaggc

SEQ ID NO: 626529 - DNA, 1109 bp, Homo sapiens
  misc_feature (536)..(536): n is a, c, g, or t
  misc_feature (690)..(690): n is a, c, g, or t
  misc_feature (757)..(757): n is a, c, g, or t
  misc_feature (763)..(764): n is a, c, g, or t
  misc_feature (770)..(770): n is a, c, g, or t
  misc_feature (772)..(773): n is a, c, g, or t
  misc_feature (792)..(792): n is a, c, g, or t
  misc_feature (799)..(799): n is a, c, g, or t
  misc_feature (803)..(804): n is a, c, g, or t
  misc_feature (814)..(815): n is a, c, g, or t
cttagattgcacgaggtcgggatgtcagaaggcttcagcaactgttcgagtcgtagagtaagcaagcaccttaagtagctgtgttcaatgtagtgagacagacttgtcacttcgcgcttcgccgatcgtgcttcagtctcgtaaagatactacaggaaagctggtatattgtacccttaataaacatatgtctcatccgtaaacacacaaaacgagcagaaagccatagacaccataacagacgagcaaaaagaagatgagagccatagaacgtgggcgacaagaaaggcaagatcgtggacgccgagatacaggagcaccagccctccgtgctgctggagctgggggcctactgtggctactcagctgtgcgcatggcccgctgctgtcaccagggcgaggctgatcaccatcgagatcaaccccgactgtgccgcacatcacccagcggatggtgcgatttcgctggcgtgaaggacaaggtaccaacccttgtggttggagcgtccaggaatcatcccccagctgaagaagangtatgatgtggacacactggacatggtcttcctcgaccactggaaggaccggtacctgccggacacgcttctcttggaggaatgtggcctgctgcggaaggggacagtgctactggcatgacaacgtgatctgcccaggtgcgccagacttccntagcacacgtgcgcgggagcagctgctttgagtgcacacactaccaatcgttcctggaatacagggnaggtgnntggacngnnctggagaaggccatctacnaagggcnccanngcagcgaagnnagggccctgtattgtcgcgcctcccgtgacccacctgctcgagggcgtcttctcatcgccatgtccgtgcgtatcgtgcaatggttgaccacgacgctgcgtcgcgtgcctgaacctgtactagcgagcgtgcctggggtcgtgatgtcgcatacatagtagcagaaatgccaaacgaaccgttcgagcgcagtagggtccatgtcagccccttgtacccatgcgtaaaacacgtcatccttgagagcatgcgaaaacgaacttcgtggatgtggttgcgtttattgttacacg

SEQ ID NO: 626530 - DNA, 475 bp, Homo sapiens
cagactggtctcacactcctgatctcaaatgatccacccccctcagcctcccaaagtgctgggattagaggcgtgagccagggtgccctgcccttgcttcctgtttgtaccttcccaggatcatgggtgctgactcctgacctcccatctctgccctccaggtggtggtaaatggaaatcccttctatgagtacgggcaccggcttcccctacagatggtcacccacctgcaagtggatggggatctgcaacttcaatcaatcaacttcatcggaggccagcccctccggccccaggtgtgaggggtcccatcccttcttgcgtcctttctttctaaattcagttccacattcatttttttctttttttctttttttcttttttttttgagacggagtctcactctgtcgcccaagattgcgccactgcactccagcctgggcgaaagagcgagactccatctcaaaaaaaaaaa

SEQ ID NO: 626531 - DNA, 470 bp, Homo sapiens
  misc_feature (440)..(440): n is a, c, g, or t
  misc_feature (467)..(467): n is a, c, g, or t
ggcctattttgggttctttaggagggggattaacagatatttagaggaggatgacggtagtgggaagggatctagaagctatcttctggtgaagaatggtttttgtaaggatcgattagacaatgaatgtaagatcctaaaatagtacccagtagtttttgcattgtaaacaaagcagttaatcctgttttggggattgtactttagttggtacctttatagattaaaacctttgagatctaatcctttaatatgtatatatttttcattttcatagttcttttttgctttaaaattaaaaattgagccaggcaagttggcatatgtctatagtcttagctactcaagaggctgaggcagaagaattgcttgagcgcaggagtttgaggctgtagtgtgctatgaacaggcctggcaatagcaactacactgtagtctgngtagcatagtaagactccttctcttanaaa

SEQ ID NO: 626532 - DNA, 299 bp, Homo sapiens
cccgggcacatcgtggagcgtgacgagtagtacggtggctgtaacttggtaatcctttttataactgttggctgtgtgttcttgtactgctggagacccacctgcaagtggatggggatctgcaacttcaatcaatcaacttcatcggaggccagcccctccggccccagggacccccgatgatgccaccttaccctggtcccggacattgccatcaacagctgaacagcctgcccaccatggaaggacccccaaccttcaacccgcctgtgccatatttcgggaggctgcaaggaggc

SEQ ID NO: 626533 - DNA, 1331 bp, Homo sapiens
tgagtgccagtgaggagtgtggagtaggcgcccagtgcatcgtgcagacagtgacgacatcagctgtgggacgatggtgcctgagctaggtgctggaaagaagggggagccaggcattcatccctggtcacttcttgtgttacatggactgtgtgcagcttggtttgtgactgaggggatgcttggtgaggcatgtgtgtttgatccacagtggacctgtgttgcaactggagtgttgtatgctagtgcagctagctggtgctagtgttgatgtgaaccccaatcgttggcctgtggtgccagtgttgatgttcccggttccgcttccagccatgtgaccttctgcgtatcccacatgacgctatccttgacagagacacgtgacgtgttatacgtggggactccgacagtgtgcattgtgctgcgtggacagaacggcaggaacaaccgcttcccatgcacagacgtgtggcacgtgactgggtggcacgggcatgaacgtttatggcacgaaatgtgttgaccattcatatcatctggtgtgcgcgtgatgccctgagagaacgttgcgtctagacgtggcttgcgcgtgtgtgtataattgtgtgccgctggttcacaggctgccacgggaaaaatggaaggcaaaacaggactggggggccaacgcggcattgtgcggcatgcgaccaaggtgggcggctagtgggacgccaaagaccggttaacggtagtaccccaaaggacaaaccacggattggcgcggccgtatggcggataaccccacaccgaggtggcagcattagggagtgttccgacagaaaacaacaggagcgaagccacattaggcgacacatgcgcgagtgggaacacacacacactaggggaaccaatggaaagcagagagatacccaccccaaggagcacgtaggacgccagagcagttacaagaccagcaaaccagggcagaatatacaagtatcgtaaacgtaaacgcgacaacagagggcaaacccaaaggggggcggcacagggcacattcgcggcgccaacccggggcgattataccgtcaacgggccgcccgatacgtgcgcgcggggcacacgcccattcaggaaggcggtgcggtgggcacgtgaaagaccgggggcgtacagcggaacagaaggtggcccaacggaggccacatccgcagcgagagaacggcaacaacggccacacatcaacgggaacaactgtgtccaaaccccaagccgacaggtgcgtagccgagactacaccggagcgaccacaacagcgcagcaacgcggcgacgcgcagcacaccaaca

SEQ ID NO: 626534 - DNA, 163 bp, Homo sapiens
ggtgcatgatgtggaaaagtgtggtaagctctgcttgtgttcttagattcattcatactgtgaaaagtctgccatgaaggagactgtggacatgctctcgcacatcagttatttctgcagatgtctttcagaacaaaggagcttccatgtaccacgtctcaaa

SEQ ID NO: 626535 - DNA, 156 bp, Homo sapiens
ctagcaggagctatatacaccacctggctcccaatcttatttgttacaagtcctgcttcagggttacttccctggcactgctgctccctcccagcatttgcaggactgtcattgccttagttattttttctgtttgtttttttttggtggtggtat

SEQ ID NO: 626536 - DNA, 558 bp, Homo sapiens
gagcgggtggagggaccgttggggcgggaggcggcggcggtggaggcgcgcgctgcgggcagtgagtgtggagtgacgcggacgcgcggcggagctggaactgctgcagctgactgccggcgtccggaggaaccttgatcaccgtgctccggcagggggccgggactcgccatgcgctgaccagctgactgaggagccagattgcagagttccaggaggccttctccctctttgacaaggatggaagcatggcaactatagaccagcaaggaagtggggacagcgatgagatcactgggacagaacccccactgaagcaggacgctgcacggactcatgatcaatcgaggtggctgaacgatgggaacgggaccatagacttccacggaagtacctgaccgatgattgggcagaaagatgaaggtacacagacagatgaggaggagatcaagagagggaggtaccagggatcatttgaaaaaggaatggtaaatggataaaataagagacaaaagagaaaggatcaagtaatgacgaaactgagggagaagatgaacg

SEQ ID NO: 626537 - DNA, 957 bp, Homo sapiens
ggctgagcgtttttgcagactaccatcttccctgcaactctgaaggatggaatttaatgcaccaccatgtcgagcaacaagaacaaatgaccaagatcaatgaagcgccctcagggtgcaacatccaagtgtgtaggcattatgtagactcagttcactagcattactagcggcatgttcaatagaggccttcaacatgacttgatcagatacagagatggcttatcatcgacaagggaagaattggcatggatttggttgcttaatatggggaaaaaaaattccacatgtgatgagtctctgagatgccatgatgcatgaggcctccagtccccaatcaaatttctaaccattgtgcctcaccatgtagggtgagaaagttaacttggggtacaagatcctgaaagatgtcatcaagaaaatgcctttgttgtggttgagatgaaagatagcagctggaagccatagaggaagattacttgagaacagcttgatgataagcatgggggatcggtgtaacagatgagggaagtggtatgagcttgttacgggagaatgcccctattgatagtaacaggggaattgcaattagatcgaagtaacagacgcatcgtgaaaaattgatgccagagacgaagatgagtggagatacacttgtaaatccaggccagagggtactgtggcactggggaatcgagaatttcccgtgcatgccattggcttacagggttgcggttccgaggtattaatctcaggcaatggggtagtattttttataaatagacgggagacggagttgattagtatggtcaggaaataaatgggaatatccaccagcgttcccaaaaaggttaagggagaattcgagaagagcgacaagtgacctataaatgagcaacagtggcatcttcacgcgggggtcctccaagagacacaagttgttacatcctctatggt

SEQ ID NO: 626538 - DNA, 301 bp, Homo sapiens
cagtggaactttatttttgaaagtttatgtaaaggccggttgccgtagctcacacctataatcccagcactttgggaggcagaagtgggcagattgcttgaacccaggagttaagcatcctgggcaacatggtgaaaccctgtctctaccaaaaatacaaaaatgagctaggcatgatggcctgtgcctgtagtcccagctactcgggaggattgcttgagcccagtaagtcgaggctgcagtgagccatgattgcaccactgagctccagcctgtgcgacagagtgaaactgtctcaaga

SEQ ID NO: 626539 - DNA, 1122 bp, Homo sapiens
  misc_feature (276)..(276): n is a, c, g, or t
agcggcggggcggaggccgcgccgggagcgcggtggggctaggcgtggggcgctcccggcatgtacctgtaccgcagcgtccgtgtggcttcgcccaaggggctgcgccgagctaccaccaaggagtggcctatgaatctgcgatgtccagactttgtccctcatgcacgttggcaggtccagcattcctggacagtagtctcttcccggtcactgcgaaggaacaccacgccggcattggcacatgcaacgttgcccctttgaaatcggcccaangctgatggtggcgacaagttgcgaccttgggttggttcggcagatgcaaagcactcctagctaggaaggatcgcctaggggtcgagatcatcgcgtggacgatgctggtcaacgcacgaacgattgttttcttgcgactatttgttgcgacattgtgcctgattcccagaggctaaagtcgtggacagactctatggtcagcaatccactttgtcacaaggcatgtgcaaatcatgaaccttcccaatggttacctgcatctagataaatgtcagcgatttggcgatgggcttcaaagtagaagagcaagaggcgtgcacagtgagagactggtaccgtctgagaaagcaaaaccttgagcctgcctagattagcttcttggggtagtgtaccacttactcagcggaaccaggcacgtgatctcacctgttcgctgggaggcaataggaaactaccgagccccccggaatgctgagtaatcgcagtcgtaccctccagagtagggaaattgttccgggttcactgataaacctcgaaatcaacgcacattgtagtcctccaagtccccgaaagatgaaaccaccgattttgtgattgggaaacttaatggttcttaatggcaacgaaaataccacaagggagggcctggccacgttggggttcctgaccggcatcgcgattgggccccaaaggggccaccgcggtcctatcccaatttttcttttccatggcagttcctgggcctggggccgaacgacccccagggtgttgaagcgcagggcggaatgccggggggttccgagcggccagggttccgggggacccggcctgcgtctccgaaggccc

SEQ ID NO: 626540 - DNA, 149 bp, Homo sapiens
gcgtgatccgctgcttggctccaaagtgctggaattataggcatgagcactgtgccagctgatagggaactaagttctttcggtgcattggttatcttttgctgcattaactgactatggaaaaatagtggctaaatatatctgtcatc

SEQ ID NO: 626541 - DNA, 200 bp, Homo sapiens
  misc_feature (45)..(45): n is a, c, g, or t
  misc_feature (65)..(65): n is a, c, g, or t
  misc_feature (72)..(72): n is a, c, g, or t
  misc_feature (110)..(110): n is a, c, g, or t
gcaattcgtggcacgagccaggcgtccgggacgtcctctccggcnttttgccctgctctgcctgncctgggnttaagaggctggtgccgttcaaaccgttcgcttatccnggctttttgaccacgctatgcttcaaggccattgaggtggaccagcttggccattgatacctaccacgagttttatgaaacctatatccc

SEQ ID NO: 626542 - DNA, 212 bp, Homo sapiens
tggaccgccgtcacgccacgatttcgcgctgattggcgctaatgtccgacgccgcttgacggactccgccacggcgcaatcttcaccggcggcgacgcggtggcccacttccggcagatcgacaaacaccatatcgcccagcagttcctgcgcgtgttcggtgatgcctacggtgtaaacgccgttaccttctgaacgaacccactcgtggg

SEQ ID NO: 626543 - DNA, 336 bp, Homo sapiens
gttgctaggtgagtgatgaaatcttggtcactcactcactccgatcagctatctctgctcactctcgagtagtgggatacaggcatgaccaccagcaggtaatttgtattttagtagagatggggttctccacgttggtcaggctggtcttgaactcccgaactcaggtgatcctcctgcctcagcttcctaaagtgttgggattacaggcgtgagccactgcacctggtctttttttttttttttttttttttttttattttttttttttttttaaacccccccaagggaaagggggccccggcccaaatttgaaaattggggacaaggtttttc

SEQ ID NO: 626544 - DNA, 762 bp, Homo sapiens
  misc_feature (315)..(315): n is a, c, g, or t
ggcgtggttgcggtgtatgtgactggacgccaggggcagcctgcgcatcgcctgaaccgctgcgtgtgcgccgtggcctgccccttcccaccctcgcctctgctgtctccagcctcgctttctccgactttcctgctcctctgctgccttcgtttcttggtcctcggccgtcctcgccgcctgcccagatggatgtccccgtgccccgcaagaatgcctgttttcctgctttggccctgcatgcctgcctgctgatttctggcacaggttttctcccctctcggcttatgtctcccgaaactggcgctggctccntctgcccctgctggtgggaaagacccatgtgcttgcctgatcctgctggaaactgccgctgattccgtcctccaagggaggcccgacaaggctggatgctgcccctgtgtgggccaacgagcccccttgtgaacacatcaaccccctggggtggggcgtctttcggggcaccatggcatgctggcctttgcgctttttctggccacaggcacacagccctggtcaagcctcccttccggacccctgttagagaactgagaccgacaccgccggacagggcccccattcgactttgcgaggggctggtgcctggagaaccccggaacctggggagcccccaaggaagcccaagagacttgccaaaggaatttgcggccggacccggtgctcgcaggttcgacattgggcccgttccagaggtgttccccccgggagggatcagggtac

SEQ ID NO: 626545 - DNA, 813 bp, Homo sapiens
caggtgcaccaccacacctgtatgtcccagctacttgagaggtaaagaggggggtctcactgtgttgcccaggctggtctcgaactcctgggctcaagcggtccacctgcctccgcctcccaaagtgctgggattgcaggcatgagccactgcacccagccctgtattcttattcttcacatatttatttttacttttcactgttttaacaataataaccaaagctattgcataaacaccaaaaaacaaaaacacaaacaaaaacacaacaaacaacaataacagaagaggaggcgcgcgcccgccccccgagaggtacttctcctcgctcgagagtgctgcgccccacagaggggtcatatcaacggcgcagcgacaacacgcccagcggttgattttcatgtgatgtagcaccacaagaagcagagtagtggcggctacgccccagtaatatatagtagtagtggagcgactgtgcgtgactatatatattgtaagcaccagcaccatcgcgaggagcagcgtctgtgtggaggcacccaccagctgcgattctctactcaccaaaccatcacgcgggttatgcaggtgaagcatacaaagcgtgcggacacaacaaaaagacgctgttgagatgaatgacccgacgttgttgggggcagccacccctactgctggtgtgatgaacaagaagagggagaacacacaccaatctggtcttacaatgcactcatcaggagccggagcggtggtgtgcatcaacctaatctatctagggtcggcaccaaaaagacagtaacctctatcagaaga

SEQ ID NO: 626546 - DNA, 423 bp, Homo sapiens
gggaatctcacttgcaaccacctaaaaggagtattttcaactgaaattttacacatttgaattacaaactcaagacatgctggtcataacaaattaaatgacaaggaagtgcctgagtcaaaatgtatgggagctatgtggtatataaagctatgcggtgagctgagatccatataaagggaaggccacagaagcacccaaagcatcgtgggtcggctacagaagaagacaattttgactccctgtacaggacactatcttggtaccactcactttcctccctacaaaatctgaatattgctcacatatattcaacatatgtccaagaagcttcttatgtatgtctcctgcctcttctttccatacctcccaaatgttgatccagaacactgatcaatattaataaattaagcaaagttttga

SEQ ID NO: 626547 - DNA, 161 bp, Homo sapiens
gcccaatacctgtcgcgcgtgtgcatcaagacgacggtggacgccatgacgcgctcggtctacttccccaagcgcgccaagcgcgagttcagcttcgccatgggtggctaggtcgtcggaaaccggcgaagcctcctcgtacctgcagtactgggtcagcg

SEQ ID NO: 626548 - DNA, 959 bp, Homo sapiens
tgggggggggggggtccttatttccaaaaaaaccttgggagattttcggttatcaaaacgggggcattaatggtattctctttttcccccaatgggccccaaaaaaacccaaaaaagggggagtcacattatacaacccaaaaggcggcggggttgaccccatcacagacccccctatagaaaaccttccacaacaaagagtgggggcgggggtggggagcgaaccataaaaagaccaacaaacgggccacccccgggcagcggcagaaggtggtcaagacacagaaggggggtggccggggggccccacaaaccccaaaagccacagagttctcacacaaaataatatctataacaattattaaaagcagcttgggtgtaactaatacagccatattccaaagaagttcccaccagcaccgcgggagcgggtcaccacagcgcccccatagtgggaaagaggggcgcattctaagaagaaacagcagtgcttacaacacccccagaaacaaggggggtaaggaaaaataggagtatccaccacgtgggctaataacactcgagatgggacaacaacaccacagccgtctgtctctgtatcatctaaaatctatcacatccaggaggaggacagggaaagcagcctattatagggtggcccaccctcaacaaaagtggggggcacgaaggaccccaacgtgagacaacccagacgagggaaggcggggaaagcaaaggtggcaaccaaattgtggggccccacgaggtttttaacgactctaatggtggacactctgtggagacaactacaacacagaaatcacctctccccgaagatcctatacggcgcgacacgtgtcaaagacagtactggctgggtgggggtggaaacccggggaccctcgtgtacaatacagtccgacaggggtcccgggggtccgggcgaggcctcgagaaga

SEQ ID NO: 626549 - DNA, 353 bp, Homo sapiens
accggaaggatctgtgggcaagatagcgccactgcactccagcctggggactgcaggagacttcatctcaaaaaaaaaaaaacaacaagatatggcagatgcggcggccactctgtccccagttttagatgttttacctcattttaattctctcaaaacctcaagtttagatttcagtgctatccccatttcatgtgatgcacagagagatcaagtaattggcccaagttcaagcagcataccttggggctgagcgggagtttaaacccgggcactcagtgacagcttccacactcattaccacaatgctaagagtttggccagacaggtgagaagcacatttttgggaagag

SEQ ID NO: 626550 - DNA, 308 bp, Homo sapiens
ggggtttaataaaagggctttttccccctcggtccaaaagatcaaccggcctttctccaataagaccttaaaaggatccgtttaaaaagattgcgtaaggttagccctccccggcatttcccaaaattcgaaggaagccaaggaaccctattctttaaaaaaccttccccttccaatgttaccaggggttattaaggatgggtgggcccatagaagattttaatttggggtttctaatcggacctttctgatttttccccaaagattgtgtattacttgtataataaaaataagagctttaaattgtg

SEQ ID NO: 626551 - DNA, 739 bp, Homo sapiens
ggaaaatcacattggtgattatacagtcagagaactcattcgaactgagaagcctcatatgaatggccaatgaagtgtgacgaaaggccgtacccttaggaaggcatcacattgcaggatagcaccagcaagactcattccgggagagataccctttataagatggcagtgagatgtggaagagagccttcactcatgaatgtcatctctcagttggacacatcagagagttcaccacgtggtggatggagaaaccagtggtgaaaagtggcgtcatgaacatgttggggaaaagtcgcttatcatagtcgaggaatatctaccgaggggccttccgtgattaccaatctgggaacaggacttcgatgacacattgatgcaacattccagaacactgggattgcacattgtgaggcaccacctggatggttaccaaggagacgacgtttcgacgattaactaagtagagacgaggacttttgactaagtccaagcgatgggggacacttaaaaaagagttagcgaacgtacaagttgttctaagaaaacaatttcgaagacggacgtggagagggaagaaacgcaaagacccaagtaatcttgggtggggaacttggaccgttgggtgaaaagaagagcctcttttccagggaaagacataaatgttttagcaggaaggtgctttggtggtagggagttgacacaagtaaaggtgtgtgacagggggaatgtgtggggg

SEQ ID NO: 626552 - DNA, 284 bp, Homo sapiens
tgtaccttggctcactgcaacctctgcctccggggttcaagcaattctccctaattctccctgcctcagcctcccaagtagctgggattacaggcacctgccaccacactcgactaatttttgtatttttagtagagacacggttttgccatgttggccaggctggtctcaaattcctgacttcagttgatccgcctgcctcagcctcccaaagtgctgggattacaggcgtgacactcatcacccggcccagaacaccaaatttaaacactgtcaacacagaa

SEQ ID NO: 626553 - DNA, 263 bp, Homo sapiens
actgcgccagtcgtcgcgggatgcaaagcttcgctcgctagctgtaatatcttccacgagagagggctttctcaggacctagttgctactggttcagcaactgcgaaggatgtcctcccttatgggtacctcagttcctgccctatggcctgaagtcccagcattaatggcagcgccacatcttcgactttggtgctcccctttgcctaggccctatggcctcctgggcctctctactccccctgagtaaggtctggggatcc

SEQ ID NO: 626554 - DNA, 794 bp, Homo sapiens
  misc_feature (3)..(3): n is a, c, g, or t
  misc_feature (124)..(124): n is a, c, g, or t
  misc_feature (244)..(244): n is a, c, g, or t
  misc_feature (262)..(262): n is a, c, g, or t
  misc_feature (284)..(284): n is a, c, g, or t
  misc_feature (306)..(306): n is a, c, g, or t
  misc_feature (309)..(309): n is a, c, g, or t
  misc_feature (415)..(415): n is a, c, g, or t
  misc_feature (769)..(769): n is a, c, g, or t
aanataaacaaaaaccaaataacaggaaatcaaatacataatataatatcaacacaagaatacaaagaacacaacaaggaggaagaatgagaaaaaaggttcccagtatttagtcactagtgantccacagacattccttttagtgttttcaataggaataaaaacatgtcctgcgatggctctgcaagaatagagcagcctggaaaaggaggcaaagaaaagaaaatggacccaaagggaganaaagtgaagaagagaatncaggaaagtaatacatatgganacaaaacataagggctcccttnggngagagagaacataaccaatgaggggcaaaaaggaagaaatgagatcgtcccagatcaacctcaaaattgcacgggtagaaacaaaatagaaagtacccaatcaccnaagaagcagaacttttttcacagcattgtaataggaatggcagggcagagggaaaggaaagtagtgggagaacaacttgcttttaagataccctgggtgacaggtatcaaagccttgggcaaaacctgtcacagtaaagctgtgactctccaacttccttcacaaatgacaatatacataatagcagctttctattaaagaactacatgaactgaaaagaaatgtttatggaaaggggccagatacccaggcagcaaggcaatgaggatactaaacaagagttaagtgctttcaacctctctgctctacagatcaggttaaaaactctaaacccttcaactttaggtcaaagancagggcaaatacaaattaatgccat

SEQ ID NO: 626555 - DNA, 108 bp, Homo sapiens
tattggaacaacccctgagctacggaaagctctgctgtgatgggctaggccctttatatctgtgtgaatacagatttataaacaggttaataaacttatccaaggtca

SEQ ID NO: 626556 - DNA, 86 bp, Homo sapiens
  misc_feature (32)..(32): n is a, c, g, or t
  misc_feature (58)..(59): n is a, c, g, or t
  misc_feature (62)..(62): n is a, c, g, or t
aggcgccgggagcccgttcggttgcgggtgtntctggccctgcggtcagccctggganngtnccggtagagtttttttcctatagg

SEQ ID NO: 626557 - DNA, 102 bp, Homo sapiens
gatccgtacaatagcgtggttttccagtaaatattttcttctacggaaatggagccattattaagagtagtgtgttttttattatgtacatttgtatatttt

SEQ ID NO: 626558 - DNA, 958 bp, Homo sapiens
atcatgtcctacgtgccgagatgaacctaaacgtgttgctgctgaggcgtgtgcgtcgctgagctgcgcgagttcctgtgacaagtgcgcaggaagcaaggcaatagttatgggcatgaatacctcaacttggacccttatggcctgatatgcacagtcattccactcatttgaagtgaacatgcaatgtgtgaacaaaatgttcgacagcttaaagtgaaatcagtatatgccatggcaagcatgcatgttgcacagcacatcatcacatatttaattatttgtgtacatgcaccccaatgtgcgtaagcatggtattgcattgtgcatacatcaaatctgcgtatgcaaacagactgttgcctccatgttgcacaagcatcatggcactgcatgtgcgccgcacactgcaagcatgcatatatatccaatcatttcttgtgtatattggtatagacaccagctgacccgggtaaaaggcacatgtgatatatagtatacgactggcacaccacatggacgaggaggttataggcaggagggtggcatacgtttggggtgtgaggttcctatatagtaggagaaatccactaatataaattatacaaacaatggggtgacatgtggcatgattaacaaatggacattataaaagaatacattacccatatacccgcatatactggaaattggggggaggcattacctcctctacattaccccaatagtggaacacatccgatggaagatggtggattagaacaaataataccacaaaacaggacaggtaggaccataacacaccttagtgggaaggtgggtgttgggaaccccaatggacactgggaaggaccccattggtacaccacacagcgaacaaaggcacgaaaatggtgggtggtcttatggaattcggaatcccaccttaggacgagacagggcttacataggtaaattg

SEQ ID NO: 626559 - DNA, 151 bp, Homo sapiens
ccagcagagtagcagaaggtacatgctggataaagaaaatatgcaacaaatatagttgcttcctaatttcatttcatttgatttagtcatttaaattcatttcacattttaaaagctacgattcttacagctggttaaggaaacttaacac

SEQ ID NO: 626560 - DNA, 704 bp, Homo sapiens
  misc_feature (60)..(60): n is a, c, g, or t
  misc_feature (75)..(75): n is a, c, g, or t
  misc_feature (78)..(79): n is a, c, g, or t
  misc_feature (81)..(81): n is a, c, g, or t
  misc_feature (90)..(90): n is a, c, g, or t
  misc_feature (107)..(107): n is a, c, g, or t
  misc_feature (112)..(113): n is a, c, g, or t
  misc_feature (119)..(119): n is a, c, g, or t
  misc_feature (121)..(121): n is a, c, g, or t
  misc_feature (127)..(127): n is a, c, g, or t
  misc_feature (137)..(137): n is a, c, g, or t
  misc_feature (140)..(140): n is a, c, g, or t
  misc_feature (155)..(156): n is a, c, g, or t
  misc_feature (160)..(160): n is a, c, g, or t
  misc_feature (164)..(164): n is a, c, g, or t
  misc_feature (167)..(167): n is a, c, g, or t
  misc_feature (173)..(175): n is a, c, g, or t
  misc_feature (191)..(191): n is a, c, g, or t
  misc_feature (218)..(218): n is a, c, g, or t
  misc_feature (251)..(251): n is a, c, g, or t
  misc_feature (261)..(261): n is a, c, g, or t
  misc_feature (264)..(264): n is a, c, g, or t
  misc_feature (273)..(274): n is a, c, g, or t
  misc_feature (290)..(290): n is a, c, g, or t
  misc_feature (292)..(293): n is a, c, g, or t
  misc_feature (299)..(300): n is a, c, g, or t
  misc_feature (303)..(303): n is a, c, g, or t
  misc_feature (307)..(309): n is a, c, g, or t
  misc_feature (311)..(312): n is a, c, g, or t
  misc_feature (315)..(315): n is a, c, g, or t
  misc_feature (324)..(324): n is a, c, g, or t
  misc_feature (332)..(332): n is a, c, g, or t
  misc_feature (343)..(343): n is a, c, g, or t
  misc_feature (350)..(351): n is a, c, g, or t
  misc_feature (353)..(353): n is a, c, g, or t
  misc_feature (357)..(357): n is a, c, g, or t
  misc_feature (359)..(360): n is a, c, g, or t
  misc_feature (364)..(364): n is a, c, g, or t
  misc_feature (372)..(372): n is a, c, g, or t
  misc_feature (374)..(374): n is a, c, g, or t
  misc_feature (381)..(381): n is a, c, g, or t
  misc_feature (393)..(395): n is a, c, g, or t
  misc_feature (397)..(397): n is a, c, g, or t
  misc_feature (404)..(404): n is a, c, g, or t
  misc_feature (411)..(413): n is a, c, g, or t
  misc_feature (424)..(424): n is a, c, g, or t
  misc_feature (429)..(429): n is a, c, g, or t
  misc_feature (434)..(436): n is a, c, g, or t
  misc_feature (439)..(439): n is a, c, g, or t
  misc_feature (444)..(444): n is a, c, g, or t
  misc_feature (454)..(454): n is a, c, g, or t
  misc_feature (457)..(459): n is a, c, g, or t
  misc_feature (463)..(463): n is a, c, g, or t
  misc_feature (467)..(467): n is a, c, g, or t
  misc_feature (472)..(472): n is a, c, g, or t
  misc_feature (474)..(474): n is a, c, g, or t
  misc_feature (486)..(487): n is a, c, g, or t
  misc_feature (489)..(489): n is a, c, g, or t
  misc_feature (497)..(497): n is a, c, g, or t
  misc_feature (499)..(499): n is a, c, g, or t
  misc_feature (502)..(502): n is a, c, g, or t
  misc_feature (504)..(505): n is a, c, g, or t
  misc_feature (510)..(510): n is a, c, g, or t
  misc_feature (519)..(519): n is a, c, g, or t
  misc_feature (523)..(524): n is a, c, g, or t
  misc_feature (528)..(528): n is a, c, g, or t
  misc_feature (530)..(532): n is a, c, g, or t
  misc_feature (542)..(542): n is a, c, g, or t
  misc_feature (550)..(552): n is a, c, g, or t
  misc_feature (557)..(558): n is a, c, g, or t
  misc_feature (562)..(563): n is a, c, g, or t
  misc_feature (569)..(569): n is a, c, g, or t
  misc_feature (573)..(573): n is a, c, g, or t
  misc_feature (581)..(581): n is a, c, g, or t
  misc_feature (584)..(585): n is a, c, g, or t
  misc_feature (587)..(588): n is a, c, g, or t
  misc_feature (594)..(594): n is a, c, g, or t
  misc_feature (597)..(597): n is a, c, g, or t
  misc_feature (606)..(606): n is a, c, g, or t
  misc_feature (608)..(608): n is a, c, g, or t
  misc_feature (611)..(611): n is a, c, g, or t
  misc_feature (618)..(618): n is a, c, g, or t
  misc_feature (624)..(624): n is a, c, g, or t
  misc_feature (627)..(631): n is a, c, g, or t
  misc_feature (638)..(638): n is a, c, g, or t
  misc_feature (696)..(696): n is a, c, g, or t
ccgtccgcccactccgcggcgttcggggaaatggctgcgagaccctagaggcctgcgganttactccacgggaanagnntntagataatntgagttgttgaaaatangaagnntgttantngtgaanagtggctganaanagtgttgttgtgagnntggntgtntgnttggannnagaggtttcgtctgcnagggtttttggttgtatttaggatttnagggaaaagtgtccaagctttcagtgttggagnaggtatgganganaaaggcganncgagcaatgaggaggnanntaaggnnatnaaannnannagnaaagagttnaggaaaanatggggttttngaaggannantatngnnaagngagagggngnaggggangcggaggctgannnantggagcngaaaaannnaaagaagaagntgggnatgtnnntgnggcgnagtgggaggnagnnnaagngcantgagngngtggagcagttnntnaccattgngnggngnngcggnaggaggagnatgnntgtntnnntggaggattntggtgagnnnacgtnntgcnncgccanagangccgaganagnntnngagggnagngtggaaagngnttntgagaanagaagnggnnnnnagtatgnttaaaaagatgtgaaggaaagaaaagaatattatgaaaaggtgaaaggaggggatgancacgatga

SEQ ID NO: 626561 - DNA, 547 bp, Homo sapiens
  misc_feature (301)..(301): n is a, c, g, or t
  misc_feature (307)..(307): n is a, c, g, or t
  misc_feature (338)..(339): n is a, c, g, or t
  misc_feature (360)..(360): n is a, c, g, or t
ccccagacctaagcatactctgttaatatcatcaaagaaaaatgagaattatttatactagatacagattaaattggctaaaaactggtcagtgccaaaacaagtgtctttagtgaggccactcaagttatctcttgaaaaattattaatagaatgactgtgttaagtccaagtttaacacgttatatagttcatcaacatgcgtggatatagcccaatgcaatagaagcataacgctattcaatatacatttaatgtgctatcaacatctgtacacatagtcaaagattctgtgaactgnaaccanaaccaattcacataatatacatcatattttnnaacaaactacaaaagtatacnttgtaaaaatacactaaattaagttcatggaagtttataattactattaacaagtgaaaatagggtagtatgaatacatggtgctaatgtctttttaattatttatttttttaagaaatcctaagggaatggcggggtctctcaggaatatgtttcattggatttggagcatgtggggtaaggccgg

SEQ ID NO: 626562 - DNA, 302 bp, Homo sapiens
tgaggatccccaaccctgccacccacagctggacgagggtctgaacccagtttgtttttgttttttttgagatgcagtctcgctctgtcagccaggctggagtgcagtggcatgatctccggctcatagcaacctctgcctcccaggttcaagtgattctcctgcctcagtctcccaattagctgggactacaggcacaccccatcatgcctggctaattttttttgtatttttagcagagacggggtttcaccatgttggccaggctaggcttgaagtcccgacctcaagtgatccagcca

SEQ ID NO: 626563 - DNA, 113 bp, Homo sapiens
cctcaggaggttgaggcaggagaatcaattaagccctgaagttttaggtttctgtcaactgtgatcatgtccctgccctccagcctgagtgacagagtggtaccctgtttcca

SEQ ID NO: 626564 - DNA, 500 bp, Homo sapiens
gagccgacagcgccagactgttgcctggcgcgcattctcggcattttgcttgacggtagaggtgagtcttccatggaggacgcggtctgttccagcgagcttgcctgctcttcggtccgcgaggacaggtccatgttgccggcggcgatttcgcgcgaggcgctggcaatggcatcggtgccattgcgcacctggcctaccaggttcgccaggctgtcgcgcatttcgcgcagcgcatgcagcatgctggactggtcgccgggctttgtgtcgatggcaacggtcagatcgcctgctgcgatgcgatcggccagttccaccgcgtgggaaggttcgccgcccaactggcgtagcaggctgcgcgtgatcaggaaagcggcggccacgctcattaccagggcgatgccggccagcgccagcatcagattgcgcgtcttgccatattcgctggccgagtcgaagccgaacatgatgctttgcttgttgaccagtttggccat

SEQ ID NO: 626565 - DNA, 553 bp, Homo sapiens
accccctgagaaggacatcttcctacagtgatcacctcaccagcccagtgttgtggctttgtagcgcaccccgtatctaccatattctgggccagcctagtagcattacagtgttctagaatatggtaatgctactaggctggcccagaaaaggtttaaatgttgaattcacttaaattgcaattgttgcaccatcatggaatcgtgatgtgtattatttatattggcggtggactccaaggtgtagagaaaacttgggtcttgggtaatatggaccatttcatcctcagacttgttaggagtacatttcttggtcttgagaccagtatttttcagttatgtatgcaactgcctttattacacctggttatcacaattcaattctcaggtgttgcagaaaaatctacctctttcagactgtagatggaaataactgtgaaaaaaatgatgcagatatcttctagttgtgctaaacacactgctttatttttacagcccacgtctttcatgaggatacgaattgttaagaggcagtctcgttttgcttttcaaa

SEQ ID NO: 626566 - DNA, 364 bp, Homo sapiens
tcatgaaatgccattaaaaaaaagcccagtaaagtccatgaataaaccagatatggagatatattttctgtagttattcattagtatgtgtttatgttttggggagagctcttattggtcataaagatgtggaagtcattaatctattaacaataactgaaaccacaagaatgactggccttaccaaatgtaaagatgcaaactggaatttaaggagtccacatctttcctacaatattattagacatgtatgcttgtattccagaattgcttaattcagaatgtccctttttagcttacatgtagttctccctggtagcaactttacgctttaatagcattgattcttagatttccatttgtt

SEQ ID NO: 626567 - DNA, 440 bp, Homo sapiens
agaaattatttgcaatctatccattggataagtagggattaatagctagaatatatgaggaactcaaacaacccaacaacaataacaaaaatctgattgaaaaatgagccagtgacctaagtgaacatttctcaaaagcagacattcaaatggcctgcagctgtacgaaaaaaatgctcaacatcaccaatcattagagaagtgcagatcaaaacccacagtgagataacttctcatcacagttaatgtggctattatccaaagaaagttataacagatactggcaaggatgcagagaaaggagaactctcatgtcaatgttggtgggaatgtaaattagtgtagccattatggaaggcaatatagaggttcctctaaaactaaaaatagaactactgtataatacagcagtcccactgctgggtatttgggtatgttgc

SEQ ID NO: 626568 - DNA, 1496 bp, Homo sapiens
gggaccctgaactccgggaaggctcgagaatggacacccagggcacatagatggctcaacactcagcaaaccgagacagcgtccgatgagtcagcagcagaagcattctgtgaatctcctcgtgtgtgcgaggcttggagaaggggagtgctgagcaatggaggaggcggtgggcgtcagggccatggccgtctggagcagcccgtgcataacctgcctgactcgtgatggcaccgtccaccgcctgtccacagacagagggacggctggtgacctggacgcgcctgtagacaagacagtgaacgagggcaagcagcgtggcagcgtccagagccatgcagcccaacaggggcaacaaagaagaaagatacgagaaaaacagagaaaaagaaaaaagcgaaacaataagaaactagcacagatcacgaggaacgaagacacaagacaataaacaggagccaagacaacagaaaacaacaccatagcagaaaaacagaaaaaaaaaacagcgcacaacacagccaagaacaatagccatagaccaaaacgaagaacagaaaatagacacaccagcaaacgagccaacataacaacaccgaaaaatgagaaacacaggcacgcaatcaaatccgagaaccccacaaagaggacaaagagcaacctgacaactccaacaaaaagaacatgaccaacaggaacaaaggatgcaaacgagacgaattcaacccccagcaggatcactaacactcacgcagcaacaaagcgaccaccaaaaacaccttccatgacacacgccacacggaccacaccatggacacaaccagagccgccaacccaaccaaactcacaatgagaccaacaagcgagcacacccgaactacacataaaccataaagacacaacatgcagaccacgacaacagaccacaaaaccttcgaactcaaactccacacaatttaagaacaaacgcaaatcgatccaaacacaagacaaaaccataaaaacacaatacataatatagacaacacaaatcatcacatatcccaaacacctacacgtaaatacaaacaccaataccatgttaacgcacaccataccataaatatacaaacaatcaataaaacactaataaacaaacaccaacatgaacaactactccataacatcacacaaatcaacaaaaaagaacaagacaactaccatacacccaaacataacaactcaaataactacactaaacaaattgacacacctacaacaaacattgaaccaacaaaaacaaacaacaaaccaaaaaaatcacaaacccaaaaaataccaaataaaacatacacccacaagcccatccaaataaaccataaccaaataatcctcacaactacaaaaaaaacaaaataatcaaaaaacacgcactcacaacaaccaccacatctaacatctaccacgaccacgaccatctaaatacacatagtaaacataaaaaaaatacactacta

SEQ ID NO: 626569 - DNA, 310 bp, Homo sapiens
tccactaagatacaggcaccgggatagcgtatttccacaagtaaatgtctcgggacatttaggactgtcatagctgattactagcactcacgaagctctaggggtagaagtcacagggtttaccagttgtatctactacaactttgctagcacagttataggagatctctttccaacttctgcagacttttgggtctgcaggggcctaattttcatgaggtcagccagcacagactggtccgacaatgtagaagaggcggtgtgcaatacagtttccatcgcgtgagtactgttatcacctgtattagag

SEQ ID NO: 626570 - DNA, 826 bp, Homo sapiens
  misc_feature (384)..(384): n is a, c, g, or t
  misc_feature (403)..(403): n is a, c, g, or t
  misc_feature (406)..(406): n is a, c, g, or t
  misc_feature (410)..(410): n is a, c, g, or t
  misc_feature (414)..(414): n is a, c, g, or t
  misc_feature (418)..(419): n is a, c, g, or t
  misc_feature (422)..(422): n is a, c, g, or t
  misc_feature (425)..(425): n is a, c, g, or t
  misc_feature (429)..(429): n is a, c, g, or t
  misc_feature (433)..(433): n is a, c, g, or t
  misc_feature (436)..(436): n is a, c, g, or t
  misc_feature (450)..(452): n is a, c, g, or t
  misc_feature (460)..(460): n is a, c, g, or t
  misc_feature (462)..(462): n is a, c, g, or t
  misc_feature (466)..(466): n is a, c, g, or t
  misc_feature (468)..(468): n is a, c, g, or t
  misc_feature (470)..(470): n is a, c, g, or t
  misc_feature (476)..(476): n is a, c, g, or t
  misc_feature (478)..(479): n is a, c, g, or t
  misc_feature (482)..(482): n is a, c, g, or t
  misc_feature (487)..(487): n is a, c, g, or t
  misc_feature (521)..(521): n is a, c, g, or t
  misc_feature (580)..(580): n is a, c, g, or t
  misc_feature (599)..(599): n is a, c, g, or t
  misc_feature (612)..(612): n is a, c, g, or t
  misc_feature (638)..(638): n is a, c, g, or t
  misc_feature (641)..(641): n is a, c, g, or t
  misc_feature (648)..(648): n is a, c, g, or t
  misc_feature (652)..(652): n is a, c, g, or t
  misc_feature (666)..(666): n is a, c, g, or t
  misc_feature (668)..(668): n is a, c, g, or t
gcctggccatctacccgccctgcggccggcggaagatcatcctgtcagacgagggcaagatgtacggccgaaatgagttgattgcacgctatattaaactgaggacggggaagactcggacgagaaaacaggtgtccagccacatacaggttctagctcggaagaaggtgcgggagtaccaggttggcatcaaggccatgaacctggaccaggtctccaaggacaaagcccttcagagcatggcgtccatgtcctctgcccagatcgtctctgccagtgtcctgcagaacaagttcagcccaccttcccctctgccccaggccgtcttctccacttcctcgcggttctggagcagcccccctctcctgggacagcagcctggancctctcaggacatcaagcnctntgcncagncagnntanccntatngagnccncctgctgccgacgnnncagcagtnantgangncngctggncnncgntcccnctcagctgctgcctctgtgcctgtgtggcaggancgtaccattgcctcctcccggctgcggctcctggagtattcagccttcatggaggtgcngcgagacctgacacgtacngcaaacacctgtngtgcacatcggccagacgaaccccgnctnctcaganccanccctggaggcagtngntgtgcgccagatctatgacaaattccccgagaacaagggaggattgaaggagctctatgagaaggggccccatactgcatctccttgcaacgcactggcccgacctcacagaacacccaggaacggccccggaaccccaaacagaaacacccacacac

SEQ ID NO: 626571 - DNA, 170 bp, Homo sapiens
gatgcgaacatagtaccctgcagcctccaactcctagcctcaagtgatcctcctgtctcaacctcccaagtaggattacaagcatgcgccgacgatgcccagaatccagaactttgtctatccctctccccaacaacctagatgtgaaaacagaataaacttcccccaga

SEQ ID NO: 626572 - DNA, 383 bp, Homo sapiens
  misc_feature (6)..(7): n is a, c, g, or t
catatnncagagtgtatgtgaagagtataaaaagttagttgtggataatctgcttcagtgttattaaggtagagacgggttgtgaaaaaagccggataaagtattcagggaatgagtgtataaggagtatctaaatgattacgataatcagtgcttaagattgaaatctctcatgagatgactcaagatcagaaattactttggatgttggtagagttggcaaaatgacatatctatatctgcttggtcaggtttcactatctaatgtctattagtaaattaattatttttacaactagaaattcaactaagtatttaaaagctaaggatataggaagaattacagactgatagagaagatgggagaaaagaaagaacagaat

SEQ ID NO: 626573 - DNA, 166 bp, Homo sapiens
  misc_feature (25)..(25): n is a, c, g, or t
  misc_feature (31)..(31): n is a, c, g, or t
  misc_feature (33)..(34): n is a, c, g, or t
  misc_feature (37)..(37): n is a, c, g, or t
  misc_feature (39)..(41): n is a, c, g, or t
  misc_feature (57)..(57): n is a, c, g, or t
agggctcgggccgtagtaaggtcanctgctngnnagnannngatttagtgtagggcngaaggaggagctccagaagagcttaaacatcctgactgccttccagaagaaggggccgaggaagaggagcttaaaaaggctgtcatgtgattttgccagatctagtgta

SEQ ID NO: 626574 - DNA, 415 bp, Homo sapiens
caatatgcccccagaattcaaggacctttccattgtaagagaaaccaaacccctgcaaaagaagtgtgccgactatcaaataaatggtgaattcatctgcaaatgtggccaggcttggggaccaataatggtgcccaaaggcttagatttgccttgtctcaaaataaggaattttgtagtggttttcaaaaataattcaccaaagaaccaatccaaaaagtgggtagaattccctatcccatttcccatttttgcctattcagaatgctgtttattaagtaataaggataagcccttgattgaaaattcttttaaaaaacaaccagttaaccatttaaaaggataaggataaatgtattccataatgctacagaactgacataagaatcaataaaatgattgttttactctgaaa

SEQ ID NO: 626575 - DNA, 628 bp, Homo sapiens
  misc_feature (320)..(320): n is a, c, g, or t
  misc_feature (351)..(351): n is a, c, g, or t
  misc_feature (396)..(396): n is a, c, g, or t
gcgagtagtaggccgcgcgcgcgcgcgcgtgagagagaacagcaccactcgccgcagcgcgcgcgagagagcgcgcgcgctcgtcgtcgtatgaagagagagagagatagtatgtgtgtgtgcgcgcgcgcgcgtgcgcgctcagctgctgagaggccacacagtgcctccgcgcgagtgcgcgcccaccaccctgcttgctcgccctctctctctctccccctcttctctctgtggccccctctctctctctctctctctctctctctctcgccactctgctgctgtgtgagagacgaccacctgctctctgctgtggnccgcgcgtgtgggcgctttgtgtgcggcccnccccccacgcgcaccccgctgagacgctgagacaaagagcacacncctcccggagcccccggagaccttgaccccacccacccgcccaccacccccacctccccccccccgaccacaccccccgggtgttggagattttgttttcccccccagacaccacacaaagggtttttatagaacccccccccccccacacgaaatgagaccccccccgacgcgaaaccctaagagagagggggtcttgtccccccacaaaaaaaacacccctgccccggga

SEQ ID NO: 626576 - DNA, 106 bp, Homo sapiens
  misc_feature (13)..(13): n is a, c, g, or t
acccagccgcggntgaatggcgaaggcgaacaggaaacgatacaggcgcgacagcttgtcggcgaggggatcgcctgaacagattccacaccagctgggcgaacag

SEQ ID NO: 626577 - DNA, 1797 bp, Homo sapiens
  misc_feature (421)..(421): n is a, c, g, or t
  misc_feature (1797)..(1797): n is a, c, g, or t
ccatgtcattcggacttagcttctagatcttggagttcggctgtcccttttattcaataaaatgagaaacgacatctaatcgtaagaaagcaacacaatatgtaagcatatgacaagagcatcatgatgctttgcacatgacacgtattcatggatcataggcgacgagcgtgcgattgttagacctgttagttaccaggggctcttgaatgtagatgtgcctgaggcagttgtcctacttgaccagagacgggagtcaaacaaaccctaggttgctgcaagttctggaccgtgctctaggtcagttggcctttcgcagagacagtccccagaagcggctgtagcgcatacacaagattttgtacacgttcacctgtgtattcgtagcaattgctgcatttgggcgacactagggataatnatctgctagagtgcttgttctaggcctatggtcgtgaacggaaggtaggtgaacagggcgagatactatggacgcactacaaacccggactctatggataaattcaatcggtaactcttcgagctttccggtgtagcgcctcgttagtgcttagacagacggtgaccatccacccacgtggtggcacagccgcataatagcggtgtccccaaatgggccacatatgccgatagcacgacacgacagttgaaccacaaacacgaccataagcatccggaacgtggattgcacaccgctcaaccgcatggggtgccaacctgcacttgggaagtggatacccattctcaacaacagggcacacccctttacggagcaatatgccacgcggttccccataattgggcggcggttttaaccgggggcccaccttcccacttaacgaacacagagactgtggatttgaggccacgaggtaactttgccgagcaaaacacacactactcaccacacgcggcgccccaacagacacacttgtgcaaaccgggccaccttcgcatgtcgaatccaagtacaggtcctatggctacaccccgccaactatagaccagtggggggggacgcccacaccagattagggcttatcaccttcgaacgcgacacagtttataaccttcccaagatcgcgtgtgtggtcgcttgtgtggcatataacaacgagaagcacggttcgagatgtaaccccgcttgcctctatgtacagcgacaacacagcgcgcacaccagcacacacacttactagcgacgaacgcacctttccggacagcccacggcacagagcccgccacgtgcgcctggggcgaatgacaacaaagggatttctaggttcctagataggtcaacccccgtgcttgtcgcaaaatacaacaaccgccatagtgtccactatcattatgacgccgaagagaaagtactatatgcatatgctgaggaacagaaggcgccagattgccccccagcggtggacccgggcaaccgttggcctagtatgcgtgctgggaccgaacaatatcaccccctggcgaggcaacaacgatcggataataggcctaccccactaaccacccatcattttgaacagggacagtgcctataccggtcaaaaaggcacccaacaacacattttgaaaacgcacatggtgttagaaatgtacaagcagctcatacaccacacaacacggcatgcaacattagtatcagggcgctatctcggtaaccacacgacccaaactatttagcacgagacatcctatgaagaagaagacacgcatatagaccgatacacgagaagccgacaaatactcatctcacgggacggn

SEQ ID NO: 626578 - DNA, 175 bp, Homo sapiens
tctagaggaccccatcaggcgacagagtgtgcacagagggccacgacaggtctgcgcgtgtgtgtggatgatcagcttgtactcctccgcctctggcatattgtgaggtaggacactgagggcgcgcaggtctcttccggcttcagcatggacctgaccacagtcttcgcctgat

SEQ ID NO: 626579 - DNA, 153 bp, Homo sapiens
ttatactccacaaacagaaagactaaggattaaaactggaattcataggaaaatataaatgacctgagtcttaactttaattaactgttagcaaatactggccgggtatggtggctcacgcctgtaaccccagctgtttgtggaggtagcact

SEQ ID NO: 626580 - DNA, 198 bp, Homo sapiens
atgtcattttaatcccatgagaaggggtgttcaaagattgtcgcgaagttcactgttaaagtgagctgaatagtcatcaataattctggagaataggcagatatgccagtgatgaagaacaaaagaattcagccttttttttttttttttttttaaaggtttttaaccccttttttttgggaaccagtatttcaaccg

SEQ ID NO: 626581 - DNA, 178 bp, Homo sapiens
ggttgatctcacagctcgctcgcaagcaggcgggtaggtgggtccaacagtcactgtcaccccacacttcttccatccatgtcgtctcactttcttggccgggtgggcaggcccccacacgggccatcttgcagggtcacgcagctcgcaattcgtcaatccatggtccatcagcgtg

SEQ ID NO: 626582 - DNA, 328 bp, Homo sapiens
ggtcaggttggcgaaatctttggctcactgcaacccttcggcctcccagaattcacttcctttcctcagactttcccggggtaagctaggggacttcaagggggttcaaccaaccacggcccaagcttgattttttgttattttttgagtggggagggagggggtttcaaatcaccctagtttgggccgggatagtgtctcaaatctctatcaaccccaaagatcttttaccaccccgaaacctgcccaaaaggcttggggattacaagaagggtgagaacaatttccccccacaaaatctactattattattaaaaattgtcaaaaa

SEQ ID NO: 626583 - DNA, 135 bp, Homo sapiens
agccccttcagatgtccctcagacttccatctgatgaccctttttacaatgtcaggcttctgttgatattcaatatactctgactttccttggatatcagcattggctgcaaatcttgcttggattggaaacctc

SEQ ID NO: 626584 - DNA, 937 bp, Homo sapiens
gaggagctttggctatctgcaggcagcgccagggcagtagggtgtggcatggacgtagagcaagattaatgcgagctcatatcctgtgttcttcgtctcgccggcgcggaccatcataggttccttcaatgtttgccttaatctgctgttgcctgtcccaggacctgggctccacctgtcttcaatctaagtcttagaagaagggccaacttgtggctccgtgtacacgcatgtgtctgaggtcttcttagatacgatgtcttgtcattggtagcgctgtgggcagtaagatcctgtataacgacatatgccgacgatgtgggattgcgaggagaattccctactcatgttcctaccgatggaagactgcctaaatgatctgtgggtcaggtctaagagctgtggtgccttgcacgtccagtcatcctagggatatggagaatctaggatggtggttgcaggatgccatggaaacaatatgatgctaataggttcgttctactaggtctatactatggagtagtcaggagtatagatgataggtgataatgggcatgtattgacagtaatatctctgtggatggtcttggcaggatgcattttagaacctgtcatatgggttttacggttgaaaatgtaggctgatttggcatgtgatgtgtggtcactgatcactgactaggtctggccggttcggtccctataatccggatccgagagatgcccttgataaggcgtggtcatattggtgtaacgagatggtgccacttttggggttaaccgcacaaggaggcctatggggtttcacagcctgatttttcttcccagggagctctaaaaccctgtccgtctaagcttattctctcgctggacggaaagtacccctcaaggtccgatttgaggtggcctcttaaacccatcggagggacttacaatg

SEQ ID NO: 626585 - DNA, 323 bp, Homo sapiens
cttctcctgctttatttggctatcttggcaaaacccctccctggttaaattcactccaaacatacacccctgcagctgaatatggctggaggaaataaaccatactgaccaatctcactttaaatttataaccacagaggccgggcacagtagctcacgcctgtaatcccagcactttgggaggccaaggcgggcagatcacctgagaggtcaggagtttgagaccagcctggccaacaaggtgaaaccccgtctctactaaaaatacaaaaattagttgggcatggtggcgcacgcctgtaatcccagctactgggaggctg

SEQ ID NO: 626586 - DNA, 787 bp, Homo sapiens
ttttctgttgcattgtgtgtaccaggtggtctagaggaataattaaacattttagaactattaacaggtaaagtactgaaatgggtacaacttacggaaaacaagaatgtcgtcttctaactctgacattataccttgtttgtacccgccagcgggaagcttcatggctggccgtgtgtcaccctgaccacgtctatctctgggggtcgcacgttgctgggcagagcgcagggatacaccagaaaacgctgtcctgtggtatggtctcttccaagcttcatgtaccagtcgtaaagattaggagtggaaaacttcagactttggcttgtcattgtttaatctgtgttcggagagttaagtgtctgaaactttaacttaaatggtttttttacaggagttaaagtacgtagatgcctttttacagcttaatcatttggtcttctgttgagtgtgtatttcaagtgtggagcctcatttgaagtgttcattctttgaagatttaatgctttgttttgtcttttaatagctaatagtgaaatctacaaacaaaaaagaattctacatctgggatttgattgacgtgatcatatggcccgatcaatttatgttcttgtaataaacttcttagaaatgtggcgtcgggataagcatttgactgggtgatagagaatgtgctaggagaacttgagttagatagttgacttggaatgggaagggtggttccagatctgcgaggaaatgagtatgggatgggacccaggggttttgttcaagtttcccaaatgtt

SEQ ID NO: 626587 - DNA, 1049 bp, Homo sapiens
gagacgttcttcgccgaagagtcgtcggggtttcctgcttcaacagtgcttggacgtgaacccgtgcgcatcgttccccagaccgggcggacagcccatagccagcccatcacgtcatctcgttcaccgcaccctcaggacagccccaaggtccccggtcgccgctccgagctgaccgcgcatgagcaggcagcccagccggcccggcacatccgtcctccttatagttcaggccgaccagtgaagcgactcgcggtccaacactccgcaagggtgcggcccagcaagctacacacacagggaactccagagggcggccatcaaatgcggacagcatgcaaagcgtggtaagtctctcacggccgtaccctttcgggtcataccctggttcgcgatggtgctatatcctatctttgtggacccgcgaattgagtaggtggctgtgcgaaagcaactttggtcccttaattaccgtttcctttcacacgacatgctccgtgaagggcagtaggggaaacatttgctgtgagaaagacttgaatgaaaggtcgtgtgaaaactaaagagaggttggggcaggaatttttgccggtgtcagggattagtcaagagaaaacacacgagacgtgatgaatggaggagtgggaagaaggagggggtactgaaatggcaattggtgcaggtggctgccccttcaccatttctgggaacaacaaactggtgcaaattcaggtcaacttacttgggaacctggcaggcatacttgggagcccattggacgccaatacttgaaaccccccaattcagtggtgcaccttccatctggagaaacacctgtcggctggcactgagggcagtggttgatgcagccgactctgacaggacatgtggcgagtggacccacgttgaacccaggctatggcggcacgtgactggggaagcacgccgccgacaggcgatgggcgttgagcggacaaataaatctccgttggaaagcggcccgcaccgcctgtggaagaacagaggattaactgcggcagtcctacagc

SEQ ID NO: 626588 - DNA, 361 bp, Homo sapiens
  misc_feature (309)..(309): n is a, c, g, or t
  misc_feature (320)..(320): n is a, c, g, or t
cccagtctaggatatgtctttattagtagcgtgatacaccctaatatcaaagccagatcaaaaaaactacaagcagctgggtgcagtggctcatgcctgcaatcccagcactttggaaggccaaggtgggcagattgcttgaggccaggagttcaagaccagcatggccaacatggtgaaactccatctctgctaaagataacggaaattgaccgagtatggtggcgtgcacctgaaatctcaactactgaggaggctggggcaggagaatcgcctgagcccgggaggcaggggttgcagtgagccagngatggtgccanctgcactcacaccctgggcgatagagcgagactctgtctca

SEQ ID NO: 626589 - DNA, 648 bp, Homo sapiens
ggccctgaaaatttacgggttcgtcgtgagaactggcatcgtgccgaagcgtcagcgtcagctcgtggcggggggacccacaggggtgcgatgagcacgtcgacgtagttctggtcactgtgtgactcttagtgtcgtgggtgaagatgagagctcgtcgctgtgtcgcccacagggctggaactgtattgccgcgatctctcgactcactgtgaatccttcttcctcccggcgcttaagagcgcattctccatggcctcacgcctctagagtaggcttgagattacatggcatgcatccaacacgcccggctaatttaatgtgatttccagtagagacggggtttcgcgcactattggaccagcagtggtctcgaactcattacctcaggtgatccaccagcctcggtctcccgaagtgctgggattgcaggcgtcatgcaacgctgtgcggccgaatttgggtctgtactaaatgcttgcttgtaaaaggggttcctctgttcccttttagggactctcagatttctttggctcagaatggaaagaaaccagagtctgatttctgccccttctgaactctactacttttaaaacgaaagaatatctacattgcagggtcagttaaaaaaattttttgagttataag

SEQ ID NO: 626590 - DNA, 130 bp, Homo sapiens
tgtggagacgggttccttggatggtgcatgggcgagagcacacgggaacaagggaggggaatggtgttcttatccctgatgcaggtaccccctactgcggtgtctgttcccctatgggctaggtgtggga

SEQ ID NO: 626591 - DNA, 470 bp, Homo sapiens
  misc_feature (7)..(7): n is a, c, g, or t
  misc_feature (76)..(77): n is a, c, g, or t
  misc_feature (134)..(134): n is a, c, g, or t
  misc_feature (465)..(465): n is a, c, g, or t
  misc_feature (468)..(469): n is a, c, g, or t
cccggtnagaatatgtttggcctgcctttcctctcctaagcctacagagagaagttaaattgtttggtcccctccnnctttgaatgcattttgcctgtgtcaggagtagtttgcggaagaaaatcctgatcctnggtagacagtgattccaggctttgggggttcccccctagctgctttcccctacaggtggctacacaacagggtgctgacagattgctgcagagtcacctgcttgacccctccctgagtgatggcgacccacagccggcctttctacttctgtgaggcataaaataatttttcggaacagcattattctagctgagatataaaattataataaaaatgtatgaaattttagaatgggaactgtgaaaactagacacttagatgttctagctagactaaattgaatatgttggctatagctgctgctgaattatttggaaattatcaactgcntcnna

SEQ ID NO: 626592 - DNA, 390 bp, Homo sapiens
  misc_feature (381)..(381): n is a, c, g, or t
  misc_feature (386)..(386): n is a, c, g, or t
tggctgctcttagagataatagatgacaaatgtttcctattcagatcttcaaaaggtgttagacttttagttaatccgtttaggattgggagggcctggaagaaaaacatctagctatgttaatagatgttctttacagatgcacattttaccccacaaaggatagcttttgggggaaaatgctgtcctttatggaagaaattgcaaaatagggcaaggaaacatgttttggggtaaaatattttgactttctttttgtcacgtaatgttatgccagagtcagaatgggaaagtaagtcatcatatatagggattaaataaaaccccatctggatgaggatttatgggtttgtagggtcctgactcccccaggtccccttngggtngggg

SEQ ID NO: 626593 - DNA, 347 bp, Homo sapiens
cagctccagaggatcccccaacgctgctcacaggagagtgtgtgtgtgagagtgtatatgagagtgtgtgagtgtgagagagtgtgtgtgagacgagtgtgtgcatgtgagtgtaagagagtgtgagagtgtgagagaatgtgtgtgagtgtgcatgtagtgtgtgtaagagagtgtgtgagagtgtgtgtgagactgtgagagagtatgtatatgagagtgtgtgagtgcgtgtgagagagagtgtgtgtgagtgtgtgagagagtatgtgagagtgtgtgagcgtgtgagagtgtgtgtgagactgtgagagagtatgtatatgagagtgtgtgagcagcgttgg

SEQ ID NO: 626594 - DNA, 451 bp, Homo sapiens
gggaaggtggaggttgcagtgagccaagattgcgtcattgcactccagcctgggcaacaagagtgaaactccatctcaaaaaaaaaaaaaaaaagaaaaaggaaaaaaaaaaccttagcctttgaatagttggacaaatatttattttatctccatctacaggccctttgtttattttttatttataggatgggcctaaaacccgactatatttctccctagtgttgtaggtacattttgttggcctgtgatgggctctttaaggtctttaccccagaagaagccgtgaacttcatctagtcctgtctcgaggtgagaaaactcacacgggggtggtgggtgcaccaatcgtgtcataattttgagagaagtagaattttttggaccacaattactcccattgagggacaaccaatgggcgctttatcaaagggaattatgccaacagatt

SEQ ID NO: 626595 - DNA, 302 bp, Homo sapiens
tgggcagactaagccaattatccagaaaaagctaaaactacaaagaagattgtgctaaggcttagtgcattaagcccagaccaaccgcagatctaagagaatgctagctatcaaaagatgcaagcattttgaactggaaggtggtaagaagagacacggccaagtaatacggttctaagtgtctttttttttttttttttttttttttttttttttttgagacgagtctcgctctgttgcccaggctggagggcagtggcaatctcggctcactgcagcctctacttcccagggagcactaa

SEQ ID NO: 626596 - DNA, 120 bp, Homo sapiens
aggatggcatagtaatagggcacggacgctcctagttagtaggggcggatcggactattataccctagccaaccccttacacacccctccccacatcacgcccgaatgatatttcctatt

SEQ ID NO: 626597 - DNA, 112 bp, Homo sapiens
gatgatgttctaaaagatggcagctttgagaaaacacatcttgtgaaagtgttaaaacccctgcttctctaaggcctaaattaggctgctccaaccagctttacagggaatg

SEQ ID NO: 626598 - DNA, 475 bp, Homo sapiens
  misc_feature (146)..(146): n is a, c, g, or t
  misc_feature (239)..(239): n is a, c, g, or t
  misc_feature (262)..(262): n is a, c, g, or t
  misc_feature (273)..(273): n is a, c, g, or t
  misc_feature (314)..(314): n is a, c, g, or t
  misc_feature (317)..(317): n is a, c, g, or t
  misc_feature (331)..(331): n is a, c, g, or t
  misc_feature (344)..(344): n is a, c, g, or t
  misc_feature (352)..(352): n is a, c, g, or t
  misc_feature (355)..(355): n is a, c, g, or t
  misc_feature (362)..(362): n is a, c, g, or t
  misc_feature (375)..(375): n is a, c, g, or t
gggaaaccattcctcgactcagtatccagatgtcaaccatgccaaggtgaaattgcaaggaaaggaagttggtgtttatgaagctctgaaagatgacagctggctcaagggagaatttgtcacgactgtgcagcagcgtggcgctntgtccatcaaggctcggaaaactatccagtgccatgtctgctgcaaaagccatctgtgaccacgtcagggacatctggtttggaaccccagangagaagtttgtggccatgggtgntaaccccgatngcaactcctatggtggtcctgatgatctgctccactcattnccnggttgtaatccagnattaagacctggnaagtttgntgnaagtccncctaattaatganttctcacgtgagaagatggatcttactgcaaaggaactgacagaagaaaaagaaagtgcttttgaatttctttcctctgcctgactagacaatgatgttc

SEQ ID NO: 626599 - DNA, 592 bp, Homo sapiens
tccaaaaacgatgcagtcacagtcaactaacactgagcttgctgggcatctcctgaacagaaatgtatgtggtggtccatgtagcatgtatgcgatataattggccacccacctttccttttcacattaacatttatcacagaaacacattcatttgctacagggatatttcacaatttggctgaactttgagagaagtgggtgaggaaaaggtagtttcgtaactagtttatatataaacctaaattgtagtgagtactcttgtaagtggagcatcttttctatggtaattataaatggctgttagcccctttgcactaaagctaggtgggtggttttgccacagaggtaaattatctttcgggcggtataaccaaacaaataaaatataaagtgagattcagggcatgttctgaatacagcagttaattaggcagctaagaaaactgtattttagcccctctatgtgattggtatttttttaaattaaacaaatggaaaataatatttttaacaggttatgatatgtcagtcatttaatcctcacagtaactctgtggggtaggtaggtactgtttctatctcattttac

SEQ ID NO: 626600 - DNA, 508 bp, Homo sapiens
gctccagcaggataggtgaacgcatcacaggttcgtatctcggatcaaagtaagtagcgagtcacgatggcggagcacagtcccgtcatcgtgcggactggagcagaaggatggaatgtgctggggtgcgcagaagcccatagcaagtagcttcagcgggaaacctgttctcaatccggttccggtgacacccaccgcgaaaagaattttgcacagtgtccatggaactctagattaagagaaatactttgtcttgtggacccctgcacacgtggtcgtccacactacacttggcagccaggcagacttgtggggaactttgttctattcctccagcaaggcatcgtcgcagagccgtcccagtgtgtagaaagtggttggcggttgcccgtcgcagcccccggtacaggcaacgtggcgggagctctggcgtgtacgctgtcgtagtgagtaacggacgaaggtagggcccggcaggggtccgtagatctagggagcaggacgacag

SEQ ID NO: 626601 - DNA, 397 bp, Homo sapiens
caggtggggttggcccaaagcagttccccagcttgtcctttcaggtcctttggacactttcccccccacaaataaccctgggcctttacaggttccacacccccatccccccctaggaaaggacatcggactggaggtcaggggcctaggattcaagtcccagctttgccgacagctaccagtgtatttttgggcaagtccctgaacctctttgggtcctgattcccttacctgtaaaaaagtgataatcataaggccctctgcattgctttaaggatcaaaataaagcttgtgaaagttttccctggactttaaagtgtgattaatatatattttttatcctggaatttcctatttcctttgagtcctgttaaataaaccataatgtgaatggtta

SEQ ID NO: 626602 - DNA, 837 bp, Homo sapiens
  misc_feature (95)..(95): n is a, c, g, or t
  misc_feature (461)..(461): n is a, c, g, or t
gctgtaatcccagcatttgggaggctgaggtgggaggatcacttgagcccaggaatggagacccgcctgagcaacatagtgagacttcctctctncaaaaaataaacaaaattagtggggtgttctggcacgtgcctgtagtcccaactactcgggagactgaggtgagaggataacttgtacccaggaggtcaaggctggagttagccaggatagtgccactgcattccagcctgggaaacatagcgacactctgtctccaaacaaaataaaaaataaaatgtcattaatcaatttgcatttttgctgacagtctagttataatagctgttttaccgttcccataccccacttcactattaatcagtgttacttatagacatgtaatgaaatcagaaaccaagctctgcttctctaacagccttaaatcttcatcacaaaattaagcaaacagaacagcnagtatttcaagacatactatatcattttccttactaggaatctggattttatgtatataaatttatatttgtatttcatttcctcacttttttctgtttgcaaaaaacattacaggtgtgagccaccgcacccggccattttttctttaaaaaatactaaatacactttgttagagggctgagcgcagtgagactttgggagaccaaggtgggagaatcacttgagaccaggagttaaagaccagactggccgggcatgatggctcatgcctgtaatcccagcactttggggagggccaaggcaggcagatcacgaggtcagagatggagaccatcctgggcaacatgggaaaccctgtctcaactaaaaatacca

SEQ ID NO: 626603 - DNA, 182 bp, Homo sapiens
ataggatcccctgttctgctatgtgggtgtgtgtgtgggtgtgtctgtgctgtctaatgtctgcctatgtgtctcgtgatgtgtgggtgtgtctgtatatcaatgtctgcctaatttgctatcctgcattctcgcccccgcccagggctcttgagtgcagggggtaccgagactcgcaattc

SEQ ID NO: 626604 - DNA, 673 bp, Homo sapiens
agagtatgaactttgtctcccctcaaagaaacccaggttagcagttgctccccatttcttctacctgtagccacgaatctactttctgtctctatggatttgtctattctggacatttcatataagtggagtcatacaagatacggccttttgtgtccgacctctttcatttagcataacgttttcaagtgccagccgtgttgtcacatctatcagtatttcgttcttttttattgccaaacatcctattctaaggatatatcctgtttgtttatccagtcataagttgatggagcttatgatggttttcactttttggcttttaagaataatgcagttatgaacattcatgtacgagttttagtgtggacatcatatgtttacatttttcttgggtatgtacctaggagaattgttgaattaacgtggtaactctatgtttaactccctgaggtgctgtcacactgctttccacagtagctgtaccattttacatgcccaccagcaatgtatggaggttataatacctacacatcctcaccgacacctgttattgtctgtctgtcttttgacagccattttagtgagtgaaacgggatgtttagtaggttggatttgcattttcttattactatgatgttagtggttcaatgctataggtattgatatctct

SEQ ID NO: 626605 - DNA, 258 bp, Homo sapiens
  misc_feature (51)..(51): n is a, c, g, or t
ctccccaggatgaggaattgcttgaacctgggaggtggaggttgccgtgancccagatcaacccactgcactcccgcctgggccaccgagcgagactctgtctgaaaaaaaaaaaaaaagaaaaaaaggaatttacatagttgaacaactattctttggacatcttttagtccagtagacggtgttaaacttgaagacaataacgattgacctgtgatatttgtttttccctcttatctctaagcccatgtcaatcca

SEQ ID NO: 626606 - DNA, 192 bp, Homo sapiens
  misc_feature (71)..(71): n is a, c, g, or t
gaaaaagtagtgcaaatatttagggtaggagggtgagaaagcaaagaagtcgcacaaatattgtggttttntagttgaacaactattctttggacatcttttagtccagtagacggtgttaaacttgaagacaataacgattgacctgtgatatttgtttttccctcttatctctaagcccatgtcaatcca

SEQ ID NO: 626607 - DNA, 872 bp, Homo sapiens
ggtgagccatctcaccagccccacgagagcttctttaaatggggagttctgagggagtgtgatggtccacatatgtaaccccaggactagggaagcaaagaatggatccttgagcagccaaagccagttgaggctacagacagaaccttatctcaaaacaagaactaattggggaaactcaactccagtgtgttggtgaccatttatagctctagtacccagctgaaccaggttaaggtccaggccagcacatgtggttatgtttcagaacaccaaaaataagtaaatgtattgcaaagtccagcagggatttccttataatctactgctatctagtgttttcatggtactttttatcaatataccctccaacttctgtagtgaacagagcacactaaagatgtgatggctgggttatggcgctgtaggcctctagtcccaggtgtttagaaggctgaggcaggaggactgctaggctcagaggtcaagagggcgtatgatcctgcataactggagtcacagaatgttgtgagtgtccatatggatgcgtaaatataggtgtttaaagatcagctagtgcactgcacctctgagccgtttctccagctccatcataggatttttgattagtgaattacagatagataaaaacttactattgagggtaatgagttgctgtggtgggtaagggggaaggggaaggaggggtgggatggaggcggggtctttggatcggcgggttctcgggaaaaggggggttaaatcacaaaatttggcgggtctgactgagaggggagaaagggaggatgacaatgtgatgcctttagaagggaaaaaggggggtagaaaaatggcggaacaaagggaccagt

SEQ ID NO: 626608 - DNA, 243 bp, Homo sapiens
aactggtccggtacacacgacatagtgcaatcataaagagtatgcgactaacgaacttatcatggacatttacagggctacggtcgcaaacctcctggatgcgttataatcatgtgaagcccatgaaccccatgcactcagctcaaaatatgcctatttatatttaccctcagtttcttatacctctgcacacacacacacaatatatatatatacacatatcccagctgaaatactttcaat

SEQ ID NO: 626609 - DNA, 92 bp, Homo sapiens
gtcttgtgtgttatggggagagggtcagaaatagacttaaagcattaaatgcttttttaagaaaaagttttgatgtgtcatcctccatagtt

SEQ ID NO: 626610 - DNA, 948 bp, Homo sapiens
  misc_feature (1)..(1): n is a, c, g, or t
  misc_feature (3)..(3): n is a, c, g, or t
  misc_feature (6)..(6): n is a, c, g, or t
  misc_feature (11)..(11): n is a, c, g, or t
  misc_feature (15)..(15): n is a, c, g, or t
  misc_feature (21)..(21): n is a, c, g, or t
  misc_feature (25)..(25): n is a, c, g, or t
  misc_feature (27)..(27): n is a, c, g, or t
  misc_feature (30)..(30): n is a, c, g, or t
  misc_feature (32)..(33): n is a, c, g, or t
  misc_feature (36)..(36): n is a, c, g, or t
  misc_feature (44)..(44): n is a, c, g, or t
  misc_feature (48)..(48): n is a, c, g, or t
  misc_feature (66)..(66): n is a, c, g, or t
  misc_feature (69)..(69): n is a, c, g, or t
  misc_feature (73)..(73): n is a, c, g, or t
  misc_feature (75)..(75): n is a, c, g, or t
  misc_feature (77)..(77): n is a, c, g, or t
  misc_feature (81)..(81): n is a, c, g, or t
  misc_feature (85)..(85): n is a, c, g, or t
  misc_feature (87)..(87): n is a, c, g, or t
  misc_feature (91)..(92): n is a, c, g, or t
  misc_feature (96)..(96): n is a, c, g, or t
  misc_feature (98)..(98): n is a, c, g, or t
  misc_feature (100)..(100): n is a, c, g, or t
  misc_feature (104)..(104): n is a, c, g, or t
  misc_feature (120)..(120): n is a, c, g, or t
  misc_feature (123)..(123): n is a, c, g, or t
  misc_feature (125)..(125): n is a, c, g, or t
  misc_feature (133)..(133): n is a, c, g, or t
  misc_feature (135)..(135): n is a, c, g, or t
  misc_feature (137)..(137): n is a, c, g, or t
  misc_feature (141)..(142): n is a, c, g, or t
  misc_feature (144)..(144): n is a, c, g, or t
  misc_feature (150)..(150): n is a, c, g, or t
  misc_feature (164)..(164): n is a, c, g, or t
  misc_feature (172)..(172): n is a, c, g, or t
  misc_feature (184)..(184): n is a, c, g, or t
  misc_feature (188)..(188): n is a, c, g, or t
  misc_feature (194)..(194): n is a, c, g, or t
  misc_feature (200)..(200): n is a, c, g, or t
  misc_feature (202)..(202): n is a, c, g, or t
  misc_feature (204)..(204): n is a, c, g, or t
  misc_feature (228)..(228): n is a, c, g, or t
  misc_feature (230)..(230): n is a, c, g, or t
  misc_feature (232)..(232): n is a, c, g, or t
  misc_feature (234)..(234): n is a, c, g, or t
  misc_feature (244)..(244): n is a, c, g, or t
  misc_feature (248)..(248): n is a, c, g, or t
  misc_feature (251)..(251): n is a, c, g, or t
  misc_feature (254)..(254): n is a, c, g, or t
  misc_feature (262)..(262): n is a, c, g, or t
  misc_feature (276)..(276): n is a, c, g, or t
  misc_feature (284)..(284): n is a, c, g, or t
  misc_feature (286)..(286): n is a, c, g, or t
  misc_feature (293)..(293): n is a, c, g, or t
  misc_feature (303)..(303): n is a, c, g, or t
  misc_feature (305)..(305): n is a, c, g, or t
  misc_feature (307)..(307): n is a, c, g, or t
  misc_feature (314)..(315): n is a, c, g, or t
  misc_feature (320)..(320): n is a, c, g, or t
  misc_feature (324)..(324): n is a, c, g, or t
  misc_feature (329)..(329): n is a, c, g, or t
  misc_feature (340)..(340): n is a, c, g, or t
  misc_feature (342)..(342): n is a, c, g, or t
  misc_feature (364)..(364): n is a, c, g, or t
  misc_feature (371)..(371): n is a, c, g, or t
  misc_feature (373)..(373): n is a, c, g, or t
  misc_feature (376)..(376): n is a, c, g, or t
  misc_feature (381)..(381): n is a, c, g, or t
  misc_feature (411)..(411): n is a, c, g, or t
  misc_feature (419)..(419): n is a, c, g, or t
  misc_feature (421)..(421): n is a, c, g, or t
  misc_feature (431)..(431): n is a, c, g, or t
  misc_feature (447)..(448): n is a, c, g, or t
  misc_feature (452)..(452): n is a, c, g, or t
  misc_feature (464)..(464): n is a, c, g, or t
  misc_feature (467)..(467): n is a, c, g, or t
  misc_feature (469)..(469): n is a, c, g, or t
  misc_feature (473)..(473): n is a, c, g, or t
  misc_feature (475)..(475): n is a, c, g, or t
  misc_feature (487)..(487): n is a, c, g, or t
  misc_feature (497)..(497): n is a, c, g, or t
  misc_feature (506)..(506): n is a, c, g, or t
  misc_feature (558)..(558): n is a, c, g, or t
  misc_feature (564)..(564): n is a, c, g, or t
  misc_feature (651)..(651): n is a, c, g, or t
  misc_feature (710)..(710): n is a, c, g, or t
  misc_feature (732)..(732): n is a, c, g, or t
  misc_feature (836)..(836): n is a, c, g, or t
  misc_feature (887)..(887): n is a, c, g, or t
  misc_feature (943)..(943): n is a, c, g, or t
nanggntttcntttnaatggnaatnanttnannaanttgaaacnaaanaaaaaagcagtaaaaaancanaaantnanaagnaaananaaannaaanangnaaanttctgttcaaaaaggncanangtgcaggnanangaannanaagcgngcatctaggattanggccaaantgttttaaaaangcanaaaagnaaaaananancttgaaaaaaagaagagaggggcnanananttcaaaaaanaaangtngcntaaaccanagaagtatgaaaancacgggantnaagtganaagcagtaanancncaaaaannaaaantggncaaanaaaaagggaananttttgcatttcactgaaaaaanattgacnanaanaaaangaaaacaagcaggaacccagggaaaaaaantacaaaancnaaagccaaanacttaaaatttcttannaccnaaacaacagcanganantaananaaaactgcaccngcatttcaantgccaaacncacgttaattaagttccccaaaaaagaaatgcaaccaaaacgggttcaaacnccaaangaaagtctgcaaggctcagattaaaacatggaatgtttcagatgaaagtaataaaaacactattggttttgttctttattgaatggnataaaatgttgacatttctttgaaacttggaactactaaatttcatttttccaaatggntctacatttttttcttagtggngcaagttgtcttaagtagcttaggaagtcaatctctacaaagtacttctgtctgttgccattctgataaaacaaaaactattcattaacttaaccatatgtgtnttttttttgctataacacttaacacatgaacagacatctattatttctccnctaaaacaaaagagtacaatagttttcttctaactatcagtattgtatttaaaaanggtaa

SEQ ID NO: 626611 - DNA, 155 bp, Homo sapiens
  misc_feature (6)..(6): n is a, c, g, or t
  misc_feature (48)..(49): n is a, c, g, or t
  misc_feature (71)..(71): n is a, c, g, or t
  misc_feature (76)..(77): n is a, c, g, or t
aaaatntacatgatcaaaaggctttgttgccatgtaaagcatagtttnnaggttacatcagtgattttatnttctnncatttcaaatgaaatgttgaaagcacaaacaagcgccatcaatgtaacaagcaaggcagcacatatacatctgcaagt

SEQ ID NO: 626612 - DNA, 375 bp, Homo sapiens
ggtactatgctcagtgcggcactggggcgtggcgatggctataccagcgccgcatatggcgccagagggacgtggtggcccatgcagagggcgtgacatagacgccgtaccgcgtacgaaaccatggcggtggtcagtgcgccgggtgccgcgggcgccaaggtttcggggtaccccggactgacgctcgacagtcgcggcaatagcctgtggtgccgtaccctgcggccttttgagctgatcgaggtggccatcgacccgattggcagtacgctggatgtcgaactcaacgagaccaggcaaacaagtcgccccacgcgctggcgccgtggatagcaatcttaagtaacaacactaatcagggccgagaggtga

SEQ ID NO: 626613 - DNA, 674 bp, Homo sapiens
cacgagtgccagggtgggaaggagtctaaagagacgaaggtagtgggagagggatctgagatcgaagctgtgagcactgtgcgcgggtatagagtgacagttatgcacgaaaggtgacgtagaaagcgtatagtgtgatgggggtaagtggggagacgagtcgaggatcgggactgggggaaacgagcggtgtcatatggccaggaatgtggagagctgagagacagcgagaggagggcgaggtgtgacgggctaggctcggtccgtataggcaaaggggagatgatgggttacgggaaaagggcgaaaccgggggcatggtatcgtcatcaagtgtaagtcaattacagggaggatgagcgatgggtgccatagaggaggcacaatgggcgccctgcggctagagagtaggtagcacgaaagagggcacgtagatatagatgtgagcacacgaagggggatatcagagggtgtggggagggataggatgtgcttcaggcaggttgcgcaagtaggcaggagtgcaggaactgtcgggctttgagtgagactaagcaagtgatatgaaaccactctagataagtgctgtgccgctgcagatcctcatgaatgctatggcaaagtgttcgatgtatctaaacctcgtgtgaaagagcctcagaatttaatcaaac

SEQ ID NO: 626614 - DNA, 146 bp, Homo sapiens
  misc_feature (18)..(18): n is a, c, g, or t
  misc_feature (28)..(28): n is a, c, g, or t
  misc_feature (76)..(76): n is a, c, g, or t
  misc_feature (138)..(138): n is a, c, g, or t
cctttttgagggagcagnccctatgggnactcgtattggtaccccagaaacattcaggaaagcaaccattagcctncctgacccctctccccgcttccccagcagctaggatgaaggcaaaatattccttcacaggtnatttgatc

SEQ ID NO: 626615 - DNA, 127 bp, Homo sapiens
  misc_feature (29)..(29): n is a, c, g, or t
gatatttcctttgatttcgtggactttgnagatggatcacctctctcattcagatgaaattctttggagagacttttctttccggagtggggattttcatcaaaataaaaatctattcagcactttg

SEQ ID NO: 626616 - DNA, 488 bp, Homo sapiens
tgctgctgtaagtagaatctagaggatccctctggctctattcagggacaggatggagcagttggccactcggaggctagctcctgcaaggctgtgcccggagaggggacaaaaaagtaaagttgggtgtttactgggagtccactctagcttgggtttcttctaaatatgtccttccaatgacctgtagcctaatcaagtcggcgggcaacacatcccttggctctgctcaattccaggttccagcgagagaatctcatttttctggggggaaatgtttcctgattttcgtctttaccaccacccctcagggaggctgggtaaagtccttcttctccatgatgtttagacaccaggcctcttgcggtggcagggctctctaccccttatgatggatggggtgatgtctcaaccggtttcctgtggagaagcagagcagctcgggtaaacagaagggccctctaaagatgcccatgccctaatctctg

SEQ ID NO: 626617 - DNA, 118 bp, Homo sapiens
  misc_feature (6)..(6): n is a, c, g, or t
gtctanaggatcccaggctttgtatctgctcaggtcaaaggtaagatttttgtaggagaggtaaacaatctcaaagttagagatgtacatggggatgaagaagtaagtgcacttgggc

SEQ ID NO: 626618 - DNA, 432 bp, Homo sapiens
gcctagaggacccacgtaatatgtaaccatgtgtagcatctatcagtacttcattcttttttatggctgaataatattccatggcatagatatataatcatgcacttcttagtgatggggatatgttctgagaaatgtattattaggcagtttcttcattatgcaagtgtcatggagtgtgcttacagaagcctacatggtgtagcctactgcacacctagattatatggaatagccttttgctcctaggctacaaacctgtacagcacgttgctgcactgaatactgtaggcaactggagcccactgttaagtatttgtatatctaaacatagaaaaagtacagtaaaaaacagtgatataatctcatgggaccataccatagtcatatatgtggttccttgttgactgaaacatcgttacatattacggg

SEQ ID NO: 626619 - DNA, 577 bp, Homo sapiens
gtaaaagtggctcttcgtcttagagggcgtgaaaatacaagacctgaacaaggtaaattaattttaaattctttttttgatgaagtaaaatcgattgcaaaattaagtaaagaaatgcaatcagttggtaattttttaactcttcatattgaacgtgataagaaaaaattacccaaatttacttcttcaaaacaaataaaggaattaattgattttgaaaaaactataaaggaagaagaaactaatgcctaaagcaaaaacaaaatcagcacttaaaaaaagaattaaagtaactgcttctggaaaaatcaaacacaaacatgcatatcgttctcatttagcacaaaataaatctacaaagcaaaaaagacagtcaagacacgcaacattaatgtcctcttctgattacaaaagaataaaagacttaatttaataaatttatcaatatttttaataattaaaaggagattttaccaatgagagtaaaaggtggaactgtcacaagatcaagaagaaaaaaatgattaaaattagctaaaggttattgaggacacaagtcagtaggttataaagttgc

SEQ ID NO: 626620 - DNA, 321 bp, Homo sapiens
  misc_feature (182)..(182): n is a, c, g, or t
  misc_feature (313)..(313): n is a, c, g, or t
ttttttgtttgtttgtttgtttgtttgcagagtcttgctcttgatctatctcccaggctgaagtacagtagtgtgatctcggcttgctgcaccctctacctcccaggttcaagcaattctcatacctcagcctcctgagtagctagaaccataggcacacgccaccatacctgctaactttnctatttttagcagagactggattttgccatgttggccaggctggtctcgaactcctggccgcaactggatctgcccaactcagccttccaaagtgctgggattacaggcataagccattcatgtgcggttnttcaactg

SEQ ID NO: 626621 - DNA, 350 bp, Homo sapiens
gcgccagccttacctgcagctctctctgatggaattacatgtgcatagcaccgcgcaggcccattagtcttttttttttttactgggaagtcaactgggggtcatatactcggcccccaaaaccctccgagtggctctctgtatcattgagtaaaatctcactcttgcagtggcctatgaaatccttttagctcctctcctacatcccccttactcgggtccagctacctgggcctcggggctcctcctcaaacatgcttgcgaaagcccttgaccttcaagcggttatcccttcaagcctttatacctacggagtcttgcttactgaaactctcttataactgatgcca

SEQ ID NO: 626622 - DNA, 392 bp, Homo sapiens
  misc_feature (374)..(374): n is a, c, g, or t
gcgtcgacctaggttccatttattagctgtaaaagctctggcaagatactcatcctgtatttgcctcagtttccttctctgtaaaatcaaacagcaatacctgttgcctaggtttgttatgaaggttaaagaagttattgcttgtgtagttagtgtcagatacacataataactatgcaatatatgctagctttgttattttttgaaatggagtcttgctttgtcacccagactagagtgcagtggtgcgatcctggctcactgcaacctccacgtcctgggttcaagtgattctcctgcctcagcctcctgagtagctgggattacaggcacatgccactacacctggctaattttttaatagagatgaggtntcacatgttggccaggct

SEQ ID NO: 626623 - DNA, 267 bp, Homo sapiens
  misc_feature (80)..(80): n is a, c, g, or t
  misc_feature (88)..(88): n is a, c, g, or t
tgttcaagttctggttgttggagtttttagcccagagtgacatactgaagtcagtaaataattattttataatgacacancacaactnccttgttatgaatttttcttaaatgcatatatactgtatttaagaaaaattcataacaaggcagttgtgaatttttcttaaatgcatatatactgtatttaaaattaaaatataggataccaatttaccaaaggatacatattactaattctaaggcaaaacttaaaaaaaaaacccaa

SEQ ID NO: 626624 - DNA, 1385 bp, Homo sapiens
  misc_feature (1304)..(1304): n is a, c, g, or t
agagcactcgagcatgatagtacccctatatacatactataagacagcagctatggtgaacaccctaaaagaaggaaagcttttggaagactacaaggtagccaaagttatatacactagatagacctatattccagctatagctaggggagaagcgcaggccccctataacagcgtaggctatccgtcgatagcgggccacacacgctaccggcaactagggcataacacatacgacccctactgcgcgaaccagatgacctaggaatagcctataagtatacagcggccccacaagacgctaggtagcctagtaataccataacgcagacaactacccagggaaactacatacacaagtagaccacgagaaacgaagggaagggaacacagaacaacgagcgaaggctaattcacctaggattataaatagtatatatatataccccgagacacaccagcgtatccagacctagggccaacctaggaatatcagaaccccgtggcaaatctatcacacaaagaccaagggagcagactgtacctatgtaggtaaccaagaggagagctagggtgggccaatagtataggtacactacaaactactacgaacgaactaactaattactgcgccatcaacacacaacaaaaacttctagggcccaggcgacgcaacccaaacgctattaccactgataggggacaattagggccgaacacacagcaccgggtaaacagcacgaggcacgggcaccgagagcagtaaattaccacacgggcacacaaatagaggataataacggagaactaccggcaacaggccaaaagcaacgcaacacaccgcgaaggtattgagccaaggaccccttacaggcgcaggaaacaacggagaaaggaacgctgtataacaaggggcaaggtaccccaaacagcagcggggaaataaaggcactgtccccggagagctagggatataacccacgcaagaacatatccttatccccacggcatacccgtaacacagagactacaccaagagagtaaccgggacaaaagcaaaactagtcgccaggaaacgttaaccaaagaaaggctgtggcacgaagggctacctcggggcgcgatacactcggaaacgcgggccagcagacgacggaggcgacacacagcgtcgaggagcacaacccgcggcaggacggagggaacaggaaaccacgaccgggcggccgacaacggtgcaggacaacggacaactgggcaagggtacaacaacgggagcaccaacgtccaacagcacactcccncgcacggcgaagacgaaactcgaggcagacgccaacgcacgaaacatcgcgccgaggagccaaaaccagcaggaggaaaca

SEQ ID NO: 626625 - DNA, 263 bp, Homo sapiens
gacttagaggatccctctactcgcggctgcctagtatgacaggaaggcagctaatagaaccattgaagaatcacaattccagccagacgtggtggctcacgcctgtaatccccgcattttgggaggcagaggcgggtggattgcttgaggccagaagtttgagaccagcctggccaaaaaagcaagaccctgtctcttctaaaaatataaaaaaacattagcagggaatggtgacatgcctgtagtcccagctacttgggagg

SEQ ID NO: 626626 - DNA, 684 bp, Homo sapiens
gtgaaaaggagagagatgagagacgggcctagcctcccagcctatacctttctcccatgccggatgcttcctgaccttgaacattgaactccaagttcttcagttttgggacttgcactggctctccttgctcctcagcttgtagacagcttattgtgcaaccttgcgattgtgtaagttaatacttaataaactcccctttatatatatcctattagttctgtccctctaagagaagcctgactaatacaatccccgtgttggaagcctggccctccgctgtacagagttattgaggaaggagaacagggtctggaggcagcaaacctaaggctgcacgccaacttcctagaactaaatgaaaaggaaacccctaactttccacacacctaagtaacaaaaggaccagaggctactccctttaacctttttctgtgaggcagatgggaaattggctgccctcaatgaatcaaactgattgcaggccagtctttgtttgcataaaatgtaactttgagaccctgcgtggtggctcaagcctgtgatcccagcgctttgggacggcaaggcgggtggatcacctcaggctgggagtcgaaaccgtcttgaccgcatggagaaacactgttttactaaagaaacaaaatttcccgggcatgtggggcatgcctgtaaacccagttg

SEQ ID NO: 626627 - DNA, 675 bp, Homo sapiens
gacgtgcttatttccggtcttgtcgggatgctgacgctctcttcctgtctttgtggctccggaaagagcgtttgggatgccaatcgcatgaggctgctgtgattggtgggtgttggctctatctggctgtctacgtcaagcacgcagagaaggagccagtgctttgggctccaaatcactgctgaacagatacgccgtgccaagggacagagacctgaggcttgcagtacagatgagtctagcaatgttggctcaagtgctgcattagacgtgcgaacttatctgatgattccttccctccagaagtactttggccttgtgtctgtcatgctcaatgtcatatgggtaccggcattgcctcctgttatcaagtgtcgtcccagcatcctgtggtcctgcgtcgcctctcatggctggtttctttcactcgttcacctcgtcaacccttagttacgctggcccacgcaggttgtgcccgttgtgatgggttctaccagtgcacctgtagctgtgatggagatcctggctcgacggggacgttgcctaggcgattctcccctcattgttctggactgcggcaggccttctggggtcatgttgcctttccctccattcgtgctcccccctgctatttgttggtccctcccacggctgcaggacctattgacgttccca

SEQ ID NO: 626628 - DNA, 438 bp, Homo sapiens
  misc_feature (438)..(438): n is a, c, g, or t
gggaagtttatgattatgaaataaaaactaaataacaattaaaaaaaaaaaaaaaaaaaaaaaaaaaaaaaaaaaaaaaaaaaaaaaaaaaaaaaaaaaaaaaaaaaaaaaaaaaaaaaaaaaaaaaaaaaaaaaaaaaaaaaaaaaaaaaaaaaaaaaaaaaaaaaaaaatgggggggcggttgggccaaaagattttaaaaatgaaaaaatataaggtgggggggaaaaatgggggttaatggggaaaaaggcccataaggggggggtataaaaaataaaggggggggttttaaaaaaaggggaatgggaaaaaaccggggggtaaaaaaaataaaagggttggggaaaaaaccctttttgcaaaaggggggaaaatggaaagggggcccaaaaaagggcctttaaaaaaagggggaaatccaaaagggggggtgn

SEQ ID NO: 626629 - DNA, 229 bp, Homo sapiens
tgctgatggtcgtctctcacgactccctcgaacactggccggttggaccattttggacactatacatcataagagggcctttggggtcacagcttttaatgcccatggcagctcgtagtccgggggcccctcgtcaaggagctcgcagtggtacttctgggccgtcacaggcgcgggcaggtggatggtgctcatctgcaaacacaggcgtctccgcaccagggccagc

SEQ ID NO: 626630 - DNA, 385 bp, Homo sapiens
  misc_feature (41)..(41): n is a, c, g, or t
  misc_feature (252)..(252): n is a, c, g, or t
  misc_feature (285)..(285): n is a, c, g, or t
  misc_feature (346)..(346): n is a, c, g, or t
  misc_feature (382)..(382): n is a, c, g, or t
taatgtaaaagtgtgcagatttttttttttaaataggattncactctagtgcctagactggagtgcaatggcctagtcaaggctcactgcagcctcaacctcccgtgctcaagcagtccttctgcagtctcctgagtaggtgggactaaggtcatgagccaccactcctggctaatttttaaattctttgtcaagccaacgtggtgaaacctgtctctaccaaaaatacaaaaattagccaggcacagtggnccacgcctgtaatcccagcacttttggaggccnagatgggtggatcacgaggtcaagagatcgagaccatcctggccagcatggtgaaaccccngtctctacctaaaaatacaaaaattagtgtgcgtgngtg

SEQ ID NO: 626631 - DNA, 284 bp, Homo sapiens
aggacagttgatatcgtagttgtatggtgattgtataggggatctttggctgaagagaagtgctgaatgtcaaggtcatggaattgatccatcttttatgataatgcttgtgggtggtattaagaggttcttagcgctcctaaagtcataaggacattttccctctaccggcttcatgaagttatttggtccttttcttacagtagtgacttaatattatgttatgtatggatataatttttttcactaatgagtaaatggcccgagcactggtgctcgtgccg

SEQ ID NO: 626632 - DNA, 368 bp, Homo sapiens
cataatctcagcaatagtcacatgaatcagggctgctgatgggcaacagatctataccatgacacaccctagcactcatgctggaatagtcctgcgtaacgaaggcagctcttcatatattcatgcacaagttgatgtgtgttaaaatccaagtgtcgatctaaactcaaagtggacgtcataaggttaatccatcagctgatgtgtccaatcaacattcaatcacaccccactcccatggcaggcttgtccctccatgtgcagcatagcgtcactacctgtgctacctgggcctctccaggttcatgagtatagatttcatcttgtacaattagcaggatgtaggacgtgtacaaacaaaacacgta

SEQ ID NO: 626633 - DNA, 1068 bp, Homo sapiens
  misc_feature (186)..(186): n is a, c, g, or t
ccacgcgtccggagaaacgcggggtcgcggttcctgcggatcctggcacttgtgccccagtacagccgtgcagggtcgtggcctagaagcgcctggcctggtgaccatcgtgcacgaggcgcatcgacagcttcctaagacgctgctggccatagcagaaagttgaacagaatcgcggtctcccanccacaccaagttcagcatttaccctcccattccaggagaggagagctctctgaggtgggcaggaaagaaatttgaggagatcccaatctgcacacattaacagcatcccacatacatacacacacgatccaggtagtctcgtgctagctaattgagccccttgcctttgcttcctgtggcacagagggcatttcggacctgcctcgaccgggcaccggcactcgccgtctcagaccgcatggcactacgccgccgccggcgaccacgctccccaccagggcgtgatccacatccgaactcgtggtgccccggccctggtcgcccggacgcttgtctgccatgcgccggcactgctcctggccgcgcctgccccctgcctctcactccaccgaccaacaccccaatcccaccaccaaccgcgcctgccgccccggcacggctcggaagctgacgatgcgcacgcgacgccatgcactcgcgacctgacctcacgccctcagctccaggaggcgacctcgctcacctgctccctgctacccgaccctcaccacacacacgcccgcccccaccatcgctcaggacaacaccccaccagccccgccctccctacccagcgcaccccgccggccccgccaccgcaccaggccggcacacgaaccaccccgcctccgctccccagccggcgtccgggcacccgtggccatgcccaccgcccgcgaccccctcgggccccgtacgccgcccccccccccccggcgcccccgcctgccaggcgcggccgccgccgcgcaacccgccgcccgcaccgcgccgccccaaccccgccccgagaagcacacccccgcgccgcccgccagcccgcaccccgatctggggtggcgg

SEQ ID NO: 626634 - DNA, 215 bp, Homo sapiens
atcagccgtgtaccatacatggctcagcattgagacttaggatctcatcaatgaatacctgatacctgtattgctatttatatatttaatgagattaatctataccccaggcatccaagtttttgaaactttgtgacaaggtttatagctgctttatacgtgtctggtttgcataggcgtaagctaataggttgtatcaacgatgacttcgattg

SEQ ID NO: 626635 - DNA, 2529 bp, Homo sapiens
aggccatgtaaaaattttccgtggagaagtttgattctaaagtagcttctctaaagtaggctttggtaggtaatcaacttgacagcagtctagatgtctcacaggacaggagggagtgagggaaaggggccatgattggctgctttgtggttttattttggttctttccattctccgccattcattggaggcttcgttccagacctgcctgggaaaacagcttctgagccattttggggagcagttcttcatctgaatggatggacatctgggcttccttcaagggccattgaatgggaactagaaaaccactggaaactagaaatttgagctattgggcccaccagtagcagcatgtgatactagatggttaaaatcatgaaagcagtcactatccaattagaagcagagtcacaacaactgttgggaaatgtgactcttggaggaaggtggggagggagtggccttgccagccctgtgggacgtcccctgaagtttgtaataagaccccttttccaaagggatgtgaattggagtgaaaaggaaatctttcatcttagaaaacttctggtccttaacgcagggtggtatttgggtatgtgcttggaaattgagatctcaagagtgtttgccttggagccagctccccaggaggccttttccagggacaaggcaaaagttgaaattctccatgggtagctagaaagccaatacatctagccctgctaagtcagaaaaagattatgaaaaatgttgaaatttacattcaaagcctcatttgcttatcttgctggagccaacccagtctaatagcaaaatagctgtcattgatacagaaacatcctcatttttaaatgtctgctttaccctgttactgagtttgagatgacttaaatcactgtgttgaccctcttctgaaccaaatctttagcattgatgaaaatagttattttattctttacatccttcaccccacactatggtcagggcatgaaacaccctgttgatcccttcccaggctcggcactgtctgctcactggagccggactcccaggttgtaattctaatgttgcctcatgagaacagaatggcagaaagtttagtcctgacagattcccccatagggagtaatgaggacagcatgaaacttggataggttttacccttagtccctataaggtggattttactaaggttttttaaatgatactgtcatcctcttggggtttatcagccaggttagaggagcccagtgtcctaacctctctcagatcatggcagagaaggagctgcctccagcccctttcttgctgagtctcatttgagcagttccatgtgtagacattccaagtcactgcttggtagttgctgtgggagcctgtcattggctatggccagttagttctcagctgagcttcctagggccagtgcaacagggccagaggctgctatagtgtaaattgaaataagaatagatcattgttttgtacacacacacaataaaatgtaatgatggtgctaatttcacggtataaataagcactgccaagggttgagggactggcagctcaagaaacccgggttcctgtttgggaggagattttatgtagaaaagtttgaggctttgttaaaagtggggagaaggaagatcctcagtgaagcctgcacccaaccctggagtggcccagtgcaatccagaggtggaagagatcctatatccaggtgaaggtggccattgagtttctcagggctggggccaccttgtccatagcctccgtccacgctgcctggagcaggttgttagagagctctggttgttgggtcttcctcagctcccttctgcccctctctacctcttccactcatggaagcccctctactgcttatgaagattaagggtagtattttctaaggaagtggaaagaattaaactagaaatccacaacctcggaagaagtgtttcgagtttaacatgcgctgtttctgcttatgtggttccttctctagagctgctttcccatggctttcaaaacatcaggttattgtggggcttcaggtgtaaggtcctggaagttcagcaaagtttcgtggacaagacatgggcacagagagtagaagcagaaataaatggttctatgttttcaacttccagggttggggcaggccagagcaaggcggtctcatcgaggtgggtgctacctgtgtgtgtgtagatgagtgtgctgaaggtggggagggcagcacacagcagctcatggcagagccgcctcctaggtcttggcaaagaggcaagctgacgatagacatctacctatattgttaagaaaggggtcggggggatcagccaaggtccatcattgcttttttgccgcgccccccccccccgcccccatagattgtcagctgtaagtgaaactcctagtgaaaaagaggggagccctgtgttaggagtccccataaacatgtactgtaattctttgtatatagaaaaaaaatttactgtaaagtaaagtttaactttactcata

SEQ ID NO: 626636 - DNA, 386 bp, Homo sapiens
cggcacgagggctatgtggttgaagccacatagcagtagaggggcgtgtgtgtgtgtgtgtgtgtgtgtagatgagtgtgctgaaggtggggagggcagcacacagcagctcatggcagagccgcctcctaggtcttggcaaagaggcaagctgacgatagacatctacctatattgttaagaaaggggtcggggggatcagccaaggtccatcattgcttttttgccgcgccccccccccccgcccccatagattgtcagctgtaagtgaaactcctagtgaaaaagaggggagccctgtgttaggagtccccataaacatgtactgtaattctttgtatatagaaaaaaaatttactgtaaagtaaagtttaactttactcata

SEQ ID NO: 626637 - DNA, 2374 bp, Homo sapiens
aaggggagagagcgagcgagtagattgacataagcagcgagacccgggtctgtactgtcgtgccgaggctgagccattttggggagcagttcttcatctgaatggatggacatctgggcttccttcaagggccattgaatgggaactagaaaaccactggaaactagaaatttgagctattgggcccaccagtagcagcatgtgatactagatggttaaaatcatgaaagcagtcactatccaattagaagcagagtcacaacaactgttgggaaatgtgactcttggaggaaggtggggagggagtggccttgccagccctgtgggacgtcccctgaagtttgtaataagaccccttttccaaagggatgtgaattggagtgaaaaggaaatctttcatcttagaaaacttctggtccttaacgcagggtggtatttgggtatgtgcttggaaattgagatctcaagagtgtttgccttggagccagctccccaggaggccttttccagggacaaggcaaaagttgaaattctccatgggtagctagaaagccaatacatctagccctgctaagtcagaaaaagattatgaaaaatgttgaaatttacattcaaagcctcatttgcttatcttgctggagccaacccagtctaatagcaaaatagctgtcattgatacagaaacatcctcatttttaaatgtctgctttaccctgttactgagtttgagatgacttaaatcactgtgttgaccctcttctgaaccaaatctttagcattgatgaaaatagttattttattctttacatccttcaccccacactatggtcagggcatgaaacaccctgttgatcccttcccaggctcggcactgtctgctcactggagccggactcccaggttgtaattctaatgttgcctcatgagaacagaatggcagaaagtttagtcctgacagattcccccatagggagtaatgaggacagcatgaaacttggataggttttacccttagtccctataaggtggattttactaaggttttttaaatgatactgtcatcctcttggggtttatcagccaggttagaggagcccagtgtcctaacctctctcagatcatggcagagaaggagctgcctccagcccctttcttgctgagtctcatttgagcagttccatgtgtagacattccaagtcactgcttggtagttgctgtgggagcctgtcattggctatggccagttagttctcagctgagcttcctagggccagtgcaacagggccagaggctgctatagtgtaaattgaaataagaatagatcattgttttgtacacacacacaataaaatgtaatgatggtgctaatttcacggtataaataagcactgccaagggttgagggactggcagctcaagaaacccgggttcctgtttgggaggagattttatgtagaaaagtttgaggctttgttaaaagtggggagaaggaagatcctcagtgaagcctgcacccaaccctggagtggcccagtgcaatccagaggtggaagagatcctatatccaggtgaaggtggccattgagtttctcagggctggggccaccttgtccatagcctccgtccacgctgcctggagcaggttgttagagagctctggttgttgggtcttcctcagctcccttctgcccctctctacctcttccactcatggaagcccctctactgcttatgaagattaagggtagtattttctaaggaagtggaaagaattaaactagaaatccacaacctcggaagaagtgtttcgagtttaacatgcgctgtttctgcttatgtggttccttctctagagctgctttcccatggctttcaaaacatcaggttattgtggggcttcaggtgtaaggtcctggaagttcagcaaagtttcgtggacaagacatgggcacagagagtagaagcagaaataaatggttctatgttttcaacttccagggttggggcaggccagagcaaggcggtctcatcgaggtgggtgctacctgtgtgtgtgtagatgagtgtgctgaaggtggggagggcagcacacagcagctcatggcagagccgcctcctaggtcttggcaaagaggcaagctgacgatagacatctacctatattgttaagaaaggggtcggggggatcagccaaggtccatcattgcttttttgccgcgccccccccccccgcccccatagattgtcagctgtaagtgaaactcctagtgaaaaagaggggagccctgtgttaggagtccccataaacatgtactgtaattctttgtatatagaaaaaaaatttactgtaaagtaaagtttaactttactcata

SEQ ID NO: 626638 - DNA, 352 bp, Homo sapiens
caccgtctcacaggacctacatcgcccacgttgggtgaacgcggatcagagcgatacactgcggaggactttgaattaacacaatcaacacgtgtcaagctgagtaaaagcttggcggtgtgccaggttgccttcattgtacgaagagataatggaagtattgacggttggtttccggggcgccagtggggagagaaaggaatatttctttgctccggcactggatcttatccctacttacagcacgctgctgtcagctggtgccaagctttgaggcctccgctactacattgatacacagttcgcgtcagttctttctttccagcctcccctggccatttatattcagctc

SEQ ID NO: 626639 - DNA, 415 bp, Homo sapiens
gaacaggagggccctgcaggagagggaccacgcagatggaagctggggatcagcccacccactgagcagaccttcagcccctccagcaagattctcctggtgacacgatggggggcaaagaggaaattctgtcctcctcagtgacctgggcggagtggcgtggtgtgatgggaaagggtgctggtgggagggccaggacagcagagtctaactctggcccttccaggagtagctgtgtgatctcaggcaggtttcttcacctctccgggccacctcagagccctctcttgtgaaatgaggcatgattgtggagagcattctggcttcaaatcctgcaattgatacctggccttacgtgggccagcattgctccacttcccccagatgcacctgcaagtccttccaagggggctgg

SEQ ID NO: 626640 - DNA, 213 bp, Homo sapiens
caagtgtgaaaccgtaggcttggattaaggcgcacgcgatttctaggatagttcgtagcacttagaattgtgaagatataagtgtcgagcgccggttcatggtagatatcgctagggtggcgctcccaatttggtgcatgagtaggtcgcctgcagtcatgttagcggttaggcgtacggccagggctattggttgaatggcacacgcgagtt

SEQ ID NO: 626641 - DNA, 946 bp, Homo sapiens
ggcacgcgcggttagtagtcgctgctgcgcggccgcgggggactgtctgaagagacgcgggaccaagtggcaagattgacatctgagctgtcatgccgaaaaaaggccgaggagagatatcaatatgcatttccaagcctttggctattgtgggggtctcctgtgcaatctcaattatgcagaaatttatggatgatgaatgttggagagggaagactttgtgaagaaaatcagaaagaactgggagtggttcatgaagggtgaacttttccctcagagatttacattataaagaccacctcaaacctatagggagaagtatattttggcaggaaacttttggataggttgggaaggtgggctggatggggtctaatcaaaacagcaaagaaagatgactggatgaggaaatttcaatatacgaatggaagagtgggaacttgcgaagagttgaaagaaaaacccaggtaccgtgtggacagaggactgttataaaaatctagagcaaagggcttcagtggcaatattgtgttgtattagaaaaaccatttccattgtgctgataaacccctgataagttcaatatgaagtaactttccacgatggtattggaatggggggggtgctaaattaaactcctagcagacactgatggattggtttctggacaccttctattgtaacacaattcctatttcattaatgtgggccagataactgttggggagatttttaacttacttattctcaacataagctcccacagggttcccagaacatggcaacctccgatgaacttaaaggtttccgagaaccattaacctggggaccgatccattcgtgttggcacacggccagacccagggtctcaaccaaagacctaaagggtaagccttcgcacgaggcgcacagttggggcactcacgggggccacgttggagtctgt

SEQ ID NO: 626642 - DNA, 2773 bp, Homo sapiens
aaggggagagagcgagcgagtagattgacataagcagcgagacccgggtctgtactgtcgtgccgaggctgagccattttggggagcagttcttcatctgaatggatggacatctgggcttccttcaagggccattgaatgggaactagaaaaccactggaaactagaaatttgagctattgggcccaccagtagcagcatgtgatactagatggttaaaatcatgaaagcagtcactatccaattagaagcagagtcacaacaactgttgggaaatgtgactcttggaggaaggtggggagggagtggccttgccagccctgtgggacgtcccctgaagtttgtaataagaccccttttccaaagggatgtgaattggagtgaaaaggaaatctttcatcttagaaaacttctggtccttaacgcagggtggtatttgggtatgtgcttggaaattgagatctcaagagtgtttgccttggagccagctccccaggaggccttttccagggacaaggcaaaagttgaaattctccatgggtagctagaaagccaatacatctagccctgctaagtcagaaaaagattatgaaaaatgttgaaatttacattcaaagcctcatttgcttatcttgctggagccaacccagtctaatagcaaaatagctgtcattgatacagaaacatcctcatttttaaatgtctgctttaccctgttactgagtttgagatgacttaaatcactgtgttgaccctcttctgaaccaaatctttagcattgatgaaaatagttattttattctttacatccttcaccccacactatggtcagggcatgaaacaccctgttgatcccttcccaggctcggcactgtctgctcactggagccggactcccaggttgtaattctaatgttgcctcatgagaacagaatggcagaaagtttagtcctgacagattcccccatagggagtaatgaggacagcatgaaacttggataggttttacccttagtccctataaggtggattttactaaggttttttaaatgatactgtcatcctcttggggtttatcagccaggttagaggagcccagtgtcctaacctctctcagatcatggcagagaaggagctgcctccagcccctttcttgctgagtctcatttgagcagttccatgtgtagacattccaagtcactgcttggtagttgctgtgggagcctgtcattggctatggccagttagttctcagctgagcttcctagggccagtgcaacagggccagaggctgctatagtgtaaattgaaataagaatagatcattgttttgtacacacacacaataaaatgtaatgatggtgctaatttcacggtataaataagcactgccaagggttgagggactggcagctcaagaaacccgggttcctgtttgggaggagattttatgtagaaaagtttgaggctttgttaaaagtggggagaaggaagatcctcagtgaagcctgcacccaaccctggagtggcccagtgcaatccagaggtggaagagatcctatatccaggtgaaggtggccattgagtttctcagggctggggccaccttgtccatagcctccgtccacgctgcctggagcaggttgttagagagctctggttgttgggtcttcctcagctcccttctgcccctctctacctcttccactcatggaagcccctctactgcttatgaagattaagggtagtattttctaaggaagtggaaagaattaaactagaaatccacaacctcggaagaagtgtttcgagtttaacatgcgctgtttctgcttatgtggttccttctctagagctgctttcccatggctttcaaaacatcaggttattgtggggcttcaggtgtaaggtcctggaagttcagcaaagtttcgtggacaagacatgggcacagagagtagaagcagaaataaatggttctatgttttcaacttccagggttggggcaggccagagcaaggcggtctcatcgaggtgggtgctacctgtgtgtgtgtagatgagtgtgctgaaggtggggagggcagcacacagcagctcatggcagagccgcctcctaggtcttggcaaagaggcaagctgacgatagacatctacctatattgttaagaaaggggtcggggggatcagccaaggtccatcattgcttttttgccgcgccccccccccccgcccccatagattgtcagctgtaagtgaaactcctagtgaaaaagaggggagccctgtgttaggagtccccataaacatgtactgtaattctttgtatatagaaaaaaaatttactgtaaagtaaagtttaactttactcataataaaaaaaaaacaaacaacaacaacaagacaacaaaaacaacaaacccaaagaagaacaagaaaaggacaaagagacacaagacaaaaaaagagggggggcgcgcgccactaaagcaacacacacctctacggccgggcggcccccccccgccaccgccaccgctcccagcacgcgcagttggcacttgtggaacaacaggagtggcgcccccccactctaaaggcggcagctttcatattccaacaggcacatagaccggcgggtcgcggccggtatcgtccaacgtcgcgtacagcgggtggcgcaccaagcgactacttgtggcgtcttcattgcagctgaaagagagcacatccatatccgaagaagtggagaccagtaggcgcagacacgcaa

SEQ ID NO: 626643 - DNA, 235 bp, Homo sapiens
  misc_feature (27)..(27): n is a, c, g, or t
  misc_feature (71)..(71): n is a, c, g, or t
ccctaaaagtcccagagtagttttgcnaacggcatgattcctgtttttgcgttttatctcagtgctctaangttatcctagcctaggtgcaggaataggtaaggccccttaaataaaaatggagttagttatgttagttcttctgctgtttcatggttacaagacacagaagagaacccttgcatcaaaacaggatgagattaggttgttgttcctataaaaaatccatgtggtt

SEQ ID NO: 626644 - DNA, 249 bp, Homo sapiens
gcgaagggcttgtcgatttggacggagatggtgtgtatgatgcagtcgaccagtcgccaagcagcgtgtgtgccaggggcatctgcctgtccttacagaatgaattccatcccttgaaccaaggcatgtgagcacttggctccagcatgttgtcagcattccaaccagaaattggcacaaatgctactgtgtcggggttgtagccaattttcttaatgtaagtgctgacttccttaacaatctcctcat

SEQ ID NO: 626645 - DNA, 173 bp, Homo sapiens
cctcatatcatcagcaatgcctcctgcacaccaactgcttagcacccctggcacggtcatccatgacaactgtgggtatcgtggaaggactcatgaccacagtccatgccatcactgtcaacccaacacaggcatgctcataaggaaaggttcaaaaaagtaaaaggaactcg

SEQ ID NO: 626646 - DNA, 234 bp, Homo sapiens
gtgcctcttccccccaaatttgtatgtctgaagcacgtaaccctcaatgtaatgatattatggtagtgggagtcctatcacaggtacttaggcttagatgacgtcatgagggttatgtgtccttttggaaacaggaagagttcagaactttgtgtctctaccatatgaagacacggtgagaaggcaaccatctgccagccaggaagccagccctcgcaaatctgtcaatacaga

SEQ ID NO: 626647 - DNA, 360 bp, Homo sapiens
ggtcgacgagcaaggccgcactgaattccatggccagcaccttcctcagcgaaatcgaagcgccgaccttcaccgtcctgtcgatgcacccgggctgggtgaaaaccgacatgggcggcgaagacgggagtatcgacgtggccaccagcgttcgcgcctgatcgatcaggtcaatgcctattccggccggggcgggcatcacttcatcaactacaagggcgagaccattccctggtaagcaacaaccctgcaggagcgccgacgggctgctcctgcagcggagtttagccagtgtttcgacagacatctgtagaatgtccacccactgcacctgatgagaaaaaagaccatgtacgactt

SEQ ID NO: 626648 - DNA, 113 bp, Homo sapiens
ccactgtgctctcctggacacagggcttgtaaggtgaggtgcagcctgatgtatggaatcagcggagagtgaaatcccacgccaaatcaaggacactcagtacgtgagtgctg

SEQ ID NO: 626649 - DNA, 257 bp, Homo sapiens
gccctcaaattcataccggcgactagcaccgcgtccggcagagcagacctacactcgcccgcgccatagcctctgtctccgagctcgcctgcatcatactacggccctcattactgcacgacgatgaggtgacaataacggaggataagatcaataacctcattaaagcagccaggtgtaaaaaattgagcctttttggcctggcttgtttgcaaagaacctggccaacgtaaacattggggcctcaatctacaatg

SEQ ID NO: 626650 - DNA, 267 bp, Homo sapiens
aagcagttaatacagactcaaaaaaaaaaaaagaaaatttccacgagatgggtggaaatctaaactggagaaccactttggcttaacatatgagctcagcagagcttttaaatcacgatcaggttaaatttactatctaattttcagaaatacatttgtcacctgcggacagttagacctagacggttggtagaaatttccagcattcccacatttacaggaaaacccttgacaggaaaggaattacacaggcttgaccccttttga

SEQ ID NO: 626651 - DNA, 879 bp, Homo sapiens
ggctggcgtgcggcgcacgtgccctcggcctgagtcgggatggagctgcctgatatgaacctgaaggtgattctcctagtgtcacttggcttgtgacacttcaggggctgcaatttgtattctctcgtgctcctatgcactggtcccaacattacaccattcctgagcctatgctccagtgctgtggcttgtaggactcacactgagagacatcacactctgactcgcccattaaatggcattcgttaatcctatgcgaattcacaattagcatagagaccaacaccaggtcctatccctttggaccactcaggtgcaacaagtcaaggcactctaatcataacccctgcgcagcatcctacgcctaccaccgtgacaaacttgggcccatgaacttttagcacaggtagaatgcatgtgccacttacacatcaaggaatttgcattgcttctaacgcccggattacatcacatagactgaatatctgttcttaacccaacattgttacctgtggaagcacgcggcgagctgtacgtgcctctctctgggttccagccacatcgtcatgacccctatgagggtcgtatacataagtagacccggtagttggctcaaccaggactaactttgcctcatccctatgatccactggagaagtcccttgctgagctcctcagatggtaggcagacaacaatgcccgggtgtacctgaagtcagccaatactatcgcccgtgcctgccagtccccttcatcctactgaatgaaaccttaggcagtctatgctgccgatactgtgccatacaatgcatggttcccactcagaatagcgaacaagcagctagaacccatgctcccgttcactccgctgtccgactc

SEQ ID NO: 626652 - DNA, 367 bp, Homo sapiens
acattttctagctcatctattgggggccctgtgatccaaccaatagcagactgtgagcatcaacttctgtgtttgctaggctccggcatagtctcacaagagccagctatatctgggtcttttcagcacaatcttgctagtgtatacaatggtgtcagcttttggaagctgattatgagttggatccccagatatggcagtctctagatggtccattctttcgtctcacctccaaactgtgtctatgtaactccttccatgggtgttttgttcccaattctaagaaggggcaaagtgtccacactttggtctccgttcttcttgagtttcatgtgtctagcaaactgtatcttatatcgtggttatt

SEQ ID NO: 626653 - DNA, 103 bp, Homo sapiens
acttgggaacgcctacatctgacaacctcatggcggacgggacctgtcatggacgctggccatggtgggctacaatggactcgctctccgtctggtgcctgcc

SEQ ID NO: 626654 - DNA, 688 bp, Homo sapiens
ggggggcgggtgagcccccagaccaagttttttgttttgaataaaaaggaaattgcatgggtgcaagccgtttccaagcatccggcctcaaattataagccttggaaaccttccattagtggggcagtacagaattgaggctttggcccatgttttaggtttttttgacgagaaccgcaaccggcatttctccatcctttctttaaaaagtttttcttcataaaacacattttcccacaacgtgtctattttactccataaattcctttatggaacctaccttaaatgaacttttctttggtgatccatactgtcttacacccaactgtgaactgataagtccaaatattctcaaaatgtatctccaagcactctcatccatgtttgcttgatgctaggtttatctcacaaagcttataaccatcagctcttgtacattgttctggaacctaagctaaatacccaaataacttcatttgacacactttagggcgcttgtttcaggtaggggtgtatacatcccacgggagtggatatgatcactccatggaggaagtagcaagatgatttctttgtatttaatctcatcctatttcattgcgatttttgtgtgttttataatgtacataatctgttgaacaattgcacacttctattacttataaaacaacattaattggtgcatcaa

SEQ ID NO: 626655 - DNA, 280 bp, Homo sapiens
  misc_feature (134)..(134): n is a, c, g, or t
tgcgccggcagcgccaaggtcgagagcctgggcatcgccctgctggaggctgtcgagtccgacgacccgacggcactcatcggcctgccgctgatccgcacctgcgccctgctgcgtcgtgccggcctggagcntctggcatgaacaagggccggatcatcctgatgcccaacacactggacttcggtgtcgacgattccctggacctgcgcgaggtgctgccccagcgcgtcatcgagcaggcggcccgactgacgcactgggcggctgagaacgccaa

SEQ ID NO: 626656 - DNA, 107 bp, Homo sapiens
ttgtgtacatcctcaatgtgagtgcctgtttctaccagtgtccctgtacccctaccctgacctggcgttgccgcttcctagccatgaatgtggatgatcacttgagt

SEQ ID NO: 626657 - DNA, 468 bp, Homo sapiens
  misc_feature (127)..(127): n is a, c, g, or t
  misc_feature (130)..(130): n is a, c, g, or t
  misc_feature (318)..(318): n is a, c, g, or t
aaccttctccttgtggccctgctgtttccaggattgtctcaaaccaaacatgtgaaccactcagccccttaggctttcggaaaactcagggaaaaagcccctgggcaaggcacaaacgggtttcaanttntaccccacgcaatgaaaagggaccttttacccccgcgcaccccccctttccaaagggatgttcccccgggaattaaaaatacccttttccgtatgcaacaaaggatttgcagactttttttttgcccttctggtgagaaaagcgtgacctttgctctgatccctggaaaaggtgttgggtttccaatnccgattaaaaaagaaaaaaaaaaccaaaaatggatggcagatttggggttttaaaaataagctcccggaaggcagggatgtttaagtatccccagggcttaaaagaatgtgtggcttatagtaggtgttccataaaaatttgttgaatta

SEQ ID NO: 626658 - DNA, 104 bp, Homo sapiens
tcaagcttctaacgatgtacggggaatggcattctggttttggtttctgtatagttttgggtctttctatgctggttgtatttatattaaacccctggttagca

SEQ ID NO: 626659 - DNA, 926 bp, Homo sapiens
ctggtgtgtaggacagacaggaggaaaggttggctgtggagttgcttttaggcctaaataacctctttagttgtatttcttttcttttctgactatagcagtggaataaagagtggaaagaatgtgggggagtggggagcagggagcaggatctgagcacagatccatgatttactggctatgtgacctcaaaccactcgtcttaaatgacatttatttacagagacaacagaacatagtgattagagcatgagctttgaagtcggactgcctggtttatagactgatcctgctacttaagtaacttgcagaaacttacttatcctctctattacttatgtgatgtataaatgtaaatatacacagacatacatacatatatacatacatacacataagcatatataaatgtatgtttgagtatatttgagcttatataagtcaaataaatgtagtgtctaagagaattgaagttgtttcctcttttaaatttggaaagctggtgcaatgataattttgaaagttttagcatatacacatagtatttatgggtttgtccttgttgctgtttatagtggaaagtaatgtaagtggaggtcttaagtaactattgcctaacctggatttaagttttttttttaaatactctatcttgactctgtaagtttacataaatttagtctctttaagactttcttttatgactgtttatgtattaatttctggctttaacttactgggatttttatttacaatattttttaaatggcaggtatccctttaaaacagaaaaaaaaggctgagcgtggtggcacatgcctgtaatctaagcaccttgggaggctgaggcaggaagattgcttgcagccaggagctgagaccagccttggcaacatagcatctctacaaaaaagaaataaaaaaaa

SEQ ID NO: 626660 - DNA, 421 bp, Homo sapiens
  misc_feature (67)..(67): n is a, c, g, or t
  misc_feature (79)..(79): n is a, c, g, or t
ctgggcttccaaactttaccctctgactcttggttggcccctcagaagcctcagcctccctcctgtncttccctctccnacagtgatccttttccccagggggttgatttgcttcctctcacaatggctgagagattcagtgttgccccacgacccccaaccccttttctggagtctcaaagcacaaggtctttcatttttttgtttttcttaaagactgtttttttctctcttcagaaataatacaagaaaccaacaaatacatattcaggtggcacttgagttccacttacaaaggaaacaacttattggataaaatacatatgtcctgacaagtgctgagggtagaattacaggaatcttgggtgtcagcagaaatgttttatgtaaaatcgggatgaatttgccagctgtgccgaat

SEQ ID NO: 626661 - DNA, 741 bp, Homo sapiens
agaaataacggtaattcagtggcccattgtatctttgggttcacaaccacaaaatgaaccatctggggatgagaagccttgggaacattaagagggaataccattatcctttgagccatagtgcacatacaagcagtctagtatacagcccattccatagcatgtgcattatctacggattgcacaacaaaaggtatgtaggtcataggcacatactgcacccatcttcataaggggacttagaacgcatggattcccagtagatgcacccaaagataaaaggaaaagtctggcctaggtctgcgcggagaagtgcaactccatttttcacagggcattccatttcttgttttggacatcgtccctctgtagttgtttccattcccagtcttgcactgtgaaagatacatttacgtttcaaataaagctgcatctcgcatcctaatgattatggaggacttcctgttttcagccataagcacacattggtgctctataatgtgatattggaatgcccagcaggtgaattctttgtcctctacacattatgctgcgcattcgtctttgcctcctgctcccagatgagtcatagtgacactgaacagtgaaggcccctgggtattcacatagtcatccaggggctctccttcacctgatttcgagaaatgaaagaagtagaagctccagttccttatgttccattttgggactggccagcagtgtccacacaccgtgtcccag

SEQ ID NO: 626662 - DNA, 571 bp, Homo sapiens
  misc_feature (443)..(443): n is a, c, g, or t
  misc_feature (508)..(508): n is a, c, g, or t
  misc_feature (519)..(519): n is a, c, g, or t
gagaaggacgcaggcagcaaagagtagtcagtcccttcttggctctgctgacactcgagcccacattccatcacctgctcccaatcatgcaggtctccactgctgcccttgccgtcctcctctgcaccatggctctctgcaaccaggtcctctctgcaccacttgctgctgacacgccgaccgcctgctgcttcagctacacctcccgacagattccacagaatttcatagctgactactttgagacgagcagccagtgctccaagcccagtgtcatcttcctaaccaagagaggccggcaggtctgtggctgaccccagtgaggagtgggtccagaaatacgtcagtgacctggagctgagtgcctgaggggtccagaagcttcgaggcccagcgaccttcagtgggcccatggggaggagcaggagcctgagcttgggaanatgcgtgtgactctaaagctacctcttctaaggactgggtattgccaaacagccacatgtgggantcttcttaacntaaatttaattaattataccaattagttttaatttaattttgttcacggggg

SEQ ID NO: 626663 - DNA, 775 bp, Homo sapiens
gagaaggacgcaggcagcaaagagtagtcagtcccttcttggctctgctgacactcgagcccacattccatcacctgctcccaatcatgcaggtctccactgctgcccttgccgtcctcctctgcaccatggctctctgcaaccaggtcctctctgcaccacgtgagtccatgttgttgttgtgggtatcaccactctctggccatggttagaccacatcagtctttttttgtggcctgagagccccgaagagaaaagaaggaagttcttaaagcgctgccaaacaccttggtctttttcttcacaacttttatttttatctctagaaggggtcttagccctcctagtctccaggtatgagaatctaggcaggggcaggggagttacagtcccttgtacagatagaaaaacagggttcaaaacgaatcagtttgcaagaggcagaatccaggctgcttacttcccagtggggtctgttcttcactctccagctcaccctaggtctcccaggagccctgtcccttggatgtcttatgagagatgtccaggcttctcttgggctggggtatgacttcttgaaccgacaaaattccatgaagagagctaagagaacagtccattcaggtatctggatcacatagagaaacagagaacccactatgaagagtccaggggaaccgaggaatatagacagaaacaaagagacatttctctgcaaaacccccaaatgccttgcagtcacttggtctgagcaagcctgccctcctcaaccatc

SEQ ID NO: 626664 - DNA, 150 bp, Homo sapiens
gatactctacgtgcatgtggtgaatgtcctctgcccggtcccggcggctttcttctccctcctttttcatgtggccttggtacttctggtgttctgcccttgcctcttgcttacgattcaaagcttcagggcgttgggttttctttcggt

SEQ ID NO: 626665 - DNA, 190 bp, Homo sapiens
aatgcctggcagcactttgccccagcatggtaaggcgttccatcaatcgcgaaaacacagagtgtggactcccattataagaacagcctcaagcatggtcctgttcacaatgtttattgtgtcatacagtaccccagaaatgggtttctactgagatgcaaagactgctgcttctggaataccctaccat

SEQ ID NO: 626666 - DNA, 448 bp, Homo sapiens
  misc_feature (181)..(181): n is a, c, g, or t
tggggtttccccagccagcccctttaccaggggctctccaaataggagcctccatctccaggtgttctctttgggtttgcccgtccccaaccctacgatcctcctggaaagaagatggtagcagccaaagtaaagggttagaaactggattaaaagctttaaaaaattgggccaacccagnccccccccccttgggtcccccccaaaaaaaggggggagcaggaggctctttttggttagttccaaaagctggaaaaaaaaaaccaggctttaaaaaaaaggggggattccctggcccaggagatcccgttccttaaaaattttataaaaaagggcccccaggccagggggaaaaaaagggtccccttgtttaggatagtcaggagggcccatgtgcttgttcaaaaaaggctgtaactgtgtgttcccataaatttttttttaggga

SEQ ID NO: 626667 - DNA, 362 bp, Homo sapiens
  misc_feature (193)..(193): n is a, c, g, or t
  misc_feature (250)..(250): n is a, c, g, or t
gggttcataatctcacaacaaagacgggtccctccatgttcttggagctgtacacccattggaactcttaagacatatggccctaaagcacctcagaagaagctgaaggaaatcagcctccataactttcaagcccctggactcctggagccagaagttaattcacactctgatctcagagaagttcaagacnttcagcagaacttttcctggccagggcatttttgcccctgagatatgtcattaaacnctgtaaccaggaacttctgttcttacccctgtccttcccttcaccttttatagttactaaatgcaatgttttatttttccaagtacaaaacaataaaatagttataaagaaa

SEQ ID NO: 626668 - DNA, 220 bp, Homo sapiens
  misc_feature (117)..(117): n is a, c, g, or t
  misc_feature (155)..(155): n is a, c, g, or t
  misc_feature (171)..(171): n is a, c, g, or t
  misc_feature (188)..(188): n is a, c, g, or t
atgcagaaaaggagtcgtgagcgtaacaccctcgctgctggtcataaaacccatagttcctgaactcatcaaagaacttaacttcctgacgccagatatctgccatgcgcgaagggntgataccactcaggattatgaattttgtttaaagtcgngtttacaatgatttgncctggactgaaattcangctgccttaaggtgctgatgatattgagaagt

SEQ ID NO: 626669 - DNA, 430 bp, Homo sapiens
  misc_feature (163)..(163): n is a, c, g, or t
  misc_feature (166)..(166): n is a, c, g, or t
  misc_feature (168)..(168): n is a, c, g, or t
  misc_feature (172)..(172): n is a, c, g, or t
  misc_feature (213)..(213): n is a, c, g, or t
  misc_feature (252)..(252): n is a, c, g, or t
  misc_feature (271)..(271): n is a, c, g, or t
  misc_feature (294)..(294): n is a, c, g, or t
  misc_feature (414)..(414): n is a, c, g, or t
ttttggaagccattgctgttttaaagtcattatgtagaatgctacaaaccctaaacttaatatatactaattcctgaaaaagactttgagacagtactatgtcagttcagccacctattttgcattgttttctataaggaggcaaagcatatgtgttttcccngtntngggnccccttttatgggcctttaccactggtggtaatgttcacgnaccaccaaggtaaagggaaaaatgcaggatggttaccgnaaaatccagctggctattncatggaggctgaaaaacaaagcncaaataatagatagctaagttaagaactactaaggtagtttatagaagtagggaaaaacgtaatactgctttttattcatgtctttaaagcctttttcagaattaagttgccaatcactnatgttgtaaataatgg

SEQ ID NO: 626670 - DNA, 395 bp, Homo sapiens
  misc_feature (12)..(12): n is a, c, g, or t
  misc_feature (20)..(20): n is a, c, g, or t
  misc_feature (28)..(28): n is a, c, g, or t
  misc_feature (86)..(86): n is a, c, g, or t
  misc_feature (97)..(97): n is a, c, g, or t
  misc_feature (186)..(186): n is a, c, g, or t
  misc_feature (207)..(207): n is a, c, g, or t
  misc_feature (223)..(223): n is a, c, g, or t
  misc_feature (291)..(291): n is a, c, g, or t
  misc_feature (330)..(330): n is a, c, g, or t
  misc_feature (353)..(353): n is a, c, g, or t
  misc_feature (373)..(373): n is a, c, g, or t
tctatttttganttggagtntcactgtntcccaggctggagtgcaatggtgcggtcttggctcgttgcagcctccccctcccggantcgagcgattnttccgcctcagcctcctgagtagctgagactgcaggcgcccaccaccacgcctgattaattttcatatttttagtggagatggggtttnaccatgttggccaggttggtntcaaactcctgacctnaagtgagccactatgcccagccctacagtgtgttctttatgcagcatatgtgctacagaatgctggantttgaggttctggttttcaattattaatgctagtttgtntagggtaatgccccaaaactcantcttgggagtcgtattgccngtccagagactcaagagtcaac

SEQ ID NO: 626671 - DNA, 206 bp, Homo sapiens
gaagctacatgatttgggattacacatcagtttcaattttggccatgagggaggaatttggaggcagagctctggccctatggcggtggaggccatactttgcaaaccacgaaaccaaggtggctatggcggttccagcagcagcagtagctatggcagtggcagaggattttaattaggacaacagcttagcaggagaggagagc

SEQ ID NO: 626672 - DNA, 289 bp, Homo sapiens
actaggcagggtttttgccctgccgaacactttccctcccccctgcctggtcctggggccttttccctaggggtagacttttttgcccactgaaatgggttttctgcccattgactggtcaggggcaaagtttgggtgctgtcctttggccccgtgtggggacttgtttaaacccaaaagaaaaggacagggtccccaacacgtttgggggtccttattttgggctggacccggttgtggatccaaaaaaaaggcctagtttcccataaattttaggaattttgcagga

SEQ ID NO: 626673 - DNA, 460 bp, Homo sapiens
acgggtactacgaatagtagtagtagggtagggggcatccatatagtcactccaggtaaataggagggtactatctactaataaggactatttcgctatcgaagcgaaggcttctcaaatcatagaaaattatataatattactagctgttagagaaatagaatagagcctacagatagataaggatagttcatagtaggtgtaatagcatcggggtagtccgagtaaacgtacggggcatatccggataaggccgagaaagtgctagtgggaagaaagtaaagatattacgccgatgaatatagatagtgaaatggatattggcgtaggtttggtctagggtgtaagcctgagaataggggaaatcagtgaatagaagcctaccaatagaaggcaaatacagctcctaatagaaaggacataagtggaagtagagctacaacgaataacgtagtacgta

SEQ ID NO: 626674 - DNA, 201 bp, Homo sapiens
  misc_feature (46)..(46): n is a, c, g, or t
aacagtgagcgatgatcatgcattgctctacgcctagggtgacagnagtgatgatccattctttaaaaaataaacaataaaaaacaaaaatcctctttctgtaacctgggtttgccttaaaggtaaattacttgtggctcaaggtttttatgagaaatggcttttcggtttttataaaacaagaagcgattttttttaaaa

SEQ ID NO: 626675 - DNA, 573 bp, Homo sapiens
  misc_feature (185)..(185): n is a, c, g, or t
  misc_feature (217)..(217): n is a, c, g, or t
  misc_feature (313)..(313): n is a, c, g, or t
  misc_feature (322)..(322): n is a, c, g, or t
  misc_feature (374)..(374): n is a, c, g, or t
  misc_feature (382)..(382): n is a, c, g, or t
  misc_feature (384)..(384): n is a, c, g, or t
tttaaggtggctgctcatggaaacgtgtgctgtcacaatggaggcgtgaccgcacctgtaagggatacttcgacaggtgtccactgcagttgtcctgttggattcactctccagttggatgggaagacatgtaaagatattgatgagtgccagacccgcaatggaggttgtgatcatttctgcanaaacatcgtgggcagttttgactgcggctgcnagaaaggatttaaattattaacagatgagaagtcttgccaagatgtggatgagtgctctttggataggacctgtgaccacagctgcatcaaccacnctggcacanttgcttgtgcttgcaaccgagggtacaccctgtatggcttcacccactgtgnagacaccnangagtgcagcatcaacaacggaggctgtcagcaggtctgtgtgaacacagtgggcagctatgaatgccagtgccaccctgggtacaagctccactggaataaaaaagactgtgtggtgaaggggctcctgcccacaagtgtgtcaccccgtgtgtccctgcactgcggtaagagtggtggaggagacggg

SEQ ID NO: 626676 - DNA, 103 bp, Homo sapiens
  misc_feature (1)..(1): n is a, c, g, or t
ntacatcaaatatctgtcaatggggcagatatgctaatattgtacaagcagcttcgtgaagttagaagataagaaacatgtcatcatattaaatgtccggtaa

SEQ ID NO: 626677 - DNA, 201 bp, Homo sapiens
  misc_feature (29)..(29): n is a, c, g, or t
  misc_feature (42)..(42): n is a, c, g, or t
  misc_feature (90)..(90): n is a, c, g, or t
  misc_feature (122)..(122): n is a, c, g, or t
  misc_feature (166)..(166): n is a, c, g, or t
cttgagcctagaaggtccaggctgcagtnaactatgactgtnccactgcattccagcctgggcaagagggagactgtttttaaaaaaaantttaaaaaatcaaccagtgaaaaatgattatntcatgattgagaacaggcacagaagacgtttttggaaatttgantaaagaccatatattagatgacaggggattactca

SEQ ID NO: 626678 - DNA, 99 bp, Homo sapiens
  misc_feature (16)..(16): n is a, c, g, or t
  misc_feature (79)..(79): n is a, c, g, or t
agccggtattcaagcntcacttcaaaaggcggtaaataccggtttattccaccagaaattcaagggggattaacgccanggaaaagaaacattgtggag

SEQ ID NO: 626679 - DNA, 303 bp, Homo sapiens
  misc_feature (22)..(22): n is a, c, g, or t
  misc_feature (76)..(76): n is a, c, g, or t
  misc_feature (89)..(89): n is a, c, g, or t
  misc_feature (91)..(91): n is a, c, g, or t
  misc_feature (114)..(116): n is a, c, g, or t
  misc_feature (119)..(119): n is a, c, g, or t
  misc_feature (130)..(130): n is a, c, g, or t
  misc_feature (142)..(142): n is a, c, g, or t
  misc_feature (166)..(166): n is a, c, g, or t
  misc_feature (175)..(175): n is a, c, g, or t
  misc_feature (177)..(177): n is a, c, g, or t
  misc_feature (185)..(186): n is a, c, g, or t
  misc_feature (215)..(215): n is a, c, g, or t
  misc_feature (301)..(301): n is a, c, g, or t
gtgggaggtggaaaggtttggntgacaaaaagtcagtgtaaatgtataataagattattttcaaggaaatctgtanattaagttttaangnctattttacttcatatatacatnnngtnctattttgggnggtgcgattctntatgcttattctaaaatattactngtttttttngngaaaggtnnggaccgtgaggcttttttcatatctgatntattacagtataatccatatttctcctataacacttagttctggaaaaggatctactggtgtctgtgtttaggcaggtattagttntg

SEQ ID NO: 626680 - DNA, 286 bp, Homo sapiens
tcgtgtgagtaggcaggagtgtggaggggcagtgttaccttcttctttttcttgctggtgcccgcttgctgtctcgcttgtgctcgcttctgtcctctcactcttgctgggtggactgcgactgggtctcctctctgcttctcttcctgcccttcctcttgtccttggtcttgctgcggctcctgctccgggtcctgctgccccctttgctcctggtccggctccgactctggcggaggctcttctcctggctcctagccctgctcacactccctcgcttctcctc

SEQ ID NO: 626681 - DNA, 300 bp, Homo sapiens
  misc_feature (209)..(209): n is a, c, g, or t
  misc_feature (268)..(268): n is a, c, g, or t
  misc_feature (288)..(288): n is a, c, g, or t
ctgcttatgtttttcgggattttgggagcccccactctatccgtctccattttgctttgggggacccagcgccgaaaagccaagacttcatgaactacataggttttaccattgacctaagatcaatttgaactattttagcccagtcagggagctttgcttcctaaaaaggcattttcgccagtggattcgcctcaaggttgaggccnccattggaaaatgaaaaattgccctcccttggggtagacaaaaaccagttcccattggngttgttgcctataataaacnctttttttttta

SEQ ID NO: 626682 - DNA, 311 bp, Homo sapiens
  misc_feature (31)..(31): n is a, c, g, or t
  misc_feature (66)..(66): n is a, c, g, or t
  misc_feature (138)..(138): n is a, c, g, or t
  misc_feature (301)..(301): n is a, c, g, or t
cctttccaaaattttaaatggaaccaggccngatccctccatgaaattccaagccaaagaaaaaanccccaattttattgggcctaaatagtcaaaacaatgttttccataattttcctatttgaaaatgtgctgatnctttgaatgttttattctccagatttatgcactttttttcttcagcaattggtaaagtatacttttgtaaacaaaaattgaaacatttgcttttgctccctaagtgccccagaattgggaaactattcaggagtattcatatgtttatggtaataaagttaantgcacaagtt

SEQ ID NO: 626683 - DNA, 118 bp, Homo sapiens
gcgtgcggcggtggaatgaaaatgcctgttatgagcagcagcaagacgggaacgccagagtttcaggaaggagctttggagagcggggcgctcggagcctggggctcagtgggcgtgt

SEQ ID NO: 626684 - DNA, 321 bp, Homo sapiens
gaggaagaggagccttctgtcgccccgcagggaggggagcagcgcccccttctctcctcgcaggaagcgccgcctggggggttcccaccaccccatttttttgctgcagcctccccaggagttggggggacaagaagccccccccctcctcgtgcccttaattggaagcgcccccctagcaatatcacccattacccttccctctacccttatcttcttcccaattctaattttactgcctatcctagaaatcgcggtcgccttaatccaagcctaggttttcccccttttagtaagcctctcccggcccgcccccccata

SEQ ID NO: 626685 - DNA, 97 bp, Homo sapiens
  misc_feature (90)..(90): n is a, c, g, or t
agcggccgcctactactactactgctcgaattcaagcttctaacgatgtacggggacatgctcaaaaaaaaaatcatcgaaaaagttgtnctgcacc

SEQ ID NO: 626686 - DNA, 115 bp, Homo sapiens
gactcgcactcagtaggagacaggcatgccttgcagtgcatgcagctcactgattcatcctcagttccgcacagtgccaccagaagttgtccgacaagcctggcagaaggcagac

SEQ ID NO: 626687 - DNA, 1094 bp, Homo sapiens
cgcctgtctcttggagaactacgaggagtatgcagctcgggcccgtctgctcacatgagatccacaggagggtcgccggcggcgcccagcggtcagggccgaagccggtcgggaccctgagaccagatgagcacttgaagctttcctccactcgatccctggcggcccctagcggggccctgggtaggggctgagggtcccatggccaagaatgcatgctgtgcgagtcgcgataatgaagcttggtcagtgctcacaatgtaaaagatgaccgggacgaagaacagcgggcgcctgccggcgcgcatgtaagatggagcatctctttcctaccttaccgactcgttgaaccccgaatcgcttcgtccgtgtctccccttcgccttcgcgaattcctggttctacttaagtctatgttgaaacattataggcgtgggagtcagtggcgacgaggtaccatgcgagggccactgtgggacctagggatctttggtattcttcttaaaattaacatgtctggccagacagcaaacatacttgagatagtcccaaaaggatacaagagtagcaccctttcggtgcgcctatctaaatgtctctcgggggatggcgggagacacacagagagagtggctatcctaagaaaggagagggacgaccatagggggctccattatacgcgctgttgctctcgccttagacctccgccagggaacttactctctgggtgaacctagacgggcggggaaatagaaccttggcgccgaagggggaccgcgcaccgcatatacaatgcgcagaggcggggatagtaacataggttaccgctacacaatggaagcacccgggtgggtttttccccctcacgggcgtgggtttacgagagagagtcggccatggtacggcgagtgacaatagtgacatagcatggcccacacaaggccctccgacagaggagggcaccctttggcgaaaaggaaaatgctttggttggcacacgaacttagcatggcagctacagaacgggcgggcacgacacgggcacaagaatggggggccccttggcaggcacctgtgagggacaggtggggccc

SEQ ID NO: 626688 - DNA, 185 bp, Homo sapiens
ctgagtcgtgctgttagcaaacctgatggtattcttggagtcgtgcatgggtgaacagggagtataggagtggattaatcacacacccctgaggggccccagtgttgatggtcagcatggtggatatgttgttgcctaccctcaccacctgggatgtcgacgcggccgcgaatttagtagtagta

SEQ ID NO: 626689 - DNA, 401 bp, Homo sapiens
caaacaatgccttctgggagggagggaaagaattggatgcacctggcactcaatccactcagtgcctggctgctgctgcggtcctggggctggaaggaactcccactggggacacatctacaaaggagtgcgtggcgcagcgaggacggctactgctggagccgccacacagcgaactacatacttttagaaagagcctctgtcgcatgggttgaacaacaccaccaccccagaaaacccccacaaaacctggggaaaaaatatctaaatctctgatagggctcttagctagcagggagttcagtatgacagcccagagtctaaaaatattaattaaaaataaattgctttgggtagcatttaaacctttcccattcaataaaagaattctgtaatgagga

SEQ ID NO: 626690 - DNA, 683 bp, Homo sapiens
cctggtacggcccgggaattatgggatcggtgcggatagcatgtggtgctggaagctctgtaggccgggagctcgatgagagctaacggactatccggttggacatctggaccgctggatccggaggtggcgaccccggcctgacccgtaccctaaatccgtccccggccctagtgtggcggaggcgcgctgctctatttccccctagagctgcggggccgcctgtttacgtcatgcagatctccatgtggagcccaccatgcctatttcaacagtggccttcggaatacattgccaatgctggtagatgacacgttgccaagactcaggtggccgggtgacagctgagtttctatggtaagagcctcaaactcaacactgcagaagatgctaaagatgtgattaaagagattgaagactttgacagcttggaggctctgcgtctggaaggcaacacagtgggcgtggaagcagccagggtcatcgccaaggccttagagaagaagtcggagttgaagcgctgccactggagtgacatgttcacgggaaggctgcggaccgagatcccaccagccctgatctcactaggggaaggactcatcacagctggggctcagctggtggagctggacctaagcgacaacgcattcgggcccgacggtgtgcaaggcttcgaggccctg

SEQ ID NO: 626691 - DNA, 383 bp, Homo sapiens
  misc_feature (22)..(22): n is a, c, g, or t
  misc_feature (24)..(24): n is a, c, g, or t
  misc_feature (40)..(40): n is a, c, g, or t
gctctagaggatccacccgcgngncgaccttctgatatgnggtgaatatcccttcattcttgaggcatattcttgctgcatacacaattcagggtaatctgttttgtttttttctttaagcagttgaaaaatgatgggatacttcctgtctgccatactttctgatgagaaacctgttactcaaattgctgacacagctaatgtgttaatgtcctctagctaccttcaagatttcttctttggctttaattttcagaatttggactatgatgtgtctgagtatagatttctttggggttttcccatttggagttcactaagcttcccgaatgtaaaacacttatgtcttccgccaaactggaaaatttcagccattatttctt

SEQ ID NO: 626692 - DNA, 168 bp, Homo sapiens
acacacttcagccgggcatggtggcgcacgcgtataactcccacgttacttggcgcgcgctgaggcaggagaactcgtttgaacctgggacggcggaggttacagtgacgccgaggtcgcgtcgttgcacttacagactgggcaacaagaacgaacctccgttgcgca

SEQ ID NO: 626693 - DNA, 374 bp, Homo sapiens
tgcaagctgtagaaacccaggaacgatctgcaggaaacctctttccctttgtcaaccaacgtagttaggaagcagctttggatttgagtcaggccaattgggaatgtgactccacactcctccccctgagaagtctgcagattttcacttcctgctggaagttgtgggcagggaaagcagtgaatctggtccaggcaccttggggaaaagcaaagagagggaaaaacggtgcccagggaaaaggaatgctgctaaataatgaactaggatgcctccgccatcattccagaatcaggtggtatttgccaaagctctgattttcctcaccggaaaccctcggcaagggcactgcctgcggtgtagccattcctttt

SEQ ID NO: 626694 - DNA, 295 bp, Homo sapiens
tctggggtgacggggtacaagtaataccgtcgaaagaataccgcaagtggcgaagcggccttgtcatagactccgagatgtgctatcgcgcgcggcgggaagaggagagggatgtcagaatcgaacttgggatcaggaaggtggcagcagcgcctccatgtgctctgcgcggctgtcacgattgccacagcgcgctcctccccgcttcggcggtctaggatgtcctctccacacagtcacagggagagtgcggcctggcgcgccacaactgttctgggagaagtgcgcttgggtg

SEQ ID NO: 626695 - DNA, 508 bp, Homo sapiens
atggccttctcagccttgaaagggagccacttagggtcggtgtctgtgtaggagacaccaaggctgagatgcagacacccagtaggcgcgaggcaaatgcgtcccatttgaagaggcttgtatatatgagctctttgcttcctccctcccattaactttaaagaatggctctccatctccttgggcaaagttccttggccctttgtcttatttgggtgaacccctccagggtatttccagtccattggcatccaatctggcatcttaacggagagcggtctcatatgctatggtggtaaacgtgaactagtatttatgtgtggagaacactggctgttggacaggaaaggtgtgccaaaacaaagagtacggccggccctggaattgcatcagcaaaacccatttccccggtgcactcatgctgagctaccttccttcatttctgtcattactgctgagaacgtggactgtgcccagttgacctttcccttcctatgcctcatctggg

SEQ ID NO: 626696 - DNA, 143 bp, Homo sapiens
gcgggctgcacaaaggcaagtgcttcgctagttgccttccagttcatttcacctatgaatagatgtgtgaaaactgttcaacagtcctatacgctgcacatagtttggacgtgtcaaaccctgtagggtgattcagatggcga

SEQ ID NO: 626697 - DNA, 960 bp, Homo sapiens
  misc_feature (827)..(827): n is a, c, g, or t
tggcacatggaatatcgtcctccgatgccccgtccagaaggacctaggagagtaggtgagctttccaaagtatagagacgaatctttctttacttttgatatattaaatgggcaggatgggtatgcttagggctttctccttctgtggccccggaggcaaggagaggatctcgcaggcaacggctaacagtgattagtcactagtgagaactatgaaccggataacacccatggcaactgttccagcaaatctctagtagagaaatctgcattctctatcgatggaaagatataattgaactgatcataaagatgcttctgaaagagagaagtgtgccaaagcaagccgttatgtgttcaatgctttagtaagagactcagtagtcatagttttgcctactttgcagttcccaatagctagggacgtctcctggtattgaaactctcttcgtggagggcagagagggtgcctagagatgtgcactcagtaagtagctattgtagaggaccatgagagtatcgggtaacccaggtacgaagtacatgcttgacgcgtagtccgagggggacacgcgctttcttcatatactcttgtggcaactctaggtgagtggactatgtccttcccgaggatctattggccttggtcctgtatctctcgaggtccatgcgccgtttcaaaggtctataagcacctgacttaatggtgggggcccaggactatactccctttggacatacaagaagcaaggttgatttagggcgagaacttaagccgtaggagtttggggcaaagcgagaacagtatcgcaaggatctgggattcnttgctgtgagagaacgatggtttccccccacaggggaagttattcaatacaacgaaaggaaggcccaaggggactgtggtggcatgggaaggccacaaggaaaatcaagaaagttgccctggttgggaagtgg

SEQ ID NO: 626698 - DNA, 941 bp, Homo sapiens
  misc_feature (727)..(727): n is a, c, g, or t
  misc_feature (771)..(771): n is a, c, g, or t
tggacaaaagtaaaaatatttattttatcttaaaaatctgggtcccgcaaaagggccaacatttttttcagttcagggtcttgacctttcaaagaaagaaatctttcaactggagaggtgagttaataaagggattgtcagaggtgcttccagatttcttataaaccagtaaaccaagcaacccgggacttctagtttactggagctccttcttctagccattcacagttcctggaagggaagaaaaagaatgttggtttggcagataagggcgactttagaaaccaccaaagagaaaacccaagtctggccaggagctggcactggtgaactttgtgacgccgaagagggccaccagcagacagatgtggccaattcccaaaggttccatggacaacaggctatccaccttcctggccccaacatgtggtcccgttctgggtcttccagaacccgcctgggctctggggtggcctacctgggcctaagaatacttgggaaaccagacaactgggccagagatgaacactgttgcctgaagctcagggcagttgcccacaggggaggaatcccttcagaaggccccagtgtggggcacgccgagggagcagttcctttggcaaagcatgagtaaggggggatcagcactttagcaaagcaacatttttaacctatttttaaaagctggtaatccttccaatttccctcctgatggtagctcaagctngagctctaaacctgtgtaaaatcggcgagaacccctcctcgtgnagggcagatggactgaagtgggctcacagccagtggggcgtcaccggaaaagcctcccgctgaaactgtgatcatggtgaacactggaaacctgggaagggcagactgaatcctgggagaaatcaaccccttcttcgcggggggcagagtcaaacaggcatgcatggaga

SEQ ID NO: 626699 - DNA, 102 bp, Homo sapiens
gcctagtatcgagtctgtaatgtcgcggcggtgtaggtatgatgggcgttgaggggcgcatatgatcctaggctataatatcggagatacgtagcggtaatg

SEQ ID NO: 626700 - DNA, 433 bp, Homo sapiens
caggcagtgaagcgtcccaaagtgcggctgggattacatggcatgagccaccgtgccagccccagctagttatttttaaagacagggactcactatgttgctcaggctgatatctgaatccctggggtcaagcaatcctcctgcctcaggctcccaaagtgctgggattagaggcctgagccaagctgtctggcctatatcttagtcttaataatagtgaacacttactgagttattactcatataggggatcataactagcattttacatgttctgagttaatccttaaaacaactctgtgaggcaggtactattatccccatgttacagatgaggaatctgagctataggttaaatagtaagcagtcgatagcatttaacctcttgttgagatgagattttttttttacacagagtcttactctgtctccc

SEQ ID NO: 626701 - DNA, 173 bp, Homo sapiens
ggcagcgctggtagtcaactcctggctctagtgatctgcctgccttgctcccaaagtgctgggattacaggtgtgagccactgcaccctgcctcagtacctccatgcttcccacacaccctcctcatgtgctccttcctgacttctgggcccttccttccttttttttttttt

SEQ ID NO: 626702 - DNA, 269 bp, Homo sapiens
gagtttgcccaaagcttgctgtccgctgtgtagggctggtgagtggctgggtctgtctgagccatgaacaacttcaggtcctccatccttttttgggcagcggcagcatgttctaaatcatttcttgccttcgggagagatggacgaagttgcagttcaaaaatgcaggaatgccttgaaactacctgtcctggaagtcctacctggagggggctgggacaatctgcggatcgtgcacttgggacgagttatggcattgacttactcca

SEQ ID NO: 626703 - DNA, 356 bp, Homo sapiens
ctcgaggtcccatgcgcgacgcttccatcaagaatggggatcaagagacttcctccgagccggggagtttctttcctgccttcttcttttggctgttgtttctaaacaagaatcagtctatccacagagagtcccacgtgcctcagtgttcctatggcgtggccacgtgcacatgagctctccacgctccaatgacctgtttggttccaagtccctgtgagccagactgctgcgttttgggaggtggcacatttttcagtttgccgtattcccacacactccacaggttcaggtggcagggactcaggagtttcgtggagtctgttttccctttctcaccgcgagtcgtcgcgcat

SEQ ID NO: 626704 - DNA, 150 bp, Homo sapiens
  misc_feature (13)..(13): n is a, c, g, or t
  misc_feature (50)..(50): n is a, c, g, or t
  misc_feature (102)..(102): n is a, c, g, or t
  misc_feature (145)..(145): n is a, c, g, or t
actaattcgttgnacattcttgaagatgtaactggtatgactgtcaacanctggccctcttgggtttaggtggttgttccttgcacggagatccatgcctgnatctgcggtatactttttaggtgcctcattcgaccagttccgntggtt

SEQ ID NO: 626705 - DNA, 166 bp, Homo sapiens
catatctcttccagcctcatcatcgcatctggtgaaaagtctctcagaagtgcaaaagaggagaatcaataggaagagatgtgtcatggctcaggacttcaacgacactaaaacatctgggatttgaacgaaaactagaatcctgggttatccaagagactcatca

SEQ ID NO: 626706 - DNA, 343 bp, Homo sapiens
taatatcgatcttatgtctatctatgcggcagcgcatgcaggtgagctcgcagtaggaatgagtgtaagctgggctcgtgagatgctgcaggctctggtactcttcaaagtatatataactggtgaggcgaccctgacaggacttgagtggatggatggttttcctggagagggagactgaatacatgagaagtcaagggcagggcacactgagtgtagacaagtcctccagcacagcctatatagagctcactaggctgacatctgaggactctgctgtctaattctgtgctagaggggactactataggcgctactttgacttgtggggccaagggaccac

SEQ ID NO: 626707 - DNA, 932 bp, Homo sapiens
gacgacaatcgcccggaagcagatgggtggtgcgtggtgccccactaactcctgctatcaattggcagtggaccctcggggacctgttggatatgaagcccttcggtagatgatgctcttcgcgtgccgtccaactccacagttctggtgtacatggctgatcagctccgaggtaagccctggttccactggaaagtctgagccggcgtggagtgctgaggcactgctgtcatgctcaatggtgtgacttccatggtatcgagtgaaacgctactgatactagtacctgtgccattatgttgctcactggcttgcagagtgggcagcctaagcattggctactggatggaaccactgataggtagtagggtgcgtgacgtacaggagtcaccagttgttgaaagtgtcagtcaccttatcagcgtaccacatggacaatcacttgcccatcatctctgcgggcagcgaactgtgtctacagcaacctgtggagctggaaactgtgatctgccctagacgctctcttccagaagatgccctccaatcctttccaccctattccctaactctcgggacctcgtttgggagtgttctgtgggcttggacttgtgtcagagctgggagtagcattcggactctgggtcacatatccagctgagtgagagggtagacgtcaaaaagcctggagtgacgaatcctgcctctccccaaacattaatccatcaaacgtattacatgtacaacaaagtgtcaccccatcaccctggggaccatcacctggtgaccaccctaagtgcccattccccaaagaaaggatgaatcatatggtaagtgacaccaacggtcatgataggacacggcacagttgaacaagtcaacactcatggcaagggaagaccacaatcagacaacgtactatcagaggtaatccc

SEQ ID NO: 626708 - DNA, 1520 bp, Homo sapiens
actggcactatacagcctcttgacagcgtatgggctacaaacttggaatacgggagggaaattcaatagttaaacggctagcaggagtgtgtgaacaactagtgtgctgtgttctcgcaacggaagcagtctcgacaggatactggtgtattggtagggcacttaagagttaaggttcaccagggatagcatgtgcactggcataagctagagaacctgcggttaggctatgacacagtgtacctgcgtgcacattgagtctggcgctggtgagacgggaatacagctaagtcgtgggacttcggcctggtgggcagctacgcgaagttaggagagtgaaggacctcactaacggtgcaacacctatctagaaaccctgagtgacctcgactggtgcaaggagaacactgtgatcaacggtgacaatggactaatcttgcgtctctgctatcccgcctgtgtagtatctacgtgcctgaggtttgaatgtctggtaggccctcagaggtggaatgaagcaaatctatttcactccagccaagataacattagcggaccccgtgccccttaacgaaagactatggcacgcaggtctttggcatatacgacatctagtgcgttgcttcatgcaaccactaacaatcgagcagagtcgcctttccatcatctgtgatctaccccttggctctgggacaccatatcaagacaccagtatatcggtcaatcattgtatgtgaagcgtttgccatggtaattaggttcacacccaacacatatgtcttcaaggcaccaacttggaacttatttcttgaacagacacatttatgccccgtagtacggcgtgtgcgatgttatatagtccctgctagtgagtggaaacaaacgcgtggacgggcaccttgacaattttctcccagcaattactgcggttgcacgtaattcaagggcccaagacctaatttgtacccaccgtttttagggtattgaggtatacacttgtacgaaaggcagggaatttgcacacttttgcccttaaatatcccgagtagtgggtcctcacacagcttgtagcgcccaagaagatagcccaatggatctccaagacatctttgcctatgggccacctacaagcgccacaaacaagaaactttcccacactatgagtcccccacaattacaactgcaaaacacacagttcacaaacccagctcatatgaaacacacctccaataatgactcaacaatcgtcgtgtgatcacaacgtcatcctgctatccccctttaaatcctcaccaaatcaccctcatacacatgcagtcaaacaaaacacccacaaatacttcgccacccttcactccaataagcatttcaacaacccacaaaacaatatgataccaccaaaatattattgcttacattagtaacaaacttcctacgtcaaatcacacaactaatatcaaacctaacaaacaaatcaaacacacaaatacaacacaaaacaacatctaactaatcataaa

SEQ ID NO: 626709 - DNA, 321 bp, Homo sapiens
gaaattcccggaacccgttttgaaccggggaagggcccggggggtttttttcccccccaaaaaacccccggggaaaatttttctcctgaaaaaaaacgggggagaaattggttccccaaaatttttttttttttgggcaaaaacccccccccccccccggatttgtcccccccgggttttggtgttttttgtttcggaaaaaaggaaccaaagggggccaaaaattaatttttttaagaaacccaaggggtttggggtttgggatttgggggcccccattttaaaggcccccccttcccaaaaaaaattttttccccctta

SEQ ID NO: 626710 - DNA, 116 bp, Homo sapiens
gcggtttggtcgttcgttgggcggtgttggtttttcgctcgtcggctgcggctcttccccgggccgcagaaggaacgcggccggttcgcggagtaagctccccataaagcgttggt

SEQ ID NO: 626711 - DNA, 243 bp, Homo sapiens
cggcccgaattctaattacgggtgcgccccagtacagacgtctccatgcaaagcaggagtagcctgcaattagccagaagaattctgcagcaaatgtggttacaggctaaaggttgctctaaatttgacagctcgagctacagctataaatagtttattgggttgaaatttttttttgtctttgtcaggacatttttgcttcatctgaacattttctacaaaatagtgttacagctatggttg

SEQ ID NO: 626712 - DNA, 410 bp, Homo sapiens
ccagctacatcagcaatcatcgagcctcccctatcagtcagctatatgaccactctcaggagcccactactatcgctatgatgagcagttcaacctgtggcttgagcggctgagttctggcaaagacaagaataaaagcgttctgtagaaccaggattttcgatgttctgttagagctgaggtacgccatcttcgggagggtcctgtgttaccgcttgatgctaagaccctcaggatgttgcagcttccctttttgacaatgaagttcttccgtgatcacattacaatgaagcagatattgctctcccgctggttcggcaaggtaagccatggccacctctctgtgattacaccccctttaaaattccccacccgggtaccgaggcccaatttggtaatcttggcctatc

SEQ ID NO: 626713 - DNA, 121 bp, Homo sapiens
aatgacaagagaagagcaagtggagcctcaatcagctgtagttattgttgtagtctttgtttgagacagagtctcgcatctgtcgagggtaccagagacttcagtaattcagtaatcatgg

SEQ ID NO: 626714 - DNA, 151 bp, Homo sapiens
gctcagactcacgtcgcactcctagtcagttcagacttgtcggaactcggaacactcgagacccgaaatttctaaccgcacgcttacccatcagcggaccgtcgtacagatacctcgggattctgaagagcttaccataccaaggttaact

SEQ ID NO: 626715 - DNA, 667 bp, Homo sapiens
  misc_feature (1)..(1): n is a, c, g, or t
  misc_feature (93)..(94): n is a, c, g, or t
  misc_feature (207)..(207): n is a, c, g, or t
  misc_feature (229)..(229): n is a, c, g, or t
  misc_feature (233)..(233): n is a, c, g, or t
  misc_feature (241)..(241): n is a, c, g, or t
  misc_feature (252)..(252): n is a, c, g, or t
  misc_feature (255)..(255): n is a, c, g, or t
  misc_feature (271)..(271): n is a, c, g, or t
  misc_feature (311)..(311): n is a, c, g, or t
  misc_feature (316)..(316): n is a, c, g, or t
  misc_feature (318)..(318): n is a, c, g, or t
  misc_feature (320)..(320): n is a, c, g, or t
  misc_feature (324)..(324): n is a, c, g, or t
  misc_feature (357)..(357): n is a, c, g, or t
  misc_feature (376)..(377): n is a, c, g, or t
  misc_feature (392)..(392): n is a, c, g, or t
  misc_feature (397)..(398): n is a, c, g, or t
  misc_feature (410)..(410): n is a, c, g, or t
  misc_feature (416)..(416): n is a, c, g, or t
  misc_feature (461)..(461): n is a, c, g, or t
  misc_feature (490)..(490): n is a, c, g, or t
  misc_feature (504)..(504): n is a, c, g, or t
  misc_feature (568)..(569): n is a, c, g, or t
  misc_feature (573)..(573): n is a, c, g, or t
  misc_feature (595)..(595): n is a, c, g, or t
  misc_feature (663)..(663): n is a, c, g, or t
naagaaaacaaacaagcaaacaaaaacaattcaattcaattggatccagctccttaccctcttgtttgtagaaaaagagcatcatctcctaannaaactttcttcttcagattttgtttctgtattactccactcttattttctaaatacctctttaagccatcatttcataactgtagttagaaaaggctttgcgcattttttctnattattttttcatttttagatngacnacaagcantttcatggganaantcttcttttttgtatnttctttagatggtaggtcagttctgttcagggtactgtcngtttntnanccancacaaatagagaatcctattttttaaggaggtnttttgaaagtgctcccagnntctaagcatttatanaattnnaattgttgtttnaaagtntaaaatactaaaggtggcattattccaggagctactgtttaaaanaatgcaatgcccgttcagagaagaaaatnagtgtttgaaaatntgagtttgtttaaaaaataataactatgcgtccaaaaagaattcctgaagaagcacttatatgnnaggnacatgtttttaattttaataanattggtttacctaaataaatatgtagaacctaataattgttctctatatattcatactttaatactantcta

SEQ ID NO: 626716 - DNA, 1734 bp, Homo sapiens
  misc_feature (529)..(529): n is a, c, g, or t
  misc_feature (956)..(956): n is a, c, g, or t
  misc_feature (1095)..(1095): n is a, c, g, or t
  misc_feature (1427)..(1427): n is a, c, g, or t
  misc_feature (1447)..(1447): n is a, c, g, or t
ggaaacgctgcttctgctccctcgctgcgggtgtttgattggctccccgtacctttttgtttggtgagatgtttcctcaccaccacgcgtcgtgttgttatttatcataacgcgggagtgtcttatccacatgcgcccgccacgcctgcttgttggtgataggcgagacatagtttggtgtgattatatatcgccccgccccacacaggagtgggcccccccaggtttgcggccgcccctcttcttttcacagggtggtctcctcctgtgggtggtagttgtgggagacctccccgtctgtggcgcgccgcccctcttgttggggagagattttctcttctcaccacccaagccccggcgggcacaccaccccaccgccccccaccgatgagtcgtgcgcgccgaacgcttattttttttgtgcggcgcgccccacctagtagagcccccacaggagagaatgattgtttgtccgcctgtgggagagtgtgtgtgggcggcccctgtttgttctttcctccctcttcgntgtgagcccacatggccgccgggctccacacaggaagttgttggtgttccttcttctccgggagagttttcttctccgggacgggagattgtatgtgacacccctctgcgttgcccacaacgctccttcttttttggtggaagatttaatccccccctcggcggggctggttgtttggtgtggcgccccacacaagtagaaccgcagcacgtcgtgtgttccccacgcgggaatttgttggaggaggcgcccccccgccgtcctccaacgagaaaagttgtgtgtgttgtttttctctttttggtgtgtgttgccccgccccgcctttgttttttcggcgcgtccccctcaaggccacagggctactggtccgttcaaccccccgtcagttgtgcaagtattcgctgttcgtctcccccgtgtttgngtccctcggtggggaacccaccaaaagcttgggttccaccaaagggtttatttgggagaacacccctcgcgggccttatatacgtgtccacaccacgtcttggtagatagaggcccccacccacacccaccttgtgggncacacacaccacgcggccttatattcttgagaccacacgcgcgtgacacgtgtttctctctctccacgcgatggggagttcccccctctcgtgcttcttttcttgtggaaggccccacgggagtgtggcccccacgcgccccactcgttttatatgggattatttcttctccacccgcagagaggccacacacacacaccgtctgtacacacgcgcgctatagagatggtttgggggagcacttcactcacacaccccccctcgtggtctgttcaccgccctcttaccccgcgtatctctctggctctgtggttgtgctcgccacacacagngctcccaccgcactctctcnagagttctcgggagtattatagagagggagaaagagttactcttgtagaatgtaactgtaacacccagaaagattactccagtacccacccaccctagagccagaacccacccccagtgccaccctcccctggccctggtcttgtctgtatggcccagaacatcttgttttgcctggctacacaccggcaccacacactggtgcgagtttgcccggtgacccttggccaccccctagaaagatttatggccgaacctttcacccaattaaaaaaaaactggcttttc

SEQ ID NO: 626717 - DNA, 261 bp, Homo sapiens
gttttagatggaaataaggaagttattgggaactggaataaacgtcactcatgttacaccctagcaaagaactcctgcattgtgttcatgtaccaaggatctgtggaaggttgaatttaagagtggtaatttagggtctctggcagaagaaatttctaagcagcaaagcattcaagatgtggcctgactccttgtaacaacctgtgatcagatatgggagcaaagggaatgacttaaagtgggacctaatttccaaagggg

SEQ ID NO: 626718 - DNA, 393 bp, Homo sapiens
  misc_feature (58)..(58): n is a, c, g, or t
  misc_feature (66)..(66): n is a, c, g, or t
  misc_feature (210)..(210): n is a, c, g, or t
  misc_feature (226)..(226): n is a, c, g, or t
ttatttttaaaccaatctcagttgacctttttacccacccagtctgctggttatactnatgggctntcatagtgtctttccccaaagagaaactggcagctaattgttcctatgccttgagcaactctggtcatggactgttgggttgtctggccttagcataccagattaccccgtttgcctgccagtactggggtatccgggcccagntatgtgtgtgtttgtncagtggatgggagggaagcagccgcctggtggagggagtgttagggatggaagagatgccttactttctgtcaagagaaaggtgttttttctttaattgttcaaagtggacgtgtttactcaattcatttctttattaattcatttctttatttaaaaaaaacaaca

SEQ ID NO: 626719 - DNA, 701 bp, Homo sapiens
tcgttgttcttggtgttcctgggtgttctggggtgccggtgttgttcttgtccttcgctgatgtgcggttggcgctggttggtgcttgtgttgctgaatgtggtctatggtcctcggttagtgttggtggtttgggtgtgagtgggtcgttgaataggtgtgcggttctagtgtccgacggtttgttgcttgtgcggcctgatgggtattatggtggtgctcgggacagtgctgcacgcgcggatctcaatttgttggtggtatactctttcgtgttgctatagttctgttgttgccctggagtgtttgtggtcactttcttggtgtgtgatgtgtcgcagtgatgtatttggctgtgtatgacgctggtttcagtgagctggagatggcgtgagcgtctgtctgagtggttcgtgtcgccttgctcgctgtttgccggcgtgtgtgtgtgtggtgccctgtcgtcgggggtttcttgcgctatgcttcattgatgtccccctcgccgctctgacagcagttggttgtgtccggcgtttttcttgctttgaatgcatcttgatacacctctaatctcaatcattgttctgtatctatctaaaatagtgaataaatcattgagaggatcatatactttgatagtatcaatacgacctatcaatataataataacaacaatacataacaattatcccacaaac

SEQ ID NO: 626720 - DNA, 1162 bp, Homo sapiens
  misc_feature (115)..(115): n is a, c, g, or t
  misc_feature (120)..(121): n is a, c, g, or t
  misc_feature (124)..(124): n is a, c, g, or t
  misc_feature (146)..(146): n is a, c, g, or t
  misc_feature (153)..(154): n is a, c, g, or t
  misc_feature (161)..(161): n is a, c, g, or t
  misc_feature (164)..(164): n is a, c, g, or t
  misc_feature (171)..(172): n is a, c, g, or t
  misc_feature (175)..(175): n is a, c, g, or t
  misc_feature (185)..(185): n is a, c, g, or t
ccattattttggatttattgcattctgaagtactccggggggagggcctgagaacgatccgctttatcagcagttctaaagccttattacctgagatttatattctggggggaanaatcnnatnggattatcatacgtatttcacnggagatnngagtttnggncctgacnnganacacgtactnacctggaaaagaggctacggtggagaattaaagaagagaaaacgggtaaacaccaaatccggggtgagaagaagaacgtcgattctaaaaggccagccactcacgtggtagcggtgacaaagtcccctcggggggtagccaggagcagaagcggtgagccacgtggcagtggaagcggtgggccacaaagggccacactccccagggagcccacaagcaagcccaggggaggcctggggagcagcttggcctcaggccgaagtcacttctcatcatccgggccatagttaatcgtctgtaaggcctgagctatgagcatcggcatctcccgggtgctggccgcaaccacttcgtgcaagccatgaggtgcgaggggtccacccgaaggggctatcacgatgccgacgggattctcgtgatgatgacgggggcaagccgccagaatcccagaagtgcaggcaaacgggtaataggcatccggggccctgtaggcagggggcagaagtgccatgtgggagcttccaatcactcgggaccccatgcgcctgggaatgacaaagcgctccatgttacccaggaacaggtacgggacagcagggcacgttgggggccactctgtcaaacccaggccttgagaacctggtccccgggagaaccggggacggtgggcatgtgaaaaggggccggaaccccggcgccgtgtataagggccctgtgtggtggggaaaaaaaccgcgattaaaggcatgttgtaagaaaacaaatggtaggggggaagatggttctaaaggaggggggagaaaaatctggggggaagtagggcacgtttaaaggggaaagtgggattataaataggcggggacacaacaaggagaagctatgatggaccagggggtgacgacaaacaacttgtaggtgtctagtgtgtgacgttagttagtgtgttatttgtggttggaggatgatagagagagtgc

SEQ ID NO: 626721 - DNA, 1052 bp, Homo sapiens
gggcacagccaccgctcatgtggactcagcttgagtatcccattagtcccgagacgctcgacccactgcaagattcctttcccgtgcagacatggcctcatggcaccacacacacaccgccgctgaagatcggaatacattggtggaacaggcctggctgatccagcacttttagacaggaagaactgaaaaatatgtggatactccatttggcaagccatctgatgccttactacggggacgctcacaaaatgttgatagcatcctccttgcaaggcatgcaaggcagacacaccatcatgccttcaaaggtcaactaccaggcgaacatctgggacttcgaaggaagagggctgtacacaatgtcatagtgaccacagctagtggatccttgaaggaggagactacagcccggagaatattgtcattcatcgattcagtacattcaccagggacacaactatgaagaactcaagaccatacacatatgcatgcgacagtcaattcatatgttcccagacgaagatgtgccattcatccacatgtgcatacacccgatatagcctaaaacacgagacaaggatccctcgataacaaaacgagcacaccgacacgccacggcacaccagagatgccactcacaaagagcgcacacatcggacacacaaccccaagggacccacggtaataagaaaccgggagacccacacgatacacgaaccgcaaactcagaagaccacgaaataactaactccccatgggacaacaaaacccacagatgtggaaacgggcaaacacacagcgaagaacatagagaacaccaaacactccccaatagcgcaaccgataatgaaccactctgcaacaggtcagaccgaccacacaattatgtgaggacacggacttaaaacagccatagagacacaacacatcatactgcacacaactacaagacacacccaacaagaagaaatgttgccacagcagcctccaataccagactactcccaagacaataccgctatgttaaccaaccgcgaattaacggtcca

SEQ ID NO: 626722 - DNA, 929 bp, Homo sapiens
ccagcccatgacccctaacaagggccctctcagacctcctaatgacctccggctagccatgtgatttcacttccactccataagcgctcctcatactaggaactactagaccaacacagtaaccatataccaatgatggcgcgatgtaagacgagagaagcacataccaaggcacaccacgcaccacctgtccagagagaaggccttcgatatagggagtaactcctattgtattacctcagaaatgaaacttctatcgcaggattttatctgagacctgtatataccacatccaagcctagtcccctaccccaccaattgaggagggcacaaggtccccagcaggcatcaacccgctaaatcccctagaagttccactcacttaaagagtatccgtgttactcgcactctaggagtatcacatcacctgaggcgtgcaccatagtgctaaatagaaaacaatccgaaatcgaataatacaccgcactgttaattacaaggtgtaccgagtcgctgattgtaccgctgcctacaatgcctcgagagtacctgacgaagtctccgctatcagcattatccgacgggatgcgacggctcagcatggtggtagccacaggtcttccaacggagttcgcggcattatgggctcaattttgcatcactgatcgtgattcagtcacggcaactaaatatttcagttttgacaatccgaaagctgtgtacttgtgggtttcgaaaggcagccggctgagtactggaattttggtagaatggtgggtttggcctaattgcgtggatggtgcccgatcctaatggatgagggggtcttaaaaaaaaatgggcataaaggggatgggtggaaataaaaaaaaagagggggggggggtataaaaatataaccgtgagaggagcacaggttaaacagataa

SEQ ID NO: 626723 - DNA, 453 bp, Homo sapiens
ccagtcggtgctttataaactgcttatcccatttgtccactgaaaatacaacctagattccgttcagttaaatatctgttgaaggaggtcacatgaataagattgctccaactcattcttgctggtgtgctcccgagggttaatataatatagttcgtgtcttctcagtcgtgaggaacaccacttgtcacttaaatcttccctgggatgcttcgtacattctcagcctagatacaaatgggatgcgacagttgagggtctccaggtcataaacgaatatgtcaacttgcttagagatgattgcagtgatctgcgtccttgcatgagccctacgcactccttcggtgaggtacaagaagtggtagttggtcagactcaggatttcctggtctgctcacaggttaaaggaaagcactcagctttcccgtgtgctattcccacatctcctcatat

SEQ ID NO: 626724 - DNA, 550 bp, Homo sapiens
gggggggaaaagaaaaacccatagttttattctgatgctgaatgaaaataaatcatgtgtaatcattcagctggttattgtgaaaaaaattatgccaccttgtgggccgtttgggccaatgcattttaaacttcattcgcgttattgagcccggccaaagtttagcgtaagtggtaaaacttcccggatgtggagtgaatatacatacaacggcacgtttttttaaaatgtacgacgaccgagaaccctcgtgtaaccccaaattaatgtattgacagaaaatccctcttggaacacttttctgaaaacgaaataggccggcacgttcgcctttctaaaaatggacctcctgaatggaggggaaaattgttcgcgtattttccgataaaacccgcgtaaattttggtaaatagctaaattttaaaccaaagggcaaaaatcgtgaaatcctttttataaaaaagaattacaccgaatagggtttaggttgtttccctttgtgcaacaaaattcctttataaagaaccgtgggttccacgttaaaaggaaa

SEQ ID NO: 626725 - DNA, 146 bp, Homo sapiens
gacgatccaagaatacacgctggagtccctctacgggaggcgctgcgcttacgtgaggtgctgagcaaggccccacatggtggagggttgcagattctgagaggcgtttctgtggggtgagagcagagttgggtggtccgagcgga

SEQ ID NO: 626726 - DNA, 158 bp, Homo sapiens
  misc_feature (155)..(155): n is a, c, g, or t
acggggtacggacgtcaggtacgttacgtacttacggacggaggggtagttacgaggggatcggacggacaacaggttggggacaccacgctacacactacggttgttgtagactttggtatacacaacacactacgtacgacgggactgactgncta

SEQ ID NO: 626727 - DNA, 509 bp, Homo sapiens
  misc_feature (35)..(35): n is a, c, g, or t
  misc_feature (106)..(106): n is a, c, g, or t
  misc_feature (148)..(148): n is a, c, g, or t
aagaaagttttttcggtgttctgggaggaagaaanttaggtgtcacggggaaaggttccctggtgtgggcggcccaccccacctgccttccttcagcacctttagngggatttggaagccaggggttaacccattgccttatttatantaggatggtcatggcccacacatacccgtcatagaagaaaaaagggggggttttttttgatttttaggggggatttttttggctgcgggaggactaaaggggacttaatggtactaaggttaaaggcgggcccttttccctttatatatattttttaaagggggggggggggttttggccttttttaaaaaccccctttatattacattgggaaccctgaaactttaatcagagggttagccttgaaattggggacttttgggaagggtattagggaggtttgccactaaactaaaccgggaaaattttgatggttggttttaaaagattaatggaaaataaacatttttgtccccccgga

SEQ ID NO: 626728 - DNA, 157 bp, Homo sapiens
  misc_feature (28)..(28): n is a, c, g, or t
  misc_feature (35)..(35): n is a, c, g, or t
  misc_feature (68)..(68): n is a, c, g, or t
  misc_feature (112)..(112): n is a, c, g, or t
tttctcctacaagtgagattttagatantgttaancctgccagtctttctcttcaagccagggtgcancctcagaaacctactcaacacagcactctaggcagccactatcnatcaattgctagttgacactctgcattaaatctatttgccatttc

SEQ ID NO: 626729 - DNA, 1298 bp, Homo sapiens
  misc_feature (1043)..(1043): n is a, c, g, or t
gaacgtgctgcaggcgccggctgtgcgctgagaatggcggaaatggatcctggtatgccgagttcccccagtctcccaggtgctgcgcgctggggctgaggttatggctcgcttcgcggccatggctgtgcgcgcagggccggcggatgatgttggtaacgtcagggcggcaccagggtcccacttgataaggcgcaggtcggtggcggtttcctgggaacaattttcaggaagcgaggcgatcgctgattgcaacccttcgagccgaagggcctatcgataagcacggccgggataacggggggtccgtggtacgtaggtattcaggcggctacgggatctgggcctttatccgcgccttaatggccaaaacaggttttacacaagatcgccaagaaacttgggcgtagagaccgggaatgcttgggagggccataccggggcccccaagcccgtttttacaggagcttacgttagaggccctgggaaggccaggatggaaaaaattcggactttcgcgggaggcaatggggacagagaagggggccaccttgagagaagacgcgatacccaaaagggaagggtctagcagcgatatgaagcagggcacacacattcccttggggacagtaaaaaaggttccacacccaagtttggggcggaagcactaaattagcggtttcttggtaggcatgtcttagaagccacagggactcaaaatcccgcttaagaacccatttctgtgccaattgtttataacccgggacatcaagctggtcgcacggaatcccaatggaaccggtctccacacaattgctggagaacagaaatcagaccacttggggggccccacggcggataaccaacgcaacatgctgccacaagggtctcccatgcggaaaacagtgcgccccaaaagttaaaacccagatggggagaggacgcgattgataacgagcaggacaccggaagataaccacggggggggaaaacttggacagccggggttctgatcacagcgacacacgctgtggcggacaacngcgagcgagaagattctcccctcagcagacatccacgatcgttcctccctgtcagccgtctgcatctagatcaccaccgggacgagcaagacgcaagcgacagggagagagaagcaagcggccccacagtgacgagacgacagacgagaggcagacagtagcagcccgagaggagacaacacacaacaacaaccagacgagagacgcgagagacaagaccaagagtcagcacgagccagaggcggcaagagagca

SEQ ID NO: 626730 - DNA, 1360 bp, Homo sapiens
  misc_feature (332)..(332): n is a, c, g, or t
gctctggaaggttgtcctgtgatcgacgcacatgcttggtagcctgatacacacatgtccctggctaactgtgttgcatcactcaattggtgctgtttcgcgtgcttatgcctacgaccgactcgctgcatgaggttgcatgaatccactggaaatagtgtcgtgggcgcttgcgaactgacgcgtctatcagtttgactctcttacctagtagttgcttccacgatggtctctcatagaatggactatctcgagcgctctagtggacactatttctcactgggacaagcagatgctaggggttgtaagcaccagggaggactgactttgtncactctaactcgccagaaatccatcattctactccatcgttaacgcaagcatgtccgaagggatcgccatgcccagtatatctacatgtgtggcgtgctcgtatggacatagcgccgccctttatcttcaacgtgtttgtcgagaggttccccacatttgtctgataccttaccacacggaccatttggggagccaaagggggcgcctgggtgggcgacctattgtatggcacttggagccgtgggaaagtggcaccaaccaaaggggttgtttctattgccacttcgtcccattagacaacacgtgcatacaatagcccctaggaaggggccttctcgcgctagttgaatttgcgggcaacaatggggttggttttggtagatcccctcttggtaaacggctatatggtatccacaactacgttcccctcctagagggaatcctttttccatggccataccaggttccatttacgtgtgaccaccccaagccagaagctggcaattaaagaaatccccttacgtgtagaaacccattgggggtctcattcccaatgtaaccataagaatgtatgcgtctatttcgcgtgagaccttgcgctccttggggtaagaccactatgagcgttcacacaagtgtgcgcgaaatcgagcgttggtccaccccccaaaggaaagaaagcgttgtggggaagtattaggtacccctttacctggtggaacaaacgttgttgggccaggtagatatagcgctcgggagggcggtgtcgtactacacacgacaccttatttgacttctccctttgtccttctttactttgggtcgccttggccacattgggctttgtcgtgagggctaacgtggtcgagtgccacgtggcacgtcttgatacttggtggagatgcttcatcttggcgtcgttagggtccttttgccggttggtttgcggagcttgggcctacccgttgttcatgtcggttccggaggccgttgcacccttgaccggtcctcagttccaaaggccttg

SEQ ID NO: 626731 - DNA, 1293 bp, Homo sapiens
ggcggagctgaacgtggacagtctcatcacccggctgctggagcagccattgtggatgagaagatcttctgttgtcatggcggattgtcaccagacctgcaactctatggagcacgattcggcagaattatgagacctactgatgtccctgatacaggtccgctctgtgccattcgcgtatgcgtctgcatcccaccatcacggcatgtgccaaggctggcggcagcacacaatgccatcgctggtgctatccattctacctcttcggcacgctgatgctagtccagtcccacatctccatcgccacatccgtccatgcattctcagcattctgcatcttgctcggccagctcccatcccagcgctggcggtgggcacacgcatgcgcataatgccaattctatcactcgcctcacgcaccgcacccagcgccgcgctaccgccccgatctactgcttttccaatgccctcccgacacacgtctcaccctggttgtgccggcacgcctctctcgcaattcaccctagacctcggcctcgcgcaaccttggcactcgcagctggttcgcgcaccttgcacacacccttctctgacactaggctacggctcaccaaattctagaacacacgacccctactcttccggcacacacacctcaacctccgtcgggcacacaaaccgcgacacataggcctataacccagtaaccacccacacgcttaccttcgcgcatcggcgcacccctagcgccaccttcctcttggccacctcgacatcacccctgggctatcacacgctacccacaccccttacgcacacaccctagggctacttaaaccttcccccgggttccctgacaatcgcaaaaaacacaccgcgggattggtcaccggcaacaccacgcggcacaacgtttttcctgtgcgctatcaaccgtgcatcccagacctccaactctcccgcaggcacctacttatgggacttacacacgctggcacctccatgctacattgtgcacaggttacgacgcttacccgtctctctacagccagcttttcgttgtacgacaaccgttggctacatccaagcaccccgccattgtcgccacgtgcccccaagctcatcgacggacaaaccacccgccatttctacattggatatacggcatcttaccccacccgccccggttatctaaccacgctcttacacatgcggtagcgacaacggcgcgcgataaaaccacgcgcactatctcgtccacacacaaatttatgttcagtaactatctgacag

SEQ ID NO: 626732 - DNA, 895 bp, Homo sapiens
ggctaccaccgctgccgtcgccgccgccattttgatggcaggaagagtccggttctgggacagctggagacagtggtggtgactgaaataactttaccaagggaaagctattttgcgaactatcttctccagcggagatggcaattagaaacggggtttcaccatgtttggccaggctagacctcaggtaaatccaaccaccttctgctccctaagtgctgggatttaccaggccaatgagccaatgcaacccaggccaaggatttgaagaaatctccaacagggttaaaacggggtggcttttgtaaccacgagcccagaactggttttccctattctccccaggatttggctcttttaggtttaaacagggttgtccaaattcccaaaagcctttttgcgactggcaggatccaatccaggttcgggatgagtctcatgggttggctgctggcaaccttccaggatattattgctctcggaacaaggttgttggcctggattggaaactaatgggaaccctttgggaaccttccaaagaatcaggaagggttccaagctttccttggggaacaccattaggtctttggatttgttcaaccttcaatgggacttgctttcaccaggaaggaaaaaggcctggttccattaaaacttttgccctgatgtttctagcagaacctttttattcaaagtgaacagaccattgagtttggtgatgggccccactcattgttgaaatgacatttccagggtaattgatgcccctgtttgaaccaagaaattaaacagtgcaggaaactttcactttgaaagtgcccagcagttagaagtgtggcataccaaaccttgttccagaattggtgcgaaaaaggattttgaatccacggtttcc

SEQ ID NO: 626733 - DNA, 946 bp, Homo sapiens
  misc_feature (2)..(2): n is a, c, g, or t
  misc_feature (111)..(111): n is a, c, g, or t
  misc_feature (144)..(144): n is a, c, g, or t
  misc_feature (152)..(152): n is a, c, g, or t
  misc_feature (223)..(223): n is a, c, g, or t
  misc_feature (239)..(239): n is a, c, g, or t
  misc_feature (247)..(247): n is a, c, g, or t
  misc_feature (255)..(255): n is a, c, g, or t
  misc_feature (325)..(325): n is a, c, g, or t
  misc_feature (347)..(347): n is a, c, g, or t
  misc_feature (363)..(363): n is a, c, g, or t
  misc_feature (376)..(376): n is a, c, g, or t
  misc_feature (458)..(458): n is a, c, g, or t
  misc_feature (485)..(485): n is a, c, g, or t
  misc_feature (501)..(501): n is a, c, g, or t
  misc_feature (509)..(509): n is a, c, g, or t
  misc_feature (512)..(512): n is a, c, g, or t
  misc_feature (514)..(514): n is a, c, g, or t
  misc_feature (516)..(516): n is a, c, g, or t
  misc_feature (528)..(529): n is a, c, g, or t
  misc_feature (553)..(554): n is a, c, g, or t
  misc_feature (574)..(574): n is a, c, g, or t
  misc_feature (587)..(587): n is a, c, g, or t
  misc_feature (610)..(610): n is a, c, g, or t
  misc_feature (639)..(639): n is a, c, g, or t
  misc_feature (650)..(650): n is a, c, g, or t
  misc_feature (663)..(664): n is a, c, g, or t
  misc_feature (667)..(667): n is a, c, g, or t
  misc_feature (672)..(672): n is a, c, g, or t
  misc_feature (755)..(756): n is a, c, g, or t
  misc_feature (833)..(833): n is a, c, g, or t
  misc_feature (926)..(926): n is a, c, g, or t
tngggtaggaaaagccattgaggaggaactacaagagattgcctctgagcccacaaacaagcatctcttctatgccgaagacttcagcacaatggatgagataagtgaaanactcaagaaaggcatctgtgaagctctagaagnctcttttnaaagacaggactctccagcaggggaactgccaaaaacggtccaacagccaacagtgcaacacagatatctntttgaagaagacaatnttttacgntctacacnaaagctttcccattcaacaaaaccttcggagcccttgcgagcaaaaagcacgaccatgcaaatgtgaaanccttataatgttccagaacctngcaaacgaagaagtangaaaattaacacngcgcttagaagaaatgacacagaaaatggaagccctggaaaatcgcctgagatacagatgaagattagcaaatcgcgcagcngcattggtagtcattgtatcacggatnacaatgagaacgccgngcggggcnccnangntcaggctattgnnaaatcaataatgttgtgaagtaanncaatcaggactgagaaaccnggtttgccacagnacaaagacaagaagtatacactnacttgtataaatttatctaggaaaaaaanccctcagaatnctaagatgaattnnccnggtgngaatgaataagctatgcaaggtattttgtaatatactgtggacacaacttgcttctgcctcatcctgccttagtgtgcaatcnncatttgactatacgataaagtttgcacagtcttacttctgtagaacactggccataggaaatgctgtttttttgtantggactttaccttgatatatgtatatggatgtatgcataaaatcataggacatatgtacttgtggaacaagttggattttttatacaatattnaaattcaccacttgcagaaa

SEQ ID NO: 626734 - DNA, 467 bp, Homo sapiens
aaataacctgcggaagacgggtagtctgtgtaagacgtgtagcctgaggaagacggaaccattgacttcccggagttcctgaccatgatggccacaaaggggaagggcacagacagtgaggaggagatccgagagccgttccgtgtctttgacaaggatgggaatggctacatcagcgccgcagagctgcgtcacgtaatgacgaacctgggggagaagctgaccgatgaggaggtggatgagatgatcagggaggctgacatcgatggagatggccaggtcaattatgaagagtttgtacagatgatgactgcaaagtgaaggccccccgggcagctggcgatgcccgttctcttgatctctctcttctcgcgcgcgcactctctctttcaacactccccttgcgtacccggtttctagcaaacaccaattgattgactgagaatctgataaagcaacaaaagatt

SEQ ID NO: 626735 - DNA, 115 bp, Homo sapiens
atctggcctcagccgtgtcttctcaagtgcagcttctgcctggcagcttcctcctcctccaggctgttcttcaaggtccagcatcgtgtgggccatcttcttcctttcagacctg

SEQ ID NO: 626736 - DNA, 600 bp, Homo sapiens
atctctttagtaaagtggatgtttaaatctattgaccattatatagagttatttgtccttttatatattcatttattattaggagatggtgtctcactccctcttcacccaggctggcatgcagtggcatgatgctggctcactgcaacctctactggctgggttcaagcaattctcctgcttcagcctcccgagtagctaggattacaggcatgtgccaccagtgcctggctaagttttctattttatagtagaaatggggcttcaccacataggccagtctggtctcagactcattacctcaagtgatccacccgcctcggactcccaaagggctgggattacaggcgtgaaccaccattcctggccaggaaatgactttggagtgggaatattggaggttcctggcttcagagtgacaatagctctttaattagtaagagtctttttaataaaaggctcatatattcccttaaattggctgtcttacgtgcaaacattacagaaatggctttcagaccttcttagtcactttgaacccattgtttctttaacatcaaggagagtactcttcagtacggaaagagcacccagctctgc

SEQ ID NO: 626737 - DNA, 282 bp, Homo sapiens
taaatggtgtatggatactacaggaatggataacatttaactgtattttgcagccgtacttcttgggatacaattgtctaactttttatatttgggctggctgttgtggtgtgcaaaactccgtacattggtattttggcacactgcaacaccttacagatgtggcagatgtgcaatttgtccatccattattggataacctaaatactcagaggattatattcatcggattgggagaactggtgcgcggacccaaaaagggccaggcatataggtagggga

SEQ ID NO: 626738 - DNA, 1047 bp, Homo sapiens
  misc_feature (1027)..(1027): n is a, c, g, or t
aggaacgtggtggacggacgcgagcggtaagatgccagattgttctaacttcctacgtgatgaacgatctgtgtgacttcatcttagcatatgcgatgcggactacggagcagataggcaaagctactccaaagaacgtcgcttcgaccaggagtcgagatgaaagggagactatggtatcagtgtaccatctgaggcctgcaagggagctcctaccggaatcggcaagggcactgaggaccgggacgggagacgactacctatagggggggtcaacacagaggaccacgacgagagacaggcaactcgcaagagcacacgagatggaaagacctggtgccagcacaggatgcagaatgcatcattcctatcagacctatcagacaaccgacctggaacgaaggcttgcgcataaccggggctgcgagaggcgcgagggaagaggtgccctagtaggtagtgaacttgaaggagaatccctggattggggggacacgtaccaagggaacgtgccaagacggagaacttgaccgcgcgaaactcagagaggtgacgagattgaccgagcgaccttagtgagtgcggagagagatgagccaaatacagagagacgccacgaggagtcgctcgggaccgatgtgctgcgcggcgatccaacactgcgtcgattggcccgcgactgagcgggaggcgaggggtagtcgagtgaaacccgggtctccgacgttccataaacgtgcggggtccaggcaaacacggcaggggaaatttcaattcataaattccccagaaaagagaagaaattccagcagaggaagaatttactggagcaccggcaattcacagacttctttagggaagcgacccagaagtccaataagggctttgttcgggaattgacgaggggtcacgacaattgacaaggggggagaactgtccaacgcttggcaaaagcctatgaaatagggagcgctccctccagagcaatatgtcgggaagagattccccgcgagagggtggagagggnggagaattgggggggcggaa

SEQ ID NO: 626739 - DNA, 152 bp, Homo sapiens
ggccgctccgttattgcggtatccccaacgcgcgtattatgcgtacattgcgtcggcggttgcggccccctaatcccgttgcaaaacctgacctccagcctcgcataaggctccgcttgtatacacaaaatggcctattgggccaacagggg

SEQ ID NO: 626740 - DNA, 143 bp, Homo sapiens
  misc_feature (16)..(16): n is a, c, g, or t
gaccggtcacgcctgntatccagcactttgtggagttgtcaggatgatgtgagacatccgggctaacacagtgaaaccccgtctctactaaaaatacaaaaaattagccgggcgtggtgacgggtgcctgtagtcccagctcc

SEQ ID NO: 626741 - DNA, 559 bp, Homo sapiens
ggtccagtctgcacagagtccccagtgtcctgtaggggagtgatgggtgtggaggtgggcctctctctggctgtgggccttcctgggcttctagacaagtcgccccacagtgcctgtgttcatcttgttgcaaggtaatgtatgtacaggcaaggatacacagcgggggaggtgtcccctgttctctgcgaactcgttactaagctctcaacaatccagtgcaaggtagatcgcgtgagtcattagaaggttcctcgaggtggctgtgtgtatatggacccattcaagcgagtggatgagatgttgggtcggaaaagtatatgatatatacacttgttggagcgttagattacagagaaaactacagttggggaagctgctatttttgcaagattgaggattggtattctaggagatgatatagtagtgctctgagaaagtgctcgcgagggtagatggttcaatgtgtgctcaactgaggaagagaagtcgaggaagtgatgagctgatattgaggggagatagcgtagtgcgagtccatgtctgtctgtatatatat

SEQ ID NO: 626742 - DNA, 823 bp, Homo sapiens
gaccaggggctgtcgcccgaatgcaggaagaccgtgatgggagctgcagcacagtcgggggtgtaggttatggggacagtaacggatgtatcctggagccgctttccctgccagaaagtccaggtggcagcatcactttagaaggttctccatctgtgccttgctattttctgtggaagaacatttgcctgtggctgaacaagacaagacgttctgaagcacatgattattgagcatagagagtgtcatagcgtgatgtcgaagttggttgctgatgtccaaaggtacattttatattggaggaagaggttcactgaagcagtccatcacagatttgggtagtgtaataagaattaatgtccggtgctccattggaagaacaggagaagtaatggtgatgttatgtgacgtggtaccaggaagatgagaattcttagagaagagcttcagagacagagactgagagaagattctggaacaacagctagcaagaacgaagatgataccaattttcatggcgtttgtatgttttgcgatgaagagttccttggaaacagatctgttattttgaaccaggatggccagagaacatgcttttcaacattggattgccagagaacattgtaaactgcgatgaattttagtgtacatgacagaaaaggcttgacgatttgcagtgcttgtactgtgagaagagcgttcagggactaaatgtacacttacagatcacatgaggaagaaacagcagtcgtaagattaatcctaagaacagagaatatgacagatttatgtcatcgattatttgggacttggaaaatcgtgg

SEQ ID NO: 626743 - DNA, 1283 bp, Homo sapiens
ccagatccgaggtctgacagcgccggccagatcccacgcctgccagtgagcaagcctgagagccagccggcggctgcactccgactccgagcagtctctgtccttcggacccgagccccgtgccctttccgggacccctgccccgcgggcatgcgctgcaaacctgccggccatggatgaccccgtcccagcggccgcgccacccgacagcggggctgcaggccagctccactccgctgtcgcccacccggatcacccggctgcggacgaacggagtgacctgcacgcagctcagctgatcgcttggcggtctacatcgaccgtgtgcgctcgctgcgaccggcgaccgcagcggctgcgccctcgcatcaccgcagtctcgacgcaggtggtccagccgcgagcgctgtcccgcgcatcgacacgccggcctacgcaggccgagctcgcgggcatgccccgcaaagacccttgactccacgtcgcccaagggcagctgcgcccccgcccgtgccgcagcctgggcgccctagatccaccacgtcgcgtcgagcgacgctatacacgggctcctcgcaaggcgccggccagattacccaacgcacagcgcgcgccttgacccctgactcacgctgcctcccacgcgcccccggcctcgcaggcccacctgcgtcacgcctcctgccccgcacctcccacacgccatgcccgccccctgccaccactgcctctcccagctggcaccacagccgctacgccttgcccacgcgccccaccctcgcctggcatcatcccgcgcgccccacgctggcccccgccctaccacgccacccctcaccgccgaacgcccccccaccccctctcccccatcccacctgcacgacagcccacctgagcaatgcctctccaaccaagcgcctgcacgcacccactcaccggagccgaacccgcagcccttcacccacccaaacattccacaccgacagcacgccccctcgagcacccaccgtcccgtcaacgcagaccccaaatatccctcaccactatccacacacctatccaatcaaccctataactcctactccacacccacatgctcgcaacctacaccacccaaaccaaaacaccaccaccacccacacaaaacacacaaccaaccaccacaacacactacaacacaacacacacacacacacaacacccacacaaccacgcacaaaacacccaccaccaacccaacacacacccacacacaccaccacccaccacacacacactacccc

SEQ ID NO: 626744 - DNA, 431 bp, Homo sapiens
gctgcaggaattcggcacaaggcgatctctgctcactgcaacctctgcctcccaagttcatgcgattctcctgcctcatcttcccgagtagctgggattacggtcaccctccaccacgcccggctaatctgtctatttttagtagagactgggtttcaccatgttggccacagctggtcttcaactgctacccttactgatccgtcctcctcaggcttccaaagtgctgggattacaggcgtgagccactgtgccccacctataatatggttaatgttacgaatttggtagtttaaacatgttgccatgagcaattactgatatactaatggaatatcattttagtcagttagctattaatcctctatgcatgttagaccgactccattttggtatcgttgtggcaatattcattataccatgattctctt

SEQ ID NO: 626745 - DNA, 110 bp, Homo sapiens
tccacgtgacggtgctgtacccagtactgagtgttacccagacgctgacccttacaatctactgcaacagtgcaaggccaggcacaccactaccgtcttgtactgaaaca

SEQ ID NO: 626746 - DNA, 86 bp, Homo sapiens
  misc_feature (51)..(51): n is a, c, g, or t
ctagaagattcagcaaagtacttttgtgctcttggggaacgatgtataccnaacagggaggagggggccacaccgataaactcact

SEQ ID NO: 626747 - DNA, 409 bp, Homo sapiens
agggatactcgcgagtaggtgacacatggagcatatacttcacaagaatgtgaccttctatctgcgtcggatcacttatagtatggttaacccttcactagaataagcctctattctcgctctagactgactcgcagggatacctcttcaggtggatattctacaatgccttcaggtgagacattccattgcacacggagtccggctctacctttaagccttagaggactgtatggtggaatagagaatgatgctattacaatggctttattaatcccataagactgtatataggtttgtgtatgccagtcacgcactggcccatccttacactgacgtgatcctagggagagactcagctgttcgaacggagattactgcatacattctggcttcgctgggttacttt

SEQ ID NO: 626748 - DNA, 132 bp, Homo sapiens
ggttcaattcacccaggcggcagaggcatggggctcgactcactagctcggcggcagccgtccaactccgtgagctcaatcaattcctcccgagcctccagccgtctgggtgtagctggggaccacgaggca

SEQ ID NO: 626749 - DNA, 217 bp, Homo sapiens
tgaagatcaccagcagcaccgccggcttgccgttgaacaggccgaagttgcgcaggtcctcgacgtcctcgtggacgtagtccaggtcggcgatgcgcaccaggctgccgttgttctgcttgaccactaggtcggcgtagtcggcgctctggaacagctggtcgttggcaccgagcacatggttatgctggccgaggatgatcgagcccttgggcag

SEQ ID NO: 626750 - DNA, 609 bp, Homo sapiens
  misc_feature (17)..(17): n is a, c, g, or t
ttcctgcatgtgagttntgacttcttcctgtgctggtcagggctgcaaatggctgataatatcactgaagcctggactatcttcagagcccgactggcacaaaatgacatattaatgtagtatctcatttcctttgcattctggggacaagtgggattggctcgatgcccagggatatcctgtgaactcatggaataggactgggctaagcctggctagcacctgacagatcctgtctatggaactagggacattttttctcactgcttcaattggttggaacataaaactaagatggcatttgatctgtcttgcaaagatttggttcagaaaaatcttacaaatatgctgatagtaactaaaattttctctgtatctgttgcttagatgcaataattatgtgttgaaaattgtatatatatcatatttatatactttagcacctagaaatggaagtatttagtgttatggaaaaacagatggatagatgaataagctctctctctcctctatttttctttccccattttatactttttaaaagttaatttaataggtagattaaagacatctttaaatgactgtaaaaataaagttcatgtttagaca

SEQ ID NO: 626751 - DNA, 377 bp, Homo sapiens
  misc_feature (47)..(47): n is a, c, g, or t
taccaagacacatccactgtgttattaatttagaatacaaaagacanagaaacactggaagctcacattaacaaaaggcctggttccccccaccttcaaccagactggaaatcaaagccagcattcgggccaggtgcaggagctcacacctgtaatcccagccctttgggaggccaagccggggggaattgctggagcccaggagttcaggaccagcctgggcaacatggtgagaccctgtctccacaaaaaattaaaaatttagcagggcatttggtgcatggctgtggtccaaactaaattggtggctgaggcaggaggatcacttgagcccgggaggtcaaggctgcagtgagctgtattcatgcctaggtgaa

SEQ ID NO: 626752 - DNA, 576 bp, Homo sapiens
tattatactttaacttacgggcgtacatgtgtagaacgtgcagtttggttacataggtatatacgcgccagtggtggtttgctgcacccatcaactcgtcacctacattaggtatttctcctaagtgctatccctcccctagtcccccattccctacaggccccaggtgtgtgatgttcccctcccgtggtgtccatggtgttctcgtgtgttcaactctcacttatgagtgaaaacatgcagggttgggtataccgggtactggcgttagtttgctgacaaatgatggttcccagcttcatccagtttccccgcaaaggacatgaactcatccttttaatatggctgcataggtattccaggggtgtatatgtgccacattttctttatccagtctatcattgatggacattggggtgggtacagtttcctcgtcacaagggacaattagggaagcaatgaggataagtaggaactttataagttaggaaacaaaaataattagaatcgagtcaatacaagagctgtcgttagaaagtcctattcacatggataagccatgggccaagcaagaaa

SEQ ID NO: 626753 - DNA, 102 bp, Homo sapiens
ggaccttttgtactgagctcagcatagactaatactaccttatgttaaaatctgaatttcttttagcatttgcttaaaagcaatatgctatttgcttattcc

SEQ ID NO: 626754 - DNA, 269 bp, Homo sapiens
gtcctcttagttcatgccattctcctgccattaaaggagctgaacagctcctttaatggcaggtaggctgcttgagcccaggagttcgagatagcctggctaacatggagaaaccccgtttctactaaaaatacaaaaaaagagccaggcttggtggtgcacgcctgtaatctcagctatttgggaagctgaggcaggagaattgcttgaacctgggaggtggaggttgcatgtgagccatgttcatgccactgccattaacggagctg

SEQ ID NO: 626755 - DNA, 756 bp, Homo sapiens
cccatcgcgctcggggttgcttccaaaagctggagcccagcgcgtgcctaggggttgtctagagagccacacctgcaggggaacaggtacctccgagggtgagagtcgtggtctctgggagttgttttcgtcacctcgtgtgcttagaacgggtcaaggcagaaaccgactaggactgtgcgggtcacactctactggtcccacagtttgggaactctgtaaaaagtctccgattcagaaccatggttgttctcccatgtccctatgctatcttatcttcctaaatgactaatgaggaagcgggtgtacttttatctgcactttgattcgccatctgggttctgtagggtgctctgaaggtgtgatctgacgttctggcatgatgtggaggaagagcaagcgccttcccaggccactagctgctcacctctcggcgagatattccaggcaatgcatccgtgtgtcttcccatcttcaggagaacggtaaatgcaccctaagtgttcacttctggaccttttgcaagttgcacttgggactgtgtgacagaagggagttggagggaggatgggaatatgtttaacagttggtattcctgtgcagaaacataataccagtgtgcgcagaactgtgtctcaatctgtgactaccagagccctcctcagtccttccctcagagggacacatccgctgtttctcccgcaagcacgatgtcgtggatgacgggatagactccttggcacggaacgcaaggtg

SEQ ID NO: 626756 - DNA, 1214 bp, Homo sapiens
actcgttgactattctctacaaaccattaagagacattgtaaacactatagcctattattcgtgcgtcatgaactggaagtcctagtgcacagactctaagcacgtccattattcggagaccagatgctgggcgcagtccagggcaaagccttcgtatcgtaactgaacatcatcgtacagacgttatcggtcacagctcgcatgcatacgtaatgaatctgtcttcattatgttaatgacactcatacataagagtacggaagcgactttaggccaacgatgacataagttgtccccttagataatgctggtgcccccgaaatagtgagctgtatatccgccgcaatataacacatcgagtacagtcttactgactccttgactcacgcacgctctcgtccttatctccttgtcgtcggaagtctgcttattagctggacgtgccggcaacatgtgaatcagtgttgaacaggtcgtaaccctgcaccttagcagagggaacataacgtccccaataccgtggaagcacatcgcaggtagtaacctaacacattctatctccgttatcatcctacgcagagtgatctactatctaattcgttacgagggccatcgaattacatcacctaacaagttatcaagtatagaaactccccgtgtcataacccaagtaacaaaatcgcccctcttcgtctgatccgtgctaatcacagcaggtccgacttctgctaatctctcccagtactagctgtggcatcactatactactaacagaacgaatctcgaagcacattcttcgaccccgccggacgtgaggaaaacccattctataaccaaaatctattctgaatttacagggacaccctgaaggtatatatagcataaatctatcaaggctaggaataagctcgcactatggaagctaaaatacgggaaacaagagacactagagtacaaagtattgatagaaagagatccacagtgacccaaaggattatcggtatacacaacatatatttcacataaataacttaacaacacaaaattatacccataataacatacgatacacaaagaacaaaaaatagatatccacacatcaaacaaaaaataaaaaacataacaaaaaaatataaaaagaagaagaaatataaactaacacatataaaataacatacaacaaacataaatccagataaactcccttataagt

SEQ ID NO: 626757 - DNA, 503 bp, Homo sapiens
ccgcctgttgttctgtaccagtgaaggaagtgcttcatggcgaaacatggcagtgaactgctcctgatgatgcgcattgaagagctcctggatggctgtgctcttgccaatgaatgtgtgactgccatcttgaggccacgaggtgagatgtcacagagggctgtcttgacatttgttggggatccattccacaaagtagctgctagtactatgtactgcacgtaaaagcatctgcttcatcgacctccttcatggacatcctgaccatggaagacagcagccacggtgaggtatcggccgtggggagggtacaggcaagacatcatgtacttggcatcgaagacctgagggctaccaagcttgaacccactcactgggcggggtgcaccaggctcttggactgtgcactctccttatcagcaagatccgagaagaataccccgtgattcgcatcatgattaccttcagtgtggtgccttcacccaagatgtgtcttgacaccg

SEQ ID NO: 626758 - DNA, 950 bp, Homo sapiens
aatttcactgccaaccaacatctattgttctggtccctcctatagcagtcttgtggacacaccattatgctccatcgcgatgccgttgtttccaccacggtgttcaaccaccacgctgggtttgaagcacccacattcttctttgcaacaaaaagccctttgtttccccaacaggctgtctaaatctgtgtccccccgcctttataaagccctgtgaacacctgttggccccaaagattccgtcgcccgcccaagaaatttgccgacccctgtgcaaaacagtttttccccccccttgtgtggtcctatacagcataaactgcaacaaaactggttgctgaagcgatttaggggcaacgttttcgcgccatttaaccacaacaggggtttgagtaccctgctgggtcgcagaagcaccggaggagcccacacacctgttcgtggggaagctacacggcgaacacttgtgtgggggagaagccaccaactgccagccgcctctggggtaatgcctgtatgaagaacacccctcgcgcggtattctttatagtaggacggtggtacccctcctatagagggtgggacgccgccccagttctgggttgttcttactcatttccccctgtccatgaggatgtgtacaacccgcggtgtgtcctacatctcaagcgcgcactctccacattcgtgcacaagaactaatgaggggcgcgccccacggggggacactaaactgtccgggaaccgcagcagttaggaaatacgctcacctcaggggccaggtgaagtcccacaagcacttatctgcggtacaccacggacagataatgtttaaaattgcgagatgtgaagtaaaatcggatgcgaaatgagtacgcctccaggagaagcttgtcttttttttaaacttgcgaaaaaacaaaaatgattatttgcgccccaacatgaca

SEQ ID NO: 626759 - DNA, 912 bp, Homo sapiens
  misc_feature (912)..(912): n is a, c, g, or t
ggcgcttcttgctgccaacatgtgaagaaagacgtgtttgcttccccttccaccatgattgtaaaatcaacaaggaaggcgatgagcacagcagtgtgaaggtatacagaccaacggagcagaacagaggcctcagaaataacagcacacatctacaaccatctgatctttgacaaacctgacaaaaacaagaaatggggaaatgattccctatttaataaatggtgctgggaaaactggctagccataggtagaaagctgaaactggatcccttccttacaccttatataaaaattaattcaagatggattaaagacttaaatgtcagacctaaaaccataaaagccctagaagaaaacctaggcaataccattcaggacataggcatgggcaaggacttcatgattaaaacaccaaaagcaatggcaacaaaagccaaaatagacaaatgagatctaattaaactaaagagcttttgcacagcaaaagaaactaccatcagagtgaacaggcaacctacagaatgggagaaattttgcaatctacccatctgacaaagggctatatcagaatctacaaataactcaaaaaatttacaagaaaagaaacaaacgacccatgaaaaaggtgggcaacgacatgaacgacactctcaaagaagactctatgcggcacagacctgaaaattgtcttgtccggtctccgagatgcgatcaaccatggattccttcttgcgtagatggcacttcactcggacaccgtgtgggggtgtggacaagcttcacggggggagcaattccccacgggcaatggcgccgcttaaaatattgcccccctggttcacgaagctaaactgtctggtcaacagtcaccttttacccacagccttggctccgcgcacgagtacacgn

SEQ ID NO: 626760 - DNA, 339 bp, Homo sapiens
tatcagcggtcttagtacaatcgatccggcgttgcatgagctgtggtgtaggtgcagacgtggctcggatcccgcattgctgtggctctggcgtaggtctggaggacaaagtagataacgaaaacaacaaaacaacaagtaggacgtacccgtacgtggcgcaggtgattaacagaatctgaccagtaaaccatgaggttgcaggttcggtccctgcccttgctcagtgggttaacaatcgatccggcgttgccatgagctgtggtgtaggttgcagacgtggctcggatcccgcattgctgtggctctggcgtaggtcggaggagaccgctcttaccg

SEQ ID NO: 626761 - DNA, 291 bp, Homo sapiens
gaattggggggcccccccccaagattgggccccctttctcccccctcctttggtttcctcttggccttgggggtacttttaaattttgggggctcccccctttcccatgggtggggtttttggccggggttcccctccgaacccttctgggaattgtgcctggttttccctcccctgggttttggggttcccccccccccctttgggttttggggggtcccctttttttttcccccccccttcaagggctccttttttttttcccccaggagccccggatttttttgggga

SEQ ID NO: 626762 - DNA, 1046 bp, Homo sapiens
tatcctcatctgggcacaaaagcctggaggttccagatttcttaaggcacacacggtagcagcaaagggcacacacacatattctcgcatctctgggcgcattcaccacaccatggctcaaagcaaaacatgacagcacacacagcacacttccatactggctagctccaggatcaatgcacggcaggctcacttgggtgacccacattcccaactcgcgcaagcaccttccatcaactgtgtaagcctgtccctgtgtgtgctacgcaagcctggcttggctgacttacacgacggctgacacctgacatgacactctagctaccaactctcacttactattctcacttacatactgtcacctttatcctactctttatcatttcccatttcactatcacctagatcacattagcggagcacgttgaccagcttgagcacgcgtacagccagataacgtgctgtgctcgcttgtacgctggcacatatcaagatgtgtaccgacgatcccccgacttaacgtctacaccacggttgcacctggagtgacccgacggaccactggctcacgacgccaaccataacgtcacccctacccttggaccacactaacgtagggaactatactaaacccctacacttacctacggtggtcaggtacatgggtatcatacaccaagtccaacacaggcccacggatttaaacaacattatacactggtctatgggcatataccattcaactttcaatccttacactcactcagcctatgggccctgtttacgactcctttactattaaacttacattatcctcctaattgggatacttggacactcccccccacgggaactatgataacccctacaggggacactccagggtaacaccagagagaacaagctcgaagagaccgccaccaaggcttacagaacgaaaaagaagcaacaaataaatcccaaaacccacaccggctatcactgagggcactcctggcacaagcaaccggcaatacagtgcagccgacaaccatggcaactgagcc

SEQ ID NO: 626763 - DNA, 153 bp, Homo sapiens
gggcacactcatcacagcgctaagctcgcactccattttttaccttagtaggcctagaaataaacaaaccaacctttattccaattctaaccaaaaaaataaaccctcgttccaccaaaaggtgccatccaagtattttctctacggaagcaa

SEQ ID NO: 626764 - DNA, 223 bp, Homo sapiens
  misc_feature (115)..(116): n is a, c, g, or t
  misc_feature (129)..(130): n is a, c, g, or t
gagcggtctagtcagagtaagctcaagagaaaatgggttctaaggaaaacagttccctttacttcgaaccataggtttgtcatattttgaagggatattttcaagctcatttagnnttagtgaagctcnntcaacactgcacaggagatttcgtgggacacccccgtgtagaatcaggcagggagtgacctcttgtgaaatttcacaccataatcaggttgag

SEQ ID NO: 626765 - DNA, 614 bp, Homo sapiens
  misc_feature (148)..(148): n is a, c, g, or t
  misc_feature (174)..(175): n is a, c, g, or t
  misc_feature (346)..(346): n is a, c, g, or t
  misc_feature (350)..(350): n is a, c, g, or t
agcgcggaatgaatggcgtccgcaaggaaggtacggctctactgccacctcttccagctccaccgccggcgcagcagggaaaggcaaaggcaaaggcggctcgggagattcacgccgtgaagcaagtgcagatagatggccttgtggntattaaagataatcaaacattatcanngcaagaaggacaaggaactgaagtgtcaaggagtgctcttgggtctggcttgtagaaagatcggccttgaaacttaccaactgcttctcctttccctcagcacacagaggatgatgctgactttgatgaagtccaatatcagatggaaatgatgcggagccttcgcatgtnaacnttgatcatcttcacgtggcgctggtatcagtccacagtactatggcgtcagttcgtttacccgggcactcctgggactctcagtttagttaccagcgatgccagtttggaatgagatctgtcagttctcatccatgatcccagtaaagaactgcccaaggatctctctcactaaaggcagtacagactgactcctaaatctgagtggaagtttgtacagaaaaggatttttcccctgaagccttgaaacaagcacatatcacct

SEQ ID NO: 626766 - DNA, 109 bp, Homo sapiens
gacactcacgcttcttcagcccaaagaactcgaggatgcgctgattgtcggggtggactgctgcgatgaagatgagcaccatcttgcctttgaagctatcggctgctgt

SEQ ID NO: 626767 - DNA, 1547 bp, Homo sapiens
  misc_feature (1249)..(1249): n is a, c, g, or t
atatcgcgtctgcggtctgtgctatttgttgtactcgtgttgtcaaaccgttgttcgcctcccggttggtgttttttgtcgtccttttggcggcatctgttgctctgggtgctctttttgtctttgttcccttgtttgccgcagtaatgtctctccggtcgcctctgtggtttaccctcgattttttcttgcgcgtgatatgacctgttttctccccaggggtttcccggctcactgacagcggtgtgttactagtcgtcatcgtgttacaccctctgtggtttcacacatcctctggggtaatacatccttggggggttgttggggtttttcttccacccaagtggtattgctctttcttattgttggggctggtgtctgccaccccgccccagcgcccacacgatcttctgtgggcgccccttctttccccccttttggggattatcgccgccctgcgcccgtattacgcctcgcccgccccctcactgctgtattgctccttcctctttgggggctttccaaagagctacttggccgcctcgccccctctctttggggccacatggggtaccgccccacgggggggcacgggaacacaatatccctcgggtttcacttggggatacaccctgttcgaccaatagctctgttcaaccccaacttttggccccccccccgcgggtgtgcgtatagcccccccactctcccccgcggatatgttttctcacgaatatgcccgcgctgtgggcacacacacacctggggccccctctcataggggctctataggagacactttcccccccccgcgctgggagaccgcccccagcggctctcttggggggccacacaccacacaccgcgctcctcgcgaccacaccaccctcggagagatgtcctctctatctctctcggagacctctctctctcccacccttgggcacatgtccccccccccgagaggggcctcccactcttcgcgagttctctcccctcggggttcacacccacgcgttctctatttgtgcctctccgccctggtatataggcgtgggagacctctcctctccctctgatgatgtcccctcccctgtgaatacccctgggcccttccaccgagacccccacccctcattgggtacacccgccgcggggcctctcttccctctccacacccacgagacccacctctccccggccaccccgtgttcccccctctcgagaggcccacatcttcgagaggccnctctttctcctccacgtataaattcaccacactttcctcttcctccctcgttacactttttcccacacaattcttttttaatttcctctggagcccacttacagaaaatttctcgtaagctccctctggggccaaaggtatactaaatccctcttcacccacccccccactcccacttcccccttttaaatgtgaactttttcccccgcgagggtattttttttttaatgttggtcctgaggtatattttgccaaatgcccacgaggagaaaataaactaaactcccttggtttaaaa

SEQ ID NO: 626768 - DNA, 311 bp, Homo sapiens
  misc_feature (30)..(30): n is a, c, g, or t
  misc_feature (32)..(33): n is a, c, g, or t
  misc_feature (35)..(35): n is a, c, g, or t
  misc_feature (47)..(47): n is a, c, g, or t
  misc_feature (60)..(60): n is a, c, g, or t
  misc_feature (65)..(65): n is a, c, g, or t
cgtgtatcaagtgatcctccacatgtggcntnntncacatctaatcnacaggcaggtcantcgcngctgactctattcttctctgggctcctgggacgtataaatatgactctatgtaagaaaaccagaggctgggcgcagtttgctcatgcctgtaatcccagcactttgggaggccgaggcgggcggatcacgagttcaggagttccagaccagcctggccaacatggtgaaaccctgactctactaaaaccacaaaaattagccgggcgcggtggcgggcgcctatactcctagctactcgggaggct

SEQ ID NO: 626769 - DNA, 914 bp, Homo sapiens
  misc_feature (696)..(696): n is a, c, g, or t
ggctgaaaagcactagtttgatataaaattaaaatgaccaaaatcctccaactttgaagactaaagaaggtaaacccttcccattattgcattacatgttgttgtaatctctcgtagttgcgatagcactgacttagtacatctatcagtgctatagtctactgatagaactgtttcatgtgggggagtcgcgcaacttagttaaactatttgcctgaattgtaagaagtgtctgaggaaatcagatcttatgtactctcaggctgctgtggaacaacttcaccaggtttagggatttcctttcctgtcctttattaaacttgttcacgttaaactgtctccaggtgtaacttgcagatatggtaaatatgtaatgttgactattatgtacatctgctaatgtttctataaagcaattagtttacataaaatcacatgtggtgaggacgtatgaaattttgtgtaacctccctagggagtatacgttttttgaggagtgatataacacatctcttgtgtgtacagttctcgtacgttctcgactaaatcgttaaataaatgcttgaagattagttgcagtcttttaacatgagtgaattgccaggtccttagtgctgtcagccgttagagcacggaggtgtatggctgcgtcctctttgtttatgcggggacctgatgggcatttagatacagggncccaattattaggtacctattgcagccctttttgcgcaacgggccgtgtccggtttggcgtgagttgaacggggacctgtggtttcccccggttaccccgttgggtggttgtttcccccacgaaacaaaacggtgctctccttggaagaggcggccccactgacgcctttttgatcacgcgcccctatatccgggctcataactccctcacttactcc

SEQ ID NO: 626770 - DNA, 124 bp, Homo sapiens
  misc_feature (54)..(54): n is a, c, g, or t
cggcatgcttctcacagtagatttgatcctccacaaagaaatgggccttctgtntcaggttggtgccacagtcagtgcacacgttacactcaaggtggcggtgacggtcccgccgtcccaaagc

SEQ ID NO: 626771 - DNA, 917 bp, Homo sapiens
atgcacatgcagcgcaaagtaggtctacaagacgctattcccctatcatagaagagcttatcacctttcatgatcaccgccctcataatcatttccttatctgctccctagtcctgtatgccctttttcctaacattcacaagcaaaagtaactaatactaacatctcagacgctcaggaaattagaaaccgtcctgaactatcctgcccgccatcatcctagtcctcattgccctaccatccctacgcatcctttacataacagacgaggccaaggatccttcctttaccatcaaatcaattgggccaccaatggtaaactgaacctacgagtacaccgactagggggagacattaatctacaattcatagattactttccccccaattattccttaagaacccaggcgaccgcgactccctgggagcgttgacaattcgaagttagttatccccagatgaaggccccccatttcgtataaataattaacatcacaagaggttctgggaacatcaatgagctgtccccaaataggttaaaaaacagatgcacacttcccgggatgttctaaaccaaaccaattttcacaccgtacacgaccgggggtactacaccggtcaatggctctgcaattcgggggagcaaacaaagttccatgccatcgcctagaaatatccctaaaactttggaatagggccgtattaccaatagcacactcaaaccctctaaaaaaacacacaaaaaatgttggccgcggccatcaagcttaaaccccggggggcggccaggagaacaggccgtgcccagaacggcgaagggggcccaacaccggcggccgaaccgggggcccgcacagcgaaccccgcggcacagccagcccgccaacgagcacagaaaagagacgcgacgccacgac

SEQ ID NO: 626772 - DNA, 138 bp, Homo sapiens
gacgtattccaaggaactgcacagtagccctagacggaaaactgctcaccgtcatctaaaaaatggacgcgtcctgcaatggaatattactcagtagtaaaaaggacaccaactatggactatgatgataaatgggac

SEQ ID NO: 626773 - DNA, 313 bp, Homo sapiens
tgattatctgacggatgacattggagcaccaactacagcaaaattcagggtcaaggtagctggcaagtcagttctctggattgggcaattaccttccactattttcatctgtatggaagctgagatcttcagggcctattggttcaccatcaggaaaacgggaaggtgtatcttcatccgggggctgtgtcatgaccatggaggagtcgtgaaacccgcccacacgggtatgctcttcctgctcctcattctcagtgtcacattcaaggtcactgtcgctactcattccttcttcaggggcagcgggtaccga

SEQ ID NO: 626774 - DNA, 318 bp, Homo sapiens
  misc_feature (125)..(125): n is a, c, g, or t
  misc_feature (172)..(172): n is a, c, g, or t
  misc_feature (204)..(204): n is a, c, g, or t
  misc_feature (310)..(310): n is a, c, g, or t
ggatatagcttttacttttaaactgtgtacataactgaaaatgtgctatactgcatactttttaaatgtaaagatattcttatctttatatgaagaaactcacctaggaaatggcttcgtgattnaatctgtaaactgtgtactcaacgacatgtctgttctacatagatgnctagtcccctcatcggcaactcacattacgtngctccacaacagacttcgctcgaacattttcatatcgccttacccgatctacttttacacattttttcatcatcgcctgtccctgtccaaggtctacaacggctgnaccaataa

SEQ ID NO: 626775 - DNA, 134 bp, Homo sapiens
cagaatggatgaagataaatttgactgtgggctttttcaagtggagaatatgaatatccagaccaagaaaccaataactccaccctgtttgattccgtctgttttctaaataaagcccctatgcgctggaaata

SEQ ID NO: 626776 - DNA, 137 bp, Homo sapiens
ggcggacggacagcatagaatgacatttcagacccatgtagtattaccacatagatatcctgagcacaaagacaccgttctacatattacattaagatgatcatgcctaaaaatataaacagtcaacttctttatag

SEQ ID NO: 626777 - DNA, 813 bp, Homo sapiens
gggaggacagtgagcgtcgcagaaaccacaacatcctggagcgccagcgccgcaacgaccttcggtccagctttctcacgctcagggaccacgtgccggagttggtaaagaatgagaaggccgccaaggtggtcattttgaacaaaggccactgagtatgtccactccctccaggccgaggagcaccagctttcgctggcaaacaggaaaaattgcaggcaagacagcagcagttgctaacagacaaattgaacacgctcggacttgctagacgcttctcaaaactggacagtcactgccactatgcacatctcgattctccctccccctcaaacaaacatcgtgtcgacacttaacgaatgtcggctttactttcaaatcggtcccctgtcgagcttcggctctgggctgcggcagtaggaccaccagtgtgcgggttctgcctgggaccttggagcagcctgcatcccaggatgctgggtggccctgcaagcctcctccacctcaccatccatgacacgcgctaaaccgctcggtgacggtatgggagcctctggggctgttgaacgctcaccttgtgtgtcccaagtttccaaacaaccaggaaagtcattcccttctttaacaaatggtgcttacagttccacgcagatgccacataaggggctttgccatttgatacccctggggaacattcctggtaaataccattggacacaatccgcctttccgtatacatcctggcgtactgagaacgtcggcttcagccggccagtatcagactgcaagttcatacctaactactgttaacca

SEQ ID NO: 626778 - DNA, 250 bp, Homo sapiens
  misc_feature (54)..(54): n is a, c, g, or t
  misc_feature (173)..(173): n is a, c, g, or t
gatctcgtacgagcgccatcaagaatatgggctgagagattcagggagcagaanagctgagcacagagtagagacggggcaggcgagacaggaagacagcgagatgcagcctctgagcgtctcgtggctccggtctcttcagattgacttggcacagcagtcgatgagtccgncagtccgcacaccaggtcatgctccacgatgtcatgccacgagtcatcttcttcatggcttgtattgagcgctcagt

SEQ ID NO: 626779 - DNA, 300 bp, Homo sapiens
  misc_feature (120)..(121): n is a, c, g, or t
  misc_feature (136)..(137): n is a, c, g, or t
aatcattcaaacaactacataagtaaaatgggtatcatcacatacagtgcatagagactaactgaagtagatcacttataatttcccattcaagtgcttcataaatcctcctcagtgaanntagcatctggcagcnnaattatcatcttttgccttattaaaacatcaattaatttaactgttttcttgaaccctatcattaattctccttttgttttctagcttctgtttctgatttaacacttcaattttttgtgttcttcattgctatgtcttgttattttgctattcgtaactcag

SEQ ID NO: 626780 - DNA, 214 bp, Homo sapiens
cctcttgcacactgctcggtccgccctgaaggtaccgctcgaactgggcctatcatggcctgcaggttgagctccaaccgcagcttgagatctatcggtggcctgcagctcgtcctccagctcttccagctagcgtctatcatctcctccacctgctgctctagggcccgcttggactatctccagctcgtggacactcttgccccacatcatc

SEQ ID NO: 626781 - DNA, 926 bp, Homo sapiens
agcggtggagtttgcagtgagccaagatcgcgccactgcactccagcatgggcgacagagtgaggctccattaaaaaaaaaaaaaaaaaagaaagagcaaatgaatgctgggcataatatctagaatgatgggcatgactctgtgcagcaaaccacttatggcacatgttttacctatgttaacaaacctgcacatcctccacatgttaccccttaaaccttaagaagttgtggaaactcaacaacagaaaacagggtatttaacctcaaaattaaaaaccaggtggtgttactaattttctctaattcagccaaagtgttcattttaattttctcacctattaatttttagaagtcgataatcttgtggcctcgtgttccgcacagctcgtggcagttgccagggtggcattgaattagccttgtgaatttccgtgtttcaagttgattccttcccggcctcagtctccagaagtgtggctggggcctacgggcagtgtgctgccacaccgtggatacttcttcacacacttttttactacgaagtgggggatctggcctatgtttgcccaggcttgctctcggactccgtggccttaggtgatcctcctggcctctgtcttctgagtcgctggattgcgggtatgagccaccatgctcagcagaaaattaaactttttttttaacaagtcattagtcccggggaattctatttcacttccaaatccacctcatttcgcagtgccctgttcttagtagtccgtggttcacggaacgacgtcgctgtttcaccttgattcagggctagccaacacaatgaaccgttgaagttcccaggagctacttcacttcatctccgggtcccctccgagagtatctactaaccctcggggcccctcacaggagtaatggccattctcggtccc

SEQ ID NO: 626782 - DNA, 1035 bp, Homo sapiens
tgcgtcccctgtcagtgtgctagcgccataattctcaaggatggtccacctcgatgacccgcttgacgcgaccatacctctaggttcctcctcgctgcgggcccgcttattcgctccgacaagatgaaagagacaatcatgaaccatggaaacaactcggcgcaaacttgtcaggcgacaagtgcgcattggtggcgaagaggaactgctcgcagcaacgcaagaaggtggttcatagatacagccacagcagatgacaaaaaacttcagttctccttaagagaagttaggggtaaacaatatctcgggtattgaagaggtgaatatgtttacaaagccaaggaacagtgatccgagctttaacgaaccctaacagttcaggcgtctctggcagcgaacgcttgcaccattacaggccatgctgagacaaagcagctgagagaaatgctacccagcatcttagaccagcttggtgcggatagtctgactagtttaaggagactggccgaagctctgagacaaacaatctgtggatggaaaaggcaccatttgctactggaagaggatgatgatgatgaagttccagatctagtggagaatttgaatgaggttccaagaatgaggcaaactggaatggagtcaacttctgaaggattaaacctggagaaagtactggcagctgctatgtgctcattctgacgtgtttcacgaaaatttcaggtcaatggatccgatacaatcagatctctagaatgaaaggccaagcccttgaacactggagctctttgcgagaccggggctaatacccaagtcacgacactgacgcaacatagccgaggaagccggggcactaggtggcacaaggcaagagaaggggctggctagcacaagaacggacgacgacagaaggaaacaccgtgcccaggcgacgcccacgaaaccacacgggcgcaccgaacgcacagaatgagagccagcacagaacgagccaacggggccccacgacagggcacagtacaaaaggtgacactacac

SEQ ID NO: 626783 - DNA, 265 bp, Homo sapiens
taactcttttttctcctactttttccaggatttggtaaccaaaactttactttttacttttacaaaattaaaaattttagcttccatacataagggaaaacacgtagttatggggggtttatgtttctatgccaggcttatttcacctaacatagggccctccacttgcatttttgttgccacaaataacaggattttgttttttattatgactaaacaattttccattatatatgtatgtcacatttttttatccattcatctg

SEQ ID NO: 626784 - DNA, 549 bp, Homo sapiens
  misc_feature (147)..(147): n is a, c, g, or t
gctcgccaccggtgctctggtctcgtcggtcccctcctccgcccgtggtcctgatctctctccctcctttcctcagaggatgtccggcttccagatcaacctcaaccggctcaaggagccactcggtttcatcaaggtcctcgagtngatggcttcttatcttgtgctttgtgccacctgtggaggttttaagggccaaacagaaattcatgtgattgtgtcctcctgcagttactgagaataaaactgttacagctactttgtgttatccattcaggtgtgaatgaggcatcatttcagccacctccaggtgtaaccatatgtgcatgtaacatgtgcacaagattacggtcctcataaggcgaattactctttctttctgcacaatcctatggtacctttgtgcagtcttgtgtgtccctgtactgcatgtgttggcccttcttgctttatgtgtggctacacgagtctgtatctggatagtcgtaaacttcctatgatagacttgtgttggttacacttggttggccacttttgggtgggtaggtg

SEQ ID NO: 626785 - DNA, 208 bp, Homo sapiens
cccacacgcgtccgggctcctgctgtcctccactgaatgtgaactagcacacaaggtgtaatataatgttttgtaacctctgccgagatggctgtaacacataagtgtattgaaaagttatatttaagccccctgttgtacatttttgttcctagattggatgtgtgtgttttaagaagttgtcataaataaaacctggatggcccca

SEQ ID NO: 626786 - DNA, 341 bp, Homo sapiens
  misc_feature (87)..(87): n is a, c, g, or t
cctcctagccctcttaccagagtgagtgagactctgtctcagaaaaaaacaaaacaaacaaaaacagtggaatattgggctcagctnttaacacattatatttagagattgcaacacttcaatatttactggaatactcctataaaacggtctcttttgccttgttttattttggtaactaagtgaatgctgggttagccataaaggtagcttgctgcatttctatttcttgtgttctaaatcactgaataatttttcaaaaaagtagttctaaagcatttccagttaaaaaggaaggcgtaacatttattaggggaagtcaaggtaagagggctaggagg

SEQ ID NO: 626787 - DNA, 219 bp, Homo sapiens
ggtgtggctgtcttccgttctaatacggccgaggtgtctctccattcgtcgcgggtctctgtttcctccatttccacggctgaggagattttaccaatggtggatagtttccccgtttcttttacagggaggtgtttgggaacctgctgtggggccatctgagttggctatagaagcttggtccagtccgtcaacggggtggtccatgacgacagttgg

SEQ ID NO: 626788 - DNA, 1172 bp, Homo sapiens
acggcggggagcagttttgtctggttgcaggatagcagcgccctctactagtgcctcctgctgtctccttctgctctcgaatatgtgtgtgaacacccctcctagtttttgttggggccctcatcccttagatacagtgtttggggggtattactttgttggcgccaatattgtctcccttcgcaatggggccaccatccgccttttgtccgggggtattcccctcgtgggggtatttctcttgccaacaggggaatgcttctggggtctatggagatccccgtgtgctttgtgctactccctggcctgttctcccttgagggtttcggggctctgggagatgatggttcgggtaggtaagaaatggcacgttcctagggaaaggagtacgagcgacttcgcctgattctccgagaagcctccgagaagtgctttaacgctgtgctttgcatgcgccaggcggtgggctattcgggggcctgtccagccctctcccgccatccttccgccaatgtgacgtccactgccttgtcacctagcgacctgcctgtcatgccctaccccctgaggaagcatggggtacccttacaccctggtgccctggcacctagacaggccgtggtcaggccctaggccactcggccgggttctgccacagcttcccacgtgcttgctgaacatgcgtgtgcctgtgtgctggatgtctgttgctgtgtcgtgaaactgtgaccatcactcagtccaacaagtgagtggccctcgaggccacagttatgcaaactttcagtgtgtgtcatacgacgtcactgcttttttacactcgataactcatgtatatcttagtaaaatgcccaggagtctctggaagctatcgcggacttgacagaaggattattattcttttggccattagaaatcatgacaagaaacattaaggaggcaaccgatgcccaagcgacagcctagcatcaggacccaggatgtgcagatatttcactttagcggatatgtttataacagatgaatatataaatgattttatttctattgggcatttatgcttcttttttccccccctttctcaccgtcccatctcccggacgcccacgcctgccataaagctacttcttcatttacgcaggtgagtataaacagaaaaacccccccccaca

SEQ ID NO: 626789 - DNA, 784 bp, Homo sapiens
  misc_feature (62)..(62): n is a, c, g, or t
  misc_feature (186)..(186): n is a, c, g, or t
  misc_feature (201)..(203): n is a, c, g, or t
  misc_feature (222)..(222): n is a, c, g, or t
  misc_feature (227)..(227): n is a, c, g, or t
  misc_feature (237)..(237): n is a, c, g, or t
  misc_feature (239)..(239): n is a, c, g, or t
  misc_feature (267)..(268): n is a, c, g, or t
  misc_feature (270)..(270): n is a, c, g, or t
  misc_feature (336)..(336): n is a, c, g, or t
  misc_feature (377)..(377): n is a, c, g, or t
  misc_feature (387)..(387): n is a, c, g, or t
  misc_feature (397)..(397): n is a, c, g, or t
  misc_feature (413)..(413): n is a, c, g, or t
  misc_feature (485)..(485): n is a, c, g, or t
  misc_feature (538)..(538): n is a, c, g, or t
  misc_feature (557)..(557): n is a, c, g, or t
  misc_feature (687)..(687): n is a, c, g, or t
  misc_feature (691)..(691): n is a, c, g, or t
  misc_feature (767)..(767): n is a, c, g, or t
tgtctgactacaaaggaaaatatgttgttttcttcttttaccctcttgacttcacctttgtntgccccacggaaatcattgctttcagtgatagggcagaagaatttaaaaaactcaactgccaagttatttgttcttactgtggattctcacttctgtcatctagcatgggtcaatacacctaanaaacaaggaggactnnnacccatgaacattcctttngtatnaaacccgaancncaccattactcatgattatggggtcttnnangctgataaaggcatctctgttcagggtgtcctttttatcattaattataagggtattcttcggcanatcactgtaaataacctccctgttgtgccgctctatggatnaaactttganactagttcangccttccagttcactnacaaacatggggaagtgtgcccatctggctggaaaccttggcagtaataccatcaagcctgatgtccaaaanagcaaagaatatttctccaagcagaagtgagcgctgggctgttttagtgccangctgcattgggcatccatnaaaacaaaacctcttctgtattttttttttccattagtaaaacacaagacttcagattcagccgaattgtggtgtcttacaaggcaggcctttcctacagggggtggagagaccagcctttcttcctttngtangaatggcctgagttggcgttgtgggcaggctactggtttgtatgatgtattagtagagcaaccattaatcttttgnagtgtgtattaaacttg

SEQ ID NO: 626790 - DNA, 159 bp, Homo sapiens
agtcccttaatggggggccttgctctgggcatgttgggctcttcctccatccagaggtggcccaaggcccttataacccttagtgctggctaatgtcaatgctccttccccagcctgtgtattccaaatgaaaacagttaaaccaaaaaaaggaaaaaa

SEQ ID NO: 626791 - DNA, 903 bp, Homo sapiens
ggagaggaggcgtcgggagcagcaccatggctcaaccagaagaaccttgtaaggctatgtggtgatttgccaatctcccaaatcaagtatacagaaaatcggtgaagagaggttgtgaattcacgcttatggtagtgggtgaatctggatagggaaagtcgaaattaatcaagtcattattcctcacagatttggtattctccagagtatccaggtccttctcatagaattaaaaagactgtagcaggtggaacaatccaaaagttgttaatctaacaagaaggtggtgttcagttgctgctcacaagtagttgataccccaggattttggagatgcagtcggataatagtaattgctggctagcgctgttatcgactacacttgatagtagattgtgaggactacctaaatgctgaatcgcgattgaacagacgtcagatgcctgataacagggtgcggtgtcgtttatacttcatagctccttcaggactatggacttaaagccattggcataccttgagtttactgaagcgtctgcatgaaacaagtgaatatcatcccacttattgtcaaagcagacacactcacacagagagaatcggcaccagtttaagaacaccgatattgaaagaaatcccggaaacattaacattataggcgtttacgaacttttccgagacagaatgtgaggacgcccataactcggttgacaaagtgaggcgggtacccccttggggggggggggggagccacacttggagtgctggggcacggcgaaaaagaggaccttgggggtgtaactgaaagggagccccgcaccctacaatagttgaccccctcgcggaaatcacatccacgacagaaggcatggacacatttcagaaggcacccgcgaaggttat

SEQ ID NO: 626792 - DNA, 169 bp, Homo sapiens
  misc_feature (50)..(50): n is a, c, g, or t
ggagtactatctcaggctgcatactcttcgatgctcatgcacatgccgancaagacaccaggtcaagagcgagttgcccgagtcggttggcacatgtaccgaggcacaggcggccatcccacagtcgtacaggctgtgcacaatctgatcctggccattcacgtgcctc

SEQ ID NO: 626793 - DNA, 342 bp, Homo sapiens
  misc_feature (176)..(176): n is a, c, g, or t
tggggaaaaatttttttccccttttttccatttgaatttcccaaatggaatgtttccccttgggccaaaggaaaaggatttaatgggggaaaactagggtttttaaggcccgtttattgggggggggccaaaatggaaccattaggggtgtttttaaaattaaaaaccaaaagtgnattttgtgggttttttccggaacccccaaaggaaaaaaaattagctttggctgttccccaaaaaaagcctccttattttccgggttttaaaaaaaatttatggaaaaagttttccggcctttccctggttttgcctgccccaaaaaaaattttttgtcccccctta

SEQ ID NO: 626794 - DNA, 286 bp, Homo sapiens
  misc_feature (7)..(7): n is a, c, g, or t
  misc_feature (36)..(36): n is a, c, g, or t
  misc_feature (53)..(53): n is a, c, g, or t
  misc_feature (65)..(65): n is a, c, g, or t
  misc_feature (73)..(73): n is a, c, g, or t
  misc_feature (76)..(76): n is a, c, g, or t
  misc_feature (94)..(94): n is a, c, g, or t
  misc_feature (111)..(111): n is a, c, g, or t
  misc_feature (113)..(113): n is a, c, g, or t
  misc_feature (127)..(127): n is a, c, g, or t
  misc_feature (173)..(173): n is a, c, g, or t
  misc_feature (176)..(176): n is a, c, g, or t
  misc_feature (182)..(182): n is a, c, g, or t
  misc_feature (215)..(215): n is a, c, g, or t
  misc_feature (227)..(227): n is a, c, g, or t
  misc_feature (258)..(258): n is a, c, g, or t
  misc_feature (267)..(267): n is a, c, g, or t
  misc_feature (274)..(274): n is a, c, g, or t
ggcattnggatggcagagtttttcgataagcatgtnacctctgaacaggagtnggacaagtactnccactatnttnctgggctggtcggaattngcctttcccgtcttttntnagcctcagagtttnaagaccccttagttggtgaagatacagaacgtgcaactctatgggnctntttctnccgaaaacaaacatcatccgtgactatctgggngaccagcaaggnggaagagagttctggcctcaagaggtttggngcaggtatnttaagangttaggggattt

SEQ ID NO: 626795 - DNA, 285 bp, Homo sapiens
ctgagcccgcagtctggggctacagggtccattggggaccccaggcacggctggcggtaaggcggcacgaggaggagccacagactggccacttggtcctgttctgatattcacaggggaaggaggtggtttgactgggggtggccgcaggagcgtccctctcgacctagtgctgaagcctttgttcctaggcctctggtcgcaatgggtatctctctatttgtaagcagggggcttcgctgctgtgcatcggcagaggtgctggggggtgcgttggcacgccgc

SEQ ID NO: 626796 - DNA, 446 bp, Homo sapiens
  misc_feature (125)..(125): n is a, c, g, or t
  misc_feature (300)..(300): n is a, c, g, or t
  misc_feature (443)..(443): n is a, c, g, or t
ttgggcatcacgtaggtgcggagctcaatttgcccacctgctgcctccaggatcagcaccttgaaaaagtgtgtgggcactgccacgtggttcttgccgatgacctggtactttacgtaggattntcccatcaagcctctgtcctgtgggcagacccaagagcacaacgtgggcaagggggcctggatagaacccaaagcccaccctctttccagagcagcccttctcctgatcgtgtcctcttaacttctgtgcacacctgcaaggaccaccgccctcaactgtgagacttctgttagncctgcctggcctcctcccttgaggcgtggaactcttctccaggggtggtgtaacttctttctcctcttgtttttccttaatgcccaacacctgggtcaaggcagacgcgcccgaccaataaaccgctgctaggagaaaaaaanaaa

SEQ ID NO: 626797 - DNA, 1145 bp, Homo sapiens
  misc_feature (826)..(826): n is a, c, g, or t
gggacaggcttgaggggagcaaagtgggagacaaaagcaggaagcatgcaggggtgtgcacaggtgtaggagacaggggtagagaagactgggtgagggctgggtacagtggctcacgcctgtaatcccagcactttgggaggctgaggcaggcggattgtttgagcccaggagtttgagaccagcctgggcaacagagtgagactctgtctgtataatttttttttttgattagctgggcgtggtggcacattacctgtagttccccagctactctggggggtgtgggggtgttgacgcaggaggatggctgagtccaggcagtgaaggctgccatgagccatgattatgccactgcacaccagcctgagcaacagagcaaaaccctgtttaaaaaaaaaaaaaaattggggggctgggcgcaggggctcaccccttgtaatcccagcactttggggaggccaaggcgggcggatcacgaggtcaggagattgagaccatcctgactaacttggtgaaaccccgtctctactaaaaattccaaaaatttagctgggcatggtggcaggcccctgttagttcccagttactcaggaggctgaggcaggagaatggcgtgaacccaggaggcgaagctttgcagttgagccgagatcgaccaccaaatccagcctgggtgacagagcgagaatcctctaaaaaaacaaggacacctgtgttaggattaagatcctggggtaaaaacaacattataagattaagccagcgcatgtggggcatgccctatatgccaaaacaggaaaagaggggaaagatttgtaacccncggaagaatagcggtcactgtagcctgtagttagttgcaccgtggctcccaccagcgtgggcaacaaaggtaggaccaccgccctttattttaagaaacaaaaaggggcgcgtacaataaattcatcaggggggcacaccgatgagtacccccgttgtacaaggcctgcacgtggcgatatattaatgcgcccgcgcgcgcaatatcggagaaaacgagtgactgtatgacacaaagttgaagtgcagatccgacacactgcgctacatatcatgtactacaggggcgtaaataaccatcaaccatcggtacggctgac

SEQ ID NO: 626798 - DNA, 467 bp, Homo sapiens
attggacatcccgccacgtcattactgaccaccagtggcacatacacaaggtttcctggctgtggatcgtaagtacgcgtaaaaatgatcgttaccactatcactcatgaccatgggcccgtgagatcaacgcatacatttgaacgtttggccgaataatctgccatgtagtatatttaccatattaaccagatccacgatcggatctcatccaggacttcagtgggtagtcccctacctctaagatataagatcaactgtgccgcattaaacgtttctgtgcacgattctcgataatgacaatgcataatatccgtacgagtgtatttacattatcggctggcttgattcgaatggtattgctgaataactgaaatcctttgaggatccaccaaactgatctgccaccatgtgtggaaactaatcatcctcccacgaaccatattgcagtatgcccatcgagaagg

SEQ ID NO: 626799 - DNA, 646 bp, Homo sapiens
  misc_feature (454)..(454): n is a, c, g, or t
  misc_feature (510)..(510): n is a, c, g, or t
  misc_feature (579)..(579): n is a, c, g, or t
  misc_feature (601)..(601): n is a, c, g, or t
aaaacttaaaatatctatcctgcacatcttaatcaatttggagtaataagatacttttatagttgttctatgattgctattttccattgccattaaccaggagtaagcaaaaaccagcaagccgtgtggctggtggtaaccaagtgcccgcagtctggaaaatgccaggctcagagagtcagtggggagatacaaaatagcgagggtagaccctggggccccaggaccagggaatgctgaatggtagaagtcacccctctgagctggaccggcaggcaagcagcctggctgtgcacatggaacagcttcagccacttccgcccatggtcttttgttcagattctgccattcattaacagttaccacatttcacattaactactgccctgttagttcaggattttttttttttattttttattgtatttttcccctgaggtgggagtcttgctcngttgcccgggctggagtgcagtggtgcaatctttgggtcactgcaaactttgcctnccggggttcaagtgattctcctggctttaggcttcccaggtaggttggggttacaagggatggaaccancaaggcttgggtaatttttggnattttttaagtaggagatgggggttcaaccatgtttggccaggtt

SEQ ID NO: 626800 - DNA, 210 bp, Homo sapiens
  misc_feature (126)..(126): n is a, c, g, or t
aggatccccgcagctctctctgtggggtttcttccatggcctttcatttctcctcttcccagtgggcagttttgccaggctcttctcggtggcaaacttcacgcagcgttggctgggcctcggctntcgctggtagtgtactcccagggtgcaaggccagcagtgggatttgcagaccccaggttcaggcacgcaccccaggctgagcaa

SEQ ID NO: 626801 - DNA, 181 bp, Homo sapiens
cggccaaggatttttgcggagatggaatcgcggtgttaatcaaggggggaatagatcctgttacgggctttgcccggaacgcttaggggaaccgcaagtggtgagcaatgacaagcccaatgataccatttgggcgatagaggcacgcggtctggtcaagcggttcgatgggtttgtcgcg

SEQ ID NO: 626802 - DNA, 322 bp, Homo sapiens
gagacggagtctcactctgtcacccaggctggagtgcaatggcgcaatctcagctcactgcaacttctgcctcccgggttcaagcgattctcttgccccagcctcccgagtagctgggactaacgcgcacaccaccatgcccagctaatttttgtatttttagtagagatggggtttcactatgttggccaggctggtattgaattcctgacctcctgatccacccgccttggcctcccaaagtgccgggactgcaggcatgagccaccgtgcctggcagattggaacgttttaacatgagaggagcacttccccaatttat

SEQ ID NO: 626803 - DNA, 618 bp, Homo sapiens
  misc_feature (403)..(403): n is a, c, g, or t
  misc_feature (483)..(483): n is a, c, g, or t
cgccccgtccagtttctttgggcctcggggcggggatccccttttttgccctgggcggggggccacatccccccaagggggggtttttttttcccccgggggaaaatttgtggtgcccccccctagccaaagaaaaactttggtttttccctcccaaccccctttaccggggcccggggggaagggtgtttaaggggtttttaattttttttgccccctggggtcccccccccccccccccaatgggggagattttttttttttgggggggggccatccccccccgcccgccccgggtcctttaacccccaaaaggtggggttcccagccccccggggtttcccccttggtccctttccccacgggggggggggcccccccccttcccctgggttctttttgntgggggggtttaaccgggaaccccacccaagggcctttttcctttcccctttggggggttttccccccggggaaaccccnaccccttttccccccccgcccccgattttaaaatttttgggaaaaaaaacccccgggggtttaaagggttggggggttttttttcccccttttctgggacccggggggggcccccaattttttttttttaattta

SEQ ID NO: 626804 - DNA, 518 bp, Homo sapiens
tcactttaaaatagaagatacgagtgttccatgtatttagctaaaggtatacaagctgataatcatgttagactcatctactcttcaacatcagaagatccgaatgtgcctggtagaaccacggatatccaggaataagcgattccgtactgatacttcactatcatggagcttaatggaccacaggaacaagaagatgaagcttggccactagctatattcaacaaacatcttcaacagactggtcgctgtttgaaaaagaaaaaacttgcaaagaacactatctaagcctaagtgtgtgatacagtttgttactttaaagtacatcttaataatatcagacatctgcatataaattgaacagttgtctgtatctgacccatcatactactatacttctgggttgaacagaattatttatgcagaataatacaattgaatatccatcacttaaatacagtgacaggacagcaacttcagggatctgtaaagctcatttaactggagtgctcacctca

SEQ ID NO: 626805 - DNA, 425 bp, Homo sapiens
agcacactgcagcacgagcgatctatacatgctcattcaaatccatgggggagattaggacaattcaaacccggatgcaaagaaccatcaggagaatgagtgaaggccagccgggcacagtggctcacgcctgtaatcccagcactttgggaggccgaggaaggtggatcacgaggtcaggagttcaagaccagcctggccaacatggagaaacactgtctctattaaaaatacaaaaattagctgggcgtggtggtgggtgcctgtaattgcagctactccagaggctgaggcaggagaattgcttgaacctgagaagcggaggttgcagtgagctgagatcccgccactgcactccagcctgggcgatagagcaagactccatcaaaaaatgtgtatatatcttatgtgatagggaagatgaa

SEQ ID NO: 626806 - DNA, 1031 bp, Homo sapiens
gtgcttgacgaccttgcgcgcatgcgcctgggaggccgataccagcgactaggaggatcctacatgtggagtgcgcacagcatcttccctgccgatatcatactggctccgggaacaccagaaaccctcaagatagtcctcgtgcagtcaccttcatgtttacttatgccaagaggttacgcgacgctggactcgaggcccgtcgacctggcgtcctcactagaggccgacggtccttataagcgcctcgcgcggtaggctgtcatgctacattataggaagaagctgtcgtgagtaggacttgtgcctaaacaggtgacacgaggagactttgacggagatatggaagctatactgcatgactgtagtttgcacgtctatgatgtagataccgctgatgttgtccataatgagagacaataacccaagaattcacggtaagtccagacaatgtgagagccctgcgcacgaagctgaggcacatgctcgagcagtaacaaaggctgaaagcactacttacccatcgtgcagtcttgcgcgatcacagaatgacagatgtattccccgtatcgtccgttgtctgcctgaaagcacctggtagtatgcggcaatctccgggtaactagaacgaccttatacattgaggtctgatctacagctgtacactcatccagggacaagtctggaagccaggctgaaaccaagctgcgtggaccgtggattactgcattgagccagtgacatcctgaacatgaaggatatccattaatattgtcatgacccgtgcatgaagtgcgtgtgatggcttgtgaaacgcagttctacatgggccactcgatgcacacaaaggtttcatgaggagccaatccatagttgcaataagaggataccacgaatcgcgaattcagccagcaggttagaaggcagagggtttacccaacatcacagaaagacactcaaaagccaccgaattcctcctcgggtcaggagattggagcagcaagcttgggtgaactgggagtgtccctctg

SEQ ID NO: 626807 - DNA, 452 bp, Homo sapiens
  misc_feature (263)..(263): n is a, c, g, or t
tcctttttttagaaaaggaaatgtatgatcataaatagctgaaaagccctgttctaattacctctcccgacgcatggagccaccacaagaaactgaatagattcaggcgggaacgtggggctgcagacacggctctgccacctgacgccggcaccatctcctcgctgccacccgcctccccagagtcctctgcccactctttccccagaccccagtcaccagcctggacaggtctgctgtgaccccagcagcaagatcgcccnagacaggagaaggcctgctggacagaggctgggagaggcaggaggcctctctctggaaccctcatcccagctggtcgtttcccaaatgagcaggactctggcatccgtggggcccatcgagaacatgatgacaggcgaaagcggcagtaataagcgcctcggaggaccacgcgggtcagacagtcctgc

SEQ ID NO: 626808 - DNA, 530 bp, Homo sapiens
  misc_feature (1)..(1): n is a, c, g, or t
  misc_feature (79)..(79): n is a, c, g, or t
  misc_feature (86)..(86): n is a, c, g, or t
  misc_feature (93)..(93): n is a, c, g, or t
  misc_feature (120)..(120): n is a, c, g, or t
  misc_feature (130)..(130): n is a, c, g, or t
  misc_feature (136)..(136): n is a, c, g, or t
  misc_feature (158)..(159): n is a, c, g, or t
  misc_feature (273)..(274): n is a, c, g, or t
  misc_feature (278)..(278): n is a, c, g, or t
  misc_feature (292)..(292): n is a, c, g, or t
  misc_feature (303)..(303): n is a, c, g, or t
  misc_feature (308)..(308): n is a, c, g, or t
  misc_feature (320)..(320): n is a, c, g, or t
  misc_feature (342)..(342): n is a, c, g, or t
  misc_feature (344)..(344): n is a, c, g, or t
  misc_feature (469)..(469): n is a, c, g, or t
  misc_feature (530)..(530): n is a, c, g, or t
nctccctcccttcagtagtcttcagccatggccagtaagacaaggctggtccagtcgtggaaagggcggcagccatgcntcgcccntcgcggncactgttactgctcccaaagaaagcgngtaggctggnactggngccatacattgcgctaccacgnntggcacggtagctcaccgtggagtttggcagcccgagcctggtgaggaccctgccagatgcccatagtggtggggtgctcccaaagccaggtagttgacattgagccacacagnncccngccagtaggggggntgatgctctgnattgngctggccataanaggcgctggaggctgcaagggngngtgaaggcaaaggggctccagagatggcggctgtcggctagaatgtccaggagggggcaaggcgggatgaggtggggtccagcagtcgcagcaggaagggaaaaagactgacatagccaaggagnatctacatactgcagttgaggttggggccgacccaccacccgaacgagcccctgagggggn

SEQ ID NO: 626809 - DNA, 671 bp, Homo sapiens
  misc_feature (420)..(420): n is a, c, g, or t
gcatggtggctcacgcctataatcccagtactttgggagtcacagtactcaggatcatctgaggtcaggagttgaataccagcctggccaacgtgataaaaccctgtctctactaaaaatacaaaaattacctagaggtggtggcacacgcctgtaatcccagctactcacatggctgaggcaggagaattgcttgaacctgggcagcagaggttgcagtggcaccatctcggctcactgcaacttccgcctcccaggttcaagagatcctcctgcctcagccccacatagtagctgggattacatggaaatctattatgggatggcctggatatatcactttaaaaatcctgcttttaatgaacaaatgagaaaagaccaagaaattgagctacagtgaggtcacacagccgagaatcncacagtgaagagttgggatttgagcctggaatactctgacctcagagtctggatgctagtctcttgctgcctcccctgtgttatgaggtcatgtctaaatcacctccgttactgaaaatgcttgtgaaagacctattctgctggatagagcagtcaccttagtcaaatatgatccaaatgttgccattaggtcctacccaaccccatcaaagatcagaacctggaggtgtggtaactccctccagtccaaa

SEQ ID NO: 626810 - DNA, 145 bp, Homo sapiens
gccctgaaaccatgctgtgggttcctaggtatcctgtcttggtctttcttatccaggctgcaagcaatgattgaagcaaacattgtttctctggaacgtgatagagccctagagttcacctcatccccagaccagatccttattt

SEQ ID NO: 626811 - DNA, 1431 bp, Homo sapiens
gacgatggcgggcttctccgatcatgggtgtaatgcctgagattagcacagggctgtggaccgatgatggattcggctcctcccaagctgatatccatggctgaagtccactcgccactgatacttaccgacggaggtgatcgtacacttactggactggtccgaaaatagggaacagttggcatacaactgggtagcggaaaagtagttccaagtcttattccagataagttcatagaaagctactgaggaggaacagcatggtagccgggcgacagactacggtagacaaaatctagatcaagattcattagactggatcgcctgtcatgtagtgctgcagacggatatggatcagcatcgcagagccacattaactggacacgaagagagtctggctgtctgtgaacacatttttgggggttgcatggatcggctctataagtccagttccccaaagtcaggcaggaagctgacatacgcgacaattgggccgagtaggacgctggtcaagcaatgaatcacatgaaaatcggcggaagtgtcaaagtcgcaataacgggggagaaagcaccatagcggtacttgcactcggtatgtcgcttgactcttggataggacccccaaagaggggggctttgaaactggcgccaagcgaaggattccgttcagttctggggcatgcgataagcggccaatggccttagtgggtgggcctttcatatctcggtgggaacccctttaaacgccggattagcgttgggacctctgagtggctttacaggcggacctatttaggtgggcctttctccgtgcctgggggagaccctaaggtgcatagagcggacaccacattttgggccccaattaacacgccaaattaggcgaagatctaacggcaattaaagcagtggaaagtcggttgccaaaggaaatgcggaaaacttgtgggcggatctttaagtaggtcggctttgggattgagggccaatgttctggtgagacttgtactgtggagacaccatggggttaccttagttcagggcaaattatggacgggtgtgtgaagccaaatcggctatacataatggtatacgcccagggctgcggaaaagcacaggacactctcggagataggagcgacgagcacgtgcctccttatgtgcggccccgtgtgggagcttcacatcggtttcgagcaattaatcgctattaacccaaaggcgcaagcgcaatttttcacttttgacaacaagagaaagcaccttatatggacacgcccggatccgtatctaatgcaacgctcggaccggtctcgcgtagggatgtcgtcgtgatgaacagagaaaaacgtgtcgcactttggagaacccttggaaaggggactgcgtgaacgcctgttttcctaggcgggggaactagcacactggg

SEQ ID NO: 626812 - DNA, 128 bp, Homo sapiens
aacttgggacccccaagttgtaaaaatgtatgtttttacctgccagttataccccaggtagactgtcaagtttaaaaaagtgaatccataacttggatttgttttaaaaattaaattaatccttgata

SEQ ID NO: 626813 - DNA, 165 bp, Homo sapiens
attcgcggccgcgtcgacgtgaggaaacattgaactgcttttcacaaaagctgtaccattttactttcccagcggcgtatgagggttccaatttgtccacatccttgccatacttattttttgttttttttcattataggcaccctcccgtcctccacccctccc

SEQ ID NO: 626814 - DNA, 158 bp, Homo sapiens
  misc_feature (13)..(13): n is a, c, g, or t
  misc_feature (43)..(43): n is a, c, g, or t
  misc_feature (95)..(95): n is a, c, g, or t
  misc_feature (105)..(105): n is a, c, g, or t
  misc_feature (119)..(119): n is a, c, g, or t
tgcacctggccantccctgtcctgtctcctcagcctgcctcanagtggccatggggtgtcggggtgaagggtgtcccagctacttgtcctctgcnggaccctaancccctgcccgcaantccacatgccctctgtgatgagtggcgtctttcctgcct

SEQ ID NO: 626815 - DNA, 134 bp, Homo sapiens
ccctgctcaatatcctaagcatagtgaagttctaggtggtcctcataagggttcctcaaatcttcaaatcattcccttcaatctaaaatcctcaatggacactactgagtcctctaagaggtccagtcttccgg

SEQ ID NO: 626816 - DNA, 970 bp, Homo sapiens
gccgggtggtgctggcttccccactggcctcaagtggagcttcatgaataagccctcagatggcaggcccaagtatctggtggtgaatgctgacgagggagagccaggcacctgtaaggaccgagagatcatgcgtcatgaccctcacaagctggtggaaggctgccttgtgggaggccgggccatgggagcccgggccgcctatatctacatccgaggggaattctacaacgaggcctccaattgcaggtagctatccgagaggcctatgaagcaggtctgattggcaagaatgcttgtggctccgactatgatttgatgtgttgtggtgcgtggggctggggcctacatctgtggagaagagacggcacttattgaatccattgaaggcaagcagggaaagccacgcctgaagccgccctttccagcagatgtgggagtgttggatgccccacaactgtggccaatgtggagacagtggctgtgtcccccaccatttgccgtcgtgggggcacctggttgctggcttggccgagaacgcaattcaggtaccaaattgtttaacatctctggccatgtcaacacccctgcactgtggaggaagagatgtctgtgccactgaaagagctgattgagaacatgctggtggtgtcacaggtgggtgggacatctcctgctgtgatctggtggtcatctactccactgattcccaatctggggtgtgaacgtgctaatggactcgatggccggggcgggccagaacggctggacaggtgcacgttgtaatgaccgccgagaaatggaagcacccggtcatggattacagctggggtcgggcggttccccgcggggggtgaggaacaggggccccttggaggagcgcccatatccggggaaaagaaaaccacgtggggggggcgcaggtacaagaggagatggcgaggggcgcacacctcgagagaaatgcacc

SEQ ID NO: 626817 - DNA, 332 bp, Homo sapiens
cctagctccatatcacaaatcgcacaggatccaggactctttccatatcttcaccacgaacgctgctgtcagattgatcctcagtcctagctacatcaaacactggttcctggaatcctgtctgctgctgtcttcctagattcactgaatccacttctgtgtagcacctgggtcagctgtcaattaatgctagtcctcaggatttacaaaataatcttaactcaaagtccaatgcaaaaacattaagttggtaattactcttgatcttgaattacttccgttacgaaagtccttcacagtgggcaaactaagctactatatttaaggccttc

SEQ ID NO: 626818 - DNA, 186 bp, Homo sapiens
gaggaaatctgagggttgtctctgaccttaccaacagttgtcacaaaaggtcccttttatgatgtgtcagtacacatcatagaaggtaccctttagttacattttaaagttagctgttaacttatctgaaatatgtattgtggaacagcattgatactgtgtggaacaacgaagtgctttggaatg

SEQ ID NO: 626819 - DNA, 275 bp, Homo sapiens
aaagtatacagcgaattcaaacatcagtttatctgcaaacatgctggccactttaactgatatctcaatcaagcggtacagaaataaattaagaaatcccttcacggatatgccgtgatttacactgttcaaaggtacactgttcattaacatgtactcctggttcagaattacctttgagactccttgctcaaaatttggttaacagtaagaatcttccagaaatacaagttcttattaatcaataatttgtcagctaggatacagtagggaga

SEQ ID NO: 626820 - DNA, 554 bp, Homo sapiens
atacccaagaagacaggaaaacaggagagaacagtcaccagatcaagaagcacatgatcggtgtactttttaattttcttttataggagcctgtcgcccaggctggagtgcaatctcagctcactgcaagcgccatctcccgggttcacaccatcctccggcctcagcctcccaagtagctgggactacagtggtgtgcaagcatacctggctaattttggcatttttagtaaaggtggggtttcgccatgtgggccaagaggtctccaactccgggcctcaagtgatccgctcaccttggcttcctaaagtgtggggatggtaaacgtgaaccacagtgcccagcctgccccagttccttattaagcagacatatctccttccgggtggacctctagccgcactgtttcactacggggcagtgaaatcagatggtacactagtggcagcagtatttataggccttgaaacacaaatgggtaactgtgtaacaaatgtttagcgagccacatttcatgacctgcttggcaagacaacaattgcccgtgtgaccg

SEQ ID NO: 626821 - DNA, 315 bp, Homo sapiens
cttcgcgtccaattcctcatgccttccggttgatggctcctcctggtgcttcagcagtctcagctgtgggtgttgcagctaacgcctgtgtgatgtttgtcccatagaacttaggttctgtggggctgagctttctcgagggctgcacggagggagctgagggtgcaggcaaatggggcaggggctggaagctcataggctggtggtggctcccgggtctcaaaagggttgtagacgtcaagcgtggcatactgccggctgggtcggtgctggatcacagctgggtcctgaaaggggttgggacacgaatgttca

SEQ ID NO: 626822 - DNA, 351 bp, Homo sapiens
gtcgacggtcataccgaatatcacagtgtcacgtaggaagcccaagggaggtattcccgttaatctgcagccaaggccgggcgcggtactcatgcctgtaatcccagcactttgggaggccaaggcggatggatcatgaggtcaggagttcaagaccagcctggccgagatggtgaaaccccgtttctactaaaaatacaaaaattagccgggcgtggtggcggacgctgtaatcccagctactcgggaggctgaggcagagaactgcttgaacctgggaggcagaggttgcagtgagctgtgatcatgccactgcactccagcctgggtgacagaacgagactccatctc

SEQ ID NO: 626823 - DNA, 137 bp, Homo sapiens
ccggcggctaagaacttccctaccccaaagtgagtgagttcttggaccagaccagactgttctattgtgagagactttggtgatgttgagtacctatgaatacttggttggtaggcctcctaagtcacttacccata

SEQ ID NO: 626824 - DNA, 436 bp, Homo sapiens
cgggtgcattcaattaatttagtaccccagtggtcatgcaagtgcctgcacagtttcaaaggcatggtacagaatatatcagtgttgatgtagtctgttacagaaacagctatagataacattatccagtgaagagcaaaattcaagctatagagagatattcatgcatgcgattgttgagatatcgtaaaaataggtatttgtctatttatggtgggaggtggtcgggaacttagaagcaaaatggggtgttaatttttgtacagtctgtgggcatttacacatataaaatgtattaaaattcggtaattatgtgtacattaaattaataaaagttacttctagttatgattggtgaattccctaagagcttggatttttttaagtaactttatatcagaaatgatactgcatctttatatttttaaaattgtgt

SEQ ID NO: 626825 - DNA, 197 bp, Homo sapiens
ctttggggggtggggttttgcccccccccccccccgaaagggccttttctttttcccggggtttttggggggggggggggggggcccccccttcccggggttttttggttggggggggggggttgggggggcccccctttttttttttttccgggcccccgggggggtttttggccccccccccccccctgggggga

SEQ ID NO: 626826 - DNA, 185 bp, Homo sapiens
tctcaaagcgcgagagagagggggggtgggtggggagagaggagagagagggaagtaagggccattttttatgagtcactcggggccagcacaggggctcaggctggcagtctcaacacttggggaggccaaagggggaggatggctggagcccaggaattcaagaccatccggggcaacacaag

SEQ ID NO: 626827 - DNA, 338 bp, Homo sapiens
tatcccaacgcgagccgccagctgtcacactctacatattcttggtgtatgataatctgtataatttgccccgctctatccaccttatatattgtgggctactttccatgtccataagtcatttatttgttaaagccatgttattaagtaccttctacttgctggtcactgttgtgtaccattatgcttagtaggtacatgcaattccatcttatgattcacctaacacttattaggcagtgtctatcatcctccacgccctccctctaaaatgcctgataggcaggagacttcttccatgtcttcctaccttgtgtgacccataccgtgccggctcg

SEQ ID NO: 626828 - DNA, 429 bp, Homo sapiens
cacaggtgcataccaacatacccagctaatttttttaaattatgtgttgtagagacagggtctccctatgttgcccaggctggtcttgaactcctgggctcaagcaattttcccacctccttaaatgctgggattacaggcatgagccaccacactcagctcttactttatgctttacactgaacaactcaaagttccttaaagatgtgatgctgaattgttttcctggcaccacactctcagcctaactaaaaagttagtcattactttcaaagacccctccataatcgagatatttatctacatctattactgtggtttatcatattatatcagacatattattaatacgtctttctcatctattgtaagtatccttcctgagagcagggccctgtgcctagcagagtgtgaggttcaagtcgacgc

SEQ ID NO: 626829 - DNA, 117 bp, Homo sapiens
gatagcgcacgatgcgcgtccctggcatggctggagaatcgtggggacctcccactcctcccagccgggcccgagctccagttgtagcccctggtgtcagcagcgagagagcagtgg

SEQ ID NO: 626830 - DNA, 481 bp, Homo sapiens
ggatatacacgacactgtgtcatagggtgggcatcaccaagagaagtcgcaggtgcatgaatcccacaacgattcataagagtgttctaggaggcaaattcggtgtgcatacagagaggcaggactccgcagctgtggggtttgattacaaggagaagctggccaagcacgagtcccagcaagactactccaaaggcatcggcgggcagtatggggtgcagaaggctcggatggctaagaatgcgtcaacctttgaggatgtcacccaggtgtcctctgcctaccagaagacagtacctgtcgaagctgtgaccagcaaaccaagtcacatcagagctcaacttagaaaccctcgctaaggacaaagcagcaggaggacaggcggaaggcggaggcggcacacgcccagcggatggccacggagcggcaggcagcaagaagcggcaggaggaactggaggacaagccacaacacaacttcg

SEQ ID NO: 626831 - DNA, 467 bp, Homo sapiens
tggagggggtacctttctgggtttatgcagtttattgactggctgtgaaagtacagaagaggctcttagaaatggcatccaacaggtgatagcacacaagctgacaagctggtccgtgatatttatggaggagattatgaaagatttggtttgccaggttgggctgtagcatctaagtttggggaaatatgatttataaggagaagcgagaatctgttagtaacagaagatctgggcaaggagctactttagtttactaatcaccaataaccatgtggttctggtgggcaccgaatggtgtcgctggttacatgacgaaaactaaaccagacgtggtcttgtgtgggaaacctttttacgttgttcaataccctctcaatgaaactttgtggcatatgcactggattactgggtcaaacaggttcaactacaaagccattggtcttcttagaaaccattgacgggga

SEQ ID NO: 626832 - DNA, 1296 bp, Homo sapiens
  misc_feature (1296)..(1296): n is a, c, g, or t
ggccacacttgaagaggctgagggaggcggtgtcgtccggcgtgagtgctgtcatggatgctagcgcaggaagcgcgggaactgggttgctggcgcggtcgaatgagatgggggtgcccgtggtcagggccggggcgccggaatcgacgctcgggcatgcgctgtgtctcgggcctagtggggctgacatctggggcctaggatcttgcgagcatgtgcacagtcgagtaggggactgtcgaagcaatgatcctggtgagtaaaccgtactctgagtcatggtggcaaccaggacctagggtccaccagggatccgcttcggtagaggttacggaggcatgggaaagcctgcttgttggaactccgacgctggcggggcgagcagagaatcctagcgcacttacgtacccaagaagactctagtgaagacctggaattggaatgccagtacgaacgacttcgaacgcgactccacgggaaaccacctgggcgtccactgggaaagaccacgtgccatgcgaatcgaagaccacgactatcgataggacgagccacaggcgttatcagaggcgatcgtctcctcgcgtcgcgggtgcaccgaagggccttggcgtggctcgagtggactgcacatggaacaatgagacggggacatagccggccatccggggagaatgtcgcacgaagtgttcaaagaccgtagcacgtgggccaggcaaaggtgcaaattttggacaggaggccgtcctgttgacacaccgggaaaccaggtgtggtaggcaagggcaaattgtacgagccaatgagggataagtacagtggcctgaaaccccttatatgggggatctacaccacagtcaacctgtttcggatgttgaagcacttgtcagtggtggtgtccccttgggtaacgactccaccggaagtgaggggtcgcctggacagcctgcgaaactggattggcgggataaccaaggccccttttgataaacccccgttcccctggaggtgggccccagggtgatacccgcttggccaagaaaaaacctaattcactttggcaatttgccgcccccaatggggacccgataagacaaggggggagtacaatggacattaccggtcgtaaaattcgcccccgttccagttgggaattgaacaccgaactttatgtataggtgaccagcatattgactggttgagaacgccagaagataggtggtggggcaattggaagagcttgcccacggtttggagcaagagacctgggcatgcgtgtctggatacaaaaaagcn

SEQ ID NO: 626833 - DNA, 1392 bp, Homo sapiens
gacacgaggagccagatagtggtgagtgtatacattcaccacaccgatgctgtccaggaattaggacggaagtgcccttgacatgaatgcctggtgctgcaagcctgtgttacgcatgccatgggacggacacacacgacgtatgcatgtgcatcatccattggcaaacaattgccatcttttgaattgttgatgcagatcaaacctcagtttacagcaatgtcctagcaagcagtagaacccagtaacatccagtgcgttaattacccaactatgtgcacagcctaccttcaacatgccttgttgtgctgctgtgccacacccaatttccccagtgcacgtacaacatcacatcacattgtatgtcccagcattgctcttgttcgcacgttgcgcacattgctcttggccccacaattgcactctcaattgcacacgcattcattcccactgagcacagcacatcaagtccaacacaataaccccaacatgcaacacacgtgccatcatctcctagacacagcccaccgtatcccacatctcccaatctgcacggcagtctatgttctggcacgcccagcctggcacacgcaacaggcatacatcgcttcctttgtacaacacaatacatcggacggctcgcacccagtcggcacttccccgatgccaccgcaatacttcactaacactcgacacgtctcggctcctctccctccttcacgcatctcaattcatattatgggcatacacacacccccctgaactacaccgggccctcatctccatcggctatgcattctctatacagttaagtttacacaacgggcttcttcaccttcatctctctccacccagcgccttaaccctttgtccgaccaccttgtggcgcctcaagcccttacaagttgtacaccttactccaagcgcccataccaatgcaacgcgctcatcaacaacgcataacccctggcccacagcttcggcggcacccacctgccacggacacccaaaccaaaccagaggaacagcgggatctaaaacccgccaccccgcaaggccatggcgcgccacgcgcacacacccaaatacaccttacggttgccacaaactaatcgctaatcccacacccaattggctaggcaacattgctgtctagggagcctcgaccccccccgcgagtcaaaaaaccccactactgtaggcgacctatctcctccaacctctctgtgacaactcaaacattgtatcccccattaacagacgaggtgacgtatgatcccggcgccgctgcattgtccactgtacaacgtattgtgccactatctacaatctacacactaacgctttgcaccgcaggcgtgccgctagcacatacccgtcgtgctacctcca

SEQ ID NO: 626834 - DNA, 214 bp, Homo sapiens
gtcagagggagggaatatgacggatgatctcaggggaggagtgtccacactcgacagctgggaacactgaatgtagtgggatgggagtacacgtgattagggccatcttggaaaatacaatctgccatacatgattctacttcaattgttgttgtaattttttcactattacagaagaagtagaatcatgtatggcagattgtattttccaaag

SEQ ID NO: 626835 - DNA, 156 bp, Homo sapiens
agtagcgtcaacatcatcccacttgaacatattcaaaataaaacaggtttactcaggatgctgaggcaggatagcttgagctcaggagtttgaggctgcagtgagctatgatcacgccactgcagtccagcctaggtgacagagcaaaaccctgtc

SEQ ID NO: 626836 - DNA, 249 bp, Homo sapiens
cggggtaatttttttaatttttggagaaaagggatctcccttttttccccaggggggttttaaattttgggccccaaaggatcccccccccccccccccccaaaggggggggattaaaggggtgggcccccccgccggggcccccttttccaaatgcccccaaaaaaatgtccctggggaggagcccgccccccccccgtccctggggttttgggggcccaaaaaatttccccccattgggttttccca

SEQ ID NO: 626837 - DNA, 324 bp, Homo sapiens
ctatttgtctttccataactcgctgtttccgttatgtaatgtctttcaaggtaactccacattgcatcatatatcagaatttcctaccttttataggctgaataatattctgttatttgtgtaaagccacattttctttatccattcaggacatttgggttactttcaccttttggttattgtaaaattttgctgcccttaacataggtgtgcagatcccacttcaagaccctgctttcagttcttttgcatatttacctagaagtagggttgctggatcatatggtaattctctttttaatatgtttagtgtatccgtgaggg

SEQ ID NO: 626838 - DNA, 330 bp, Homo sapiens
  misc_feature (211)..(211): n is a, c, g, or t
  misc_feature (315)..(315): n is a, c, g, or t
gttgaggctgcagggagccatgttcaccccactgcactacagccagggtgacaacaagaacctttctcggcgtgaacccagggggcggagttgcagtgagccaagatcgtgccactgcactccaccagcctgggtgacagagcaagactccgtctcaaaaaaaagtttactactcggctttaattatttcgtttcggttttgggtgaaatnattttattactgactggttccttagttgtacagaagcctattatctttagagagactcttcatggtaattaactcagattcttattttgcctgggtgaaagganggcaagtggatctaa

SEQ ID NO: 626839 - DNA, 152 bp, Homo sapiens
  misc_feature (8)..(8): n is a, c, g, or t
  misc_feature (16)..(16): n is a, c, g, or t
  misc_feature (65)..(65): n is a, c, g, or t
  misc_feature (133)..(133): n is a, c, g, or t
ccgctacnaattgggnaacaaaagagtagctttgccaatgccgcctaaacttgctgcctcgaaangtgggctcccctcttcctcttgaccctgcaacctcctagggcattgtatctgtctttccactctggantcagccttctttttctgga

SEQ ID NO: 626840 - DNA, 151 bp, Homo sapiens
ttaaaatgctaagagatcttactgtagagatgaggagagtaattgtatgacctgtatcttccccccgtcttttttttcctttaacagtattctgtttcagcataaagcatcactttctgaagaggttcctgttggagactgtaatctctga

SEQ ID NO: 626841 - DNA, 169 bp, Homo sapiens
cggctcttctactacgagcgcactcttgccagcagtgccaacggggccagggcacaggagcacaggagcaccagggggtccagcggggccggtctcaccacggtcaccctggcgggagagcaggggaatatgggtcagccccggggtgacacggccagagatgaggcag

SEQ ID NO: 626842 - DNA, 240 bp, Homo sapiens
cttcttccgcaccccaccaatgccaggactttacccatggtatcctagttctcaaataatttccaaagaagattaaacaagcaaccgccaggcggttggaagaggttcgtgcaacattattatttttttgagataacgtcatcagcgcggggcatttattctattgcctgttatcgcaatggtagttattgggtattactggattgcataatcatttgcattctgcagctacatatgtca

SEQ ID NO: 626843 - DNA, 117 bp, Homo sapiens
tcctagccgcgccagtggatgaaggtggttccatcattgtggatgtggtaaatgaggtggtggtagtgggtgatggggtgctgtgggcctggttatgcactggcgaggcgaggacgg

SEQ ID NO: 626844 - DNA, 124 bp, Homo sapiens
  misc_feature (10)..(10): n is a, c, g, or t
ggatcttagnagcaggaaccgaggcaggtgtcatgtggtggagcgctgtgacccggggaactccatctgactggtcaggttcgtgcggtacggaaggtcagacccttgagttctggtggctctg

SEQ ID NO: 626845 - DNA, 329 bp, Homo sapiens
cacgaggcctcgtgccgtgacgatgctcggcgtatcgaggccggcggcgcgcatcagcagcggcgtcagcccggcatgccagtcgtgggcatgcacggcggcgggcaccggcagcggcgttcggcccgccgcgatcgcggtggcggcgtgcgccagcgcggcgaagcgctgcgggttgtcggcaaagtcgcgcccggtgggatcggtgtagggcgtgcccgcgcgatcgtagaacgacgggcagtcgagcagggcgacctgcacgttgctgcccggcaggcggccgagcatcagccgcatctgactgtggccgggcggcagctccagcc

SEQ ID NO: 626846 - DNA, 343 bp, Homo sapiens
ggtgttacacgctggcactggtcatgaactcctagactcaagcgatacctgcccctcgtgctccaaagtgcttggattacaggcgtgagaacacgccagggtggtttggttttgatttgtaagtccaggcatttttagagtcctggaggtctagtttacttgcccaaatacatctatggttttaggtaaactttctggggaattatttcatgagtattaaggcaaaggccatcagtgggcataagaagtcaatcaagggggaaaaagtacctcagggcctcatgcgtgggatatattagttaaggattacttatttcctgagagcccgtcttcacagggtacc

SEQ ID NO: 626847 - DNA, 806 bp, Homo sapiens
tggaaaaaacaggttcttaaatggtacggagtctcacaaggcaacgaaggaccctcaccaggaccaaataaaataatctcccagcggttgcatgaaaggcgcggcctggggggaggatgtgcggcatctcgtgaggcctcctcccgagggccgtggtgtgggcgagcccgggggtctctgcagctcgtggtgaggggccctcctggggtgtgtgtgctccgggcccctcatagaagccgggctccagctcctccgaggagtgggagaactcgcttccactcacttcctccggaggtcggagagtgtattgtcccggccactgagtgggggagtgtgacgccagaagatctggcagggtgtgtcgcccgctgttgtacggcgaggtgtgtgtacacgtgtgtgcgcatccccttggggggaaggagagcgtctcttgtcttgtgggcagacccgtgggggggcgcctattggtccctgaggaacgggggtctctccctatttctctgttggccgcccccctttcggtgggtctgttggccgttgccccactgttgggggggggggctcctacacgcgtgtggtccctccccggagaggcacacaatgtctcccgcggggagactttgggcgccggagtcctctggggcaacgcctctctctgtggtcaccccggcggtgttccccccaaagactcgtgggggtttcgtctggcccgacatgcttgagggggggccctccggggagactgtccccagagaaccttccgccggaagagatgcccaattgtcccccggaccggttgattg

SEQ ID NO: 626848 - DNA, 203 bp, Homo sapiens
  misc_feature (168)..(168): n is a, c, g, or t
  misc_feature (186)..(186): n is a, c, g, or t
agagagagagagagagagagagagagagagagagagagagagagagagagagagagagagagagagagagagagagagagcggatgtcatctttgtatttggagttcagaactcatttttggggggggggaagacaactggctttggcatgatttatgattccccggnttatgcaaagaaaaatgnacccaaacatagacttt

SEQ ID NO: 626849 - DNA, 423 bp, Homo sapiens
attgctcccagatctgactctactctggcattctttatattaataggctataaatttccctctacacactgctttaaatgtgtcccagagattctggtatgttgtgtctttgttctcattggtttcaaagaacatctttatttctgccttcatttagttatgtacccagtagtcattcaggagcaggttattcaatttccatgtagttttgcggttttgagtgagtttcttaatcctgagttctaatttgattgcactatggtctgagagacagtttgttataatttctgtacttttacgtttgctgaggagtgctttacttccaactatgtggtcaattttggaataagtgcagtgtggtgctgagaagaatgtatatattctgttgatttggggtggagagttctgtagatgtctattagg

SEQ ID NO: 626850 - DNA, 219 bp, Homo sapiens
gtcgacctttccatgattagctatattcctttgactacaagacaagtcaaaaccttctttgaaattgctgtttgttgggtatttgatcatagcattcttaattttcgatgtacttgtatctgggatgctctatctggtttgtaataggcacatcaggatggcccatatgaggcaggatgatttttgtgcattcaaggccagcctgggatacatagcaag

SEQ ID NO: 626851 - DNA, 1408 bp, Homo sapiens
ggccgcgcggggcatcacggccctggtcgtgccaggcctgcggtggcaacctcggctttccctgctcaggagcctcgtgtctttctccgcagcgctttgccagccggccggctttccccttccaccacacacctccacctggtcacagcagataacccagcagccaactggcttcatgcgcgctccactcggaaaaagcggtgcccctatacaaaacaccagaccctggaactggagaaagagtttctgttcaacatgtacctcaccagggaccgcaggtacgaggtggctcgactgctcaacctcaccgagaggcaggtcaagatctggttccagaaccgcaggatgaaaatgaagaaaatcaacaaagaccgagcaaaagacgagtgatgccatttgggcttatttagaaaaaagggtaagctagagagaaaaagaaagaactgtccgtcccccttccgccttctcccttttctcacccccaccctagcctccaccatccccgcacaaagcggctctaaacctcaggccacatcttttccaaggcaaaccctgttcaggctggctcgtaggcctgccgctttgatggaggaggtattgtaagctttcattttctataagaaaaaggaaaagttgagggggggcattagtgctgatagctgtgtgtgttagcttgtatatatatttttaaaaatctacctgttcctgacttaaaacaaaaggaaagaaactacctttttataatgcacaactgttgatggtaggctgtatagtttttagtctgtgtagttaatttaatttgcagtttgtgcggcagattgctctgccaagatacttgaacactgtgttttattgtggtaattatgttttgtgattcaaacttctgtgtactgggtgatgcacccattgtgattgtggaagatagaattcaatttgaactcaggttgtttatgaggggaaaaaaacagttgcatagagtatagctctgtagtggaatatgtcttctgtataactaggctgttaacctatgattgtaaagtagctgtaagaatttcccagtgaaataaaaaaaaattttaagtgttctcggggatgcatagattcatcattttctccaccttaaaaatgcgggcatttaagtctgtccattatctatatagtcctgtcttgtctattgtatatataatctatatgattaaagaaaatatgcataatcagacaagcgtaatgcataatcagacaagcttgaatattgtttttgcaccagacgaacagtgaggaaattcggagctatacatatgtgcagaaggttactacctagggtttatgcttaattttaatcggaggaaatgaatgctgattgtaacggagttaattttattgataataaattatacactatgaaacc

SEQ ID NO: 626852 - DNA, 950 bp, Homo sapiens
atgaaagtcttcctgaagcagtgaggaatgtgccaggcatgcaccccaagacctgccctgtggtgctgccccctgagacccgcccatctcaggctggcctagggccccctagcagccccgctccgatcaccgaggggtaccagtccctgtcagacaggcccccggggtcccgagtcttcactgagtcagagatgaggccactcagacatcgcaacgtagcgacgcgtgtcgtgggaggtgtccccagatggtgcccccggacccgggctcccggcttggttcggagatcctgtgtactctgggtggtgtgagagctgacttctcgatgtaggactgctgctcctggctttcagggtgctgtgaatgctctggtaagagtggtcaactggtaccttcctcctccgctcttgcgtctttcgttggtaacacggaccgtgggtgcccggtccttggggtaggccttgggtgaccaagctggtcactgactgctcttccagctgcaaatgtaagcgaacgtctctcttaccgatcccagacaacaccgaaattagctcgatggaacccagtacggtcctggtccaatatatgggggcctgtcctaggttggtgcgaacagtgctcctttatgtaagtcggagcccctttgttttacaccccagttcgccttgtgtacacttaaatgagacgggagagataggcatggcattgagtgacacgggtgctccagttcatggtctcccatgtgtgctggggctgtcatcccactggggttgctaggaccgcgttgggcccctcaccatgttggctttttaccttccgattattccgtggccccggttggcctggtcactggagatttcggcccgtgggttgcgtggtttccttggcggtacccgatgttttggtccgcggtccccccccgggcgctggttttgccgggccacacggtg

SEQ ID NO: 626853 - DNA, 434 bp, Homo sapiens
  misc_feature (323)..(323): n is a, c, g, or t
  misc_feature (330)..(331): n is a, c, g, or t
  misc_feature (334)..(334): n is a, c, g, or t
cactttgggaggctgaggcaggtggatcactggaggtcaggagtttgagaccagcctggccaacatggtgaaaccctgtctctactaaaaatacaattagccaggtgtgggggcgtattccagttggcctgtaattccagcttcttgggaggctgaggcagaactgcttgaacccaggaggtggaggttgcagtgagccgttatcgcgccactaagccaagattgggccactgcacttcagcctgggcgacagagccagactgtttcaaattaataaatatgagataatgcagtcgggagaagggagggagagaattttattnaatgtgnnggnctggcccccccccccccccccagcaggagagcagcaaaatttatgcaaatctttgaccggtgtcccttgtcctgccagattaaaagccatgaggttctgt

SEQ ID NO: 626854 - DNA, 408 bp, Homo sapiens
acgccgagagtgaagtctggtgattcccagcatcacaacctcgaagggaaacgtacaggggccatgaagaggcagcactgagtgttgctagttgtaaaagcaaggtgcctcctcttggaccctataataccaggtgccctgtcaggcatgagtcctgtcctctaagccccctgggtactaggctctaagatgaggaagtgagtcacaggggtctggattctgttaggcgctggggcactcaagatcctggcagtgtctatctagttccgaggatgagaatgactggccccccgattataaatggatccctgtgaaaagatgctgtgccccaaatactgtcctggcaaaaacatgcagaaggaagtcaacataactggtatccagttcctaggggtaagatatttcaac

SEQ ID NO: 626855 - DNA, 1592 bp, Homo sapiens
  misc_feature (1424)..(1424): n is a, c, g, or t
  misc_feature (1453)..(1453): n is a, c, g, or t
  misc_feature (1467)..(1467): n is a, c, g, or t
  misc_feature (1474)..(1474): n is a, c, g, or t
  misc_feature (1482)..(1482): n is a, c, g, or t
  misc_feature (1563)..(1563): n is a, c, g, or t
ggccgcgcggggcatcacggccctggtcgtgccaggcctgcggtggcaacctcggctttccctgctcaggagcctcgtgtctttctccgcagcgctttgccagccggccggctttccccttccaccacacacctccacctggtcacagcagataacccagcagccaactggcttcatgcgcgctccactcggaaaaagcggtgcccctatacaaaacaccagaccctggaactggagaaagagtttctgttcaacatgtacctcaccagggaccgcaggtacgaggtggctcgactgctcaacctcaccgagaggcaggtcaagatctggttccagaaccgcaggatgaaaatgaagaaaatcaacaaagaccgagcaaaagacgagtgatgccatttgggcttatttagaaaaaagggtaagctagagagaaaaagaaagaactgtccgtcccccttccgccttctcccttttctcacccccaccctagcctccaccatccccgcacaaagcggctctaaacctcaggccacatcttttccaaggcaaaccctgttcaggctggctcgtaggcctgccgctttgatggaggaggtattgtaagctttcattttctataagaaaaaggaaaagttgagggggggcattagtgctgatagctgtgtgtgttagcttgtatatatatttttaaaaatctacctgttcctgacttaaaacaaaaggaaagaaactacctttttataatgcacaactgttgatggtaggctgtatagtttttagtctgtgtagttaatttaatttgcagtttgtgcggcagattgctctgccaagatacttgaacactgtgttttattgtggtaattatgttttgtgattcaaacttctgtgtactgggtgatgcacccattgtgattgtggaagatagaattcaatttgaactcaggttgtttatgaggggaaaaaaacagttgcatagagtatagctctgtagtggaatatgtcttctgtataactaggctgttaacctatgattgtaaagtagctgtaagaatttcccagtgaaataaaaaaaaattttaagtgttctcggggatgcatagattcatcattttctccaccttaaaaatgcgggcatttaagtctgtccattatctatatagtcctgtcttgtctattgtatatataatctatatgattaaagaaaatatgcataatcagacaagcgtaatgcataatcagacaagcttgaatattgtttttgcaccagacgaacagtgaggaaattcggagctatacatatgtgcagaaggttactacctagggtttatgcttaattttaatcggaggaaatgaatgctgattgtaacggagttaattttattgataataaattatacactatgaaacccgccattgggctactngtagatttgtatcccttgatgaatctggnggtttccatcaganctgaacnttacactngtatattttgcgaatagttaccctcaaggcgctactgacccaaatgttgtggtgagatgatcatttacactttttgccaanataaaactatatcgattccttttcctatt

SEQ ID NO: 626856 - DNA, 687 bp, Homo sapiens
ctcctccaggacattgatattctcaaagaggaggcacatgactgtgtcttgtgcagagctactgacaacagagggaacgacttgtgctggtagcccctgcaggcatcacactgaaggaggcaacatgaaattctgcagcgcagcacgaagggaaagttgcccatatgtaaatgaagatgatgagcttgtgtggcatacatatgcccggacagacctgaagaagaatcgggactaaccactagacctccaaagatgccaacgaaaacagcgtgctgtggtggtgggcaagccaatagtggcactccctgagtgattgacaacgtataggcttggacttgtcgtcgcgccaggctaggtgtggatgtagatcggtatctttgggagactctatcccagagggaaaattccatcttaccagaatacaatatgatcaagtacatcaaagacaaataccctaatctccacagtcattggaggccaaatgtgggtcccaccatgaggtagcgcccatggcctccacaagaaatcctcacttggagatgccaagagttgatcggcgactctgcgccccatggccatgtgcagcttgtcgagcacctgccgcgaaacaggcttggcgacatacccccacaatcatcggcgcagtcttacctggccacggcgcacacagatcggctttgggaccct

SEQ ID NO: 626857 - DNA, 236 bp, Homo sapiens
aagtgatcagccggtaccgtagacgctgaactatgtgaacaaaggtctctggttttcctaggcagaggaccctgaggccttccgcagtgtttgtgtccctgggtacttgagattagggagtgatgatgactcttaacgagcatgctgccttcaagcatctgtttaacaaagcacatcttgcaccgcccttaatccatttaaccctgagtggacacagcacatagttcagcgtctga

SEQ ID NO: 626858 - DNA, 891 bp, Homo sapiens
cgatgtctttgagctatgcgtgtactctgtccgggcacccgaggttgtcggtcgccccgcccccctttgaggcttttccggacgcttcacacaggccgcacaaaccgtggttgtagcctccctttcgccgcttccaactttatacggcgtggaccacccgagcggttgtacttaatctcgccagggatactgtctcttcacggtttaataccagcgtgaaagcgctgaatgaccccgcgtgcctccgcctggtattcaaagacgtgtttcaaaggcctggcgccacccaacccccggcggagtcaacgaggacaaaccagtcacactcgcgcgcataattcgcccccgcgtcacaaaaattggcatctgggtcgcccctaacacctaatggggagcagcgtccttccatatcgcccgcctgtggtgtccccccgctatgccccccgcgtttctttccaccacggagaacagagtcttcacccgggacgtgggcacgaagacccggcacccccgggacactgtcgggcgccctatattcttagtcgtgaatgggtcctttcccccctgcgctctcatcaggcgttacaatcctttgcccccccgtcatgacttgccccctaatagggtccagggggaggcgcccatacttcacacgcgtagcggctcgttaataaggcgaaagcgccctttctttataaagaaggatcacacccggatctcaggggcccgtgatgtccacgagctctatcggggcagcgtacacatcccccatgtcttattgctacccccaagggttgtcctcaaatatgagtgacaccagatccataggagccaccatctgggtccctaaaggggcacccccctacccccccccagccccaacaaacagac

SEQ ID NO: 626859 - DNA, 519 bp, Homo sapiens
ttccagggctcgctcatcatgcagcgggaacccctgcagcgagggctcgacccgctcgcggcgaaggcgccagccgcccttgcgcgtgctgtcgcacaggctgcccacgctgcggcggaagtcctcgcggctgctggccgatttgccatccttgtcatggaagaactccatgtcttcggtggtcatcgcggcggccttgtcggcgtcgcaggcctcgaagaccatggcgaatagttgggtatcggcctggcggatctgctcgcccaggtcatcaggcggcgcgggcgcggcaaccaggccggcggccagcaggggcagggtgagcagcagcatggcgaaactccaggggacggtgcgcgaaggctggcatgccggtgaccgcggcggtacggccctgcgacgaaaccgcctgggcgcggtgcgaaggccggccaggccggtgcggcttcgcgtggcggcatgtgcaggcgatgtcatgagggggcgtgattccctcacggctgccacagggcgcggccg

SEQ ID NO: 626860 - DNA, 138 bp, Homo sapiens
tcccctctcaagacagtttgcatggctctgttgattgtcactccttgtattagcttgtattttgatttagttttatatactggttattatgtatactgtgtacttatatatatgaaagcactaaatgcggacagaggt

SEQ ID NO: 626861 - DNA, 134 bp, Homo sapiens
ttagaagaaggaatgaaaaaaacccattttgaattttttcaaatttagacttctttttaactgaagttccaaattaaaaaattttaaataaataaccaaaaagcccaaagaaaggtttaaaaaaggaatttttt

SEQ ID NO: 626862 - DNA, 880 bp, Homo sapiens
  misc_feature (313)..(313): n is a, c, g, or t
agcgggccgttgacctcgggttctccccgggacagtcgaatccaagccaggtcctcagggcggtagctgtccgtgcgagtccgagcggagctgtgacctcgggcagctggaaggcctgtgggctgtggcttctccaggcaggcggcggaaggatgcaggcaggatgagcggcggatcccttcgaccgccagccggagaaccgcggcgtggtgcccttgaaggccactgggatgcctgggtagggtgggtgggtgaacgatgaagccctgagatgagtgagagtgtgatgggcgagagtcaccactcgcatgancattcaatattcaaggccaagtcagttactgtcgatggttttgaatacttgcacacagccgacctcacccgtcctgtcgaatgtctgacacatgttgatagcccatggaggacctgcgacgctgtcggtgaggtgcaatggcatggagatgggagcgtgtacaccacggagggagtgctcgcagaataagtcccggagatcggacacagcgctgagggcggcttgaagtttagcagacctccggaatgcctgcgacaccacgacccgtgcagatccaacgggattatccgagggaaggggacatcaggaggggcttgcaccgttgtcacggataacggatgacttgaacaacaaaggaggaaagattttgaattgaggtacatggtgataagttcattgtgatttccagaattctcagaacccatcaacatgagttcacacagaagtaaagccaaacccggaagagggaggcaggcacgcgcgccctacccgaaggcgcggccgaggcagggcatcaggcgcgaacagcatcacacgagggcccgggaggccgccacgagccagacg

SEQ ID NO: 626863 - DNA, 225 bp, Homo sapiens
cacgctttatacattcctcaacgctttatacttctcatttcattacccgggtatgaagtatcacgttgagaagtataaagcgttgaggaagtataacgcgttgaggagtataaagcgatgagaagtataaagcgttgcgaaagtataaagcgttgagaagaataaagcgtagagaaagtataaagcgtagagaacgtatacagcgtagagcagtatcccgcgtcg

SEQ ID NO: 626864 - DNA, 181 bp, Homo sapiens
cccccccccccctccccctttttaaatttttttgttttggggggggggttttttaaaaattttggggttgggtttggggttttttttcccccaacccccttccccctttaatttccccccgggttgcctcccggggggggtttaaatttggaaaaaaaaaaatttttgtttttttgtttta

SEQ ID NO: 626865 - DNA, 373 bp, Homo sapiens
actttcttgtctctagtccaggaggcagctggcgcggcggacacggctggtgaggagaagcatggcagtgaggtctgacctcctgggatagaccttagccctcataccccagcacaaggagagtacggccgttcccagaggaactccaagcgactcatgatggggatctacggaggacgaggggatcctctttgcttgggccgcccagcgtgccggccacgacccatccctgttgccctttggtctgtaatactccggtgaggtccctcagtggagaacacgtccaccacctccatggcccccgggctggcattgctgactactggagtgagccggcagcttgtcctccggctggtgatgaccttgtccactc

SEQ ID NO: 626866 - DNA, 348 bp, Homo sapiens
  misc_feature (44)..(44): n is a, c, g, or t
  misc_feature (47)..(47): n is a, c, g, or t
accctgggggttccccccccttttgtgcccccttaggactttgntgntggtattgcccttcccccagggttgggtttggccccaggacccccagtttcccctcccccccttgtgtcctgtggggggggggtccccccctgctttgttcaaaacccccggaactgatgggtttataactttttaatgtggggtttgttccccctttcctggttttcccctaattccccccccccccctttttttccccccccgttcccgttttttactgggctgggtagggttgccccgtttttggggggggtttggggcttttcctgggcttgtaaataaataaggtcctgcctttta

SEQ ID NO: 626867 - DNA, 280 bp, Homo sapiens
gtatgccggtctttttattggcttatgatttcggtgcgtgtaagactaagccgtgttcaggaggtgcgggcatttaattcacgattattcttctacgcggaaaatacgtgttaattgctctgtagtgaagagttttttcttttccgcattttgtcggagtgatttaccggcgcgtagggattctttggcattctttagccgcttcttgatacccgataatgggcgccattgctgtggcacggctaggctgagagatcactatctcgagacacgcgcgcct

SEQ ID NO: 626868 - DNA, 136 bp, Homo sapiens
  misc_feature (51)..(51): n is a, c, g, or t
gatatcgccgtctttgttggtcatctggaacttggacaagttaagccagcnttaagttgcagtgttgagttaggaccttctcgcacaagctaagtgccggcctgtgcaggtctctcttccttcccacagatttcag

SEQ ID NO: 626869 - DNA, 797 bp, Homo sapiens
aatcccacccctcaggcggacgaattaaagtgttcaacctgtcgacgatgtgtccgtcatgcactttgaccatggccagttggcaggccgagacaccacccatgcggttggccgtctcaaaatccaccgcgacgaaaccgctttcagcaatctgggtgggagaggggaccaacaaggaccgacaccgagtcctgcgggtcggtgctgagcctgcagtgttgcgtacaccctcatgttcccgcatctgtgcctcctcatgcgactggcgccacgatagttcccgcctgcgacaccgaggactcgtgcacatggtggtagcgcttagggggtagagagttacgcactcgaaggatgctcgctagccaacctgcttgcgtgcctcccgcctcaccatgattgcccctagcagaccgatcaacaggaacagcgacgacaatccgatcgaccacgctgctgcatgcgcgaaaccagtttcaaggctatggatgacggcgtcgcgggaatccccgagtggtcggatgaaaggggcatcagtagccgcattgcgaagccccggaatggccgatcccgccgagttttcggtggcgaaaacgagtttgttgagaaccttggcaggtgctccgctgaccgaggccacagcgtcaggaatagtgtggttcatggtcgatcccagtgccgaccggcgatggtggcaccgagagccgagcctagctgacgtaccgtcgactggggtggctgaacgcgcccggactggttagtgggaatgtcgtgcaacaccgtccgaggtgaagctgggc

SEQ ID NO: 626870 - DNA, 420 bp, Homo sapiens
  misc_feature (4)..(4): n is a, c, g, or t
  misc_feature (272)..(272): n is a, c, g, or t
  misc_feature (414)..(415): n is a, c, g, or t
ttcnatgtgaacaagccaaatcacaaatgtgttcctcctacctcaggaagtttaagcctcaagtattatggattaaacacgtgttccctacttgtgtgatatttccttatgacaacccacagaaaacatatggggctgggcacaagtggcttatgcctgtaatccccagaactttgggaggccaaggcgggtggatcacttgagcgcagtaatttgacaccagcctgggcagcatgtcgaaactgcgtctctacaaaaaataccaaaattanccaggtgtggcggcacatgcctgtaatcccagctcctcgagaggctgaggtgggaggattacctgagccggggaggtcaaggttgcggtgagccgtgatatgccactgcactcaagcctgggtgacagagtgagaccctgannaaaaa

SEQ ID NO: 626871 - DNA, 402 bp, Homo sapiens
atctagagatccccttggggctcattcaggacttttaaccggaagcgtctcagagacgggctcaggtatttctggagaagacggtacagggcttctcatcatacacaacccctccacagcccacggctccaacccacagcacctccggcagtccttttatgcttctggtttcttctccatcaataatatgtcagtcaacggctggtcagagacacttagctgcggacaggtcctcataacctgactcaggtaaacggccaagagatgcttgcactcgggggagatgatggcgtcgaatctgatgtcagagaacacagctttagatctggagggggttggggtccaatccggtctctgccagtggagatacacttagggcacatcagttacgagggtgggggt

SEQ ID NO: 626872 - DNA, 486 bp, Homo sapiens
aagttattttaaatattgactttttagcataacaggtaattgctcacaatatatattgaataacttttgaatattatgaaactatatactacatagtggttacttgaaagacatacggatgactaaagaggggaggtaacgtagcatactataaaagaagggatgcaggtggggcaatttcacaaagggaatcacagcatgagaactggacatgtttgttctattcagaaattgtatcttcagctaaggatatatcagaaatgctgccaaagcactgtcagtagtctttatgccatgcataacctggaacatccttttatccgagctaattggaatacttacatatgtgaagctaggtccacatgaaaggtatagcctgagagagacattcctttctaacaaatgacatcgtgtatttacagtaacagcagtcttaaccgtgatcaatgtataatagtcgcagtagatatgagctacccatgtcat

SEQ ID NO: 626873 - DNA, 506 bp, Homo sapiens
  misc_feature (113)..(113): n is a, c, g, or t
cccttagcacatttccttccctcccagtccttaaaaacccggggcccagcctcgttagagggcaccactttcagacacctatctctgcgggcaaagagcttcctctctctggnctctcttaaatctttcactcccaaccttcacctttggtggtttacactccctttattctctcttagagggtagaacaacaaaactcgggaaggtaatctcaagactacgaagagactggtaacatctgtggtgcactggctgagactatgacactgggttcctttggagttggactaaatatttaacatgagtgtaataatacagcttcccttttggacggtctaatttaacttaacagaaggtttggaatttttggtccttatggtagtacttttcaagattcccttattttaagggctgattgctatcccagtgatggtacgtgcccggttggctgaatctactcatccttaggggtacattggctcccaggtaacaggttggtgagtaat

SEQ ID NO: 626874 - DNA, 841 bp, Homo sapiens
gtcaggtcatcctcggccgcccctccggtccgcctccccctcccgcgctcgcggggctgcgcgggccgctgcccccgatgcgctacatatactcgaggtgcgccccacctgtccgcccgcacctgctggctcacctccgaggcacactctgctgcgcaccggagcctcggagctacagcccaggatacttagggacttgccggcgctcagaaacgcgcccagacggcccatccaccttaggtggcctagggtcgccgagagcgcccggagggaaccgcctggccttcggggaccaccaatttgtctggaaccaccctcccggcgtatcctactccctgtgaccgcgaggccatcgcttcactggaggggtcgatattgtagtgtaacgttggtgacaagcattgcattcacctggagccaaacgcctttatagtctcttagggtgaccggaacaacatccacctcaagttatacttacagttggggactgacaccccaaagtgtcgatcaggataactgtagggtctccaccgaccggcgccccacagatgataactgagggcggaaatggccaattcgggcctgcagatgctgggcatactcccaaggacctgcaggagacagggaggagtctggtggccatgcaacgaacatcccgcagtggcagatgagctcctatgcggggtgacaaacaagtaatcacgggcccaaggacatggtacaaaggggggctgtggcatggacctgcgtacacgcaagaagcacggggatgatgaagctgacacgggaccgactcggggcacgcccaggacagggcctgcagggcactcaacctcacggg

SEQ ID NO: 626875 - DNA, 124 bp, Homo sapiens
ccccccccccccccgggcccctggggggttgggttccccctttccttttgggtccgggcaaagggggggggctttttaggggggggggggttttttcctttaaaagaacccccggccccgttga

SEQ ID NO: 626876 - DNA, 624 bp, Homo sapiens
  misc_feature (346)..(346): n is a, c, g, or t
aagagatctttccaaagagagcaggacaaacaggacaataaactgcagctagagaatctaaatttagaaaaaactattattttgataggagcagatgaataggaagtagttgaggtagatttaaaaactgaggcattctcggccgggcacttggctcacgcctgtaatcccggcactttgggaggccgaggcgggcggatcacgaggtcaggagatcgagaccatcctggctaacacggtgaaaccccgtctctactaaaaatacaaaaaaattagccgggcaaggtggcgggtgcctgtagtcccagctactcgggaggctgaggcaggagaatggcatgaaccngggaggcagagcttgcagtgagccaagatcgtgccactgtactccagcctgggcaacagagcgagactcggtctcaaaaacaaacaaacaaaaaacaggcattctctgtatcagaaagttaaagttccccttttttggagtgacctaaaaagtttatgttggctgagcatgctcacgcctgtaatctgaacactttgagaggccgaggtgggaggatcacttgagtccaggagttagcttgaccagtctggtcaacatagcaagacccaggctctaca

SEQ ID NO: 626877 - DNA, 157 bp, Homo sapiens
ctcagcactcgcatgttcctgcctctgcatgtgacatggtgacgtctgcggtgctctccagcactccatgtcgccggctcttcatgtgacatggtggcatccggggttcctctccagcaatcgcatgtcgcctgcctcttccatgtgaactggtggc

SEQ ID NO: 626878 - DNA, 754 bp, Homo sapiens
ggagagacgtagagctgagcgacccagcccgcgagcgagatgccggtggccgtgggtccctagtggacagtcccaggccaagctgcttcgaccgtgtcaaaatgtcgcttcgtgatgggttgcgccgtgggcatggcggcgtgggcgctcttcggcaccttttcctgtctcaggatcggaatgcggggtcgagagctgatgggcggcatgggaaaaccatgatgcagagtggcggcacctttgcacattcatggccattgggatgggcatccgatgctaaccatggttgccaactacatctgtcccttcccattcaatcccagacccaagtggttaacaaaagaaagacagagaagatagaaaaataataactaaaagatcctttgtgtgggcgccgccttaggccccttgtgaaacattctttttacaagccaatcctgtgttggggcgacgggaggccccaatatgttaagatggaactttgggccccaacgggctgtgtgtcgcccttagggaaacccctcggggcgacttcgcgcttcacggcgtcgtggggctctggctcccacgtgggtttacatcatagcccgccggggggcgcggccacccccgggatcgtgttccttgggaaaaaatttctctccacgagtggggggtccccggggcggtcccttactcggggcggcctttatccccgcaggggaggttcaagggcggcgttctcagtatttcaattttgccccccgccccggtg

SEQ ID NO: 626879 - DNA, 293 bp, Homo sapiens
gaggctgaggtggcagatagtgagcgctggtggcggagttaatgtcaaacaggagagtaattatgaatacgacggattccaactagacgcgcgacgggtctcaatagggaatttcgagaagcagcgcctcgccttccacactgtgcgctatgacttcaaacctgcttctattgacacttcttctgaaggataccttgaggttggtgaaggtgaacaggtgaccataactctgccaaatatagaaggttcaactccaccagtaactgttttcaaaggttcaaaaaaaccttact

SEQ ID NO: 626880 - DNA, 399 bp, Homo sapiens
tcacctatttaaatgaagagagagaagcaataaaataaacaaaaaaaaaaacactcttgtgatttattcctcactcgtatgctctggaaaaataacacatattagaaatggggcagagaggccaggcatggtggctcacacttgtaatcccagcactttgggagggcaaagctgggggatcatgaggccagaagactgagaccatcctggccaacatggtgaaaccctgtctctactaaaaacacaaaaattagccaggtgtggtggcacgtgcctgtagtctcagctactcgggaggctgaggcagaagaattgcttgaacccaggaggcagaggttgcagtgagccaagatcatgccacggcactccagcctgggcaacagagtaagactccatccc

SEQ ID NO: 626881 - DNA, 654 bp, Homo sapiens
aggcaacccataattcactttttggctttatgaaatggttaatctaaatattttacataagggagaacatacaatatttggctttttggatttgggccaatttgcttaacataatggtttcagggggcattcaaggtatagcataatttagaacttcggtcttttttacaggtaaataggattccatttgatggatatacaatttgctttttcattcatcaagtggtatacatttggggtggttctatcttttggctattatgaataaaggtggcatggatggtcatgtgctagggtatatggggacatatggttttaattctggtcagaagatacctaagaagtaaattgctgggccctatgttatttggagaaatattgatgtttttaaagtggcttcagcattttacattctacccacccatatttagaggtccatttttttcacattcttaacaaatcttggttggatggcttttggatctggcccccccagtgggcgggaaaaggctattaattttaaaattggcttttttggatggacaggggatgccgaaaatcttcttaaatgcccggtggccattttcacggggcctattagcccttaattgccatccccttgaagattcttgagacccctggcccatctatccg

SEQ ID NO: 626882 - DNA, 736 bp, Homo sapiens
gcagactctacgctctcccagctctcggacagcggtcagactctaagcgaggcatcagtggtgtggatgctggcgaggcagtagtgctcagcgtccccaggccgaggaaggcagctcggtcgtccaccaagagcaggagtagcagaggagctgcctcgtgaaacgagaggcccacagatggggccaagcataactcggctggatcttcgtgtggagcccacagtccactcatgcgtccggtgtgaacgaagaagtgcaggccagcaccatgtggcagtcgccgatcgaggggtggcgcgcatagcatgcgcgccagcccctgtcctaggattgtcgactattcagagaggcggctcagactcacaactgtgcggcagctcaaggtgggccacgtgattctggaagtgaatggtgctgacagcttcgtgggctaacggagcgaccgtggaggccgcccgtcggattatcgccgagtgccttcaatgactaatggaccgtgagtacattgactttctggtcactgagtttcaattgtgattgctctaggaggccacaggcctgagtggtcctcccaaccactgcgtcgagacctccgtggtcccagtccctttccgacctgttggcttcgatcaacgcttccttgcggggttggggctgcatggccagggtggccggaggacatgcccccgtccatgccaggccactggacagaactgggagaggaagagagcaggac

SEQ ID NO: 626883 - DNA, 784 bp, Homo sapiens
  misc_feature (34)..(34): n is a, c, g, or t
  misc_feature (62)..(62): n is a, c, g, or t
  misc_feature (79)..(79): n is a, c, g, or t
  misc_feature (93)..(93): n is a, c, g, or t
  misc_feature (95)..(95): n is a, c, g, or t
  misc_feature (108)..(108): n is a, c, g, or t
  misc_feature (115)..(116): n is a, c, g, or t
  misc_feature (124)..(124): n is a, c, g, or t
  misc_feature (126)..(126): n is a, c, g, or t
  misc_feature (129)..(129): n is a, c, g, or t
  misc_feature (131)..(131): n is a, c, g, or t
  misc_feature (143)..(143): n is a, c, g, or t
  misc_feature (148)..(148): n is a, c, g, or t
  misc_feature (158)..(158): n is a, c, g, or t
  misc_feature (161)..(161): n is a, c, g, or t
  misc_feature (163)..(163): n is a, c, g, or t
  misc_feature (167)..(167): n is a, c, g, or t
  misc_feature (203)..(203): n is a, c, g, or t
  misc_feature (207)..(207): n is a, c, g, or t
  misc_feature (294)..(294): n is a, c, g, or t
  misc_feature (463)..(463): n is a, c, g, or t
  misc_feature (503)..(503): n is a, c, g, or t
  misc_feature (679)..(679): n is a, c, g, or t
  misc_feature (765)..(765): n is a, c, g, or t
ttttcccaactgttttgactacagataaatagtnacaaccacttcatagaaattgtactgtntttcctaaattaacatncatatctgggtacncncaacatgtttgantattttnnttcctggncngcncntcccagcccacncctcncaccccagcnctngncgcngccgaggtgggtagatcacgaggtcaggagttcganaccngcctggccaacacggtgaaaccccatctctactaaaaataaaaaattagccaggcatggtggtgggcgcctataatcccagctactngggaggctgaggcaggagaatcgtttgaacccaggaggcagaggttgcagtgagccgagatcgcgccactgcactccagcctgggtgacagagcgagactccgtctccaaaaaaaaaaacaaaaaaaaaaaccacacatttaatccctaagcataaaagattaactggnggcaaactaagattgagccgtcaatctgaagtattttacncaataagggtaaccccctattgggctgtcactagcgtgtcacctcagccgagaccagcatgaaggtcaaaggcgaacacctctgtagacccacctcacctgcccctcccccatccagtcacctgtgcacgccggctagtccctcggcccctaaagacctaatcaagttggtgagtncagacccaacatcatcaggaaatctgtaaatttggagaaacttgttttcaaagcaaaaacccagatgaagaaaaaaaaattttttnggccaggcacgatggctca

SEQ ID NO: 626884 - DNA, 156 bp, Homo sapiens
aaggcaggcctttcctacagggggtgtagagaccagccttttttcctttggtaagaatggcctcagttggcgttgtgggcaggctcctggtttgtatgatgtattagtagagcaaccccttaatcttttgtagtttgtattaaacttgaactgaga

SEQ ID NO: 626885 - DNA, 80 bp, Homo sapiens
  misc_feature (71)..(71): n is a, c, g, or t
  misc_feature (75)..(75): n is a, c, g, or t
tacacaccttcgaggtgaccggccaggaaacggtcgcccagattaaggctcatgtagcctcacttgaaggnattncccgg

SEQ ID NO: 626886 - DNA, 127 bp, Homo sapiens
agcttagtcaggctcacaagacataatcacgtaactccatctcagcacaccctcatcgcggatcagacacgtcatcattacctctgccacagacacagtgtcccgcagctgaggcggtgacagcctt

SEQ ID NO: 626887 - DNA, 191 bp, Homo sapiens
ggggaaaaatatcacgccaatagacatgacagaaaagcaggagtcacaacactcatatcagacaaaatagactttaaaacaaaagacacaaagaaagataaagaaggacactatttaatgattaagggatccatccaaggagaggatgttactatcgtcaacatatatgccccaaatacaggccatgtgct

SEQ ID NO: 626888 - DNA, 864 bp, Homo sapiens
  misc_feature (864)..(864): n is a, c, g, or t
ctgcaggtcaagcaattctcctgcctcagctcctgggtagctgagactacaggcatgcacacacaagcagtaattttgtattagtagagatggggtttccccatgatggcaggctggtctcgaactcctgacctcaagtgatccacccgcctcagaaccaaagtgctggaattacaggcatgagccactgcgcctcgcctgaattctgttttaaaatcaagacaagtaagcgctggtggttagttgaagatctgtattttttaaagttcctgtgacttggttgacagttttacttgtgaccttaatatgtatatcagttaaacaagtacaagttaaacatattgaaagaacgtttatggaaagggaataattttagggtctttacatatatacaatacaagaaaaagtttctttagcaagtatctgcttccttatagagaatatcaaaatcacacttagtgacatgtgacagaattaattgtgatttagaaatttattcttatttccagacatgtgtattccctttcctcttaaagatactggattaaatacttataagtactgctactgttgtcattttcacttcgaataccaggctttaggaattcgttaggtgcctgggatgtattcgacggaactacatacgggtggaataatgaattgatattggtatagacagcaaattgtgtaaggataaaatctacaacgatttgatacccttgtactggtatatccgggaagattaaacatgggatatgagaagattaaaattaacagtgaaaatgagagagtacggaaaagacaacgtaagaacaggggtagagtagaaacaaaaaaacagaaaaaaataatagacttcattan

SEQ ID NO: 626889 - DNA, 394 bp, Homo sapiens
gaggagcactctggttggtgatggtgctgaaaggactgtgaccagccggtatccgtgggctgcggcacgctgacctggcattgagccgagcgcgagctgtcgtactgaatggtgttgaggtccacgtcgatgaaggggatgccggcgaacatcacgaccacgatggcgacgaacacccggttctcaatgcgtgcggccgagagcacgcccttattgccttcgtctgcaccctccccacgggccttgagccattcctgcgcgatgatcgccacgaagggcagtgcgaataccccgctggataccagtaccgcccagatgccgttgttgacgatccaggaaaccagggtcaggtagtactccaggtagtcggtcgcgaaaagcgtcatggctcgga

SEQ ID NO: 626890 - DNA, 706 bp, Homo sapiens
tctctgccgcatacgtgttttaagcgcgatctgcgagatcatggctagcatggcctacgataaggagcgtttgcccatgaccaagtcgtgccgtttgatcgaggtcattaagatcaaatccatgacggtgatctatctcttgtccatgcccattagtgaaatagactttatcgatgacttcgtgtgtccctttgtcacggataagcttaggatcagtatcccagtgctgacacattcccagtcaggccagggcaccagtttcagggcatttgttgctctcgctgactacaatgtccacgtggatactgggcgttaacagatccaaggagcatgacatcgtcatgcgttgaaccgatatgcatggcaggatatctagggtcacaatcgcagaatctactgtctaagcatgataatgcagtgtgacactatccctagtagggtgacgagacgctgcgattatgtgattgtacgcatcattgctgcagcaagtgcactagaatgctcatcgtacctttgcctaaggagctcgtgatgatgaatgctatagaagactggttcaactcagtccgcatctgcattgccactcttggtaaaattcgtcaaggtcagctttgatgccattgtctaacgactttaccctgattccaaatctctgacagtgttctaagttaccgttgccttatatgggctcacttgccccttgtcg

SEQ ID NO: 626891 - DNA, 760 bp, Homo sapiens
  misc_feature (205)..(205): n is a, c, g, or t
  misc_feature (210)..(210): n is a, c, g, or t
  misc_feature (237)..(237): n is a, c, g, or t
  misc_feature (253)..(253): n is a, c, g, or t
  misc_feature (271)..(271): n is a, c, g, or t
  misc_feature (279)..(279): n is a, c, g, or t
  misc_feature (284)..(285): n is a, c, g, or t
  misc_feature (291)..(291): n is a, c, g, or t
  misc_feature (295)..(295): n is a, c, g, or t
  misc_feature (318)..(318): n is a, c, g, or t
  misc_feature (320)..(320): n is a, c, g, or t
  misc_feature (325)..(325): n is a, c, g, or t
  misc_feature (329)..(332): n is a, c, g, or t
  misc_feature (335)..(335): n is a, c, g, or t
  misc_feature (354)..(354): n is a, c, g, or t
  misc_feature (363)..(364): n is a, c, g, or t
  misc_feature (366)..(366): n is a, c, g, or t
  misc_feature (371)..(371): n is a, c, g, or t
  misc_feature (374)..(374): n is a, c, g, or t
  misc_feature (415)..(415): n is a, c, g, or t
  misc_feature (418)..(418): n is a, c, g, or t
  misc_feature (434)..(435): n is a, c, g, or t
  misc_feature (437)..(437): n is a, c, g, or t
  misc_feature (547)..(547): n is a, c, g, or t
  misc_feature (676)..(676): n is a, c, g, or t
agataagaagtgatggtgataaaacatcaaaaagtgaatggaacaccttgattggggaagatatgcaaatactttgatctaagaattgaaatgtatcaaaaatttatattttgcctgcaggaaaattcaaaagctactcatcctctctataatttggagtcatcttactaatgaaaataatgttttcccatatattattaaaaancatanaatctaaataataaacagttgtaaaanaataaaggtaaaaatnataacactagggaaaaanttaaagcngatgnnaaagtnaaangcaaatgtaaacataagggaaangnactgncatnnnnttnagaaaaaaataataaaatncatcattanntngcctncancttatataaaagacaaaaaattccctaacaagagggcaaanaanagagataccaatttannantccacaagagaacaaaaagggttgatacgtcaggctaaaaaaagcagccatgcattttattatttaaacatttttctacccgacaagggcactgtggctagagtactgtnaatcctacccataaagtaaggtaaggtatttctttccacttgtaaaatcatagggggtttgctgtttttatgtgagttaagcctctttcccctttgtcttgagcattcctcagggggaggtcacctgtngaggttcccagaactgtagtttttttttaccagggtgttgtatttggagggggaggaggactcggctcaaaagagctagctggc

SEQ ID NO: 626892 - DNA, 124 bp, Homo sapiens
gtttggcgtgaggccaactgggaggacaagtcccaagaccagctttctcctgatgccgggactgtgtgctgggcagtccatgcctgcccaaggcctgaggcccacaaagttcccagagaaagag

SEQ ID NO: 626893 - DNA, 116 bp, Homo sapiens
gtctcggaatgtcctggaaatccacggatggcacttttcggaattacttaagaagtttattggcgaacagaatcacgtgtcatgggggcccacaggttgtctacgatggggtaccg

SEQ ID NO: 626894 - DNA, 402 bp, Homo sapiens
gaaatagagtctcactctgtcgccagtctgcagtacagtggcgccatctcagctcactgcaacctccgactccccggttcaagcgattctcctgcctgggaggcagagggtgcagtgagccgagattgcaccactgcattccagcctgggcgactgagcgggactctacctcaaaagaaagaaagagagagaaagagagagagagagagagagaaaggaaaagaaagagaaagaaagaaagagagagagagagagaaagaactccaagaacagtttttatattttattttcacattggaaatcagtcagatttgtttcagcctcaaagagcatgcttatgtaaaattaaatgactgctgggcgagctgcactttttccttccaaacaggaaaagcgttaaaa

SEQ ID NO: 626895 - DNA, 547 bp, Homo sapiens
  misc_feature (12)..(12): n is a, c, g, or t
  misc_feature (49)..(49): n is a, c, g, or t
  misc_feature (89)..(89): n is a, c, g, or t
  misc_feature (220)..(220): n is a, c, g, or t
  misc_feature (304)..(304): n is a, c, g, or t
  misc_feature (359)..(359): n is a, c, g, or t
  misc_feature (367)..(367): n is a, c, g, or t
  misc_feature (371)..(371): n is a, c, g, or t
taaggcccattngagtatttggtttccaattagggagatagtgggtatnaggattaggatggtggtgaagtatagtacggatgctactngtccaatgatggtaaaagggtagcttacgggtggtcctccgattcaggttagaatgaggaggtctgcggctaggagtcaataaagtgatgggcttagggggcgaaatattatgcttggttgttgggatatntggaggatggggattatggctaggatgaggatggatagtaatagggcaaggacgcctcctagtttggttagggacggatcgganaattggtgtaggcgaataggaaatatcattcgggcttgatgtggggaggggtgtnaaggggtnggcnagggtataatggtctggggtcgcctaggaggtctgggtgagaaatagggtttaatgttcattaaggagagaaaggaagcagaagttaagcccgaggggcgtcttggatgtggtgtagtaaggggtggcaagggtgattttatcggcaagtgggagggtgattcctaggggggtagg

SEQ ID NO: 626896 - DNA, 290 bp, Homo sapiens
  misc_feature (6)..(6): n is a, c, g, or t
  misc_feature (42)..(42): n is a, c, g, or t
  misc_feature (45)..(45): n is a, c, g, or t
  misc_feature (183)..(183): n is a, c, g, or t
  misc_feature (191)..(191): n is a, c, g, or t
  misc_feature (211)..(212): n is a, c, g, or t
gtgggngtccaaggcccccccccccccccaggggccggctgntcncaaggagggccccaaccccctgggtggccccccccccctaccccggtgcagaggccagcccccgagtcatatcagggtaaggccccggggaaggaatgccccccccgccccctcgggggccggccccccccccccccngggcccanggccatgggccccccccccnnccccccccataaaggtaaaggactgattgatatatttaagagttaataaatttgtgatttctgctgaaaaaaaaaaaa

SEQ ID NO: 626897 - DNA, 1236 bp, Homo sapiens
ggtggtggtcaccgagtgagctccctgaaccgtgtgcacgctcattctgttcagattcaggtcggtgtggatttcctgccatcatgtttccaccattactacctggtcgtttctattatcagtctgacctcactacgcagttgctatgatgcacttccctgtttcccgctatacactttatttacgactccgtgttgattgtgccttgatgactgtgtgtgggcgcgtagagttagtgttcggtggatactcttttcttggtatttcgtcgctagtatttctcctatggcgtactttgtggcgtgatgtgtgatagaagcctacattctcctttggtatattaggatggcagtatcttcatatagcgtttttctgttaatgtctcgttgtgtttagtccatttgagttatgtatcttctgcgtcttatttggttatgtcgtggtgttttttatgtgtttgttccgttcttatgtttctatgtttcctccttgtattgctgttatgtgttgctatgactatcggtcttttcttctggtgttcaacaattgtgtttgttttatgggttaattggcccttgattggttgtttgacctgttgttcttcatccttctgtcttttgttgcatgtcctcgtttttatcttgttaggtctgttcttggtttattgggctcaatctttcggttgttagtctctttggtggcggtgtcatgtcccatcgtattgcgctaggtctccttgttctatctgatcgctccctgggtgtgtttctatgtctattgtcggagctctaagcttccatacctgtttcatagtgtctcgtgtattgtattggggtggtcggtttctatagttttgtactatctgtggtctctagtgagtcttcccttggtgtccttctggcacataactacgtctatcttggtctcgtccgcttcctccgcggtctcccgagagtggtgcagcgcaccggttgtcactgcttgtgacgctgtcccagtggactccgtggaacttgcattctctttgttccttgttgctcttgtggtctgatatatttatgcatttttttttttttcctaggtaaactaaaacctgaaagctgagctaacaaaacatacatctttgtcagagaagaaaaataatgccttaagtataaataagcggagaaatggaaacatatcacttcaagggggatgctgtggaaacctggcttatttattgctaagccaccagca

SEQ ID NO: 626898 - DNA, 917 bp, Homo sapiens
  misc_feature (625)..(625): n is a, c, g, or t
  misc_feature (643)..(643): n is a, c, g, or t
  misc_feature (645)..(646): n is a, c, g, or t
  misc_feature (666)..(666): n is a, c, g, or t
  misc_feature (672)..(672): n is a, c, g, or t
  misc_feature (674)..(674): n is a, c, g, or t
agcctgagtgagctgctgctggagccctgagcctggagccctgagcccgaagaggagcctgccccggccccgcgcccccccgtgtgtagctcctgtggccctgtgtgcctgtgttcgggatgccccctgtgcagccaatgatggatgtgatgtgatgtgatgcctgtgtgacattggtctgatggtgtgaccctggtgtgtgactgtgctgccatctgagtgaccctggagcttgtgaagctatcaaatgctcgatgtcatgtggcagattggatgtgaaatgaagcttgagcaagctaacatgtgagctacatgaacgagtgtagcagaagcatgattgaatattgagtccacctccagtgcaattgcttggcccgtggttgatcaatgtccaatctgagtgacgaagatggagtgcttgatgccctgttccatctattgtttggcacatgtgtgacttattggttgccaacaggcaggaagagcttggaagctcactttcattggcttgtgtgttcaggttcaaccgtgttaccaatacttgtgttgacaaatttagtggccatcccaaagggtttgcgtatatagagttctcagacaaagagtcagtgaggacttccttggncttagatgagtccctatntnnaggaaggcaaatcaaggtgntcccanancgaaccaacagaccaggcatctgcacaacagaccggggttttcctcgagcccgattgcgcgcctggatcaccatatacaacagctaccgctagtgattgtacagtggttttattagcaggcgcaggggtcgggtttacaggggccgggttagagcgcatcatggtattccccttctaaaaaaagtgtgtgttaggagtagagaaagtgcccacacaggacaggagggataataagggaaggtt

SEQ ID NO: 626899 - DNA, 213 bp, Homo sapiens
  misc_feature (91)..(91): n is a, c, g, or t
ctgtaatgtcgggccgcgagtagcgtatgatggcgcagttgagggggctgcatatgcatcctaggctataaatattccggagtatacgtangcgtgtaatgttaacaaccggtacctctagaactatagctagcatgcgcaaatttaaagcgctgatatcgatcgcgcgcagattctgtcatgcatgctcattgcaacttggatccactatat

SEQ ID NO: 626900 - DNA, 331 bp, Homo sapiens
cagtgtatgacatgagcatctgcaggcgaccaaaactgaataatttctgtgtatggtatgagcgtaaagttgaggttcatttggatcactattgtgactattcagtcgtggtcgtaccatgccttggagcatagatagaaactatctttctcctttatgaaagtccgttagtatcctttaagatcagctggccttatgtattcacattatttatagacaatgactattgatttattcttttaaattcatacaccttttgtttcccaaattaaatttctttcatagatacagaacaacatagatcaaaaaaatcttgagtcatttttggtaa

SEQ ID NO: 626901 - DNA, 102 bp, Homo sapiens
gtacctagttatgccatgaatacatagggaataggtccagcagctcaggctccttcccatgggcttctcacaagggtgtgctatctctgggatggagcaggc

SEQ ID NO: 626902 - DNA, 256 bp, Homo sapiens
tcccgcttctctccctggcccaccgtcagttcccgtgcgttcctcagcttcccacactcgtccacagcacttgccattttccagggctggctgggcaggttatggggctggcagggcctggcagtttggggtcccccaggctgcagggtccatgttttgtgtcgtctgtctcctgccggcgccacaccagtggtccgtggtcatcctcacagggtgcttgcgctggcagcgtagcacaggagggcatcctcgtcag

SEQ ID NO: 626903 - DNA, 121 bp, Homo sapiens
agctagggcatatatactcttagaggcgaaagcctcatcatcactgcgcccgactcataaggggatgaccatggctaggtatataaatagttgggtggttggtgtaaatgagtgaggcaag

SEQ ID NO: 626904 - DNA, 154 bp, Homo sapiens
gcctcgatcatgtgcttgaattgtggcggttggttatttttcaacatattttgagcaattaccgaatggattgcgtacaatagtaatatgaaaaatattacgaaaatcgcaacccaaaagcaagcaggacgctatagtattgacttagacaacg

SEQ ID NO: 626905 - DNA, 451 bp, Homo sapiens
  misc_feature (403)..(403): n is a, c, g, or t
  misc_feature (449)..(449): n is a, c, g, or t
cttgcccgacaaatgggcaaaaaaatctgcgttttgtttatcgactgggaggcgcaattctcttgcaccattaactatgttcagtccctgcgcgagttgtacaccgatgtcatcgaagagttttactgggttgcgctcccgcttacgacgcaaaattccctttcacaataccaacccgaatggcagtgctgggaacctgatgtcgaatgggtacgtcaacctccccaagatgcgataaccgaccctgactttttctgcttttaccagccaggcatgaccttcggaacaaatttgtacgtgagttttgcccgaatgggttttcacaaaaaacggtccggcggcgaatgatgatcggcatccgtgcggatgaagtcctacaaccggttttgtcgccatcgccagntttaaataaacaaacggttttgccgacgataaaaccctgggactangg

SEQ ID NO: 626906 - DNA, 443 bp, Homo sapiens
acacataggattattgtgagaattaaatttgataagacatgtgaaatgcctggatttagtaagcgctgcatcctgcctggactcaaggctggatgccaaggggagaagatggtcaggcaagaccccctcagctcctcccaggcagtaccttggatcccgctcctgacaggagagccctttctaatgcctgtgagccatccaaatgattaagggtggtattacctagggctctgctagaggccctgcaaatttaggggtgagtttatgcagaatacagattaggaatggctcaagggaactgtatcccagagaagtgaattggacaggaaaaaggcaccttggggctcttattcatcaagcatacatagggtacttgtctactggatgttagtgctctgttactagttttactgaggagtctgcctgtatctacttccctacct

SEQ ID NO: 626907 - DNA, 162 bp, Homo sapiens
gcggctccagaggataaccactcggtaatagcaggcagccagaaacatcagtatcagcagcgtcgccaagcaaggagaatatgcagcgccagagccgaggagaacccccgacaccctgaggaggacctgtccaaaaacttcatacaaccacacacacacata

SEQ ID NO: 626908 - DNA, 878 bp, Homo sapiens
  misc_feature (496)..(496): n is a, c, g, or t
gccctccatcgtccaccgcaaatgcttctaaaccggactcaccagatgcgtagatttggctgcatgggtactggacgattagaatttttggccctgtggaaatgttgcacacacctaatgctagcctcagagacatgctggaataaggcttttcggaaaagaatctttgtcctttgaacagctgtgtattcttgatactcacgcagctggtcatttggtacacacacgttgtgagctaggatttggggaccccgtttgtattcggccacgttcacccttgggttcccccccttgttgagagttaatcacagccggtgtgtcaagcggcctttagatagttggtgtcccgggggagaatttacccttctcaagagcgcgcttgcgacaaaagaacaccccaaagtagtggatcgacgggtcctctaggcacggcggaccttcggacaaggggagttcggcacaacacaggtttcacaagaagtgccgcggttaaganacaccccccaataggttatcccatatatacatataaaggcgtatggacttgtatttcgttgtgtcgcgacccaaaaggaaaaaccacgccccgggttgggcgtcgttgggaacacactgttgtgccgtttgtaggcagtgtttgtgcaacaacacgagccggtattgctgatgccacaattttagtacacccggcacgccgtgggctcacacacgctttgcttatactattactacaggttggcttattaaacaaatatactaacgtcgcataacacacagcgcatacataatcgtagtccgtagctaccgccgcacaacaatttatccatccaaggaaacttctcgttgtaaagcacacccgacacgtacttgtgcaccaa

SEQ ID NO: 626909 - DNA, 163 bp, Homo sapiens
tggaaatttaatccagaggcctgttgctgccccaaaccctgggaaagtcacagaaaccccagacacggcgtcacagcattcctgaaccatcactgactgcaggtccagacacccacaggcaccgtcagaaaacccttctgagaccaccagagcagaaggtcga

SEQ ID NO: 626910 - DNA, 187 bp, Homo sapiens
tactcgtacgtgagagtgaaccaggactttatatagactgagctcctcagattgcttcagctgctctgcaagcttctcctccttgaactgtcgctcattcctcagcataaattttatgaggtctttacactcttcatacttgtatttcttctgtcggtaggccaggaagccggaagaagaaaatgat

SEQ ID NO: 626911 - DNA, 491 bp, Homo sapiens
gtcttgctctgtcacccaggctggagtgcagtggcgcgatctcagctcactgcaagctctgcctcctgggttcacgccattctcctgcctcagcctcccgagtaggtgggaccacaggcacccgccaccaggcctgctaatttttcgtatttttagtagagacggggtttcaccgtgttagccaggatggtctcgatctcctgaccttgtgatctgcctgccttggcgtcccaaagtgctgggattacaggtgtgagccaccacgcccggcctaatttttgtatttttagtagagatgagatttcactgtgttggccagactggtctcgaacccctgacctcaggtgatccacctgcctcggcctccaaagtgctgggattagaggtgtgagccaccacacctggcctataatttttaaaagtagaatcacctgaatgcctagcaatatggaaatggtaaaatattttatgtaaacattacaactttttta

SEQ ID NO: 626912 - DNA, 196 bp, Homo sapiens
cggcacgaggcattcctgtgcatctgattcacctggagagtttattaaaacatagatggctgagccccaatctcaaagattctgattcagtaggtttggatgggtcctgagaatcctcatttctaacaagttcccaggtggcactaatatgggtccccttaaagggatcacactttaaaaaaaacatttgcggccg

SEQ ID NO: 626913 - DNA, 192 bp, Homo sapiens
accagacaccccacctgaggctatccaggttttagtgctgctgctttcactgctgcacccggccctcgggccccccgagcagcctttgtactctgcttgcggagggctgggagacctcaggacattcccaccctcccccatgctgccaagttgtagctatagctagactcaaaaaaaaaccttgttttccag

SEQ ID NO: 626914 - DNA, 359 bp, Homo sapiens
acttgaatagggggtaaactaaggcaggagattgtcacaaaggatcaactgtacacttatacttcaccaggcaaccagatggatgatctgaaataataaatcaaggttgggcatggtggctcatacctgtaatcccaacacttatgggaagtcgaggcagaaggatcacttaagctcaggagtttgaggctggcctgagcaacacagttaatttttgtctctacaaaaataaaaactaattagccgggcttggtggtgcacacctgtggtcccaggtacttgggaggctgaggtgggagaatcacttgagcccaggaggttgaggctgcaacctgggcaatagagcaagaccccatctc

SEQ ID NO: 626915 - DNA, 204 bp, Homo sapiens
  misc_feature (14)..(14): n is a, c, g, or t
ttttttttgcccgnttttttttttgggccccccggttcccttgggggggggggggggcccggggtttttttttggttcttaactgggcttttggttcccaacccaaaaaaaagggggggggggggggggggttgttttttttgttcccgggggtggggggttttttttttttttggttttgaaataaacgggtctttgccccga

SEQ ID NO: 626916 - DNA, 110 bp, Homo sapiens
atcatggacaccagccgtgtagcctatcaagctggccagtgtcaccaaggtcctgggcaggaccggttctcaggcacagtgcacgcaggtgcgcgtggaattcatggacg

SEQ ID NO: 626917 - DNA, 450 bp, Homo sapiens
  misc_feature (97)..(98): n is a, c, g, or t
  misc_feature (103)..(103): n is a, c, g, or t
  misc_feature (291)..(291): n is a, c, g, or t
ccagagaagcagacttagctaaagttaaaaaaacactcgctctggaaatcattaatttcaaacaaccgcagtctcatgaaacagcactgcactgtgnngtggnctctctgcatcccaaacgtaaacaagtgacagaattgttacttagaaaaggagcaaatgttaatgaaaaaaataaagatttcatgactcccctgcatgttgcagccgaaagagcccataatgatgtcatggaagttctgcataagcatggcgccaaggtgaggcacacacctgagcagagtgccagantcagcactgagcagccagctgctcttaacactgcttctctctctccgatttttctgaagaaactaattttataaaggactattagttcgtacttaaattcatggattctcctataaagctgatttagatcttgtttctaataaaaataattacccgtga

SEQ ID NO: 626918 - DNA, 483 bp, Homo sapiens
  misc_feature (7)..(7): n is a, c, g, or t
ttctttngggagggagagagttgaggcaggatgggtgagggtagggcagagggggcacagataggccgtgtggtgaaatcctcccgtggcccggacctgaaactgagttgtgatgctgatgctgagctgattcgcccgtgtgtcgaatgcaccaacggccaccgttctacagaaaggcagagtatggtttccctcctggttgtaacctggtggagagctttcccttatcagattggcagctaaacagttgtattagataatcttcaaatctgacatccagcctgttatgcttgctctagggctcgctgcttggcctgcatctcccttctcctgtgtattcatttccctcctaaggtgtgctcctaaatgaaggtttctatgtacgcggatgatgatttacctgtcaataccagcactgtattactaacatgcaaaatactgcagatttattttgacaaattaaagttaaccagtcacaactgt

SEQ ID NO: 626919 - DNA, 125 bp, Homo sapiens
cttagtccacttcttcgatggcgggtcccccggaggctcctgaaccggcgccgccgctgccgccgccaggaccaccttggtaaagtttcgctgatgatggggttgcaaactctttctagctgctc

SEQ ID NO: 626920 - DNA, 917 bp, Homo sapiens
gtttgtttggcagacgccactgccgaggaaaaccgtgtactattagccatggtacaacccgcaccgtgttcttcgacatttgccgtcgatcggcgagcccttgtggccaggtctcctttgagtctggtttgcagcacaagtgtcccgaaagaccagctagcaaaatttgcggtgctcctgagcactggcgagcagcaaaggcattgggtctcataagggtatcctgcgtttcaacgagcaatctattccgaggggttctatgtgtacagggatggtgaccttcatagcgccatacatgtgcactgtgtgcgcacagtcccatcatatgggcgagaacatttgcacagatgcagaaccttcatctaagcatacggtctgcatcttgtcatgcaatgctggcccagacaaatggtcccagttttcatctgcatggcaagactggtggtggatggcacgcctgtgttgttgcaaagtgaagcaggcatgaatatctggaggcatggacgctggggtcaggaatgcaagccagcaagagtcacatgctgactgtggacaactcgatagttgctgtgttatcttaacaccagatatccttctgtagctcaggaagcacccttcaacccattgtgttccgagtatccaagaatctttgtgctctcggtgaagaccctttgggttcagtatgccttggtcctccatgcctaagtggatgggagagacagttatggttatagaccacagcaacacaacacaaaaagtgtggcgcgcgccagaaactataaacccttgggccggccgaaagcaacagtgccacgtcaagaacaggcgacaggtggtaccaaaaacgcgggagcgttaaacccggttggggagggtaaagcgcgacacccgcgcgaaagaacgccacgaaagccaga

SEQ ID NO: 626921 - DNA, 1098 bp, Homo sapiens
  misc_feature (320)..(320): n is a, c, g, or t
ggactcggcgtggattggcgagtcccggacggtaatgtcatgtattgttgggccgggttctgcgggcgcttggcttctcttgtgactttgtcctcttctatggtcctacgatgctcgcatgtagcagaggctgggaggcagttcatgcctgtcgctgccgtagaagcctttgatcgtcgctgcatcgctattgacaggctctgtgtggttgtcaggtattggcattctgtatgggaacattgtgtgttagatgtaaccagatgatttagttatgtatgaggtgtgataccctatcagatgcaatggctcgaaggattgtncaatgaagatgtgacgaacatttcaccaggtcgaatgtatatgcgaacttatggtgaggcaaaggaagtaccgcatatgttacgcatggaaagagtagagtgacatgggttttgagaatggaagacctttagtacgatgtaatctttagggaaggtgaagaatagtcttttggagcttaagagtagaacgtgtacggggagtcacgagaagatacttttattgttaaacttaacagttgcggcgtagttctacatgcaaaacgctttacgacgggtgcactttgtgatccgttacctttcatataccttgtccctagtgtaacctttttacggacgaagcctcacggtgaactgcacacccttgggttttgcaacgcctagaacaacggcccatatgagtctaaaccatcatggcgcaacacgttcggagaccacatcgacaacttgccattccgtggtccttttaaggaaactgtggggaataatttcaacttttggatggttcgagggttaagaaacagggttaatttgtggtattacatcttgtgcgccgggaatatgtggtatgtcatgttacctcttcggcacaactgtggaggcattattcccgcggcacgttaaacccaatttgtgtggttaaatatttaaggttcccagttcgcttttctttgtacacactggaccatcttcacattggtgacccatgaggggtcagaatccatggttatcctgtggaagcattacaccggtttgcacgggtggtgaccgccaggaatat

SEQ ID NO: 626922 - DNA, 243 bp, Homo sapiens
gccgaggtcgcacgcgtgagacttctccgccgcagacgccgccgcgatgcgctacgtcgcctcctacctgctggtctgccctagggggaaattttctccccaggcgacaagggatatcagggaggattttggcacagcgtggtatatcgagcgcggacgacgaccggtctcaacagggtatatgagtgatgctgtatgagaaacacataggaggcgtcatctcccagttttgagcatgttcta

SEQ ID NO: 626923 - DNA, 314 bp, Homo sapiens
tgcacctcccgccggggcccgggccaacggaaacttctggtggcccatcccccgggacgccaaccgagttagccctgccccgcccggtcctgcaaaggttgacggagcaaccgcaaccgagggccccggcacgccttgccgggacccaatccctggggagaacccccagcccacaaaaaataggggcgaaatttccgtgatccccggcgggctccgggtttccccaacggcccgggcatccctatccctttttgcctgatttgggtgaagacccaccgtccccagtaggggcctaataaatactgactgggtga

SEQ ID NO: 626924 - DNA, 378 bp, Homo sapiens
tgcttatacctccgtaaaacagacgaggctaccttagaaacagtcttaatacgtagcacactcgtctatgttgcataatagtgggaagatttataggtacgaggcgacatacctaccgagcctggtgatatctgtttgtccagcataaaatctatagttcaccgttcacatttgcccacagcaaccctcttaagtcccttctctgtatttaattgttatccaccgtaaagggaacagctcttgtggacacgtaaggaaagaaacctagtgaagagaggttaaaaaatctaacacccatagttggccttatccgagctcgatgagggccaatcatcggtatccccaccggagtcaaagtatttagctgactcgccagac

SEQ ID NO: 626925 - DNA, 124 bp, Homo sapiens
caaaactggagaaaatttatgaaacgagtcatgcctttgatacggtattgcatttccaagagccaccaatccatttggtggatgattctgtgtctgtggcttaataatcatagtaacaacaata

SEQ ID NO: 626926 - DNA, 1015 bp, Homo sapiens
ttcgaggtgcggcaactgctccgagtcctcccctgcaaccacgagttccatgccaagtgtgttgacaagtggttgaaggccaaccggacctgtcccatttgccgggcggatgcctccgaggtgcccagggaggccgagtgaggctccacagccacccacgagatccctgcccaaagctccggaattgggtgggggggagcagggcgtggcccggggaggactgtgagggcggggccaggcctgtcagcgttcccacctgccactccagagctggtgccagggtcagtctggagaagcccctgcaataagcccctgcattgccaagctccaaagactccttccccagtctgcctgcctgcctgcctgcccgccacggagctgcctgagtttccccaactcagtctgcttcttatctgcccctgggtccttcttcctgctggctctgggaggcaggagtccattccccaagtgtggtggctggtgtgatttccccagaccccagacggacaaaggaatagccaccctgggtcaactggtctcctgtactgaaatgacgtgtccttccctgccctagtggggttgccaggtgtgtgggcaggagtagccagagaccatttcctgagttctcctgtatggttccagacagacataggcagtcagctctgctccaatgctgtgtggtgtgggtctgactccccaggaacctttacgccagggaaagcgtcaagccaccccaaggctggaagaagtatccaagccaggtccatgagcaaatgggccaggaccaagctggatcctctgcgttacttgcaaatatccctcaaacgaatctggggccatggtcccaggagtcccgggcgtgactggaccctcccacaaggataccgagtccaaccccgtgcatggaaactcacaccctggaactatcgcgcagatgtcaacgaacacacctgactagggaacgaacatcgtcgccacaaaggtcgtaaacgcgtatcacaactcaacagcgcgt

SEQ ID NO: 626927 - DNA, 226 bp, Homo sapiens
tgcataattaggatatatggcagggctaaatatttcaaattgcgattgatagggtgaatgttggaaatactggatcagcagattatctttgcctataacaaatgcattagcctacctgctagaagaggagtagttaactaggaaaataactattagaaggaaatattatgtgtgaatagcaacaagcatagctatagatgccaatattaactgagcacttactttg

SEQ ID NO: 626928 - DNA, 121 bp, Homo sapiens
cacaaacaggaataacggcttcgaaaagaacattgttcttgcaagcttgtatctgataacagcactgcgcttgtacaacttgtatgctgattttgacctatgtattgaagttaactgtatc

SEQ ID NO: 626929 - DNA, 183 bp, Homo sapiens
ggtcaccgagaagggcccgaggggagaggagcgcgtgaagcaaaaggacctgctggatggcgagtatggctacgagtattaccccatggcccctggaacctatatcgtcaccatcacgtgtggcgttcagaacatcgctcgcagtcccttcgaagagaaggctggcaccgagtgtggcaatca

SEQ ID NO: 626930 - DNA, 335 bp, Homo sapiens
cttgatgatgactttgaagaaacatatttctctttaagaaaatggccattaaggccgggtggggtggcacatgcctgtaatcccagcactttgggaggccaaggctggtggatcacctgaggtcaggagttcgagaccagcctggccagcacggtgaaaccccgcctctactaaaaatacaaaaaatagccgggtgtggtggtgggcacctgtgatcccagcttcctgggaggctgaggcaggagaatcgcttgaatctgggaggcggaggttgcagtgagccgggatcgcgccattgctgtccagcctgggtgacagagcaagactgcgtttca

SEQ ID NO: 626931 - DNA, 470 bp, Homo sapiens
aaagtgcaaaaagtgtactacattgaaaataaagctgaacatctttctgattttgaaacaacatttgaattacaacctcttgaacgtggttttgctaacacattaggaaattcgctaagaagaacaattctatcatctgttccttcagtagcggtttttggtgttaaaattgagggtgtagaacacgaattttcagtaatagataaagttcgtgaagatgttgttacaattttaaataatcttaaaaaattacgttttagcttcaaaaaagaagtatttttacaaaatgaaattcaagtagcttcctttgatggaagaaaagttggaaaaattacaggagctgatattttagtaaattcagcacttgaaattgttaacaaagaccaagtcgttgcaaatacttccgaagttggagctttaaaatttgaaatgtttttaacttatggtcgtggttttgttgattttgaaac

SEQ ID NO: 626932 - DNA, 103 bp, Homo sapiens
gtcgctggcacagtcagttctctccgtggctagtgtcgaggcgacagtccggcacagtccttccgctgggcacagtccttccgcgggcacagtccttccgctg

SEQ ID NO: 626933 - DNA, 1408 bp, Homo sapiens
  misc_feature (412)..(412): n is a, c, g, or t
ggtgaggagccgttggtctcccagtcccgccgcgatgagcctcgtgccgtctttgcgcgcctactgaaagccgggcgctgctctgtgtgggctctggcctgcgcctggggctggtcctgggatccattgtcgctgtcggtcccgggacgcactgtgcgcttgtgcgcgctcctatgcatctgacgttatcgcgccagaggcactactcagtacaggaggcgaacaatggttgtaagcgctgtcatcatagttactcgaggtcctttcagtagtggcactcggtcaaccaagactgttgtggccttcgccaagttgcagtgcccaagtatcgctgtaacgctatatacataaacacctctaggcttgcgttgctcaagcttggtcaactgactcccgtactaagggcatagtngcttgtgggctattaggcggggcattgccgtgtggcacatttccctcggctggtatagcccaagctttgcggaggcacaagctacgggaaagtcccgacgtggggacgctgacatctgcaaacgtacgattgcagaacgaaggtttcccgctccagccgaaggacatacccaagcgggatcgacacaattttcagaggtagttgctatcagggccaaatcgattcgtttgcggtttagacatcgaggcggcacctgagcggctcgcaacccactgcaatggttgtgcaatacagttggaactttggcacaaggtaatcccaataagactctaaaaggggtgcacaccatgggcgcaaattctcgctggggtgggaaagaattgcacaaactcagaaaagttgtcgtgcacactctttccaaccccataaagtgttcgccgtccaaatctggaaccaaatgaaacacaggtggcttggccggattgcggataggagaggcggctttaacgtggaacggcgccgagttggtgcactggaatgggtcccgccttggcggtttggacttcggaacgaacagggggaacacctttggccctcgagagcttaaagttgttcctgaagggccttacccaactaaatggttgcttgtttggggcccaccccgcccctccgaaggaccgctcttgtcgccccaatgggactcctttgtgggaaggcccttactcccagacgattgcatctgtccatatggagaccgttggccttcgacccttgagagaaaaagcccttgggcttggggttggtgtgtggccaaagaaacgcccgaagaggaaattccccaaggcgagtgggaaaccccccccggaccggctgcagagggcacagagtggttcccgccattgggcgggccttgcctgtgaggggctttgagggtttcgggagtgcaccccaccatagccccgtgtggcgtaaaccttttgttgtgtggcaaattac

SEQ ID NO: 626934 - DNA, 323 bp, Homo sapiens
  misc_feature (46)..(46): n is a, c, g, or t
  misc_feature (127)..(127): n is a, c, g, or t
  misc_feature (164)..(164): n is a, c, g, or t
  misc_feature (231)..(231): n is a, c, g, or t
  misc_feature (269)..(269): n is a, c, g, or t
  misc_feature (283)..(283): n is a, c, g, or t
gctcactgcaccctccgtctctcgggttcaagcaattgtctgcctnagcctcccgagtagctgggattacaggtgcgcactaccacgccaagctaatttttgtattttttagtagagatggggtttnaccatcttggccaggctggtcttgaattcctgacctnaggtgatccacccaccttggcctcccaaagtgctagtattatgggcgtgaaccaccatgcccagccngcttttgaggggctgacttcaatccatgtaggaaagtnaaatggaaggttgngtgcatttctaggacttttctaacatatgtctattatgtg

SEQ ID NO: 626935 - DNA, 124 bp, Homo sapiens
cgtatcagacaccagacacgcagagcgcttcacaggtgcgtatcagacaccaggatagcagagagcttcacacggtgcgtatcagacaccagcacgcagagtgcttcacacggtgcgtatcaga

SEQ ID NO: 626936 - DNA, 185 bp, Homo sapiens
ggtggggcgtgaggcaacttctcctagtaatctcaatctcagctcgatgccgccaagagcgatgcccagagacagagcgatgagcttgccctggtcaggcagcagttgagtgaaatgaggagccacgttgaggatggtgtcttatctgtggcccctgtttcctccccagaggcgccccctgccga

SEQ ID NO: 626937 - DNA, 321 bp, Homo sapiens
agcccgtctatttgccgtttttttctctctagcgttcagcataacaaacgtgtgacctcactggaggctcacatgagttgggaggctcttgtgggtgcatagctttaacaaacctcctgctccttgtgggaccgtctttggtaggacattcaacttcaggagtttagaatgactgtggaatcaggaacacaagcctctggattgtcctaacacaatggtgaaaggagtttggcgattattcctagatctcggacctttctggagacataacaagccatgggttattcttcatgtcctattacttgaggctgtgtgctgtcc

SEQ ID NO: 626938 - DNA, 261 bp, Homo sapiens
caggaaggaaatttggggccttaatgggaaaggccatagtgtgaaaatgttttataaattgagtgcaatacgacatggagtatgatgaatggccctcccctgcttcctaaaatccaaccctttttttgatacctccctttcatttttttttgcctgggtttcaatttcattttttaattacctcattgtccttcccccttttttttttctttttgtccagcctgggacctaatagcaaatataaacatgatttttctggga

SEQ ID NO: 626939 - DNA, 927 bp, Homo sapiens
  misc_feature (3)..(3): n is a, c, g, or t
ccntgtccttttgtggggtggctatcgtgtggggtctgcgaccactagtctgcttgacaacttcgtccgagtgttccatttggtgcccgtctccggtctacggaccggctggtcgacctatcagctgcccgtggtctgtccccgatctcctcccgggggcgcattagccccaccagagtctggagggaaactggttttcctggcgccaatttcctttctccttgtcggcatggcgtttgcacctctgggttgtaccctgcctctttgctctataatctctagcgttggctccctgtcccacacctgatgccttaaggttttaacggtaaatcctaacctctcgctattgtccccggtagggagtccaaaactagagcgtgtgtgacaacactaggcgcaactctcatagtgaccgtctttatacaggggttaaaccatgtccttggccccatcatatctagtcacgagtaataactcgcttcccggggatggaaaccctcacatatgggcactaatgttcaatccttttaccacacaggctgtacattattccgcccccacaacgtctgggtaaatttataaaagtcaaggctgcggacaagagaccgaccgcgtaacaccacggtctattccagcacaccccggacccgcggcgccctacaagtcccccggatccacggcctccgcggacccctcctgcgcgcaacacaccccgagtgcccgcgcgtacacggcaaatccaacaccacgcccgggcgaatatggcaccagacccgtaagggacccgccgccgctcggcaggcacccgagagacaccacgccgttagatccccccaggaggcgccaaaaggtcatgctcaggccgccacgacccaccaccccccaaaccctttggggcaaaaaaaacaccccacccccaacaaaaca

SEQ ID NO: 626940 - DNA, 219 bp, Homo sapiens
cagtgcctagctgagatttccgcctccccgcccgccccgccatatgctggagtacagtggcgcaatctcgactcactgcaacctctaccttccgggttcaagtgattctcatgcctcaggtgcctgccaccagcctaatttttgtatttttagtagagatggggttttgccgtgttggccaggctggtctcaaactcctggcttcaggtgatccgcctg

SEQ ID NO: 626941 - DNA, 134 bp, Homo sapiens
catcccccacccccatcctgctaccccgagtccgtgaaaaattgtcttccgtgaaaccggtccctggtaccagaaaggttggggaccactggcttaaaataccaataaatttttgaaccttaaaaacttaaaaa

SEQ ID NO: 626942 - DNA, 1179 bp, Homo sapiens
  misc_feature (146)..(146): n is a, c, g, or t
  misc_feature (150)..(150): n is a, c, g, or t
  misc_feature (158)..(158): n is a, c, g, or t
tgagtttaaaatccactttattaaaatgcttagcagaatatcaggttcccaggaatcacagttcatcttgatcagggagaaacagccatgggggtttgatcatccaattcaggggtaagagcttggtgtgcctgttgtcacagcantggnaaatctangcattgagggagggtggggctgctgggacggtcagtgcttgcagctcacagattctggggttctggttaatgagttccagtccacagtagagctttttcttgcagactgataacttcgacgactttcgccgtgaaacactggaccagatcaaccaggagctcatccaggccaaaaagctgctccaggacatcagcgaggcccggtgcaaggggctgcaggctctgtccctgagaaaggagttcatctgctgggtccgggaggctcttggaggcatcaatgagctgaaggtgtttgtggacctggcctccatctcagcgggggagaatgacattgatgtggaccgggtggcctgcttccatgacgctgtgcagggctacgcatccctgctatttaagctggaccccagcgtggacttcagtgcattcatgaagcatctgaaaaagctgtggaaggctctggataaggaccagtacctgcccaggaaactggtgagtcttattctgtctctaatgcagattttgttgaatagagcattgcttagcaacgttagggcagtgactgtggaaatggtggcacacctgtgtggtaggtttgtacacagccgttttcaatgatatttaaaaagcttttcttcataaatggaaattcaccatcttgttacctagaaagcaggatacaaaattacatgacacatagtaatctctaaggtgcaaaacacacgtggaaaaaagacagaagggaaatatgctgaaacgttgccaggagttttctctgaatggttgtaattgtcattttattctgttactttttgttattttctataattgatagaattttttatcagaaaaaagtaaacatttaaaattagccaggcatggtggtgtgcgcctgtaatcccagctactctggaggctgagacagaattgcttgaacccgggaggcagagatagcagtgaactgagatcacaccactgtactccagcctgagtgacaaagtgagactctgtctcaaaaaaaaaa

SEQ ID NO: 626943 - DNA, 343 bp, Homo sapiens
gcctaattattatttgtgagacaggtctgctgtgtcacccaggtaggagtgcagtggtgtgatcacggctcactgcagcttcaacctcccaggctcaagccagtcctcccaccttggcctcccaagtaacttggactacaggcatgtgccacaacacctagctaattaaacaattttttttttttttggtagagatggggtctcaactttgtggtgcaggctgatcttgaactccggggctcaagtgatcctcctgcttctgccttgcaaaatgttgagattacaggcatgagccaccatgcccagactatattaactccttaaaggtgggtcagaacataag

SEQ ID NO: 626944 - DNA, 623 bp, Homo sapiens
  misc_feature (300)..(301): n is a, c, g, or t
gggagaagggcgagatcctcgctccaaccgtggcctgtgttctctccttttgtccccatagtgtgactccgccaggaacttggaatggctgaagactgtgaatgagagtcatgggtctgtggaacgctcatccctgaccctggccacggccatcaaccaaagaggcatctatgtgatccaggcacccaaaggtggccaaaagatttccccagacacggttctgcacttgatccttcctgagagccctggcagccacgaggagtcacgagagtactctttagaggaggtgaggagcttttnnacaagttgatgctgatgtctggcaagaaggatcgtaacaacacggaagtggagaggttttcagaggtcttctgcagtgtgcagaggctcagccaggccttcatcgacctgcactctgctgggaatatgctgttcaggacgtggatcccatggcctactgctcccccaagcagagtgtgtccctccaaatggactttggcttggacctggtgacggagcttaaagaaggtggagatgtcactgagctgctggcagccctctgcaggcagatggagcacttccctgacagctggaagagatttcgtacccagcccacggcataa

SEQ ID NO: 626945 - DNA, 320 bp, Homo sapiens
ctgtgactaccagggatctgtatatctggcccgtctgtgactacccacttggttcttaaatactagatgttgccaaataagtgatgctacttttactaggtgtggttaggaggcacagcatccaaagcaaggacatgagattgtaatacaaggaaggtgatgacttgctccattgtctgtggctttcttatgttgtaatgggagcttatcagtgtgcaccatgatcaggttacagcatcaggaggagctctacaacctattttagattcacagttaatattgtctgcttttttctttgttcttgtcattttcttttctct

SEQ ID NO: 626946 - DNA, 364 bp, Homo sapiens
agatactttgatgtgaagactgtatatatttaagataggtataggataatgtgtaatatggtgaccttacagcaaatatttgccaagcatactttttatactgtgcttgtggaggactgattaggtcgagggaatcattgtatgcattatatccttattctatgactggattatgaccatgtatgaggctatgatttttctaatgggatgactattagtgaaagtcaggttgccatgactcatcataggctttctaacctactccttgaatgcgactactcattgcgaaatgcatgccatacgtttgatacgtaactgtgtgatcaacagctaactctagtcgtgatgtggatcagacttttgg

SEQ ID NO: 626947 - DNA, 321 bp, Homo sapiens
  misc_feature (2)..(2): n is a, c, g, or t
anaattacacagtctcatcactgtcatcatcatcaccatcacatcacaccatcagcataccatcacacatatcacacgttgtcatcacacaacagaattgtggtcactgtcatcgtcattcatggctaggagtccagtgctcccctttctttctgagactggtgctctggggattctagaaagcccggctggggcgtaggagaacgaaggcacctttcttctcatgccctctatactttgggaaagggtcccagaagccttctcctttttgacccacggtgccgttggccaacacggtgcggttggccacggggattccct

SEQ ID NO: 626948 - DNA, 424 bp, Homo sapiens
tcaaagacgtggtgtttgatatgggatgaaaaacaccacttaaaggaggcatttgcttatcagcgacaataagcaaaagcttgaagggtatgttattctctcaatactacttctccacttcgcaggcatatctattcaggagggcatcttgaaagaggagcagggtcacccacgacttcttatatctcctgcagtgcactggccaagtgtgtgtgtattgatatgcttgaagcccctagggttctcaacatgccaaatcacaaaggggttcaatttgtggcctgcaacattgcccccaagcaagactgtcatccagtccctaaaagacttgaagcctggcattgctttggtctacctcatggatcaaagtcctttcaggcatctgtttccagaatagaaaggtttcatccatattgaaaatttg

SEQ ID NO: 626949 - DNA, 241 bp, Homo sapiens
  misc_feature (11)..(11): n is a, c, g, or t
gtctttcatantttattctattttataaataaaatccttttagtaatccagtgccgttgtcgtttctgaaaactacagtattctcagaagcttgtagcagcagtaaaaaaaaaaaatttgtcctataattaattggggcaaattatacctgattttgttaaaccaattttgttaagtttactgctttcttaattattacactttcttaaaaagagctgaattttatacctcattgttcctt

SEQ ID NO: 626950 - DNA, 223 bp, Homo sapiens
attcgcggccgcgtcgacaccagatctggggctctatggcgccgggtctggacaagcatgaaaaacgcatcgccgtgccggtggtggtgtcgagcatgctgctgtcctacaccgggatgggcttagcctacttcctggggctcccgctgatcctcaagttcttcggcggcgctacaccggccggggtggagatgaagaccgccatcactaaatctgggtaact

SEQ ID NO: 626951 - DNA, 438 bp, Homo sapiens
tatatttactgcgttgtttactgatgatgtcttgacccattattgataagagagcgatcctctaccatgttggtatgacaagtatgcatataccgcgtatgtaagttagtggtaaaacatgattactgactcgtagatacactgtgtagttaacccctctgaatattctgggttatggtttctttttcattcattcgatgatttttttattgagcatctaccatgtaccatgcattggtctgggcatttggaatacatcaagtgaattaaacaaacaaatgccattgaactcctaaaactcaatcagtggcaggtggccagagaagctagtctttgggaaaaacaatgggagaaaaagctaaggagaaacttctcaattgacacggtattaatcaaagtaaaagctggaaagatgtatattgataggttgggtttgac

SEQ ID NO: 626952 - DNA, 140 bp, Homo sapiens
taggctactctaaggatccggaggttgagtccgacattggcgaggctaggagcgtagggagctggcgctcaaggattctcgtgccaagcaggaggagctggaagccggcctgcagcgggccaagcaggatattggcacgg

SEQ ID NO: 626953 - DNA, 422 bp, Homo sapiens
  misc_feature (55)..(56): n is a, c, g, or t
  misc_feature (60)..(60): n is a, c, g, or t
  misc_feature (121)..(121): n is a, c, g, or t
  misc_feature (138)..(139): n is a, c, g, or t
  misc_feature (142)..(142): n is a, c, g, or t
  misc_feature (180)..(180): n is a, c, g, or t
  misc_feature (186)..(186): n is a, c, g, or t
  misc_feature (260)..(260): n is a, c, g, or t
  misc_feature (272)..(272): n is a, c, g, or t
  misc_feature (315)..(316): n is a, c, g, or t
  misc_feature (328)..(328): n is a, c, g, or t
  misc_feature (360)..(360): n is a, c, g, or t
  misc_feature (369)..(369): n is a, c, g, or t
  misc_feature (382)..(382): n is a, c, g, or t
  misc_feature (388)..(388): n is a, c, g, or t
  misc_feature (392)..(392): n is a, c, g, or t
  misc_feature (402)..(402): n is a, c, g, or t
  misc_feature (405)..(405): n is a, c, g, or t
  misc_feature (410)..(410): n is a, c, g, or t
gcttcccaaagtgctggaatcacagcatgagccaagtgcctggtcttagctgtgnntttnattatgccatgcatcaacataacaccgggccatcttcctatcccttcctatcccatatgtntaatgaaaacatatttnntgngttaaattaggttaatttaccagagatttagcttagtntttttnaactatagaacaatacccctatagaacaatgtacagctgcacccaaggttaaaaagaggtagcagggaaaacanacttaaactctntgtatatggtgaacccatccctctcctgcctctaatggtatgnnacattatttcgntattatacaatgtagtggtataaacagtattnttaactganggcataagttagnggatgntatntttctcgtgnctnatgtngctcttccactt

SEQ ID NO: 626954 - DNA, 218 bp, Homo sapiens
atgtaacaactatagctactatgtataaatgtactctcacctaaagcctaacatgattcattttttttttccaggaaacagaaaatgtcttgggtctgggtattaactatcagaaggaatttaacgtttaagaactgatccccaataaggcatggtcccttacacagtttcatggaccaatatttaggttatatgaaaagtggttacatatttagggg

SEQ ID NO: 626955 - DNA, 231 bp, Homo sapiens
ccccgcgtcaccactagtaaggcctacagctctgcagaggaggaggaggagagagggagaaggaggagaagagtagactacagcaagctggagttagcaggcagaatccaaaggaatattattgaaagaaaaccaggggacttttgggaaaccagagaattgttcttttcctgttggaaaaaggcaatcactaggggaagcacagatgtgagaaagtgaatgtgcggaaaa

SEQ ID NO: 626956 - DNA, 515 bp, Homo sapiens
taaggccgccgggctgaccatccgtgtacatgaagttcgagccacgatcgtggacgggtgctgtctgaaacacttcacacgtgagcagggaggccggagaggagcgagggaggaacggacggactccagttgagcgcgcggaattaagtaacatgatagccaagcttgcacaaaacctgaccctccgcatcaagccctgataaagcttaagttcatcctttgtgacaagctggctactggaggcagtgagcatgtgcgtgtgagctggacacaggagaacttctgtcaagcgacatatacaaatgcgccgtggtgtctctcgcagacaaacaatgagcatatatcaaagaagctaacatcaggaaatacttcatctcgagccattgaatgactgcccagaatgccaggcttttgacacatcaaactgactaataaccagccttcccctgcctcaccggcctaccgtgaacatgtaatcctatgtcaagcagatagccgcatgtgacccatgacac

SEQ ID NO: 626957 - DNA, 127 bp, Homo sapiens
  misc_feature (7)..(7): n is a, c, g, or t
  misc_feature (35)..(35): n is a, c, g, or t
  misc_feature (87)..(88): n is a, c, g, or t
agactgnttgggtcatccgagatcattaaaaatgnctgaccctaacaataggcacaaaaataaaaacgaaataaaaaacctccttannttcgaagtatcttagaaaaaaacagggccttgagttctg

SEQ ID NO: 626958 - DNA, 117 bp, Homo sapiens
cctatcggtgtacgtgacacagagcgctaacactcagttcgactatgtatcaggaaagctatcattgcacagaaaagaatgcactcaatttcatggtcataatagtcattcatgcat

SEQ ID NO: 626959 - DNA, 532 bp, Homo sapiens
cattaacattctcagtttgccttggtctagcgaatatatagtacataatgggtttcaacatgtcagacaggcttgttaacacctcatgacctagagtgaatcatacacataaggagtgcaaagagctatgattactggcatgagaaaccgcacactgtctagatgttggtagttaaggctagtgtgaaactgttgtgcagcatgcgaaaagagcccatgacaatgctacacagtatactgcggtctctgagatctagacatcatagaatataaattcgggctgaattgctgtgagctattgaattcttaccagatatctcatgctgaaggcgaggatttaaaactgggctgttgctgctgtcgtagacgatagcattgttgagtgttcatataatcgcagttaaagctcagtgccatactatatattgattatagacagcgaaaaccatcttataataacttaatgttgtgctaaacgagtggccttgactaggcaactataatctttgttatgcagagctatatcataggt

SEQ ID NO: 626960 - DNA, 929 bp, Homo sapiens
  misc_feature (11)..(11): n is a, c, g, or t
  misc_feature (132)..(133): n is a, c, g, or t
  misc_feature (141)..(141): n is a, c, g, or t
  misc_feature (146)..(146): n is a, c, g, or t
  misc_feature (148)..(148): n is a, c, g, or t
  misc_feature (205)..(205): n is a, c, g, or t
  misc_feature (208)..(208): n is a, c, g, or t
  misc_feature (235)..(235): n is a, c, g, or t
  misc_feature (266)..(266): n is a, c, g, or t
  misc_feature (291)..(291): n is a, c, g, or t
gcagcggcagnggcctcgggcggggcggccggacggacaggcggacagaaggcgccagggcgcgcgtccgcccgggcggccatggagggcgcctccttcggcgcgggccgcgcaggggccgcctggaccccnntgagcttngcgcngnggccccagaccctgctccgggtcgcgtcctgggtgttctccatcgccgtcttcgggnccnatcgtcaacgagggctacgtgaacacngacagggccccgagctgcgctgcgtgttcancgggaacgcggggcctgccgcttcnggcgtcgcgctgggcctcggagccttcctcgcctgcgccgccttcctgctgtcgatgtgcgcttccagtcagatcagcagcgtccgcgactcgccggtcgcgcggtgttgctggacctgggcttctcaggactctggtccttcctgtggttcgggggcttctgcttcctcaccaatcagtggcagctcacggtgcccatgggccggtcacgtatcgcatggccgggggacgcgtgcgtcgtggcctgccatcgccttcagcgttcttctccatcctcagctgggtggcgctcaccgtgtaaggccctgcagtcggttccgcctgggcaccgacatgtcactcgttcgtccaccgaaacagcttgagcaccggggcgagccaggcctatcccgggtatccggtgggcagcggcgtggagggcaccgaagactaccagaggcccgccttcaccgagaccttggacacagccccaaagggttaccaaggtgcccgcctacttagcggctggcagtgcacagaccagtggctccaagggcaacccaacaagcaaggcccagggtctccggaactctctttgggccttcagctcaaatgcccgggaccagagtaggtggccgctttggccatccggggccaga

SEQ ID NO: 626961 - DNA, 183 bp, Homo sapiens
gctcgacatggcccaccataattacccccatactctctacactattcctcatcacctaactaaaaaaaagcaagcaaacaaacaaacactggtccctcctaacactccagctcttggggctctgaatgttcacctcctgcccactcccatatccacacatgcttgtggctgctagagtcgacg

SEQ ID NO: 626962 - DNA, 899 bp, Homo sapiens
  misc_feature (11)..(11): n is a, c, g, or t
  misc_feature (132)..(133): n is a, c, g, or t
  misc_feature (141)..(141): n is a, c, g, or t
  misc_feature (146)..(146): n is a, c, g, or t
  misc_feature (148)..(148): n is a, c, g, or t
  misc_feature (205)..(205): n is a, c, g, or t
  misc_feature (208)..(208): n is a, c, g, or t
  misc_feature (235)..(235): n is a, c, g, or t
  misc_feature (266)..(266): n is a, c, g, or t
  misc_feature (291)..(291): n is a, c, g, or t
gcagcggcagnggcctcgggcggggcggccggacggacaggcggacagaaggcgccagggcgcgcgtccgcccgggcggccatggagggcgcctccttcggcgcgggccgcgcaggggccgcctggaccccnntgagcttngcgcngnggccccagaccctgctccgggtcgcgtcctgggtgttctccatcgccgtcttcgggnccnatcgtcaacgagggctacgtgaacacngacagggccccgagctgcgctgcgtgttcancgggaacgcggggcctgccgcttcnggcgtcgcgctgggcctcggagccttcctcgcctgcgccgccttcctgctgtcgatgtgcgcttccagcaaacgcgggggcagggacaacgacaccacctcgacccaagctggggatcctggcactgtacccatcccatgtccctgagggtagttgaccgtctcgttctgtcattgttggtgcgtcccgtcggagcacactctcacttctctccacaggatgtaaacagcccagcctgtcagtgtgtaaacccaggccacggctaagaggtcacctcctaagatctcaaaaaggtgtccccctatcagggggcccgggcccggcccacgggggctggccaggcacggaaggaacagtacctgtggccagacacacagcctgccctagcacatcagcaagaccttgccaggaacgcaccatcatgggggcacgcgcacaagccattaaagacacgcacggcacgtgcacgccacaaatggccgtgtgcacattggacgccgccgcacacacggtccggccaccggcaccgacacagcacagccagggaaacacgcggcacacacgcaagcgcagaacaatcgccccgcgcagccggcgcaccgcctcca

SEQ ID NO: 626963 - DNA, 181 bp, Homo sapiens
ccagcggtcgccctgttacatgtagatgagttctccatgtgggtcaggctggtctcgaactcctgacctcgtggtgatccggcctgcctcggtgttccaaagtactgggattacaggtatgagccaccgtgcccagccggtttggtttttaatagggtttggcaaaaaaggggcggccgtg

SEQ ID NO: 626964 - DNA, 639 bp, Homo sapiens
ggaaagacctagaatccaagcgtgttacatgaaaatgtaacagagcagctgcttccacctttcagatatagatgtggaaccacagcagaagttatagagcgacaacttatatacacacctagaatgtaagttaaacaaaataccggcttccagagaccccttttctccagccatattacatcaggctagaagtaattaatgttgatttatttcatctacaagcagttggtccctaagtgaaaggctctgcttgaaaaaaaaaaagacaaaacaacagttgggaggaaacattttcccaatggtccttctggtgaagcttatttgggtcacactgggagccatttctaaatctttctctgggggggaacaggccaccagaactggtggtcagaggtgaaccatcttaaattcactaagttctataaacctacattcagcttcctggttggtctgcgggggatctggccttattgcatatgccagtgcatcagatatctggcatgcatcagatcacatggccgtcacgacaaagctccatggtgaacaacctactcgcatttcagagaacacactctcatcccatctttcttagcccttcctacatttaaactggctggtggcccaacattatcactctca

SEQ ID NO: 626965 - DNA, 825 bp, Homo sapiens
ccaattaaacaagactcaatttttatttatccctgcatgagctgatagatatttagagttgcttccagctatttgagcctaaccatagaagaaactaatttactggccctgtcatgaacattgatggacaagtttttctgtgggtgtgtatttccattgctctggttatatgtctaggagaattgctgggtcatataataaatttatgtttaacattctgaggaactaccagactattttccaaaggtggctgtaccattttaccttcccaatagcgatgtgtgagggttccagcttctccattccttgttatgtggtcttccttgccccccgcacctgcccctgttttttaaaccaggcacatcagctttatgtttatttttttatatttttttttgagaaaaagactcaattggtccacaaggttgaagtgaagggggggaaacccatttatcgggaaccacaacccctgtgggtacaagaaagtattgtgggattacaccccccgagaaaaagggaaaaaaaagggaacagaaaacaaaacgcagaaaaagaaaggaataaaaaaaaaagaaggaacaaatagagaagaaagcgacagaaaaacaagaataagaaacaagacaatcaagacaaaaaaaaggagagacaaaacagagacaacagcgaacaacacaagaagtaacaaaaatgagaaacgcaaagacaaaagcaaggaaacgaaaaaaacgacataaataaacgacaacagcgaacacaaaggacaagcaaagaagaaaaataagacaaaagaagaacagaaaaccaaaacagataggaacgcca

SEQ ID NO: 626966 - DNA, 469 bp, Homo sapiens
atctgccatagctgagtggtggctgtccctttggaaggctgtacagtttgccaccatctccacacctccctcttacagggccagccaccatttatcatcaggcttgcgctgttgtttctcttaaagaaaagtgaattctctttttgttcgtatgtctctatcaaaagtgggaaaatgaaagatggattgatagcgccgcgtgtttcaagagaagtgggagcaagcatatttctttgtggaagtatagtcctatgtgtttaatatgtaaccaaactttgtctgtgtcaaaagaatacaactgaagatgtcattatgaaacaaaccatggtgagaattttgactagtttacagaaaagatgcatgatgaaaaactcaatgaacttagaaaaggactaaactttctacagcattaatcatcgaatacaaataaaataagtgatgctgctgtgaaatgcagttacataataaa

SEQ ID NO: 626967 - DNA, 993 bp, Homo sapiens
tacacaaggggcaatccactttttttccctgagccttgctgcctaaacttatccttcaaacacagcaaaaggtaaaaagtctgtttgtggtaagtataaacccgtttctttgccaacagcaaatgtgggtggctccattaaaaagtatccctttggagcatcattctttcaagcctgaggctctccagacctcgtgggcaaccagccgtgcgtgggtgtggaccgtggctcctctcgtggccgtggatgtgggtggccctctccagagggaaaccatactgtgtgttttcatcatataacgtgtgggccttgtgatgtgtgtgtttctccaacagatattcacccctcgttgagagtgtgtggctcgataaaaataggcgctcgcggggccctgttgaactcgaaggacgcccgccactcaaaaagaaaacctgtggagcgcccacagcaagagaagtgggagagagggccacaagtgggtgggagagccaccgtgggcggacacaagccgaggggagttacccaaattgcgcaagagactcacagggctacgaggagagccgcctcccatagaaagaaatctcccctttggagagggggccaccacaaagtcttaatcgcgacgttttacccccaagagtaatttcctgttgcataccccaacagtgtgggtccccctatatataaggatgaaagctcggaaatatattaaagccattaggaccaacggtggacgcgctacgatttataaccaccagagttccgatgacatgtggcaaaacaactgtgctgtaaccatgaggaaccatcttagttggcaagggaaccccctaaactatccgggtggtgtgcgtgcaccataattgggtgcccaagattaccctaccaggaaacttaagagcccctcaaagggctaaatttttaccaattctcgacaaggctgaccaaactggtggttaaaccactaaaccacgcataggagtttgcctggcg

SEQ ID NO: 626968 - DNA, 238 bp, Homo sapiens
gaaagaatcaccaatgttacatcaagaatttggagaagacatggatgatgagcgccttaaggatctctttggctagttagggcgctggcttaatgtgtgaaagtaatgactgatgaaagtggaagaatccaaaggattgggattagtaagctttgaaaggcatgaagatgcacagaaagctgtggatgagtatgaacggaaattggagctcaatgtgcaaaacaatactttatgcttg

SEQ ID NO: 626969 - DNA, 234 bp, Homo sapiens
cccaggagttcaaggctgtagcaagatatgatcacacccactactctccagccttagcacagcaagaccccgtctctgaaaaacaaaacaaaacaaaaacctaaaactggcccggcacagtggctcatgcctgtaattctagcactttgggaggccaaggtgggtgaatcacttgagctaaggagttcaaaaccaccctgggcaacatggtgaaaccccgcctctactaaaact

SEQ ID NO: 626970 - DNA, 226 bp, Homo sapiens
agggctgtacgcctcggtttacgggatgaggctccctgagctgctcccaacatcaccatggccaagggcttctatatttccaatgtccctgggcatcctggggatccgtcctgggcgtggcagccgtgtgcacaatcatcgcactgtcagatggtgtactcccagtgagaagaacaagaacgccaacagctcccccgtggcctccaccaccccggaccgcctcagc

SEQ ID NO: 626971 - DNA, 320 bp, Homo sapiens
ctgtgttaccaggatggctccaactcctgagcttaagctgctgcctgcctcagctcccaaagtgttaggatcacaggtgttagccacttgcatctggccaacttaaattgtatctatatatagatattgtttaagaattacctaatatttaggacctatgaaaaggtataaatgattatacagtaagtatatacctgctttagcatccctagttcagaaataaaatattgctaatttggttgtgacctcttcctcctccccagaggaagctgctgtaactgaatttggtatttatcatgcttatgtgttggggataacag

SEQ ID NO: 626972 - DNA, 871 bp, Homo sapiens
gcgcgtgcacagtagtgttagtgaacatgttcatagctgtatcctaggagatcctggtcttgagtagtgcttggatattcaccattaaatgaacgcccgggggtaatcgaatgttcggaccaaatccagatgcagttcctgaggtcataactggattctatctaagaggagtctcgatgcgagacttcgataatcatagtcatcgcgccgccggaagcagggtgggcctagccctactagtctcaatctccaacacatatggctagatacgtaataacctaaactactccaatgctaaaataatcgtcccaacaattatattactaccatgacatgactttccaaaaaacacataattgtgaatcaacacaagccacccacagcctaattattagcatcatccctctactattttttaaccaaatcaacaacaactatttagttggttccccaaccttttcctccgaccccctaaaaccccctcctaatataatacctgatcctacccctcacaatcatggaaagccaacgccatttatcaagtgaacatattcacgaaaaaaatctacctcttatataatctccctagaaatctccttaattataaccattcacagcacagaacttaatcatattttatatcctcttgaaacaaattatccaactggtatcataccgatgaggaacagcaagaagctgaagaggggatattacaatttacactaagaggtcctcctatcatggctattacatcaaacctagtcataaatttatatcctcagccggatataaatctggcccattaatggtgtcacaaaggttggaagacttagctgaccaaagaacatggatgggaaaaggggaacattaa

SEQ ID NO: 626973 - DNA, 494 bp, Homo sapiens
catcctcctggactcaatcatggcttgtggtgtggtcgccagcaacctaaatctcaaacctggagagtgccttcgagtgcgaggcgaggtggctcctgacgctaagagcttcgtgttgaacttgggcaaagacagcaacaacctgtgcctgcacttcaacccttgttttaacgcccccggagacgccaaccccattgtgtgccacagcaaggacggcggggcctgggggccgagcaacgggaggctgtctttccctttcagcctggaaatgttgcagaggtgtgcatctccttcgaacagggcaaccttaccgtcaagctgtcaaatggaaaagaattcaagtttcccaaccgccttaacctggaggccattaactacatggcaggtgacggtgacttcaagatccaatgtgtggcctttgactgaaatcagccagcccatggccccccataaaggcagctgcctttgctccctttttaaagaaaaaaaaaaaa

SEQ ID NO: 626974 - DNA, 858 bp, Homo sapiens
  misc_feature (5)..(5): n is a, c, g, or t
  misc_feature (7)..(7): n is a, c, g, or t
ttcgngnagagagaggcgcgacaggaggaagcggacaggctagcgtcttgtctcctccgatactttcgttccaaagagactggtggacagtgtggttctccgacgggtgctcgagtacggtctctgtccgctaaacagacgcgttgtggtaagacagagatggtaagtctgttcgagaaatgtgttttgcctttgacattttataaggcccagggtccacaccagcgctggcccagagcccgcttagacacggatgtgactcgggcacccgcgtccgcttctgccccaaagcggaaattttggaggaacatctccaacagcgtcacctttgggccgccctcaaagcaatctgggtcaatactgccccccgggaaaccccaagttggtagcccccctacggatctcttttggaagaaccccaatgccggtcttgtaaaccccccttcagaaacaagccttattcttacaccccgtgcctacgatcattcggaagatctttctataacagcaccatccaacatgggttcaaagcaccacccccaaattgagcactggcccggggcctttttcccccctgggtaaaagttccacttggtgagccccaaagtgcattaatatttcatcactctcactatagggctatatatttcaccaccccggctttggagaaattagtccccgcaagccccgggatccactcggttttgcagcccaaacctcgggtttgtgaagttcaagcccctttcaccgagaagcgtattttatacaagcccacctaacagtaatcaaggacgcttcaagcataggcaacccccaaaccaaccctttaacccccatacattaaacttccccccaaca

SEQ ID NO: 626975 - DNA, 775 bp, Homo sapiens
tgagcgggttggcgagctgaggcttgccaggcgaagtctggagaccagccgggccgcgtgcgctaagtggccatggactcgcccagccccttgggcgcgttgcccaatgaagccgggctgctccatgtcccggcggcggcagtgctggatgaaccatgatggcgggacgctggagaatgctacggtgcggagctggatgtgcggagacgtggcaggctggcggttctggaggcgtgcagagcttcgcttggcctgggaggcgcccgttgacttgacggacggctgacactggagtagcgggacgcgcgtggctgggcctagaacccgttgctgttgcgtccccatgtcgcgaccgatgtgactgggcagtcacactggtcccgtttcgctggggacgcctaggagggaggggatgattcgttgaggcaagaagttacgaaggggcctgatgatactcgcggcagcatgccatgggctgtgagaagagggaagggccgaacggctggcaggacccggcgtttgccaagccaaggactgacctgaggtctatgcgagaggccccagtaacgggggaagtcagttgtgggctcacaaacggtcggcgagactgcggtgtaggaacgacccagggagtgggccaggagcgtgggcactgcagtgaacccttgaggggtcatagagaaagtcacgggacggagactgtgacggtgcctaggagggtttatccctgcggagaagacagcagagccggcatggcaagccatcgacagccgcg

SEQ ID NO: 626976 - DNA, 1009 bp, Homo sapiens
  misc_feature (161)..(161): n is a, c, g, or t
gaggctcaggctcgggtcagcaaagggacctgcgcggcgccctggggcggaggaggcccgaggtcagtggccagtgccgtgcggttgacggaggtcggggcgcaacggggaccgggtgagggatgctgccccaagggcgggggggttcgcatgtgcccccntcaaaccctgcggcgggggttggagtacagggcgggcttccggcgcgggggggtcgggaccccaaatattccaaggccaaagagggccgcccggcccggggtctttctttctttaaccccagaagggggggcggcccggtgggggaattgggaaaagggcggtggcaggacggaggcaacaatcctcccagttgcgggagagggaaccacagggaattgtccgttgtggagccccgtggcgggggccataacctggccaaggcgccagcccaaagaaatcgggcgggggttcccccttccattattccccagccggagaaaggggggtcctccacttccaaagtttacaagcacaggagtgcccttggcgcccgaaatttggctagaaggggagcgccccttgtgacttggcccacccttaagtgtcccgcgcttcagaggccacgtggttggccaaagacttcgggggttctcaaccaattgacgtggggcgcccccggggaagacctatggcgcaagggggtggctgattgccccctgctggaaggagtcgggcaatgaaccttgccctgtgttatttggaagccccaccccttttggtgggccatcctgccttaggagaatttgtggccagctggcacagggtgttcccggtacacgccgcttggtatagcaggaccggccggggcatctaccgctgccaatgtgggtcaccggcggggcgtcttgcttgtgtacggcacgccggggatatcctgtggaccctgtggcggccccattggcgccagggttagagaaaagcgcgggggccctgggggggggaggcccccttcccccggcgggcgcca

SEQ ID NO: 626977 - DNA, 890 bp, Homo sapiens
ttgagaagggtcccacccccgcgtggggaccccctggtcccgcgcccccagggtggcccaactgacccccccgcagggactggttaaagaatgctacaggctggtctaacggccaacatggttcccccagcccccactccccgcccgcagcttccaccacacggacaacactttcgggggggacaccccacgcaagctttcccgaccctctggagggagctctccctcgcgttctccctggagaagacgcccgcgctgcgctggcccccgctctcgcccctcacggggaaacttggggtctcggggacacctcacagctggtcgccccccctctctggggggttctttgtcgcaccatcgggtctctttctctctcgtcgctctctgggaatttcgcgcactcactctctcatctgtgacactctgttctcgcgtacgagaggggagactccccatcgggctctttgtgccacgcccctcgtccacacagagactccctccatcagagcacagcgtgctcggggtgtccccgcacactcttgcgccgccacgtttccccccgagtggtctcccctgcggggacgcggggcacagccacacccacaagccctccctggcgttcgaggcgccccctgtgtctgtgccacaggcactttggcctcacagccccccctgagagtggggcgcgtcctgggccacattccccgaaggaagctgggcccctgcacacggcacacacacagggcccggccaaagacccaccgcggcgcccccgcaccagagccacacccgctggggtgtcctgccctctaatgcccggcgccgggcaccccaactccaagtttggtgtttgtctgtgtttgtttttcaagaaaagattccaattgcca

SEQ ID NO: 626978 - DNA, 157 bp, Homo sapiens
tccctgcaggtagatagacaagatgccattgactgagtggcttataaacactaggaatctatcgcgtagtctggaggctgcgaagtccaaggtcaaggcagtcagcaaacttggtgtctggtgagggctaactttcggattcatagagctctgtttt

SEQ ID NO: 626979 - DNA, 325 bp, Homo sapiens
tacctcaagtaaatagcatgaactttggttagcactctgtttcatggccccactcttttactatcagttatttggaccaactatgtaactttccaactataaggggttgttttagaattaaatgaaatatttagttactttttaaagaaatacatagcataaagaaggtactcattaaacattttatatgtgaatgagctaacataaatctgaatttcttagcttttcattgaaggtttttcagtggccactgcctgatagatatgtggacaaattggacaccgtgtaactcactgcgactaaatttaacgcttaatcatgtcca

SEQ ID NO: 626980 - DNA, 351 bp, Homo sapiens
ttttcccttaaaattttttttagggaaataaagggtttttaatttagggggtttaatttccccaaaccccttgggggctggggccgggatttttaccccgccgaaaaaatttttttagattttttaaaataagatcccgaagtttttttattgcccccctttttggttttttgggaatttttaaacccccgtaagtttttaaaggggttttttttttttaaaataaggaaaagggtttgtggcctgtgttttccccccactaaaaaggcccggccttgggatttttttttttttggttgtggggttgggaaagcccttatttgccgaaaataaagggttttccccgggcca

SEQ ID NO: 626981 - DNA, 315 bp, Homo sapiens
  misc_feature (265)..(265): n is a, c, g, or t
  misc_feature (308)..(308): n is a, c, g, or t
gctacctggtaggatgctgtagatcccagggttgattcaaccaatctgtcttgctagacaggtgtccaatttctcccccagcattaatagcatctcttatgagtccacttaatgggcttcattgaagaggaaataacaaaaccctctacccagatgttttcaaaattaagaacatattttgtaaatatgcattaggttaaatgaacagtctaatgttttatatcaaagatgtgctgagggagggaaacaagtaatgagagaaatnaaagtgctagaggaagattagcggggttgggggtgtgtacggngatactt

SEQ ID NO: 626982 - DNA, 144 bp, Homo sapiens
atgtgtacagcattaggtcgagcgtataggtaacagccatttaggtaacagcccatttaggtcacagccatttaggtttcagccacttaggtaacagccatttaggtaacagccatttaggtagagccctttaggtaacagcca

SEQ ID NO: 626983 - DNA, 209 bp, Homo sapiens
acgacgcgagcaccttccaggctctggtatgattgctggacaatcctcactggcctaaagtgagatcattaccagcaacctggcgacgtgtcaggacattgggattggggcttaccttgtctggctgggataaataaccatccaggatgagaactctcacttaactctaacaggagctagaaccctcaccacaatcctcgttcggaaaa

SEQ ID NO: 626984 - DNA, 114 bp, Homo sapiens
  misc_feature (12)..(12): n is a, c, g, or t
ctggagctcggnaccccctccaaagtgctgggattatagaggtgagccaccgcgcccggcctatgcctgagtgatttttaaattttttgtagcaatggggtcttgctttgctgt

SEQ ID NO: 626985 - DNA, 124 bp, Homo sapiens
tattaggtaagtatgagagactgataatggtaagtgctaaataggtattttggggaaggaattaggcccaaaatgtgtcagtggctcatgccttgtaatcccagcagtttgggaggctgaggta

SEQ ID NO: 626986 - DNA, 143 bp, Homo sapiens
acttatcatcttcacaagttctaaattctacgactatcctagcaaatcgctgtcgccttaatccaagcctacgttttcacacttctagttaggtctacctggacgacaacacagcaagtaacccggagattaggtctacctgg

SEQ ID NO: 626987 - DNA, 503 bp, Homo sapiens
acgtccagttttggttgaattcgtcttgttgccctaaggcctcctatgaaagactgacaggcttggactgaatcttgtgatctggacaccaagggtcacctgtgggcccagagctagctctgaagaatgcggtagtttctctgagaacctccacagcaaaagtttggtcctctgttacccatgcatgtcccactttaccagctacatcccccagtacctgcccatggctcatgactcctgaaaatataaaactcagtaggcaggcatacctggttcagacctgccagggctatgtgggaactatcattggtacaaaaaccctaagtctggagaagactgtggtagacaacagggcgacatgtctgttctaaacgcccatcagcaacttccaatgactatggccaagtgagataagggtgtacagatccctccagagagcgctcataaaattgtccctcaaaactgcaattccaataaccattttgtggatttcctaaggaaaa

SEQ ID NO: 626988 - DNA, 339 bp, Homo sapiens
atattggagataaaaccagcgaagtcccacatcacataccttacaacacacaagtgtgcgcaccagacccttggatagtgtaccgcgcgttacagaaagagcctgtccgccgggcttggtctgctccagctacgcgggaaggcggccccattgcaaagtccagtttctccgcgaaggtgccgtgtggctcatgtgccagaggcccatggtttccatgttaaggaagcgcacgtgcatcttggtctcaatgtcgatcccctgacatatcctcagaagctcctcaaagtgtgatcccctcgtacacctgctcaggctccatgtgccacatgcacactctgg

SEQ ID NO: 626989 - DNA, 136 bp, Homo sapiens
acgccataactagtacgcactaactatcacctcacttccagccagcaccagtacactccacaccacagctgaatccaccacattaacaacataaaaccctcattcacagccacagaactaatcatattttatatct

SEQ ID NO: 626990 - DNA, 766 bp, Homo sapiens
tatctgaacgtgacgctggacaagcggtgtacttagtcctgagcagaagaggatgaagatctcgtattgctgtcccccattcgttcccgctggaaagcgattttgacagagctgatcactggtcagatctatcaccagtataggtgaacatggacctgggaaaggtagtggttccttggtacaacacacattcgaatagcatcctaggaagaagcgtcagaatgactcaccactagcctgaggctaggtcacggagttcacgctaaggtccgagtgacatgtgtacaagagaatcatatcaagctacttgagcagacagctaaatccaaggctgacaggtgcaagcgatgtactcgtccatgcaatccgagagcaaggaaatgtaagtgatgacagaattacaatcatgccacgactgcgtgaataggtaaaaggcatggtatgagaggagatgatttagccattattaatgatcatgtttcggatacttggacgcataatggatgagggggattgattatggcagtggacttgggtgcagtactaacttatgaaaccatgggggaaggggtgaacttaccgtgcgctgagagagcactcacaaagaaatacaatctatggaaagatccgagaacgcaacttagtacccgttgtacctgacagttcaaaacacaaagacaatgccttgcaaggcactcctgaagaaacctacattgcccttctggaagtacttgccaccctggattcacgcccaggatcttggaag

SEQ ID NO: 626991 - DNA, 93 bp, Homo sapiens
ggatttgctggtgcagtacaactaggcttaatagggatgaatagcagctatgaacatttaaagaaattatccacagaccaccaaaaaaaaaaa

SEQ ID NO: 626992 - DNA, 1389 bp, Homo sapiens
  misc_feature (262)..(262): n is a, c, g, or t
  misc_feature (288)..(288): n is a, c, g, or t
  misc_feature (349)..(349): n is a, c, g, or t
  misc_feature (469)..(469): n is a, c, g, or t
  misc_feature (676)..(676): n is a, c, g, or t
ggagaaggccgcaagcgaggaagccgcgttgtatggatccgtgtagtattcggactcctctgtcgactagccgaatagtggccattgagtgaccgtacctctcatactcatcggttgcgccacggacgtgtgttaggatcacagccatgtaggagaaactcgtcacttgccatgcgagaaggactacatacgtgagcatgagaagtcgacggaacatcaccagcacccccgaagtggggccgagaattggactgaaaggttngttaagtacccgacgcacgtaaagtnggtgcgattggaagggtattacggagcatcccgactctctataaccgatgctatcagctgnatgtttgagagaatcagagcgctgccattaaggaagggttcaatcccacacaagatggtcccacacagagagagacggtcgcttgatctcgcctattcgaactttggagtgacacgccanagatccgctctagtagattgtagaacgatcctcgggccagggcatgtggtacacatgatcctccggccaggcgcttcatctccgcggattctccgatgaagcccatgtcctcgaagtcaagcaattgggcgggaggcaattcaattggcatgccatatcttagcttacctcgacctcagagtgagcagcatagcaagcgcaattgtnggggcccaagcgagaatgcctatgagacgcgatttgtgtgggtaggccttggataatctacgctacaggccgtgggcttgatcccatcgttcgattcgctgggatcccgtcggaagggggcttgatactgggtgtgtgatgccgccatctaggcttgtgtcggatagaggggcgcagcgttccggtgccttggcggttgcaccaccgtcccgacgtgccgtccattgcgtatcgagtcgtgcgtcgacgctttggatggattcgggcgggggacagtcgcttctgcattggcaggttacttggccacctttaagccccgcgttgcgccacaaggtctgttgccacctaagcttgtacgcattgtagttccctcacctttttccattccattcggaccaggcccagtaacttgacccgttggggtgcgctcctggattgggccgttctgtgggttacgcacaccctgagttgccgccgtttttggcactctggtcggcggagaacctcctgatgtcgagcgccttagctgtaaaagtataccctgtatcgcgccctttagtgcagatgtgttctcctcgaccggtccccgttgggtttgtggggcgcgtctgtttttcccgtaagaaggtcgcaccccgtggcgcacccgggtcactcctgtgccgtgttcttcttcttgtggggccccacacgtttttccccccccttggcgc

SEQ ID NO: 626993 - DNA, 127 bp, Homo sapiens
tgaataggtcgctgatatatcagggacccgtgccttatgatctagcacatgaccctatcacccctcacctcgtatgcagccagtagctatggatcctatgtgggcatgatccataatacggttatca

SEQ ID NO: 626994 - DNA, 957 bp, Homo sapiens
ggttgccttatgtgagaagctgtgacgatatttcttttcaattccatctcttagttatccatagcgaacatcaagaaatcatgaacaactttggtacatgacagagtttgactgccactatcctcgatgaacggttttactgccaaggacatactaggaccatgaaaatttaactgaagcttctctctcttctgactgactagaggatgcctaatctatagtggcagacctgggagaacatctctaaagaaacatctagacggtggtataaaagcaactccctcgtgtcagaccctcattttatgcagtacaaaatgtacatgactagcgaaagcacatacgatgaatgacccttgcatgcctaacgtggacaagcgactttgaacttgctgctaagcaaaagacttgaacataccagtagagagagacagagtcctatgggtgtgacctcccaacaagagggaataatactaagtgccaacataccctatggctaacaacacaggctatctacaacactcaaaagtatagctagcctacactcacctagcgcatgttcacacgcaattgcatgaagcatctccgcggactagcccgcaatgacatgacgacacagagatagacacccgcctgtgctccgtgtagattacccatcccaaacatgaccaaaaagtatggaacatactacagacagccaagtaacgcactatcacttgacctctaaattccacaaccacgtcaagagctcctaggaccagatagtacaaattggcttctccaacttatcgacatgccccagcggccaacaagtacaaccatatacaaaggcaatctcacttattataggtcaaccgtggtcgtacgagacaaaagaaagacgatacactaattatacgcagtggcatctcagaatgcgaacgattaaaccggttatccccccatgaatacgagaaacgg

SEQ ID NO: 626995 - DNA, 136 bp, Homo sapiens
cccctgcccccctttggttggggaattaaagggggacagggccctggtccccccaaatgtttctgtttccttgcatggggaaaagggcccctcctttatggctgattaaaccctgtaataaagcatttttggggga

SEQ ID NO: 626996 - DNA, 280 bp, Homo sapiens
ccaaaaaaatccaacttttatttcttaaatactgggaaggaaaaggggggaaacgggcccctgatgaggaagggccgttccgcaaaaagctaaggatcattaccaaaggccccctggccattggggaagcgctcggaacatggggtgggggttcccggcgatcctttattgctatcaaaccggagcttgggtcttttggctggcataccattgaggccggcctccctcaaaggggcgctgagttaaaccttccgcgggctataaacgccctggtggacaa

SEQ ID NO: 626997 - DNA, 423 bp, Homo sapiens
agcctcacggtgagttaaagcagactacatcataagctgtatttatacattgaactgtcctgtcatctgtatatgataagtagcttcatccagacttgtgaggataaaggtcttagagtaccaatgctgtgttaacggttgcacgcagacactaagtaaatacaaatcgttggcagagtctcgggttccatataccaagaaaatttaaaacctatattggggccgggagcagtggctcacgcttattatcccagcacgttggcagaaccaggcaggtggatcacctgaggtcaggagttcgagcccagcctggccaacatggggaaaccccatctctactagaaataccaacatcagccaggtgtggtggcacccgcttgtgaacccagctgtcaggggtaaggctggaaggggactcctcta

SEQ ID NO: 626998 - DNA, 153 bp, Homo sapiens
atacacgcgctggtcgctcttgctgaagatttggcacagtgtgtatttcaagacctcgctggtggaggccacgtggctgcccgcatacttcacctgtgctggcaatgcgccgcagaatctgacggtcgcttacggtccttgaagcccgatgta

SEQ ID NO: 626999 - DNA, 274 bp, Homo sapiens
ccagaaaataactgaaaatgaactggaggcctacatattaaccatacaacaacttggtagtgtattaactcgaatttataaataagcaaactgtacagggccaatataaaaagtagcatgtaccaattggtcattggcagagggatcttggctacttacaacctgaaggcatgcattacacattgaatactgtacatttatatcaagctatgacatatctgcagaggaactgtggctctgtaaacctaaatctacagaactttggcaagcctgt

SEQ ID NO: 627000 - DNA, 138 bp, Homo sapiens
gtatcttctttgtgtgtgtgttttccaagccaacacactctacagattctttattaaggtaaggttctctaagtaaatgtgtaacctatgggcactgtgtaaacattttcaagtggcgatatatcccctttaaacctc

SEQ ID NO: 627001 - DNA, 1709 bp, Homo sapiens
gtagttggccgatgctccggctggttcctttgacagagtattgcgggtctcgcgcgtaatcattaccatggagacaatcgacctatgtgcacctggagtctaatcccgtcgagtatactcgatgtcgcgctatcatgttgcgtccgctcacgtgcctggtcgttgcgcacttcttgttgaggcgacttgccatcatatgatcagacctcagacgtcagtgtagttcagacgagtcgtgcacagagagactcaacgggagggaatatgagggaactgatggtgcataccctatgtgccttggcccgcgctggaataacactacccctcacggtcgaatgggaattcggcggggctggcccgcagtgttgggctcaccggttatttcgcttgatcacggcaatagttccttcaccggtagactttgtgcgtggcgcgcattctcgcgtcccagctagatcctactccaggagactttgagaattggggttgcgttgctctgcttgttggtgttgagctctcgttatcccggtaccggaaacggtaacttccttggaggcttaacatcgtgccgacggtgtcgtaaccctcctcgtgcgagacgtcgtggtgacacagtagcgttggttcggccccgataataattactctcgtcccttagagggcactcgtggcgtgaggccatggtatccaatccttggtatgattgacagagctccgttagccagcgggactggaaagtttccgataaacttcggcttatgcaagtcttggaacgggcagcttcgacacttttcggtgcgtacacaggaagccctaataaccttttctattgcaagagcaagactactattttggcgaattttctgtgattacacggcactggtaaacgcgtccccacgcagtttttgtgttggttctcgccaccgattagacattgggactctggcttcgtgtgtggccgccgtctggatggttatagcctaaagagcgtgaaagaattgcaaactatttgagcgagaccggtgtcgtactcatctgtggcgccgaggtgggacgttagtcgatctaaatgtgcgatctacgggacatacgtctgtggcagtctttgcatgggtgacgcgcttgggcccatgcaccgatgccaatttgacatttgtggttgctttcttgttgagcgaagaattgtatagtgcacgttatttagagacggagagttaatttgtggggccttgcgtggtggaccatgaagaattgaggtggacggggtgactcacggagaagctctgttgcaagaccgcagcataggaaagtagattgatgaaggggtgagaagacagagtgctcagttgtagagatagaggaacgtgtatggtgtggtacagttacgagggtaaccgtgcttcagttgcacaggctgtcgtttagaacgcatgtgcgttacgatatcagcaagctgtatagaggagcggcgttttagtggtggtagccacgtaaggagacagaggcgagatccccgagagtagctagcggccgaggatcttgtcttgctccacagtgtcgcgggtatgggtagggtgctgcctgtggtcgtacatgggcgtgtggtacactaacaacgagaggtaggaagccagacaagagggcagatagtcagattcgaagacgttgtgagtaaaggcaagcgattgatgtagctggtgtgtagacgg

SEQ ID NO: 627002 - DNA, 410 bp, Homo sapiens
gtgatcagcgttctagatgggcatatgcatgacgaactgtagccaagaagggtctacaaatgtacgggcttggctcaaagcagatctcaatctcagtcctgctattaataatattcgggtggcctcccagggtgctgtgattacaggcgtgagccagcgggcttggtagtggctactttatcctagaagtcgcttggcctctcgttaggtcccaggcgaggcgggtcttgcatcttggatgactccatggcttctagagtgtagcgcagaaagaatggttgtataataggctgtattaccgagtgtatccaagggcttacctggggaaggcacacatttctactcggaggtctgataaggatgggctatacagcgctggtagatagtcatgtccacacgcggtgtgcgaa

SEQ ID NO: 627003 - DNA, 232 bp, Homo sapiens
  misc_feature (165)..(165): n is a, c, g, or t
ctgtggtgactctactgatgcttagaccaggcaggactgggccagtgaggtatggctgctgaggcgggaaagcggtggctgtggagggcacgtgctgcccccacctccgtctcggggcctggttccccactggatggcagagcgctgctccagtgtgcttccacnttggtgggcgcccaatagatgtctgctactggagcaagcttgtggtctcagtggagtgagacatgac

SEQ ID NO: 627004 - DNA, 419 bp, Homo sapiens
  misc_feature (5)..(5): n is a, c, g, or t
  misc_feature (21)..(21): n is a, c, g, or t
  misc_feature (215)..(215): n is a, c, g, or t
  misc_feature (351)..(351): n is a, c, g, or t
ttaancctgaaaaatagatgnaaaaagtgccattttcccttacccccctgcccagcccatcctgaggacaatttgaacttgataacgtggggcccaacgtgcagctgtcccatgaaaaaattgtgttatgaggccgggcaacgggtgttacgccctgtaatcccagcactttgggaggccgaggcgggtggatcacctgaggtcaagagttcaanaccagcctgaccaacatggagaaaccctgtctctactaaaaatacaaaaaatttagttgggcatggtggcgcatccctgtaataccacctactcaggaggctgaggcaggagagaatcgcttgaacctagaggcanaggttgcaatgagccgagatcacgccattcaactccagcctgggctataagggcaaaactctgtctca

SEQ ID NO: 627005 - DNA, 361 bp, Homo sapiens
ccacggcaggtagtactggaagcgtggctggggaggcatcaggaaactgacatcacggcagaaggcgaaggggaagcaggcacgtctggccatgttggagcaggagagacagagagagtgaagtgggagggctgcacgcttttaaacaaccagatcccacaagcgctcactcaatatcacgagaacagcaagggggaagtcggcccccatgagccaatcacctcccaccaggtccctcccacaacactgggaattacaatttgacatgacatttgggtgtggatacagagctgaaccatgtcaagggtagttcaaccgctgagattgattgattgattgattgagtacaacctgccggtgg

SEQ ID NO: 627006 - DNA, 370 bp, Homo sapiens
aaaaaaaaaaaaagcctcttttcccccccccccccctttcccccttttgaataaaaaaggggtcccattatcccaaaaattccataggggtttattgagagggtcccttttttttcccctccctaatccccaaagaaaccccgggggcccacttttggaaacctggtaaagtaacccttaggggggaatgggggccaactggctctttggattaggggggggataaaccccccccaaaagggggggagggccctttattcagctccctgcaactggttttgttcaaaggaactgggcagatttagaacgaattgggggtttgggttccccccccccgcttcccaagatttaagtttgggccaaaccttta

SEQ ID NO: 627007 - DNA, 514 bp, Homo sapiens
cccccccccatccccgctcacaacttgggttcttctcaacggggcgagctgagaagcggtcatgagcacctggggattttagtaagtgtgtcttcctagaattcgaaggctctctctttctaaaggtgctacatagttggtaatgcttggaatggcaatagggtagaatgattaatcaaaggcatattttctatatttgaagagtatccttccttcagggtttaatagactgagtcagatgggtctgatattaatcaaaattgtcttcttttaaggcccgctgataagcattgacttgctgtcccctaaggaaatccgagcggctacaaagggtttttttacttttcacttcaattaaagctgcgcttcgcttggggaggggggactttttctacctggacacattcctgcattcatgtattttgttttttttgactaaagctatgttacatggaaaggattttgaagccttttgtttcccctgctttgttttaataaacagtatattttttga

SEQ ID NO: 627008 - DNA, 1024 bp, Homo sapiens
  misc_feature (20)..(20): n is a, c, g, or t
  misc_feature (197)..(197): n is a, c, g, or t
ttgccattggttggatgatnatgcaatacctcctccagtcatgtctgtttttgtactctataatgctcctttgatgacagaagttgttaattttaatgaagtccaatttctcagtgtttccttctgtagtaatttttatgtcgcatttaagaaatctttgcctacttcagtatcttgaagacacttgtttcttctanaagttgtgtgttttgtttttcacactatggtctgtgattcatcttgaattagtttttgtgtatgatgtgaagtagggaccaagatttttcttcctctcatgtaaatattcaattgatcagcactgttttttgaaaagactcttctttctatacatatgcaaaaaaattaaattggatctttatcttacaccatacacaaaactaactcaaaataaattaaaagcctaactgtaagacctgaaattataaaacttctagaagaaaacataggggagaagctccatgacattggtcttggcaataattttttgatatgatgtcaaaagcacaggcaacaaaaaaataaacaagtgggactacgtcaaactaaaaactttctgcacagcaaaggaaacaatcaacaaaatgaaaaggcatcctatggaatgggagaaaatatttgtaaaccatatatctgataaagtgttaatatccaaaatatgtccagactcatacaagtcatagcagaaaaaacaggctccaatgttaaaactgggggaatctgcagtagaccattttttcaacaaacaacgcgccaaaagaacaacaacacatttgtcgggcgccgcctggtgaccctgaaaaaaggttttaaaaacccatcgggttggggcgagcgggccccaaaggggaatggggaaactggggcaagacgggttccctaggaaaaccggggcgaaagcagggacgtgagttcccccattaaaagcccgcgggacaccagcgtttgaaccactcaaagaggtggaggagtagggacataacacgggccacagagccaataaata

SEQ ID NO: 627009 - DNA, 177 bp, Homo sapiens
  misc_feature (18)..(18): n is a, c, g, or t
agtcgggaacagtcactntccaaattttctttcttttgttttttaacaaaatcataagtagagtcattggccttcatggtgctcttccttcttcatttaccaagtcagaatttcttgttccttttctttttttttttttttttttttgggaaacatgttcgtttttgtggcccgggt

SEQ ID NO: 627010 - DNA, 339 bp, Homo sapiens
cacgaggagattcttcatttagcaatgaattacttctcacatttcatctttctgaccatccaccgatcttttaaacctcttggcattttgttttttttggattcgccaagcattaatcacaaactgggcagcatctcttttcactggtaacctcttgttggcaagagacaagatcttatttacagtactcctgttggttcctggcccatacaatcaattatgttggaaggcttgtgctgattgatgccttgaatctctcatatcctggtcttttacacctacggccatgtagcttttattctggttgacacactgtacttttttgtcctttaatcattc

SEQ ID NO: 627011 - DNA, 110 bp, Homo sapiens
tgtggtgatttgtgtttgagatgtgagtgtggtgtatgttagtgggtggtagtgggatgtggtgttgtgtggtagttgtgtttgttcgtgtgtgtgtagttgttagggtg

SEQ ID NO: 627012 - DNA, 238 bp, Homo sapiens
  misc_feature (14)..(14): n is a, c, g, or t
  misc_feature (57)..(57): n is a, c, g, or t
  misc_feature (94)..(94): n is a, c, g, or t
  misc_feature (103)..(103): n is a, c, g, or t
ctagctcaggtctntggctatttatttgtatttagtagagacaggttttgccatgtnggccaggtggtcttaaactcctggtctcaagtgatcnacctgcctnggtctctcaaagggctgggattacaggtgacagccagcacacccagcccaactcctactgaatcttaaacatcaacactggtatctgacaccaaattcaagttaaagactcatcttcagacctgagcaagccagg

SEQ ID NO: 627013 - DNA, 456 bp, Homo sapiens
aggaggcggactatgaaccagctaggtagacagagtagacaccccatctcaaaaaaaaaaaaacaaagtagaaacccaatctaaaacaaacaaacaaaaacaaaacaaaacaaaacaaatacaaaataggtgtccatctcgataattggcttcctaagatatgaagtaaataattgggtgtaataatagcaaatcaaggtaatggaggtgaaattaatggctatgtaggcagcccttgactttggtatgtctagattggtatgctttatactttagacaccttattgccatggtctgaataggtagtgtcctcccaagtattcttttgttagaccctattctccggtgtgatagtataaagaggtggaaccttcggggaattagttcatgaggactctgccctcaggattgggattggtgcccttaataaaaaaaagattgaggggagctactttg

SEQ ID NO: 627014 - DNA, 275 bp, Homo sapiens
gctgaggcaggagaatcgcttgaacccaggagacagaagttgcagtgagccgagatcacaccactgcactctagcctgggtgacagtgctagactccatctcaaaaaaaaaaaaaaaaggtgggggactcccgagtttaaaaatttactacaaggctccgggggcaaagggggtgttactggcttagggatagaaacataaaacagcgcaatgaaatggggggcccaaaaaaaagcccacatatccggggccaattgatggccaacagggatagc

SEQ ID NO: 627015 - DNA, 866 bp, Homo sapiens
gctctgcgttctgtagtgacgcggcttgggcccttggtggattgtaagctgctggttttgcggcgtgggaacgacggggcgacacggtgcttcgagcactctattcgctcgggaatccccggcatggactgaggtgctgccagaagagtgcttacccgcaatggggtgaagcgttcagcctccgccagacgacgactctgtgagtctagcacactgaggaggcaggcagactctggtgtaactgacagatgagcaacacaatatagattcttgagaactatatgggttgcggtgatgagaaaggagcatactggtgtcagtcttgttcaatacggatgatcgatcataagtcgagagcatactaacagcttggcgagatccggtggtagaagaaagtaggaagagaaggattacatggaagagactgtgatgtctccaagtagtcgagacatacaagtatgtggacaggtgaaaactttatctagtgacgataattccggagaggatttgtggacctctggtgttacagctgatggtagaaggactcattgatgggagaaacggtgatagtgagtctggaggatgtatgagtgatgacagagtgatgattgcaacgtgggtcctggaaagtgggatagtgattcctgaaagccgatgcatgagtgctgagacgagcaatgaatcgtgctgcacatgaaactccgaagcatggtggagcagcgctgattgacggttggacagtgatcccaaataactgaaagaagcatgcaaagatgcggttatcataatgagtgtcgtgaagtccagtgctgtcataactcccaaatgcttagtcatttgtgataacagagttaagccgttatagt

SEQ ID NO: 627016 - DNA, 899 bp, Homo sapiens
ttggcgggcgtcctaactgcaggtctcctcgacttgactccaatcacagcatggtcacttggcaagggggagcctttctggctgggtagctccataggcctggtccaatcgtgcgcagtctatgggaccgtagggggagcatccctgtgcaagcaccctgcgtagtgaattaggcccaaccttgtaaaacatgaatagcgggttttctctatgggtttgaagcgctctggttagagagcgttgtgtacactctcagctacagtgtggaaagcggtgtataggcctatatgttctcacggtgagtgtctagatgtccacatatcgtataggtagactaacaagttacgtaaagttatgtgtgtgactcgccttgtgtagtagtatgtgccagcgctgcagccgtccgaggttgctatttccgcctctggacccgtgactctcactgaggtcaccgaatgtgagtgtggcaggcccacttcttaccccagatagcctcgggcgatgccttgtagtcataggactagacaagcgtgtacaagtattccgcacaagactgctgacagcatggagacaggttcttggtttcaactacggtatattgatatcggaagtaggtctagacaagatcctcggttgggttctctagctacatagtttgaatcgcacagatccccacctgccatcctatagtgttgtcttcctgtgtgttgccggggcttctgggcagcctgggtcacgtgccacggggaagtcctcgcagttgggaggccatacagagacccactgtgtgccactgagttgtcccacttgcctgcttggcaacctggagaactgaatggggggcgtcagggactctctccttttatatcacaacagctcaactgctaccggtcaagtac

SEQ ID NO: 627017 - DNA, 106 bp, Homo sapiens
aggcactgtacatgcaacatgtcccgagaaagattctagccagtccaatgcccagtgcacatccagatgaaggtgtgtgagctcttctgggttgactccacctgag

SEQ ID NO: 627018 - DNA, 645 bp, Homo sapiens
ccacgcgtcgatgctctttccctggaatcctggagacctgtccaagagcatgggtaagagtcagcatagaaaatcagaatcaagagcaaactcatgagactgggacaatccaagaagatacctggctctggttttagtacttagggactccaactgccactgtactggactgtaatatataaatccagatagcatacacaaggtggagtgctggactgaggattaccataatgaaatgtactaaatcttcatattagagtatagcaactaacgtgaacagtgcaaggacatactgcatttctattacagtatcagagtccaagaacaggatgtcaacatagataaaagccgtcatacaaaggcagaactacactccaaaattaaatgtgttaaaataaggtggggaaccagcagaacatacttctagctacagctatactctctctaccacactaagctgagcccagcaatacaggagaggctagaagggaggagcctcccagcgcggccgaggagacagagcccgtagcagggccggccctcacaacccaatcacctgagacgtcgaccatacgaaaaacaatgctatccaccaaagcccagagagacccaacctccatccatcccctcaccactgctcacgaa

SEQ ID NO: 627019 - DNA, 457 bp, Homo sapiens
ttccccttcccttatatattgaggctatggggtaggagaaaagagcacaacccaccaccccctttactcgtgcattaaaatttcttatttacccttttcccccttcccatttcttcccactttcatctaccttttctggcaaaaaggagccttttgctctctgtgaccctaagagcacactgcacagggaaaattgccccatccagacctggctccactcttgaactcttttggcctcttctgctcttttcctggggctcttttttctcgggggggtgtggggaatagaacagcccggggcttttggggacccttaaaactttttttctctctttggggaataaaaaacactaaacaattcaattcccagagaaacccaaaaatcccacctttccaaccaacaacaactaaagggcctggggttctgctccaaaccataactctttttattctgggg

SEQ ID NO: 627020 - DNA, 776 bp, Homo sapiens
  misc_feature (695)..(695): n is a, c, g, or t
gtccaaagtctcatctgagacaaggcaagtcccttccacctatgagcctgtaaaatcaaaagcaagttagttattttctagatacacagggatacaggcattgggtagatacactcgtttcaaatgggagaaatggccaaagcgaagagctacaggccccatgcaagtccaaaacccagcaggcaaatcttaaagctccaaaatgacctcctttgactccatgtgtcacatctaggtgatgcaagaagtgggttcccagggtcttgggcagccccgcccctgtggctttgcagggtacagccccccttctggctgcattgagtgtctgcagcttttccaggcacacagtgcaagctgtcagtggatctaccattctggggtctggaggatggtggcccttttctcacagctctgcttggcagtaccccagtggggactctgtgtgggagctccaaccccatatttccctttgacactgccctagcagaggttatccatgagggcccccccctacagcccgaagcaaacttgcctggattccaggcattcatacatcttctgaaatgtaggcggaggttcatgaacgttaattcttgagcttgtggtgcatcttgcaggcttaagcaccacctagaaacctgacaggcttggaagcttgcaccctctgaagccatggcctgaggtgtacctgtggnccccttttacctatggcaggagcagctgggatgcagggctcaagttctaggcttgcacacagagggggtctgggacccaca

SEQ ID NO: 627021 - DNA, 360 bp, Homo sapiens
tactgtggtgtaccgtagttaggactagtgttgatatacaattatggtgggaagtaatttaatttggttttggtgtgttcgaatggtcatttaattttaatgttgttggtggatgggaacatagtcagtgaggaggagtaggctagtcgtatgtagaaatagaggtttagcagtgctgttatggctatgagtgtgggcatgatgatgctttcattttttggtcatttcttgaataattattcattttggcataaatcctgatagtggaggcaggcctcctattgagagtagggttactataataaggcttgtgatgacgggtatcttgtctcaggtatgggatagggacggtaacaccca

SEQ ID NO: 627022 - DNA, 335 bp, Homo sapiens
tgacacattgtgactttctaaaaacctttttggtgcccaaccaagttccactagtgacccacaaggcccgctgagattgtgctgaatctgaaggcacgggggacccggcttattaatcctttattttggcccttggaaaggggcgcaccaaagctctttattaaagacacttgtaaggagcctaagcaaatcaatcaaacttttgggatttaggttatttaccttattaaaattgcgtatttatgcctgtgtcttttactcacattaagaataagaacaaatggcctctaaataatatattataaaattggcaataaagttaatgatctaattga

SEQ ID NO: 627023 - DNA, 877 bp, Homo sapiens
taaataaatctaacaatatatgtaacatacaatatctttgttcgtggttgttttgagacggagtctcgctctgtcacccaggctggagtgcagtggcacaatctcggctcactgcaacttccgcctcccgggttcaagtaattctcctgtctcagactcccgagtagctgggactacaggcaccagccatcatgcccagctaattatgtatttttagtagagacagagtttcaccatgttggtcaggctggtatcgaatcctgactcaggtgataaacatgtaaagatcacaaagtgctggacatacaggcatgagacacggacctggagataacaaagggtcaataatagaaaacaaacacaacacgtagaaccaaaccacagtaccacaaacacaaatgacaaataaaaaaactacacccaattaacagcggagcatgaaaaaggacagacacaaaacaaaaagggcgccaaaacaaccaaaaatacaacgcggatcacgagacacaaaccaaagtacagagaccaaacgacaccagcaacacacacacaaaatcacaaacaacatacacgacagggcagacaaaccagaccaaccacccaagagccacaaaccaactaatcccaaagcagaaatagaaaagaaaacaggaagaacgaaagaagtagacagagacacaacagaagcgcccacaaaaaaaacaagacatgcaacaagagacaacagaaaagatgaaatcaaagcgagggaaagagagagaaagcaggcaaaaagaaacagaaacaagaagaacaaataaatgaagcaactacgacagaacacccaaacgcaaagagaaaagaaaaggaaaggaaaaacgacaaacgcgtcacaaag

SEQ ID NO: 627024 - DNA, 1120 bp, Homo sapiens
  misc_feature (789)..(789): n is a, c, g, or t
  misc_feature (1057)..(1057): n is a, c, g, or t
aggatggcgtggactgtggggtgaggcgggctggaccgggcttggcgaggcggaggcctcgctagtggccgagggactctgggagactcggtaggcagactggttgtgcgtgcaaagaagcttcgtcccacgcatcgtgagcgacgagctgcgtgacgtgatggcgcgacgcgagtacgacgggctagagtagactgcccacgcctggggcaccgggggtcccactagtagcacacgcgcgaatcggcgactgtcccgtacagcacaccggtggccaggcggtaagacaaacggagcatacgttcacgacgctggcacagctatgtgtccccatgatgttgctggtggcgcaccgccggggcggtctgatccagggacctgtgaacctacatatcgcgtgaggacgagacgccgaagcgtgcagggccgggcctatgtagagggcctggcctcttagggatgaagagctttggcccattcaaagtctcttgggattattcactttgggaacgccatgaaggcgggcgaaaagctggcgttgctggttcgggtagcgttgcgctcgaactggcgcttctggaaagggcctcggaagcgcaggcattagcattcgcggcacaatgcacgctacgcggtgggctagcggaaagggcacacccacgcgaagagataccgacgcgaacacatatgggttgcgctgaagacgttattccgatccgtcgaagttgtttatagccttcggtatcgcacacgcgcaatggatgtagaacccccatgcggtggggtcgntaatgggcacggggaagtacaccccctaggggggccgagaaattcgcccaacgcctgtaaaccacccgcgcgaaaccaacttttgcacccgcattggtttttcgaggaccagccgcattagtgtttaacaccgttggaccggaaacgtacacggcaccatttggacacagggtggcattcccgggtggtcacctggccacgtattagggaacctgtatccggggtggaactcgtctttacccgcgttataggaccattggcccccgtnacctcgcgtcttttgagacctcgccatacaactagtgttccagattgccccccagacggaacg

SEQ ID NO: 627025 - DNA, 227 bp, Homo sapiens
ggtgcatttattattagacactagtgttttgtaacaagaaatacgagggatacatatgcagtcggtttaagtcatatagatgggcaaggttgatatatattggctatattcccgactggtcttttcaccagccaaaagtcctctatgatgtcactctacgtacgggattcttcacttaactctagccttcgccctttccctaccttctatcccctctttccgtgagg

SEQ ID NO: 627026 - DNA, 142 bp, Homo sapiens
  misc_feature (90)..(90): n is a, c, g, or t
  misc_feature (118)..(118): n is a, c, g, or t
gatcagctagctacctactactttccattgggcagggggtggtgttctcttaatttgtatataacctgttgtctaaattttatgtacagncttttataataaaccattctcctatatnaaattttggatactgttaaaatat

SEQ ID NO: 627027 - DNA, 300 bp, Homo sapiens
gggtttttcccctggccccacgggttttggggaaaaccccaaatttttgggtcggggcccccaatttgtttttccccccaaaaatttcccggtttttggttttggttcccccttcccaaagggccccccaaggggttttttttttgggggtttgggggaaaacccctttgggggtttttgggaaccccttttcccccccccccccaaaatggttccttggccaaaggcatttttgatttggttttttgattgggagggttttttccgccctttttaaaaaaattttgccggaaagggtta

SEQ ID NO: 627028 - DNA, 310 bp, Homo sapiens
tgcccacataaatattcctcaagatttcttgatgtaaatctgggtccaattaatataaaggatagttacacttccgtttaatatgagacattataagaagctagacccctcccctgaaatctccctcaaggctcgtcctaattctcacagaagattcgtgtaaccttgtggtcgttcactctcaataacatcagcatctaagtgtgttaatgattaaatgtccgtaattcagtcaccgagctcaggtagcacctcaagaagtgtctcctagagcctctctagtgtctctctatcctatatgtagtgtcca

SEQ ID NO: 627029 - DNA, 301 bp, Homo sapiens
ggcccaggtctgtatttgcagtggcacaattcacagctcattgtcagcctcgaacctaccgggctcaagcaatcgtcctgcctgagcctcccaattagctggaaccacaggtttgcgccaccacacccagcttattgttttaatttttttgtagagattgctggtcttgaactttctgaccctcaggttgatccaccgcgccttcagccttcccaaagttgctggggtttcacaggcgttagacgccactgtgcacccgagcttcacaattttcttaaacccgtggttttcttcttattcc

SEQ ID NO: 627030 - DNA, 246 bp, Homo sapiens
cctgagttcatctggcagtgcactcagcaatggtcttaatgtacggaagtgcagactcacgagtgcctgtgcacagcagccagatggcctggttcacacgtgtgcagtggtggtgacacatccacagcctgtctgtctcacagtccctggtgcgcccatgtgcttcatgagtcctcgtgggatcctctcagatgtcgaccgtgcagtgcactgcaatgctatgtgcactgtgcctgtctgttctta

SEQ ID NO: 627031 - DNA, 81 bp, Homo sapiens
ggatttgctggtgcagtacaacctcgaattcgagctcgaattcgcacttaattgctttcctgcctccttgaaaaaaaaaaa

SEQ ID NO: 627032 - DNA, 112 bp, Homo sapiens
tcgagaggatcgaatactagcacacactaagtaagctggtcactgctatcagcactatagggtcagttgtctcaacctctcatacatatcattcatagcagaatggcatatc

SEQ ID NO: 627033 - DNA, 280 bp, Homo sapiens
  misc_feature (1)..(1): n is a, c, g, or t
nacccctccaaattgacccgaccgatgccgctgtcaagaccgccgatcttgaccctgagacgaccctggtcatcattgcctctaagaccttcaccactttggagactctgaccaatgcccggtgcgtgcctgcgtggctgcttgacggcttggtcgctgccggtgccattgccgacaccgagcaggcttgacgtgaccccgtcgctaagcactttgtcgccgtcttgacggccttggacaagggcgaggagttcggcattcacccaatgaacccctttgg

SEQ ID NO: 627034 - DNA, 134 bp, Homo sapiens
aatacatcacactcccataatgaatgtataatgtttaagtctacatcaaaaaagatctaaagggtgtcggcagataggtacctcccaagaatgtataccagatgtgaaaataatgtttccctacatgcatcact

SEQ ID NO: 627035 - DNA, 151 bp, Homo sapiens
ccggtcataggatgtggtgggagaacagactgattgctggtttggctgtggccatcagggagtgacccacagagtattagatcaggccagggaagaggcactagccccccaattaaccatctctactggtcccgacatccgtactggcccg

SEQ ID NO: 627036 - DNA, 437 bp, Homo sapiens
ccaggtatccgggctcaaatacacctatgatgccactaagccaccgctcaaacagggcggtacaggcggagagcgcatagtcgatctgcagatcgccgatgctaatggcgtctttcaaaaagtcgatcctaacggcacgtatacgatcgcgactagatttcatccggtcgacaaatggcacaagtttggcatctttggtgatggcaagactatcgatgatgtgtacaaggccatcgatgctcggccattgcagtattcgcaggtagacatgataggcgagtacatcaaaggcaagactctcgacccgtcgacgatgtcccgagttgaaggacgcatcacagatttgacgccaaaggtaaacgatgacgtcttgagacctgcccagagcatggccgtagctcctactctgagtggttttgacgcagtcggcaaggcgc

SEQ ID NO: 627037 - DNA, 403 bp, Homo sapiens
tttctggggaatgcttgggtctacttcttatgtgaagatacccgtttccaacgaataactcaaagagttccaaatatacacagtcagatactgcaaaaggagtgtttcattcctgctctgtcaaaagacagtttcaactatgttagttgaatgcacacatctcagtgaagttcctgaggaggcttctgcctagttttttgtgaagatattcccttttccaccatgggcttcacagtgctccaaatgaaaaattccaggtcctaccaaaagactgattcaaaactgctctatcaaaaggaaggttcaactgtgtgagttgaatgcacacatcacaaagcagttcctgagaatgcttctgtctagtttgtatgtgaagatatttccttttccaccataaacacca

SEQ ID NO: 627038 - DNA, 322 bp, Homo sapiens
  misc_feature (182)..(182): n is a, c, g, or t
  misc_feature (238)..(238): n is a, c, g, or t
  misc_feature (271)..(271): n is a, c, g, or t
  misc_feature (273)..(273): n is a, c, g, or t
  misc_feature (279)..(279): n is a, c, g, or t
  misc_feature (287)..(287): n is a, c, g, or t
aaaaaaaaagaaaaaaaaaattttttcccccccgggaaaaaaaccggggggttttttcccccaaaaaaaaacaaaaatttttttttttacacatttataaggcggggggaaaccccccccaaaaattttagacgggggggtttttaattttaatttggaaaaacaagggcccccttttttcnggattaaatcaaaaatccatgttgagttttagtgcagcatactcaaaatatactgntagtcagatgcccactcgtgcgaatctgcaagncngggatncactagtntagagcgaacgccaccgcgggaagctccaactatg

SEQ ID NO: 627039 - DNA, 472 bp, Homo sapiens
gcaggacctgtcatgagccagatataggagaggcactgctcgcacgactgcgtggatgctaacctggtagctggctgaacacgtgccctgttgtgctcctggacagcacgctcctgcttccgcttcttcttctgagcttatgctctgcttcactggctcgaagtcgtccttggtgtcgccacgggtgaactcatctagccgtgactggaagaggttgcggcccaggttggtgtccttctggccacgctcagtggccaggtagctgacgaagatctggtagttctccatcagatcattgtagcccacgtggatcttcccgttcgggacagagtacatcgttttgatgttgctcctgaactactcggtggatacgataaaccagctctcaatgggcgtctcctgggaccggagttcctttatcttgttgagcaggacctcgtccaggtacttgcgctcattggcgttggcgatc

SEQ ID NO: 627040 - DNA, 317 bp, Homo sapiens
ggcatgagttgttattatgcctgagaggtgtgtccaataatgagtccccgtctggcctgtggccaattgtatgtttgccacaggcaactgggggggcggattagggcggcatgtaaaaccttgatcatcagtggcctctgttcatgtttgaatgtggtgattatcatggcaggtgaggtgtggataggtgagtctcgatagcatactgagctggccggtatcccacctctctattgtattcctttagattgtatgccacatgggtgatgtaaaaatgttttgtgtcatttaagcgagttatcgtcgcacggccttga

SEQ ID NO: 627041 - DNA, 136 bp, Homo sapiens
ctagagtatccccgctgacctcttgcattgtggccaggtatgtaacctgaaactggtttagacttcaggactccatctccaagtctaacacagtgttcttaccttgcactacagggtttaccatctagccaggcaa

SEQ ID NO: 627042 - DNA, 109 bp, Homo sapiens
atagtttacaataaaatgttgctctctttcggattctcactaacttttgttactattctaaaagtttgaatttgctggatggggatccatcgtagagatcgacctgcag

SEQ ID NO: 627043 - DNA, 176 bp, Homo sapiens
caggagtcttcagtgtgacactgaaaaaggagtgacgcagacaataagaagcccacagaagacagagatagagaactactagagggataagccagggacaggcgtgtgtggtaacacatcgtgaactgagggagaggacatttcaacgatggtggccctgaggattgcttggctgg

SEQ ID NO: 627044 - DNA, 507 bp, Homo sapiens
catccgtacccacggaggtgtcgtcagattgccttcactgttgagattgtatgccaatggtatactcaatgtctctgctgtggacaaaagatacggagaaaagagaacaggattactatcactgaatgacaagggccgttagagcaaggaatgacattgaacgtatggtccaggaggctgagaagtacacagctgacgatgccaagcagagggacaaggtgtcatccacgcaattcacttgagttcctcatgccttcaagcatgtaaagcgaactgattgaaacatgagaaacttcaaggcaagattaacgatgaggacaaacagtcagcatctggacaagtgtaatgcaatttatcaactggcttgatcaagcaatcagacatgctgagaaggaagactttgaacatcaacagaaagagctggagaaagtttgcaaccccatcatcaccaagctgtaccagagtgcaggaggcatgccaggaggactgcccgaggataagaggtga

SEQ ID NO: 627045 - DNA, 359 bp, Homo sapiens
tgggaaacgggttagagtgtttctggtggaatgctggattgttaatcgtgttagatggaattatgaccttgttgttgtctttatgtggcagttaagtatggtttaaagagatgtttatgggtgccaagttgacaagggtagacttgtgatggttaattttatatgtcaacttgaataggccacagggtgccagatatctgtttaaacattattttgaagtgtcttgagtgtgtttacagacaagatttgcatttgaactgggggactcagtaaaggagatagccatccccaaggtgggtggacatcatccagtttgttgagggcgtaaataaaataaaaggcagaggaaggaaaaaaaa

SEQ ID NO: 627046 - DNA, 527 bp, Homo sapiens
tatgcaggaatacggctaacgggtaaggacacgctacgagaatacgagcacctactaccgagcccctcgctgccgctatacacaccaccctagctacccagagagccgctacagcgtagcaacataccaatgtagtaaagctatagtaaagaccagaacacagactacaggagtatcaaagcggccttacaacatagataagatccgaacagagataggtaacatcgacaaggaagatatgcataataatagcatgcttcataaggggaagaataccaactgatgagtatctagataccatgatgaatagaggctccaggccccatcaattacaccatgtacctcaccatgtatggtgagaagttcaatggcacagatacctagaagatgtcatcagaaatgcctttgcttgctttgctgaagaagcaactaggaaccatacaggaagattacttgagagagctagctgacaaccataggggatcgcgaaaccagataaggaagtggatgagctagtaactcagccg

SEQ ID NO: 627047 - DNA, 278 bp, Homo sapiens
agattgcagtgagccaacatcgtgccatccagcctgggaaccaagagcaaaactccatctcaaaaaaaaaattcatcaactcaaataatactcgattagaccacgtgtgtttcttttcttcttcttcttcttcttttttttttttaagatggaggttcactatgtcacccaagctggagtggagtggctcgatctcagctcactgcaactcccaagtagctgggattacagtcatgcaccaccacacccagggtaatttttgtatttttagtagagac

SEQ ID NO: 627048 - DNA, 1084 bp, Homo sapiens
gtatcaaagcccccttagcactcctgtgccaccacatgtcgcagtcgccagcccctgaggactcaccaaagtcgtgtgaatgataaagagtacaacagccacttcaggtgaccaatggatctgggccgcttgtaagctcgtgcagatggaccatcctagcatcatagaatgctgtgttgcagaccaactgaccatgtacctccgtcctaccatgggcgtagataattcacgctgccgcgtatctaccctttctgggagggtcctaggagcgttggtactgcactcatgctctgcggatccgtgtcatctccgatagttggtcctgctcaggccgaagtagggcaagtcgtgctacccaggagtgcctattgccagtcccatcactgaatacatagggccctgataggaagcaagggcgtgaagtgcagcagacgggactgtatgcccatctgtggggaatcgaactcgacgccagtgccaccctttgcgaagaacgcattacgcagaggacccatgcgctggtcgaccagaaggatccgcttgtacttgcctttgcatagcactggagacgccggttgacccggcgtaaagtggctccgtgtgcgagaggaacacaagcttgggcacacggtctttccaatgcacacgccaatggtattctaacactggtccttgggcacggcaacccaaggacctaggtagtccaagagccgacttatgtaccgcacaaagggggtgcacaccatagagtagacctgcgtagctctccgtagtagcacttgcaccaagaatgcggagccccttgaagtgtgcactgtgacgacacgctacaagcgcctcaacaagggccaccaagttgccggcagtgacttccaggggttccctttgtggacactcgccacggtacggcccatggaagtggggatgagtccgtaggcacctggggcgtgacaccatggaacaggcgcgacaggcacgcactttgcacgggtcaaggccgtggtcatacacggcgacataacgtggcactaacaggtagtgccagacgaatgctataggattgtcgcaccagagcaatacgaac

SEQ ID NO: 627049 - DNA, 466 bp, Homo sapiens
  misc_feature (90)..(90): n is a, c, g, or t
agaggagtcagatacctttgcctaggccgagctctgtacaccgaagatccccacagaaaaaggcatcgtcgtcgcaccgcaactctcttnacacttcccctaagttacgcctggttctattgcttatgtgctcctcttattttttttgctatcatccatccatgtggggtcctggaatcactgtaagagagtgaatgcaatgaatcagaataaaactacgcttttgttctgagcacctgaatacaaaacttaatgtcgagcacacctgggtgtcaggccccatcagtgtcacccatgagcgtgtgcgtccttgaccttaaggtcggcaaacctgagtttcatggcctagtagagtgcaccgatgagctgtgctcctctgtgcagatgctcatccctttgcagttctaagttccttgtctgcaaaatgatcaaactgtctcatgatgtcactcgtggggtaggaggt

SEQ ID NO: 627050 - DNA, 109 bp, Homo sapiens
  misc_feature (39)..(39): n is a, c, g, or t
  misc_feature (49)..(49): n is a, c, g, or t
  misc_feature (85)..(85): n is a, c, g, or t
gatcttactcctttcctgtccccctgtacaaaacacttncctaacccancttgtggttttagggccagccaaagctcactgttgntgggaaagtcctaatcactacacg

SEQ ID NO: 627051 - DNA, 169 bp, Homo sapiens
tctactggggacgctccatatatgtacccatatctcctctggactcaggaacgcactaatgtgggtctaaagatgctttgtaatactcaggaggaaatacaccatttctcatgataaggctacctaccccctctcaaaccacttacgggaaggtgtcatcaatcttggg

SEQ ID NO: 627052 - DNA, 347 bp, Homo sapiens
  misc_feature (44)..(44): n is a, c, g, or t
ctagtggcatccaaagaaacatgggtgggcattaatattatttngagatacactttgctgtggattagtgttgcttctttgattggtctgtaagcttaaggcctaaactaggagagacaaggtggttattgcccaggcgcaatgcaggactagaacatggagcttcccctgatatatctatgcttaggcaataggtcgctggccactcagctcttatatctcacgaggctagtctcattgcacgggatagagttgagtgtgcttcacagcccgagagagttgcaagctaagcactgcaatggaaaggctctgcggcatatatgagcctattctagggagacaagtca

SEQ ID NO: 627053 - DNA, 314 bp, Homo sapiens
  misc_feature (243)..(244): n is a, c, g, or t
  misc_feature (270)..(271): n is a, c, g, or t
attggaacatttaggtttttggatttttgatgaggaatgttcatccaataagtacaatgcagatattccaaaatctgaaaataaaatccaaaatctgaaaacaagttcaaaatctgaaacacttctggtcccaagcattctggatgagggatattcaatctgtgttattaacatgtgaaaggaaatagtaaatggtatagacttttaccagagaacttacattttattttaaaaagggagttnnggtattgaacaatataattaaaattnngaatttagtgggttagctaaatctccacatagacactccgaca

SEQ ID NO: 627054 - DNA, 125 bp, Homo sapiens
  misc_feature (29)..(29): n is a, c, g, or t
  misc_feature (33)..(33): n is a, c, g, or t
  misc_feature (90)..(90): n is a, c, g, or t
ttactgcgcgttgggcacgggacagcaanaatnacctgaccaaggaggagtgcctcaagaaagcctaccggaagatggccttgaagtacnacccagacaagaataaagacccaacgctgaggaga

SEQ ID NO: 627055 - DNA, 203 bp, Homo sapiens
  misc_feature (28)..(28): n is a, c, g, or t
ctgccccccttcaaggacagggaagagncccctgtgggatggcagccagaggaataagaacttgctccctccccaaaggtaaacccttggtccaaaggtttgcaggggcccaaaactgttcttttttttttgagacggagcctgggcaacagagcgagactccttctcaataaataaataaataaataaataaatatttttta

SEQ ID NO: 627056 - DNA, 280 bp, Homo sapiens
  misc_feature (178)..(178): n is a, c, g, or t
acgtgtactagaggatcccagatatccggatctgaatagtgacggtctgtattactgtgaaaataagaaaatgtagttaattacacatttaaagagtattccacataacttcttaatttctacattccctccacttactctatcgggggtttccttttcagataagcaagcttttccnatgctccttaagtgtatttcctttttagataggaatccaggaagtattacgattgaatggaacaagcacttgacatactctgtctagagggtcacacaatag

SEQ ID NO: 627057 - DNA, 425 bp, Homo sapiens
gtgactctacaggatctgtcgctgctccctcttcacatgttactcaactatcccttctcagtaaggcttttctgactatataaaatggacacttctaccactccccactctacccaactccaaacttttaattctattcccttttaccctgctttcccccatagctcttatcaatatctgatgggccagtaaagtgactggtgcttattttgcttattattttaatggcttacccaacccatccataaggacaggagctttgattttgtacattgctatgtccccagagtctagactactgccttgtacaaaacaggtgctcagttaacattcgttgaattaattgaataatttaaagcaagagaggtaaatttggaatctagacatatatatgatatttaaagccatgggcatagaaaaccact

SEQ ID NO: 627058 - DNA, 328 bp, Homo sapiens
aacatatcaagtgaagaatcccagccatgaaaggcccccaaataatataatttcatttatatgaaatgtccagaacaggcgaatatatatagagagaaggcagattagtggttgcttaggctgaagggttggggaggacaaaggggtgactgctaattagtatggggtttcttttttggggtgatgtaaacgttgtaaagttgattgtggtaatggtggcacaactctgaatatactaaaaaccactgaattgtatactttgaatgtttgaactgtgtggtatgtagattttatctcaagttgttataaaaaattaaattacaaatgc

SEQ ID NO: 627059 - DNA, 200 bp, Homo sapiens
tgggtgatgtattctcactcggtcccccaggcgggagtgcaggggctcaatctcggctcatggcaaattaccccgcccaggttcgagcgattctccggcctcagcctcccgagtagcggggtttccgggccccccccacccatggcctagcatttttttttttccccattcagccctggggggggccccccatagagtct

SEQ ID NO: 627060 - DNA, 824 bp, Homo sapiens
  misc_feature (2)..(2): n is a, c, g, or t
  misc_feature (82)..(82): n is a, c, g, or t
  misc_feature (88)..(88): n is a, c, g, or t
  misc_feature (92)..(92): n is a, c, g, or t
  misc_feature (101)..(101): n is a, c, g, or t
  misc_feature (109)..(109): n is a, c, g, or t
  misc_feature (117)..(117): n is a, c, g, or t
  misc_feature (121)..(121): n is a, c, g, or t
  misc_feature (133)..(134): n is a, c, g, or t
  misc_feature (151)..(152): n is a, c, g, or t
  misc_feature (154)..(154): n is a, c, g, or t
  misc_feature (215)..(215): n is a, c, g, or t
  misc_feature (222)..(222): n is a, c, g, or t
  misc_feature (237)..(237): n is a, c, g, or t
  misc_feature (710)..(710): n is a, c, g, or t
  misc_feature (718)..(718): n is a, c, g, or t
  misc_feature (720)..(720): n is a, c, g, or t
  misc_feature (733)..(733): n is a, c, g, or t
  misc_feature (801)..(801): n is a, c, g, or t
gnccatgaaaaaaacaattcaattaataaaaccggttgtgagggggggggctgtgggggggcctgggcttccttctcctggntcccgnccgnccgcggccngggctccnctgccccncggntgtccagtgtcnncctttgggggggggggnngngggggggggggggagggggggggaaaattctgctgtccccagtgtggggggggggggggtnggggggngggggtgtgctcgcnggggcctggggggggggtggggaagcaggggctttgtcagttctgtgggtttagagcccatgctgaacggaattccccctttgtgcccagctgtctcccacccttgctgtgttgagtctgcgagcctgggatatgctaactcgggggtgatacaacctggaagaagaatgtgaggctctcctggaaagatgcaaaaaccatctcagatccaaggggccaagatcacaaggtcctgctgctacctgaggggtctgaagctttgagggcaggggctggggagtcacaatcctgtgaggcagggagagggaagagtcacaaacccaactcagcgctattctccagccctaggcgctttcactcctcagtgccctagaagtcaccagtaggtgtcaactgggcagacaagggacaggaagacagggatggcccagggctttttacccgtttggttttaggcccgtttctccattaanggatgcanangcagggtggagtnagtaaatgaatgagtcacatctcaaaacagcaggaaggaacagcctctgctggcaatgacagttcccnagatgagatccctggggctctga

SEQ ID NO: 627061 - DNA, 942 bp, Homo sapiens
  misc_feature (261)..(261): n is a, c, g, or t
ctcaaagtggcaggtggggtggggggagatgtgtgggtttctaccgtcacattactgcttttcaaaaaaaaacacacacaaaaaactttttttttggctttctaaattctctgttcttttcactactgatttttgttttgttttttggccgtttaaaatcccttattcagcctaattatggttttctacactcccctttcatggaggcacaagaagaagtgggttctccccttataagtagactcgtgcgtgtcacctagnttaagtgagaaatatgcttaatcatgacaatacgtgctttggaataccacacgtgtacagagggaggaacactagctgggagaaatctggtcttctggattatttggttggtggacacattcctatgtactggtggagctggggcatggtgttttttctggtcccaggaaaagaaaaaccatacttaaggtggatttggcactggacagccacacaaatcttaaatttccctttttaaacacattttttttcaagtggatcaaagggagaatataatagtgggattggctataacatggaaaacttataatccacaattcagtactcgggattataaatcaagctctaagtcttgggaccctcggtggaaacatttctaacccgaattttaattgggccttttcaaccaagggcttagagtggtagcaggggatttcttccaatgaggaaaccgtgatgtcctgatttaaagacgaaggtgatatttcaatggttcggaatataagctcctgtgcaaagttcgggggtggtgtttacccacataaggggctttctttcccagtcaagcgcttaaccacattctggtcaaaatgatcccttttcccgggctcacattggggttgtcatttctcatacatcaggagtcctccagcctgggcagtggccccaccctttcaggga

SEQ ID NO: 627062 - DNA, 281 bp, Homo sapiens
tcaaagtgcctcttctatatctacactgttgtaaagctcatagcacttcacaatctctgtgtacgtggcaccttcgcactgggtgtagttggcggtgtgtgaagctggaactgtggacgtacttttgtcggtgtctctggacaaacctccataaatctggtaatcttagaacggtccacgaatggtacccttggtgtggtgttcataagagtagatatagaagagtggcctttttgggggtaccgaggctccgaatttcggtaaattcttgggttcataag

SEQ ID NO: 627063 - DNA, 118 bp, Homo sapiens
tccccgtacgcccaaaaaataaattaaccttaatacagcatgatatgtagtagtaggggagtctaaggggggaattgagacatcccgccccctgttcttctatttgggcgtacgggga

SEQ ID NO: 627064 - DNA, 223 bp, Homo sapiens
tgacaaaacacatatgcaccccttccttgtactatccctattatgcataattataacaatgctccatcttgcctacgcacaaacatgacctaaaatctgctcattgcatgctcttcaatctagccacatcagccctctgtacgtaaacatgccacttctacatcctaaacccccatgaatgcttcacctgtgtgcatgttgttgggacttgggtcccgatgct

SEQ ID NO: 627065 - DNA, 202 bp, Homo sapiens
ctgagcccggccccagacagttcacgctacaaagaatcacgcgggtcacctcaggacctcatatctggttagaaaatgaacgtgagacaagccagtgcacgctgctctacaaagcattccttaagtgacacaggaggacgcctggggactttttatatatttgcagattacgcctttttgtaacgagcagcagggaaagaca

SEQ ID NO: 627066 - DNA, 1727 bp, Homo sapiens
tcattgtgcactgctaggtcgtccgctcctgtgtgtttgtcgttagttcctccctctttgttgctttccgtgacgtctccgtagtgtgttgttgcgtcacgttgtcgtccatgctccagtctttcgtttttttactatcgtccacctctgtggagggtctggtgggtgttctactgtcgtcgctccccgcttaggtgggtttgttgtgtgctgcttcattggtgtccggctgtactttctgttgtcgttggtggtttccgtcttcgcttgttggtcgttcgctccgttacgcatcgctctgtgttttcgtctgtttgtcctacttcttcttgtttgtgtgtggatggctggtggttgctggagccgctggtggttgtacctactattttcctgctggggagtcctcgctcccccgcgtgggggttgggtacgccgccgcccgctctgctcgtgggtcttctttcttctgtcttctctctctaactacgtcggttgtagctccatcgtgagggtcgctgtgttgtactcccgctcggtgtcatttgttctctcccgactggtcttgagttgttgggtagtctcccagcttggtgtagtgttctaacacgctaactagtttgatgagtggttcctctcccacgtgctcatctacgtggggggatgataccccaccggcgtagttgccgtagttggcgtacctgtggtatctactccacagtgtgtggtccaactacaacttgtgggtgcccccactccgccgacatagttgttgtgtatctactgcgtggggaggaatttctgtagtacggtagtgcttgttcttcgcggtggatgatttctgattagctttgtttccgcgggggagatacaaccacacaccatcggtgtgttgggtcaacaccaaatgtgtatatcccccccggggtagtgctcccccccgcgttgtgtgagtcccccccccgcagggggggctgtgctcccgcgtatgtggctcctccttgtctcgcgtgcgttgtcctctgttctcacctctcacgtgcgctcctgtatggtcctccgtacgggggcccacacgtgcgcgtggtgtgtccccccctgctctcacgagggtgtcccccgcgtgtggtgttcgtgtggtggaaagttgggggggtcacgttgccaacacgcgcgtcgtgtcctcggtcccacgtgctcacgtcactcccacgcgtggtcgcgtgctcacccgtgtgtggagagggggtccgtgttccggtgtctcccccgctcctcacagtagtggggccccccggcgcacgtgtgtgtgtgtgtgctgtggaggtgtctctcactcactgggccaccacagggtgaccccccgtgtgtgagtgtgtgtctgcgtgtgtgtgcgtctcccacccgtccccacacccgtgtctcacccgtccgcggggtgtgtgtctcgatccgtgtggtgtccgcgtgtgtgtaaagagaagtctcccacccgctcccgcgtgaggtcacaacacacacggagagggcgaccacacggaacgtgaagggggaagaaagtccccgcccgcgggtcacacgtgtgtccccaacccggcgtccacgccccgcccgacgtgtccccgacccgtcaagcccgcggtggcggtggtaaagagtgcgtccccggaacgtggtgtgtgtacgcggtcgtacgggtgtgtcaggaggtgaaaaaaaagtccaaacgg

SEQ ID NO: 627067 - DNA, 124 bp, Homo sapiens
cctcacacgactgcgcccgcaaagccgcatcaatgcataagggctctggcaaccatatcataggtacgaagtgtgtttatccctgtatacgcaattcccgaggcatctatatctaggcttgtgt

SEQ ID NO: 627068 - DNA, 158 bp, Homo sapiens
caatgctctttgtgcctcttcctggcttaggatgtcgcctctcactgtgctccctgcctcaacccctgcttcctgcaggtttattctcaccaccacatccagaagtcacttttcccatcctctgttcaaccccgcagtagccttcgtacaccacctca

SEQ ID NO: 627069 - DNA, 742 bp, Homo sapiens
  misc_feature (651)..(651): n is a, c, g, or t
cgcgcatgcatgctcataagggaaggttaaaaaaaaaaaaaaaaaaaaaacatggtcgtgcgggtcgccctagtccagtctagtctagactaaggcaagcttatccatgcgaacgcaagctgacttgactaggccaatctaccctatggggagtcacattacactgcactggccgttacatcacaacgactggactgacaaaaccctgaccgaacctaattgaattgccttgcatcacattttcgtcaggtgaggtggtagaatagagaacaggcccgaacggattgcccttcacaacagtagcctaaatggaaaggggaatgggaatgcgaagcgataatgttaagataaaagtcgagttaaagtttaagtaaatcatcttatatccaaaccgccgggccgggatcaggccattcccttttaaatgaatagactggaccggggttgggtggagtgccggtccggatcgagacaacactccactataaaggaacctggactccaacgggaaaggagccaaacctatgtcaaggggatggtccactaccagaacccttaccctaattatttgttttgggggcggggtgccgcaatagactaatccgaacccggagggggggccccgattttagcttggaaggaaagcccccnaagtggaaagaaagggaagagacaaaggacggggcctccgccctgggcctttaatttaaaggttaccctttcccacctaccgacgggagga

SEQ ID NO: 627070 - DNA, 945 bp, Homo sapiens
gtgtccgcccttagacagagaggtggtaacacatgtacctctctaggcgggatgtaactcgtgtgtggcgtgtcgtggctactcaggagtgagcgtatgcgacttcaagcttggctatactagtgtggaattatggattgcgactaacgaccatgtgagacctttgaggcgtcacattgtatagtgactaatccacgtaagatagatgctctgattgtccagttgacactgctggggtttgcaggctcggcacaaactactggcccgttgtctggtgcagaagaggcctgtggcgttgcatgctccgtgcctaatcatggagactccgtggagtcatttggtgcgtgcacggtattgagagtactcggttgcaatatcctgtaggagtggcgagaacgaatagagtacaaaaggacagtctcgatgtatttgctgggttgtgactagaaaatctgtaaggacaggatgttcggttcgcgaatgaccatttactttccgaatgtgctcaatggacgattagtgaaaaagtcgggtggtggtgtgtacgacaaatagggggggactggataagttagggtaaaatcgcttcgggtgtgacaattggtaagcctgaggaatccaggggggtcactaacgttgtattgtaattcgaattgcttgttcacatgcaagtattggatggaagtgtaggcaggctacagttgatagttggaaatgccactacctagagtgttaggtaatattgagtcacatttattgtgagacggagtatggaggaaaaggtgaagggcaactgtaggcattggaccagatgagtatcagggtcacatagtaactataaaaaagagaaggggggggagtgttggtacaaacagatcactatgtctttgcaaggaaaaaggggaatattgacccaaaattgcggggctttgaaagcgagaatgc

SEQ ID NO: 627071 - DNA, 504 bp, Homo sapiens
attcctcacgccgattgggtggtgttcacctccctcgtgcaacaccagactgtgactaacagtcctagtggataaatgccaagcacatatagcgctcaacatatttcagaccatacacgagatgaccaggcccgattccagacctgagtgtcgaagtagcttattactcagacgtttccaataaaaataaggcactgtatcggcgagtaccatttgaataggaaaaaaaaactacggggggtgtgtttttggggaacaacaattcagtatggggtatacgtggctctgttcaggattccccgtcgtgccgcagagaaaaccgaatatgactaggaaccatgaggttgagggtccagttcctgcccttgctcagggggtaaaggatccggcattgtcgtgagcgggggtgtaggtggcagacgcggctcggatcccgtgtggctggggctcaggtgtaggccggtagctacagctccgattgacccatcggcgacgccaatgggt

SEQ ID NO: 627072 - DNA, 104 bp, Homo sapiens
  misc_feature (56)..(56): n is a, c, g, or t
gagaagacgacagaagggcaggagaaagaagagagcaaaaaggataggaaagaggncaaggagaaagataaagataaggaaaagagtgatgtaaaaaaagagga

SEQ ID NO: 627073 - DNA, 813 bp, Homo sapiens
gacacgttccagtatattttacatttctctaagtgtccttcatttccagaagttgtgaattgccagaaaaagaattcacaaggtcattattacgccaatcaaggaggcacgagagaaaggtgaagtccaacttagcaaaacaaaaaaagtgatacaggatatgaatggaaaaatttccaggaaaatagcatacataaataatcacaacttctgaaaatcaagggacacacttagagacatgcaaaatgcactggaaagtctcagcaatagaattggactataccttagaacgcaacgacagcaaatgtcagagttacgaagacaaggcttctgaattagcccaatctgacaaagacaacaaaagcaatttacaaacaatgaacgcagcctccaataagtttgttcaacaaccaagcctcaagaataattggctgttcccaaggaagaagaagaatctaaacagttggcaaaacaaatctgagggattaattgaggaaaacttccccggacttgctagagatctagacatccaaatacaagaagcttacagaacaacctgggaaattcatcacaacaaagatcatcacctaggcacatagtcatcaggttaaactaacggtccagcatgaaggaaagacatctcacagaagctgtgagtcaaaagcctcaggtaacctaataacaggcaacaccctatcagactcaaacagaacctcagccgaaaaccctaacagcaagacagggaatagagaacaaaccagaagcccacctaaagtaaacagcagtacaaacgattacacggcaacacagagc

SEQ ID NO: 627074 - DNA, 886 bp, Homo sapiens
  misc_feature (741)..(741): n is a, c, g, or t
tggaaatgggagtttcggcttttggtgcgcccaggctgggagtggcagtagtggcgagatctgggcttactggcgaacctcggcttccagggttcaagcagatttcttctggcctcagtctccctagtacgctggggattacagggctgtgcaccaccaagccgggttggtttctgggcttcttccgggggacgcataatggtctcaaagggctcatccgagttggcagtggtgtttgaagaactggctattctctttacgggccaagcagtggtcctacaggtggtgggttcaccacactttggtttccggtgcactcatcaggcggatgggaccagcccagtgttctctggaaacggggctggacttgggactctggaattggttaacgcaattgggctctccagggagtcctggtggaaaaatgttggcttcatccttttggaatgtctggcccagggaggccctaatgtggtgtaagaccagggtgtccccaggttggcggggtctcatcagggatacgcaattgggagagagtctcacttttcccggaagaaggggatgtgttaatggtggttaacagggcattctgggagtaatggtaatatattataggggacgaggttaagggggactctaaattggcgcacggtattggtgggagagtaacatttatattccggggggtttttaacaaacagcacacaattaataatcatatttgagtagctgacatatggntgcataatccgggagggataataaatttaggtggcaataacagtttttgaatttccgagaaccctatgtgtagcagggattataggaataccgggttagtgggtgttccaaacaaaggattactccatggggctgaaagagccta

SEQ ID NO: 627075 - DNA, 1070 bp, Homo sapiens
ggagggcggatcacctgaggtcagtgagttcgagaccagcctggccaacatggtgaagccccgtctctactaaaatgcaaaagttggctgggcgtggaggcacgtgcctgttatccgagctactggggtggctgaggcacgagaatcgcttgaacccaggaggtggaggttgcagtgagccggggtcgtgccattgcattccagcctgggcaacagagcgagactccatctcaaaaaaaaaaaaaaaagacttgactaaagaaataaggccaggaaaggggggcatcatgcctgaaatcccagaaattgggaaggccaaaggtggccgagatcaccgagaggacagcgagtaggggaaatagcacacccacaaacatggcaaaaacacaaaccaacaccataaaaaacacaaaaaaaagggccgaacaccagagggagaaggatgccagagaaaaacccacgaagaacaaggaggcaagaaggacaggaaaaaaaagaacggaaccagaagaaatagagaaagaagaaatagacgaagatagaaaatagaaaacacagcacagaaagaaatacacaacactgggacaaaacaaagagaaggaacaaactcacaaaaaaaaagacaaaggaacaaaggccaaagacgcagaaggaccaaagatggatggaacacacaagaggacaagagaaaacaagaacaaaacaatgacaaaacacggaaaacacaacaaacacaacaaaaaaaaacaaaaacaactaaacccagagcaaaggatgaccagagccagaagaaccagaacaacataaaaaacagaggagcacaagagcatgagccgagcaaccaaggatagaaagacaaagtaaccacaagaaaccaaacctggaagaagaacaaaaaagaactaaaaacaaaaacagcacatgaaccataaagcacaaacatgaaaaacacagcaaaacactaattaggactaatcctgtcaagcaccagaaaaaaatacatatatattatacctatacaaaacacaaacagaacatagatctatcatatacccaaacaatcaaaaaca

SEQ ID NO: 627076 - DNA, 262 bp, Homo sapiens
gggggccccctttttggttttgaattttaaaggtgggaaggtttaaggttccaaggtttttatatataaaggggggcccatcttttcataataatttttcaggtcgggggccgccgaggggcccaacttttcccttttcctttttaaccgttttttggttaaagagggtactctttttttttctgttaaaaacgggagggccttttttgggcctttaggtttgttccccccggaataaaaaagtttaaatttgttttcctta

SEQ ID NO: 627077 - DNA, 215 bp, Homo sapiens
cgggaggatcacttgaggccaggagtttgggaccagcctggaaaacacagtgagactcctctgaaaatatttaaaaattagctgggtgtggtggtgattgcctgtggtaccagttacccaggaggctgggacaagaggattgtttgaatccaggagttcgagattacagtgagttatgattgtgctaccacactccagcctgggcaatcaagctt

SEQ ID NO: 627078 - DNA, 951 bp, Homo sapiens
ttcgcggatgacgccggactgggcctactccgccggctctcagtgctattgtccctggggcctggcattgaggcgggtccactgtgggaagggcgtgtggcgcgcggctccgcggacagatgccaggagccaagccctgacagcagagtgctggacagaagtggcatgggtagtctggctagtgatgaagatgatagaacagctgaatgggtgagaccagtgcatggtgctagagaattctactaaaatgggtttcatccatggtgctgtctacaacgctgtgggtggatgaagaagcgaaaagatggaagctagtacggccagagtggcatgtcctcatgtgcaatgctggaatacctaataagtttttccaaaattgggtccagtggtttacgtcttggatcttgcagatagactgatctcaaaagcctgtccatttgctgcagcaggaataatggtcggctctatctattggacagctgtgacttatggagcagtgacagtgatgcaggttgtaggtcataaagaaggtctggatgttatggagagagctgatcctttattccttttaattggacttcctactattcctgtcatgctgatattaggcaagatgattcgctgggaggactatgtgcttagactgtggcgcaaatactcgaataaactacaaattttaaatagtatatttccagggataggttgtcctgttcctcgaattccagctgaggccaatcctttagcagatcatgtctctgctactcgaatcttgtgtgggagcccttgtctttcctactattgctacaatagtggtacatgatgttcagtagtgttactctaatttacaaggacaatctgggtggaatgcgttggtgcataaaggagcatttaaagttacttcaacagcagcatattacgacaggacacgcaaattctgaatatcagagaaga

SEQ ID NO: 627079 - DNA, 525 bp, Homo sapiens
  misc_feature (149)..(149): n is a, c, g, or t
  misc_feature (212)..(212): n is a, c, g, or t
  misc_feature (477)..(477): n is a, c, g, or t
tacttttcccgggccatcacctcatcgtcaagtgcctgcttaaagacggggcggcgggggcagaggacgctctgctgcactcaagatgctgatacatttctcaagcatgccggcttgtgtgtctccggttaaagtttccttcccatttnctgtgcagatgttaaaagattgactcctttccttttttcagggtataggtgctcagctggganaggtgagagttaaattttctcatgatgctggtgccaagaaatagcaccttgaaaagagaaagaaatcaagacatgatctccagggagctgtcgtttggagcacattcccgagagctctccctgggccgggaggctgcgtggtgtcgttcccctcagcagcatgcttcgggtggagcctcctgccctgttcagatatgttagataaaaacaccttgacagtgccagcccgtctttaattttcacaccatctcaagtaaaatatgtnttgaaatgaaaacattttgcattttattttaagcttatttttggggct

SEQ ID NO: 627080 - DNA, 252 bp, Homo sapiens
cccaggctggtttcgaactcctgagctcaagcgatcagcccgcctcggccttccaaagtgctgagattacaggcgtgagccactgcggccggccttacaaaaaaaaattaaaattagctgagcgtggtggtgcgtgcctgtagtccagctacttgggaaactgaggtgggaggatggccaaagtccaggtggtcaaagctgtagagagcagattgtgcagtggcacaatctggggagaccctgccttaaaaa

SEQ ID NO: 627081 - DNA, 288 bp, Homo sapiens
gtcctagcagatactcacctagtcagtgggtctgacggcatctggctaaaaaaaaaaaaaaaaaaaagcacggggcgcccagcttccaccaaccagattttcaactcgggaattcccgggagatgcacaaaactccccatttggtaagctgtcaaagctgactcctttctcttcccaccctccacctccagtggggagaaatccaggctaaaatgacaattttcattataaagggggggaccaaggaggtgatctcttctgcacgagggggatctcctctagagttcg

SEQ ID NO: 627082 - DNA, 115 bp, Homo sapiens
ggtcggtttttccatctctgagccttgtttccttttctgtagcaggggggtgataacagcacctacctacagggcaggttgtgaccatgagataacatgcaagaaagcattgaag

SEQ ID NO: 627083 - DNA, 479 bp, Homo sapiens
cggtatattgcgcaataccgtagagctcagagatccagatctccactgaagttggcatcacacgatgtttgatctttccaccgtgtgataaggagtcagagcattggacccaaaactacccgtggtgacatacctcatgccaaatgccaatggtgcacattcatctgcagacatgccaccagaacttcgcctatggttcttccatgctggtacgattgttgaacactagggtgacttgagactcactcctacaccatgaacattttgtgccgacttccattaaccatgaaaagacttggtcgccagggaacgttgtgttagttttgttagccgagccagaacaaacaagaacgttgtaacaagttttggaacatgggtataaccctcttgcaaaggaacagattggaatttgactacttgcctcctggcaaccctacacttctcttaccttaatccattggagatgccactttgagcaa

SEQ ID NO: 627084 - DNA, 125 bp, Homo sapiens
attcaggtgtgtgcttagtaagaaatgaagccagtgctaccaaatgtacttgcttgtcacggctccatggttccccataatcaacagctactgtctgcagttttcaacatgctgcctgcctcaga

SEQ ID NO: 627085 - DNA, 150 bp, Homo sapiens
  misc_feature (139)..(139): n is a, c, g, or t
actgtgctgctgggccagagatgtaggctagttatgggcaacagcttttttgggaatagaaggcagctgtttcttatggtgcagtcgcgttggaggactggttttcaccgtccccgtgttaatttgtcttctcttcacncttgcagatcg

SEQ ID NO: 627086 - DNA, 412 bp, Homo sapiens
  misc_feature (36)..(36): n is a, c, g, or t
  misc_feature (132)..(132): n is a, c, g, or t
gatccaatttgtccagacccccagaggtagcccgtncctcacggttgccctctgtccaaggcagcctgtgactgagcatctggtggtccaggcagggccactgtcttgccgaagtcaatcatccagaccttngccaggccagtgtggtcatgcacaaagagaagggaactgcccactacctgcagcagagagtgagagaaaagcagttagagaaaggagcaagcactagctaatgtatttcccggtgagcagtaaacagggtggtaagacagcagaaactctggaatgaggctacccacgttcaaatcctgactctgattctacataaacagaataattgtataattacatgtaatgggcataaatcatttcaaatggttcctgaaacacaacaaatacacaatgaatgtta

SEQ ID NO: 627087 - DNA, 910 bp, Homo sapiens
  misc_feature (53)..(53): n is a, c, g, or t
  misc_feature (80)..(80): n is a, c, g, or t
  misc_feature (82)..(83): n is a, c, g, or t
  misc_feature (97)..(97): n is a, c, g, or t
  misc_feature (101)..(101): n is a, c, g, or t
  misc_feature (124)..(124): n is a, c, g, or t
  misc_feature (127)..(127): n is a, c, g, or t
  misc_feature (134)..(134): n is a, c, g, or t
  misc_feature (136)..(136): n is a, c, g, or t
  misc_feature (138)..(138): n is a, c, g, or t
  misc_feature (144)..(144): n is a, c, g, or t
  misc_feature (148)..(148): n is a, c, g, or t
  misc_feature (163)..(163): n is a, c, g, or t
  misc_feature (168)..(168): n is a, c, g, or t
  misc_feature (173)..(173): n is a, c, g, or t
  misc_feature (182)..(182): n is a, c, g, or t
  misc_feature (184)..(184): n is a, c, g, or t
  misc_feature (187)..(187): n is a, c, g, or t
  misc_feature (190)..(190): n is a, c, g, or t
  misc_feature (206)..(206): n is a, c, g, or t
  misc_feature (226)..(226): n is a, c, g, or t
  misc_feature (241)..(241): n is a, c, g, or t
  misc_feature (243)..(243): n is a, c, g, or t
  misc_feature (251)..(251): n is a, c, g, or t
  misc_feature (255)..(255): n is a, c, g, or t
  misc_feature (264)..(264): n is a, c, g, or t
  misc_feature (283)..(284): n is a, c, g, or t
  misc_feature (288)..(288): n is a, c, g, or t
  misc_feature (293)..(293): n is a, c, g, or t
  misc_feature (296)..(296): n is a, c, g, or t
  misc_feature (301)..(301): n is a, c, g, or t
  misc_feature (305)..(305): n is a, c, g, or t
  misc_feature (331)..(331): n is a, c, g, or t
  misc_feature (338)..(338): n is a, c, g, or t
  misc_feature (343)..(343): n is a, c, g, or t
  misc_feature (376)..(376): n is a, c, g, or t
  misc_feature (382)..(382): n is a, c, g, or t
  misc_feature (388)..(388): n is a, c, g, or t
  misc_feature (394)..(394): n is a, c, g, or t
  misc_feature (396)..(396): n is a, c, g, or t
  misc_feature (400)..(400): n is a, c, g, or t
  misc_feature (406)..(406): n is a, c, g, or t
  misc_feature (410)..(410): n is a, c, g, or t
  misc_feature (430)..(430): n is a, c, g, or t
  misc_feature (432)..(432): n is a, c, g, or t
  misc_feature (442)..(442): n is a, c, g, or t
  misc_feature (444)..(444): n is a, c, g, or t
  misc_feature (473)..(473): n is a, c, g, or t
  misc_feature (490)..(490): n is a, c, g, or t
  misc_feature (493)..(493): n is a, c, g, or t
  misc_feature (496)..(496): n is a, c, g, or t
  misc_feature (794)..(794): n is a, c, g, or t
caaaggaccagtctgcagagggatcctgtggctggtaagcgaggtagtgctcnacacggccgtttgcagctaccgtagcnannatctgggcattcangcanggttattgacccctccgaggctnttntggtgtntngntgctgntttnaggaaccctaatgcntgaangatgnttatatgtngntgntcnttggggtgcgccaccnaccagggccgcgtggagatnttctacagaggccantngggcactntttntttataacntgtgggacctgactgatgnnagtnttgtntgntgggncctnggctttgatgaactccacccatgctntgggcanagctncctttgggcaatggatcaggccccatcatgctngatgangttcantgcacngnaacngaggcntcanttgctgatttttatttcctngnctggctgaanancaacttcaggtacgatatatacgctggtntggtctgcaccaatganatnatnatcacccacaccctgggacctctccagggagctctcggaggcccttggccagatctttgacagccagcggggctgcgacctgtccatcagcgtgaatgtgcagggcgaggacgcctggcgcttctgtggccacacggtcatcctgactgccaacctggaggcccaggccctgtggaaggagccgggcagcaatgtcaccatgagtgtggatgctgagtgtgtgcccatggtcagggaccttctcaggtacttctactcccgaagatttgacatcaccctgtcgtcagttaagtgcttncacaagctggcctctgcctatggggccaggcagctgcagggctactgcgcaacctctttgccatcctcctcccccaggacccctcgttccagatgcccctggacctgtatgcctat

SEQ ID NO: 627088 - DNA, 149 bp, Homo sapiens
ctacagctacctcagtccaggctgcctgctgagatcctgtctttagctcacatacattccacggttgggggacacatttagtccagacaccgctgtggagattagcattttagtttatttcgcccactgctttaggcagtagtttagga

SEQ ID NO: 627089 - DNA, 1085 bp, Homo sapiens
  misc_feature (601)..(601): n is a, c, g, or t
  misc_feature (778)..(778): n is a, c, g, or t
  misc_feature (880)..(880): n is a, c, g, or t
agcgggaattagtccgagtggagagaccgagctgaatggttgtgtggtcgcgtctcgcaaaccggtgacgctcgctgcttggctgaccaagtgagtgaaaagcacatgcagacttcaaccagcaagcttttccactgatttgacatagagaatgggctgatggatactataaccgaaacaataggaggagactgtcggagaaaacgttcgtaccgtcgaagatactgctgtgaggcgacgcaaaatcttccacgaggacaggccgagatgtttcatcctcggaaccattcggattcaagttggacagtcaaaattcgctggacttgcgtacactgagcacaacattgtagctttgccctggaattcggcttgcaacttattgactggacatagccaacaaagtcgagaacgttagcgagccagtaagcggagctggcagaggcacaagcaacacatctatgcaggagaagtccattatcgcaggtgcttcgtgttagactccacaagggaactcgtggcctaacttggcgcatcacttcaactgtcaagcctcggttcttggcgtgggagaactgtttcgcccgaactgctgtattggagnacaaaacccatttggcgcaggcaggtacaggtttgacatcaggaatggaccaggacacgttctcggactcgcacactgtggcatgcgcagcgccgcaaaaccacggactcactgtgaacttgagttgcaccttgggttccagagagtccacacaacgttccattgccataccgcagngtttcttggtagactttaaaccatgtgggacttgcaaaccgacggctccagaaaaagctcgccagaagcaatccttttgtttaccgaggacacattatgttngctatcgagcacactttctcccttgtggttagtacacacccataagtgtgggttttctcatttgtgggcccgcttttttctccattggtagggtgtgtgggtatcacctctctggattcttctgttcattggagagcggtttgttcttcccccgtggaactgggtcgaagaccacaacaagaaattcattgccgagttggtaatg

SEQ ID NO: 627090 - DNA, 352 bp, Homo sapiens
aatacaccaaaccgttaatgaaaactttgatgtcaaaaggttatgagttgaatgcagagaaaatagagcattccaaagccgaaatgcagcgtttaattgaagtattgaatcagaagttaattgctaatcatggacgttactttgtcggggatcgtttaggtttggcggatattgctgtgtgttcgatgttagcacctgtgctggagattaaagggacaccttgggaaaaagaccatgaggaaagtctatctgaagcatttagtgcttataaaacctatttaaccaatttacccttggggcagtatgttttgtagacgcggccgcgaatttagtagtagtagtaggcggccgc

SEQ ID NO: 627091 - DNA, 356 bp, Homo sapiens
  misc_feature (43)..(43): n is a, c, g, or t
  misc_feature (118)..(118): n is a, c, g, or t
  misc_feature (122)..(122): n is a, c, g, or t
  misc_feature (127)..(127): n is a, c, g, or t
  misc_feature (198)..(198): n is a, c, g, or t
  misc_feature (213)..(213): n is a, c, g, or t
  misc_feature (223)..(223): n is a, c, g, or t
  misc_feature (254)..(254): n is a, c, g, or t
  misc_feature (272)..(272): n is a, c, g, or t
  misc_feature (349)..(349): n is a, c, g, or t
gaatatgaaggcccactcacagactgaccgagcgaacctgggnaccctgcgcggctactacaaccagagcgaggacggttctcacaccatccagataatgtatggctgcgacgtgggnccgnacggncgcttcctccgcgggtaccggcaagacgcctacgacggcaaggattacatcgccctgaacgaggacctgcngctcttggacctgcngcggacatgngcagctcagatcaccaagcgcaagtgggagngcggtccatgcggcgganagcggaagaagtctacctgggaagggcccggtgcatttgacgggctccgcaagattaccttggaagaaccgggaatngagacgc

SEQ ID NO: 627092 - DNA, 365 bp, Homo sapiens
tttcgctccatagctgagactctgattgacaaatctgtccagctcttgaatggttcttgggaaccagggcactgtgtcagtcttgttatctcgtgaaagctcatgcacagtggcaccaatgtcatgcctcaagatctcgataatgtttgtcagagcaggcaggctacgtttatgcatatgagtgagtgattcatactcatctttctttaaacgagaaggtctagattcaatgtaagtcaggttcacatcattctcctcagataagcgcaatactttgggattacagttgtcttcaatatagcctgtttcctgtccaaagtcagatagtttcatgcacaagcctgggttttccaggaccgcagtgg

SEQ ID NO: 627093 - DNA, 125 bp, Homo sapiens
ttaaggatccctgtggagacgggctctcacgatgatcaacgagattgagacatcctggccgacacagtgaaaccctgtctctactaaaaatacaaaaattagctgggcgtggtgcgcgcctgtag

SEQ ID NO: 627094 - DNA, 365 bp, Homo sapiens
  misc_feature (96)..(97): n is a, c, g, or t
  misc_feature (138)..(138): n is a, c, g, or t
  misc_feature (180)..(180): n is a, c, g, or t
  misc_feature (183)..(183): n is a, c, g, or t
  misc_feature (187)..(187): n is a, c, g, or t
  misc_feature (194)..(195): n is a, c, g, or t
  misc_feature (199)..(199): n is a, c, g, or t
  misc_feature (337)..(337): n is a, c, g, or t
tcttcatgccgtacacagtcgtggtaaacatatatttcacaggtgtagaagccagcaactacttggctgttatttgaaaaaacgttcatacgtttnnctactgtgatttgtatgaaaggtaacatcaaatcaaggtanatagattcagtaaagtcagtagtgttcagtaagatgatgtanttnaatntgtactnngganggttgatgagaacaaagtgggaaaacttgtaaacattgcccagattgtggacatagggttttttccacaattgttggtcttaccttatgcttgagcttatagtgatgttcttgtgtccatgtgtttatcttggtgatnttttctatagttgggattttcttggtgt

SEQ ID NO: 627095 - DNA, 601 bp, Homo sapiens
cgggatgtaagacccagctgatttctgtatgtccgtccagttgtttgcacttgcagactgtgagcaacagtctaactctctaaaagtggaacattgtggacagtttatctatggaaaacttcattaatactggtgccagcccattgaccagacacttgtagattaaccgctgacatgggtcacttaattgagtacaagatcacatgcagttgctttcatagtagccgatagccaatggatctttagccattagccccatgatttattatgcccatttcagtacatattgcaaaactgccattggaatgcttaaattaggcttgttgcgatgcttcgtgcctgtaatcccagccctgtaggaggatgaagcagcaggatcgcttgaatccaagagcctgtaaccagactgagccatagtacagcctagtctcttgcccgactcttcctacacgtagttgactatggtggcaatgtgctgtgagcccattggcgacccaagttctggtcgcagtatcgtttgagccacataggctcaggcataactgcattctaacatgccatcccagtgagaccctttccagctttgttttgcgggtttgct

SEQ ID NO: 627096 - DNA, 169 bp, Homo sapiens
ggatatttggatagctttgaggatatcgttggaaacgggattgtcttcatataaactctagacagaagcatacccagaagcttcattgggatgtatcaattgaagtcacagtgtttgaaccagtccctttcatagagcatgtttttgaaaccatctttttggtagtatc

SEQ ID NO: 627097 - DNA, 345 bp, Homo sapiens
  misc_feature (76)..(77): n is a, c, g, or t
  misc_feature (118)..(118): n is a, c, g, or t
  misc_feature (160)..(160): n is a, c, g, or t
  misc_feature (163)..(163): n is a, c, g, or t
  misc_feature (167)..(167): n is a, c, g, or t
  misc_feature (174)..(175): n is a, c, g, or t
  misc_feature (179)..(179): n is a, c, g, or t
  misc_feature (317)..(317): n is a, c, g, or t
cccatgctacagtcgtgagctatattcacaggtgagagcagcatctggctgtatcgacatcaacttcatacgtttnnctactgtgatttgtatgaaaggtaacatcaaatcaaggtanatagattcagtaaagtcagtagtgttcagtaagatgatgtanttnaatntgtactnngganggttgatgagaacaaagtgggaaaacttgtaaacattgcccagattgtggacatagggttttttccacaattgttggtcttaccttatgcttgagcttatagtgatgttcttgtgtccatgtgtttatcttggtgatnttttctatagttgggattttcttggtgt

SEQ ID NO: 627098 - DNA, 589 bp, Homo sapiens
gctgtcggcaggagcgacatgccattgactgccgggcggagtatgcctcgtcatgctggtcctgctagagcagctgggccttgccggtggcatgacctggctgtgcccccgtgtgtgtacagcagcagctggagctgtagctgggagctggctgcttgcgtggaaatccgcaaggagctgaagctgagggagtggtgctgagaacctgcgtgcgggccaccactgaccttggcctgcatgccttggcccctgtagatgcttgctgctgctgtgggctcctctgctgcctgcctcgacctgctgcaccatgcagctgcatgtgagctgcacgcccactgtatgtgcttccctgaccctggctggccacccacgatggcccccagtcccctgtgctgtggtttgccccacctgctcggccaccaacctgagccgctgttggcgggcctggagaagcagttggccattgagctgaaggtgaagcagggggcggagaacattgatccagacctacagcaatggcagcaccaaggaccggaagctgctgctgacagcccagcagatgttgcaggaccagtaagaccaagattga

SEQ ID NO: 627099 - DNA, 693 bp, Homo sapiens
taagggcccatttgagtatttggtttccaattagggaaatagtgggtataaggattaggatggtggtggaagtatagtacggatgctactggtccaaggagggtaaaggggtagcttacgggtggtcctccgatccaggttaaaatgaggaggtctgcggctaggagtcaataaaggtgatgggctatagggggcaaaatataatgcttggtagttgggatatatggaggatggggattatggctaggatgaggatggatagtaatagggcaaggacgcctcctagttggttagggacggcactcggaaaatggtgctaggcgacatacggaacatatcatgcgggctcgatgtgggacaggggtgtaaaggggtgggcaagggctataatgggtcggggtccgccaagggaggccgggtgagcaactccgtgtcaaggcacaattcaacggagcacaagcgcaccgaacacacgtacagccgcaggcgccgcccccgacatgcgcgtaccacagggagaacagggtgcatcgcaaccgggaagaggcaacgcgcgcacaccctaacgggggaggactgggacccccgcatcgcgggcacaaacatccggacagtgaacagagccgccaaagcgggcgcaacaacccgcacgggaacagtcgccccgaccagggctcaaaacaacgcgcaccg

SEQ ID NO: 627100 - DNA, 128 bp, Homo sapiens
  misc_feature (5)..(5): n is a, c, g, or t
tgtantggtagcaatgctcactgcagctccaactcctatgctcacgttctcctcatagctcagctcctgagtagctgggactacaggttgtgcaccaccacaccttgctaatttttgtatcttttgta

SEQ ID NO: 627101 - DNA, 870 bp, Homo sapiens
ggatcttatatttatttattatttaatttagttttagaagacagggtcttgtcctgatgcccaggctggagtacagtggcatgatcatagctcactgtggcttcaacctcttgggctcaaagtgatcctcctgcctcaggctcctgagtagctgggactacaggtgtgcaccaccacacctaggtatttttatttatttattttttgcctcacactctgccaagtctcaatgcctggctaattttaaaaattatttgtagaggccacgtgaggtggctctcacctgtaatccagcactttgggaggctgaggcaggcggatcatttgaggtcaggagttcaagattagcctggccaacatggtgaaaacccatctctactaaaaatacaaaaattagcgggcgtggtggtgggcacctgtaatcccagctacacgggaggttgaggtgggataatcgcttaaacccgagaggcagaggttgcagtgagccaagattgttgccactggcaacctccagccctgggcgacaagagctagatcctggcctcaaagaaaacaataaatttcgacccaccaccgggcaaaaagggggcccggcgtaaggtgccccaggcgggcacttacaaccctggcgctcaagacacgcgtctaacctgggccccaaagcggcggggacaccccggctgtgcaagcacaggacctcggctagaagagacaagctaacagcccagcaactaccgagcagccccggcgggtggcggactcagcccaaactggacgggtcaggcccacggccgcggaggacgggcagccccgacagtgaccctgcacaacaggcgagaccaacaaacgccgtgcagtggccaccca

SEQ ID NO: 627102 - DNA, 140 bp, Homo sapiens
ttttacatggagacctctgtacggtcttcagagtactgcccttgggaccgttcatcagctccagtgtatccaggtttgctgtgaactttcagactgtggcttcagttggcaaatgacattgccgttccacgttcaacccg

SEQ ID NO: 627103 - DNA, 118 bp, Homo sapiens
  misc_feature (104)..(104): n is a, c, g, or t
taggaggcacaggctatattggtgtttaggtggtctaccaaagcaccagccacagatagcttcgttaaggtcactttctcgtacctactggggaaacttccagncagacagccgtgct

SEQ ID NO: 627104 - DNA, 299 bp, Homo sapiens
aaattctcctgcctcagcctcccaagcagctgggaccacaggcatcccgctgtacgtctgactaacttttgtaaaaatagtagagacaaggttcaccatgttggccaggctggtctcaaactcctgacctcaagtgatccacccgcctcagtctcccaaagtgctgagattacaggtctgagccactgcgcccagccatgctgtgtgctttttagcattttcttcagtttttgttgcaacctatgagtcaggaactcttattatgctattttacctaggaggaaaagagcattcacaga

SEQ ID NO: 627105 - DNA, 392 bp, Homo sapiens
gcgtcgacaattccacaaaggtggaaacaatccaaatggccatcagtggctgaatggaaaaaacaaaatatggtatgatgcaatgctattcagccttgacaaggaaggaaatggacagggtgtggtggctcacgcctgtaaccccagcactttgggaggctgaggtgggtagatcatgaagtcaggagttcaagaccagcccggccaacatggtgaaaccctgtctctactaaaaatacaaaaattagccgggcgtggtagcaggcgcctgtaatcccagctacttaggaggctgaggcaggagaatcatttgaacccgggaggcagaggttgcagtgagccaagatcgtgccattgcactccagcctgggctacagggcgagactccatct

SEQ ID NO: 627106 - DNA, 173 bp, Homo sapiens
gacaactacaatcttgctaaaggtttcaattatcaccaaggacctctaagaatttcatttatcttctgagtttcagtttaaattatttttcagtaattttaggtattatggtttgctcgtctcttaataatctctacaggagtcgctgtagctataggtatatcacgtgcaaa

SEQ ID NO: 627107 - DNA, 232 bp, Homo sapiens
agctgggaccacagttgcatgccaccacacctacctaattttgtcattatttgtagagacagctactgcctatgtttcccaggctgatcttgaactactggcctcaagcaattataccaccttgaccttgtaaagtgctgggattacagacataagcatccatccctgtgctgttatttctttttaatgaaggcatttatagctataaattttcctcatagcactgcttttg

SEQ ID NO: 627108 - DNA, 262 bp, Homo sapiens
cagaaggatcagttgaacccaggagttcaagaccagcctggccatcatagtgagacaccatctctacaaaaaatttaaaacttagccaggcatagtggcacactcctgtggctgagataggaagatcgcttgaccccaggaggttgaggctgcagcaagctgtgatattgccactgcactctagccagggtgaatacaggaagaccctgtatcccaaaataaagagtttaataaaaatgtctaattcaggtacaagcagttc

SEQ ID NO: 627109 - DNA, 164 bp, Homo sapiens
aagggccctaatccccttcatgggggctcccccttttcccctttaaaaggccccccctcaaaatgctttccccttggggattagggttttaccctttctaccttgggggtgggggggcattacccttccgcccctccttgaggggtccctttttttttaaccca

SEQ ID NO: 627110 - DNA, 1346 bp, Homo sapiens
cagtggggggtcccccacgtggcgcacccctccggttggtgtggagttgtggtttattgcgccccccggtgtgttgttttgtctgctccgcgacgtttggtgaaacctgacgcccccctgtgccactctccgggggggcgttctcccgggtgtcctgttgttgccaccaggccgctttgttggttggggagaattgccgttgtgtcctccttctttcgtggggtgttgaataagacccgtgtgttcttgcccccgctgttgtgtcttcggggggagtccccactcttgtgagagaggggtgttctttccgcaccaatatgtgggcgcagtgaggtgttttcctccaagatggtggcagaaaatttgggggcgccaagaaataatactcggggtatactacccagggccgcccccctttattataagagggaaacaccccctagatgttccgctcgattgtgggtatatagtaggggatgatgtaaatgtcttcgtttttctccgctaaaggagatgaactactgttacaatattgtgtttctccctaatgtttctcacaaagtgtgtcctcctgttgtcccacaacattaaagaggtgaatagacacccactgtctcacatgtgtgaagagtgtctctcaaactacttttattagagaatacacacacaaaagtagtctgctgtgtgtctcacacctcatatagagacagtctctcacacaggtctccgcgtgttttctctcctcccgcataacagcgctgtgtgagacaccccacacacaccctccagatccccgctgggggtgagacccagagaagagtgtgtgtgtctccacaatgttgtaaggaggtttatagagaacacacaaagagagtgccccgctgtgagagatgtgttgtttatgagagagaagtggctcttcctcgagagagagtggggtgtgttggtgttcccttttgagaccctcggccgggttgagacctctcgggcgccacactcaaggagttcacagcccgcacctctctctccacaggagagagagagaggcgccttcccgcacttcacaccgctcgtaacacagtggcacaccccacggccctgggcacactgtcccgcccctctggctcacggcgtatccttttcccactggcacacttctgaacgctatactggaaatttttggttttctgaaattatactggctgtttaaccctcccgcggagatgtaagacccctcccgggcagagggcttgtttcttgtgttccagatgctgccatccccgactgctgggccccgtgccctggtccctggccggttccaataaataactgtttggatgagtgta

SEQ ID NO: 627111 - DNA, 190 bp, Homo sapiens
tgcccggcgggtggcgcgctaacatcaatcattttagggctaattgtgtgcccgccccgcctgtggggagtggttttcatatccttttttcgcctattccggccttccggtagaggtgtgtactccccgtgtgcttcgaacacaagtctcaaataaatgtacgggtactctttattaaccacgaataatt

SEQ ID NO: 627112 - DNA, 974 bp, Homo sapiens
ttttttttcgtactataactgctgagatattagtggatattgtggacaagactgagagaaaaaaagacaacttggtcgggctcgatatctcggataatatttccgtttccgagattgttggaaacacctctggctgtatttgccactttgtggtgcctatacaggctgggagtcacattgcgcgaaaggttcccttgcaaggtacccgcattagtacccacggtttataccgtttacaagccaaggttcccgtgccgaattttgttcccttacgggcgcgcgcaagttcatggtccaagcagaagccgcgatataccgcaccccaggggggcttaaattagctgttcggccactttgggcagaggcgagccagctgtagctccaggcgcatggggcatccaaccacgcggtgaggttgcaccaccgccaccagggcgccgcaaacagtaataccgcacccctcccgggcgcttaaaaaaatcggggtgcggccccccgcatccagaatagaaatattgcccgccccccgatgcgctcaatccagtaatatatcgcgagacccgaacatgaacccgtgtggggcagacaaatacgaaagtaagcatgattttgtggcacaaaccagaacacaagacggagtgatagcgtcgcgcccctcatccgacacccacattgtgggacacaccccttgtgcttcgagttctacaaattagtcggggttttcaagcgtacgccgcgcgtgcgccatttggccgcgcatcacacaatcacagaacacataggggtcctctcagaaaaaccacgcgacattgtctcgagataccgcctaacacccaacgagatcttccccgatgtaaacacggaacagggggagaacccctgcggcacgcaacgtgtaatgatgatctgggacaaacctccgccagagagaatttcccaaattctccaccccttccccaaaagggaacataaca

SEQ ID NO: 627113 - DNA, 111 bp, Homo sapiens
agttccatcgcgtcaccattttgtgttcttttcattttcttctctcttttctttttttatttttttctgtttttaacacactggggtgtcaccgtgttgccaggctggtct

SEQ ID NO: 627114 - DNA, 224 bp, Homo sapiens
agcggggccatcagccccctcggctcggctcgaggggcgggagctgcgcgcgcccatcggtccgaccgacaccctccccttcccgcccgtccgcgcgcccgcggccgcggccgcatcgccgccgtccttggagagcgagccggaccagttaaggaagcggagagagaatagaaagaagaacaacctaaaaatcaaaattaaacaaaaataactaaaatataacc

SEQ ID NO: 627115 - DNA, 183 bp, Homo sapiens
attaccagtgtaactagcactcctccaatccataagaagtctatgaactatgacaaggagctgtcaataatgtctatctgtgttttaccctaaacatgggttcagtggtcatgtctgcgctggtgttgaaacactttttcacaaccaatgattatgtatgtgattaaaacctcggaaatggac

SEQ ID NO: 627116 - DNA, 208 bp, Homo sapiens
ggcgcgcttatcgcgtcagcgatctcttgctcagctcctgagtagctgggattacatggtgctgcaccacatctggttaattttgtgtgtgtgtatttttagtatagatggggtttcaccatattgggcaggctggtctgacctcaagtgatctggcctcccaaagtgctggattacaggcatgagccacctgcgcccggacttccta

SEQ ID NO: 627117 - DNA, 497 bp, Homo sapiens
atggtgtatagaggatccttagctgagtccagtcagataaagatcctggagaacagctggaggagacaaaggctgtactgaatgcagctgtcccagatccaggactgattggagtgtggaggagcagtggccagctagctgtgagatggaagaagaagagccaggagtaccagatcttgctggatgtgaagacgcggctggagcaggagattgccacctaccgccgcctgctggagggcgaggatgcccacctttcctcccagttctcctctggatcgcagtcatccagagatgtgacctcctccagccgccaaatccgcaccaaggtcatggatgtgcacgagggcaaggtggtgtccagcaaggagcaggtccttcgaaccaagaactgaggctgccagcccgggtcaggcataggaggcccccgtgtggacacagatcccactggaagatcccctctcctgcccaagcgcttcacagctggaccctgcttaccc

SEQ ID NO: 627118 - DNA, 241 bp, Homo sapiens
gtggagttaaagtcaccgcagcggagatggacaaaccatgtgggtgccctccaggtgttttccaccatgaaatgggagattagcaggacccacgttggccaaccgtgggacctggtccctccagtaggagttgttagccaactgaatttgaatgcaaagatggagcaagggccgacttgagttacacttacataccaccccccatatacatagggggacagatcaaggaaacaagcaggag

SEQ ID NO: 627119 - DNA, 511 bp, Homo sapiens
agcacagagctcaatactggcactggtaaacccttgagaaaatgattaaaagcctctaagatgcatgcagttatgaagaaccaacagaaggtacaggtggcatgggacagcagtcaggaagcaatttggcttaaggaggaaggccagtgactcacagatggagtctcagcacttcccttgcccgtagaagtgagaaacaatacaggtagtcacagcatagtaaaaatttcaggccaggcacagtggctcacggctgtaatcccagcactttggggggctgatgtgggtgggtcacagggtgaagagatcaggagcatcgtggccaacgtgatgaaaccccgtctctactcaaagtgcagaaattgactgggcgtggtgacacaggcctttagacccggctactcgggggactgaggcgggagaatcacttgaacccaggaggagggggttgcggtcggtcgacgtcacgccattgcactccagcctggcaacagagcgagacgtgtcttta

SEQ ID NO: 627120 - DNA, 260 bp, Homo sapiens
ttccccctaaaaatcatgaaaatttgagaccattatatatggattacttcaaaaatgtacaaaagtccataatacccattcttccttccccccatcagtgtcagagtatgaggtatctttcctgttattaagggacattttaaaacccgtcctttaagtttatgatgtgtgatacacacacacatcataagaaggcacatttggcatttctttgtgttgttccccccccacctttcaccaacctctactcaattatttat

SEQ ID NO: 627121 - DNA, 974 bp, Homo sapiens
atcctgaaagcaacataattcttccttccctcctttgaaaatcgtgtgtacctttagtgcagcaattactcactaaagggcttcatattagtccagatttaaagtctgtgtctgcatctaacttagtgcctcggtttatttgagcccgagtatctggatcttatcatggtaaagcaatataatcgtactggagacccagaaattatttgggtcctggatttctgaaaataggtgggggggcatattatgaaatttggcaagaaactaatggctgtttgaaggtcagcagattgttattttataagatctaaaaattgatgctggtgtgattcaccggagatgttattcagagcgattccgagtaatgagttggagaaatgtgtgtcgacacttagcgaaatttatatgaggagccaattatggagggcttctgaggtgcgtgtacgatgggagaatgtgtgagtatccccgttgaggaatgttttttggctcgcgatgaggggggagagattagaggcgattacgggataactcacgtggggtgaagagcacacattgcgcttgcaggttaggcacactgtgtggtatagtagtcagaacgcataggtgagggctctctggaggggcggcattcctggataaaaaacagtggccctatacaccttcgtgtgtgtcactctggagacctactgagatgtcactgaaagggtatgaagagacgcatgtctgcgggaaacaatgcccaaaaccaaggaaaacgggctttgtaacaatccggaatgacatccggcacgcccccgttgggagcccgggtaatcggacataagtgggtcccccaagagggacacgacaatcccagagcactggcaagaggaagagaaatccggggtcccacaatactattcggacccgcgacggcggggagggagcctccacacaacgggcaacagactaagagggcggcgggaaattcc

SEQ ID NO: 627122 - DNA, 773 bp, Homo sapiens
  misc_feature (16)..(16): n is a, c, g, or t
  misc_feature (77)..(77): n is a, c, g, or t
  misc_feature (80)..(80): n is a, c, g, or t
  misc_feature (91)..(91): n is a, c, g, or t
  misc_feature (125)..(125): n is a, c, g, or t
  misc_feature (137)..(137): n is a, c, g, or t
  misc_feature (141)..(141): n is a, c, g, or t
  misc_feature (152)..(152): n is a, c, g, or t
  misc_feature (165)..(165): n is a, c, g, or t
  misc_feature (176)..(176): n is a, c, g, or t
  misc_feature (182)..(182): n is a, c, g, or t
  misc_feature (189)..(189): n is a, c, g, or t
  misc_feature (195)..(195): n is a, c, g, or t
  misc_feature (200)..(200): n is a, c, g, or t
  misc_feature (213)..(214): n is a, c, g, or t
  misc_feature (246)..(246): n is a, c, g, or t
  misc_feature (248)..(248): n is a, c, g, or t
  misc_feature (252)..(252): n is a, c, g, or t
  misc_feature (258)..(258): n is a, c, g, or t
  misc_feature (353)..(353): n is a, c, g, or t
  misc_feature (380)..(380): n is a, c, g, or t
  misc_feature (394)..(394): n is a, c, g, or t
  misc_feature (422)..(422): n is a, c, g, or t
  misc_feature (435)..(435): n is a, c, g, or t
  misc_feature (438)..(438): n is a, c, g, or t
  misc_feature (462)..(462): n is a, c, g, or t
  misc_feature (472)..(472): n is a, c, g, or t
  misc_feature (500)..(500): n is a, c, g, or t
  misc_feature (556)..(556): n is a, c, g, or t
  misc_feature (582)..(582): n is a, c, g, or t
  misc_feature (640)..(640): n is a, c, g, or t
  misc_feature (659)..(659): n is a, c, g, or t
  misc_feature (731)..(731): n is a, c, g, or t
gtgggactcagttcanacccccttatgaccactcttgtgtaaggcactgtgccaagggagaatggaggggggcaggnggngggtgggaggnggtcatgggggacaaacagaggtgggggtcagcnaaggactggggnaggngtcctccacangcccagtgccctnctgcacaacancctcanccccccncgccgncctcnggcctggccaggnncagacactttccagtgccccgaaataacagtngntgcngccccngccccctcctgccctggcacctgtttctactctctccaccaggtgggtgagctaggcagctctgggttattagccactgggggtcgctgcctcgncgcctccctccctcccccggtaagccngattttaccctccnttccctttttccggcttccctgccacantggtgctggtttntgntagatctgtgggccagtttggggngtgacctgcncccacacgcttggtgccctgggggtgcntgggccagtgttgcaggaggctgaccgctgggggctcctccatccgcacgcggatnacctggagatccagtgtcccgcggancccggaggggaagctggagaggggctctccgcccggggaaggcctccttctgccactnccctgtttttgggtgagtncttgctgtctgggcccctgagctgggtgtgggagaagagctgcaagacgaagccggcggggaagctgccgtnagttaagtgtcggacctcggctggtgctgcgaaagtttccgt

SEQ ID NO: 627123 - DNA, 775 bp, Homo sapiens
aaggctgtacggcccggatgtaaggagtgctggctaatttttgtattctagtagagacggggtatcgcatgtaggccaggatggtctcaatctccatgactacgtgatctgaccgtcttggcctcccaaagcactgggattacaggcgtgagccaccacgcccggaccactgtttgtgttttaaagtttttcttagggtttatggtttttaatacccccagagagtactagacagggtttatttttatcttattttatttatttattttatgagacagggtcttgctctgttgcccaggctagagtgcagtggcctgatcttggctcattgcagccttgactctctctaggctcaggtgatccttccacctcagactcccgagtagctgggactacaggcgtgtaccagcacacccggctaattatagtatatttgtagagacggggtctcactgcattgcccaggctggtcttgaactcctgggctcaagtgatctacgccgccttggactctcaaagcactgggattataggcgtgagccacttgtgtccggtccctgtaggtttagatgttttttgggcacggaaatatgatactatggcccaggcaggaactcgcaatgggtcgctgacaaccagagaccacgtgccaacaacgtgcactactcggagatccaagcaacacatccagccctgggacctacccgaagaagagtggaataacaaagagagagcaaaaaacacaccggaaacagtacaaggacacaacgacaag

SEQ ID NO: 627124 - DNA, 135 bp, Homo sapiens
agattaatgattacctgagtcagagccatcaagaaactaagaggcacttggcactggcttcggcatcatccctgatgggcgactcgtaactcattcattcagttcctgttccaacccattgatggctcacgccgg

SEQ ID NO: 627125 - DNA, 779 bp, Homo sapiens
ggcagaagatggccgctgtgcgcccagaggcccaaagtcggagctcaccgatgtccgagagtctgctgatcctcaaggagactcactggaccttgagtccgtgtgtgcgctgtatgacatgcacgtgacttgtgaagcaccgcgccggagtgacgctcagtcgatggatccaaggttgcgtgatagggtgtacggaacactctactgctgttgtcccttgatgcacccacggaagtccagggttcatgttccagactgttgccctttgtggcccctgcttgctcgtatcccggccgtgtgttatccggaagcttggcgtggttcccacggacactatgtgcacagcttgggccatggggtgccagaagggtgaaggctgtgggcaagcggtggtgaggaacctctggagacacgtgttgcacactgattgcttgcagagctcaacaagacgtgcacctgggagacacaccggctacaggacacatgacagctgcagacaacttaaccagcgtgtgacaacaacacggagggaaagcgggcacactaaccggcatgcacgcgagcatctgcacccacgcgaccattttcacagagcacatatgggatgaccccccatgaggttcccgggcgaccaagacacccgaggcaacgggaggcgtgggcacgcccgggacaaccatcatccgggaagagccctcccgggaccacatgacgagcgcggctggcaggcaagcaagaagggcccggcgggttgggccccccggaagaggggcagcgaa

SEQ ID NO: 627126 - DNA, 708 bp, Homo sapiens
ctgctgtcaccagcgtcaccctgcccggctcctggcatctgacttcttcgctctaggcggtcgcctatcgttatagcacgtgctgcacgagtcgcttcgtccgtgatataactcagcatctacccatacaccaaatcgtcccccatacaacaccaagtactaaagaacttatgtcatccattgatacagtatgaattttctccactccacttaaagaccttaaaatgagggctgaatgtgtagagaaaagtttcgcctgtgccataatagtggtcactgaacttgaaaggatgagttgcatgtgctccaaaaatctgattatccatatctttgatgaccaataggacaggactgtctagtgatgccgattaccggtagagcgtcataaagctggtcccgtgctctaacgtgctataggccagtctccatggatacccttgcacccttgcaggaaggcgtcgggccagctgctcgatgtgcatattctccaggagcgcgctgtgaggccgtaggacaggcagcacctcttcgtcctcgtcttcatagtagctgcatgtgatctacctgcgctaagcctcttcaccagtgataatctacacaaaaggatctacgtcaggtctggaacaatagaaaatctagatttccccttaaaatggaagacgggaacgaacacaaatagaacatggcctacaacaccaggggacaaaa

SEQ ID NO: 627127 - DNA, 251 bp, Homo sapiens
gaacaaggcaggttgcccttgggcacgtccagcctcaactacttggaccccaggatcagcattgcctggtgcaagcggttcagggtgccagtcgagaagatctacacaccaacacagcgggagaggttcgcctccgtctcgccatggcaggagaagactttgaattctaacgacgagccgcgttgaaacttctttcgcatgtgtgtgtgtttttctcactattaaagcagtcctggggaattttgtacaat

SEQ ID NO: 627128 - DNA, 634 bp, Homo sapiens
gggacactgactagacttactacgtgaaggaggtctcttactatcaacaggttaattcaccatttcaacaaatctctcccggcagcctactaagctttttctttaattaagtacctgatttacacagcagattttactcattggaggactcaagtcatgtctaaacagataaaggtatcagctcaggcatagttcaggtacctggtaaatgcaatcagagttgttctgcagggtaattcagttttagacatccatttctaaaaacgtgttctgtctgaaaatggaggccttaataaccaatttctcgttattcagaggccagttatctagtatatttatcaagattaggcagtcacctggtttttcactcctttctaatctctctgactgtttggtggttttaaactcatgagtaagataaggagaagaaaaacagagaatgtacataaattaatggctaaaatgaagtgttccttggcatgtttctttttcttatgctttatttctgtgactcatacggagctgttagaagtgacttcatataatattatacagtgtaataaaatgggtttcgatgtgtgaggatccctcatgttattagattatggaacaattagaactcagacagaatatt

SEQ ID NO: 627129 - DNA, 98 bp, Homo sapiens
atcactttggcttcgaagccgccgcctgatactggcattttgtagatgtgttacctactttcttgatgtcctcatttagcctcccttctctttttctc

SEQ ID NO: 627130 - DNA, 792 bp, Homo sapiens
  misc_feature (367)..(367): n is a, c, g, or t
  misc_feature (662)..(662): n is a, c, g, or t
ggtagtccaggatttggttttcggtggtcggttgggagaccctgcatctttgcccgtcccagcctgtgggtgagggcagaagtcagccaggcaacctccccctgctctgggaggggcttaggacaggacagaccatcctgccaccgatgccttgttcctgagcctttgctgggagtcgccaggcaggcgcttgtggaaggaaggtgtcccttaaccccactgccttgcccaccggacagctgggacctttcctcagcaaccagtggatgcggacgttgagctgcctgggtcagtgcagctggccgggccccggagcctgggtccactctggacactgggctgtgggccctgtggctggcccaaaggnagctgccagttgaccatgggctttctctggctttgtgaggaactggacctcctagctctctgctcagaggaggggagcgttcaaggtggggcatggtgatccttgacctctgaccccaaagcctgtgtactccactgctgcactcggcgggctccaggcaccaaggaggagagctggggatgttgaaggtccacaggctacacattctggaggggtgtttggtgtggcccttggccctgcaggtgctgggtgccagtcagcagcacggctggcggttcttagtgttggaggctgncctatgtcgactctgcagggctggcccgctggagaagcagtggtggggagtggcctggctcgctggagaagcagtggtggggagcgggctggcccgctggagaagcagtgcccaggctgagcggccgcaa

SEQ ID NO: 627131 - DNA, 980 bp, Homo sapiens
aactcttagatccgacgagcaaggcaatggcatgcccgtccctgagcacaaacgaaaggatggagtgcttccgtgcgtgatgacacagacatggcacattataggatcagatagccgcatgtgctagtactcagcaaaatctcagaagatgcagatccgaccctgtgcaaccgagaggttgtcgccgcaactacaataggtgcgggaatggcgacaatgcgtatgcgatggacattactccttagtgatggataagacgaaaacactcatatctccgaggagtataccgacggtagtgtaccagtatgctgaaatgtccgagtgggcgagtgcctgggacagaggaaggtggtcaacttctcttaatgctagcctgacagtatgaccatataaggggcggtaaggtcgactcgagaagtactaggagcgtcatcactggtgcatgtagcatgaccccaacaatgcgctatgcagaagagagtgctagccatgcctatccttgcgtgccttcggtcatgaatcatgtgcagaggggtaaccgtattgtgcagaggctcgaacgacaggcttgggatttgaaccaatgcgtgacgcataggtagagccagtaatatttgcatgggggtaccccccaaatcgtgaaaggtctagctaaaatgaagcgtaaggctatcaacgtcctggttccatggacaagaatcaattaagaagcggagattgtgttgacagaataacgcgtttgatgtgcttcgattatcttggtaaatacgggatcatctgggatggaggatctgattcattgaagatcgtatactgttggaaaaggcttcaaagaggcagatatttcctgtggcccttacaaatggtctttttgcaacgaagggggatggacaaaagaaccaccaatttggggaaggtgtagatgctggcacaggggggaccgaatcaagggctattgaaaaatgaaaagggttacacag

SEQ ID NO: 627132 - DNA, 433 bp, Homo sapiens
tataggatctcgtgcactgctcggatgggtacagggagataaaaaaagagtacgtggaacccatacgaatcccagtgagagagggccagagcaccggaaccagcagtaggaattggaaaaccaggcgtggcttcttcccagaaatctcaggcatcaggaggcagaaacccactccccagactcagcttggccaggaagtgctgctgtgggctggagaggatgggtctaggccaaggtgaacatgcagagagctggctgctcacccttcctccaccccataaagtggtctgagtaacaagagcagctaggcagcgtccaggagccagccctgtacaaggttgggtccctttgactgtgtgaccacaggccggagacgtaactcagggtggagctcaggtcacacctcacttacacacatacgaagcaggtgccg

SEQ ID NO: 627133 - DNA, 212 bp, Homo sapiens
attccggctctctgtgatctgtctagcttttagccacttcctgtgacctcactccctgttgacagatggacattgggcagctcggccttctgcattgatatctgctgtttcgacttggtttgtcttgtccaatggtgaccatagacccaatctccagggtctcatggtatgaagtacaggacgggagattggggaagtgctggggcctgaag

SEQ ID NO: 627134 - DNA, 1235 bp, Homo sapiens
agcgggccgcacacgactcccagtgtggccgaggacggtaagggtgcaggcgaggaaagcggccctgcccttctgtctctgctcccttcgactcgtacgtctgttctaccctccgtctggaaggagtggaacccatgatcgtatgctcggtctgactccattgctagattgagcacatggcatggcatagagaccatcctggtgcactgcgtgcacaggaaagctcgggtgccggatggcacacgtctccgaggaatgagcacccggcggggaccgcggtcacaacatagaaggtggcccgtgggtaacgggcatccaccgaacaggtactcggctgtctcgcccatcgacccgaacgataggtgcccgaggacagggcccacacggtggtccgtctagcgagaccggaaaagccagacgagtaatgatggacacaagcggagagcacacacatgcagggcgtgcagagaggcctgcagagcgtgtgacgcgtgacacctgctgatgtctcatggtaggagcgcaacggcgtgtgagcgaagccgagagaagttcgcgccatggaaggcccgatgagactagatcccagaggccttcatgggccagaggtcttcgcactattcctagattctctcaatgactgacctgctgcagatgctcctctatccgtttgcgcacatgcgctaacttggagatgtccatcccagaagggacgcgctgatggcgcacacaaggagctcatgggaccactatcacgtgctgaacagggtaccccccaggcccgcattggaattgacgaacacagaggcagagttgggatgccccagcaaactgggaagaaacacagacgggagcgccaggcgtccacgatagggtgagatcctagcgggttcgtttccccaattatgcaagggaccattttgcaaggttgccaacgtccttgcccattggggcatatccacaggttcccttataagcgaataggtgcaggtgcagagaagccacggtgccgttttgacctatgggtggcccttccataacgaataaacccgccttggggccacacttaggaacgcttgggaacgccccaaagtgggaagccatttccatgcggttggaacacctagcacgtgggacaccttgggactgtagatttcagcgagactaacgcgcttcaaacgcagggactagctacatcgaactgcgagccaaccggagaacaacaagaggataag

SEQ ID NO: 627135 - DNA, 304 bp, Homo sapiens
tggtttttgtttgaaattgcattcaattggtaaccgaaacataattgtcattttaacagcactgtgtcttcctgtttagggactgttatggttggcgttttacctatggctcctgaaaaaattttaccgttttttgttgttttgtttttaatacagagccctcatattagccattgaagttttgatgttattttttgccttgtgttctgcttatcccctaactattttattcttttttcatgtctagaactttttcttaagttaaatcattctctggatttaaaataaagaaaatttcctttta

SEQ ID NO: 627136 - DNA, 142 bp, Homo sapiens
tgctatagtcacgtgactgagctgtagccaatgggatgtgagtgatgtacaccacttccaggtctggcctataaataccatccgcatggttctcctccatgagttttcctttcccatcccttggcagagatatgggtaccga

SEQ ID NO: 627137 - DNA, 435 bp, Homo sapiens
ggaatgcactcatgaataataggtaagaaaaatatgcatttaatgaaatagtagtcatcaatgtgtacttttggttctttgaaaaaatgtgtttaaggaggtaaaatcttcccctttgtctcgatgagctatttgtttcatagtagcttacacattgaaggcactcaatacctaataaattgtgcattttttgaccttatatctagttcagaagtccataaataaggataaattgtttctagaaagcaaatttgagaaataatgagttaaaaaaagaaaagtggccaggcgcggtggctcatgcctgtaatcccagcactttgggaggccgaggcgggcagatcacgaggtcaggagattaagaccatcctggctaacacggtgaaacaccacctctactgaaaatacaaaaatttagtccggcgttgtggtggg

SEQ ID NO: 627138 - DNA, 150 bp, Homo sapiens
gtatccatcctggtcactgagatcttaattcatactacattgcaagattatcttatgtgtattatagtaaataggagatctacagattcaaggctcctaagagtttgatttggctctgtttggtcctaaaatagaatattgtctctccca

SEQ ID NO: 627139 - DNA, 430 bp, Homo sapiens
tcatgcccagtgctagtatcctgacatagagctattgctcatctcggcagtctacgacgtatttatcaccagtcccacagcactgatatcgagatacttatgtttgtgcacaatatccactgtcatgggattcaatgctgggccctcaaggctcccaacagaaatgactaattctacttggaatctccagcgccttctcccctccctaaactagttccacccaagcccaatcaaaaagtcccagagcagaatctctctcctctcataaatcccctgggttcaatttctacaacttgtctgaagctttttgagggcagacttgcaaagtccttggagaaataagtagattggaaagtttgtgggattgtatattttacacaagttggatgaaaaccaaatgaattgagttagccaaattgaagacaatttc

SEQ ID NO: 627140 - DNA, 303 bp, Homo sapiens
ccagccatcgaggacatctagaaaccaagtgaagagatttcaaggtagcagtgataagccaaaaaaggtaaaaccactgaatcatacaacatgtgagtcactgggcccttaattgagctgttttagtactatactaaccatcgtctaagaattcataactcagtacctgttaggttttctgctccttttgaagatctcttattttattctgttggtggcaagccctacttagtgattcatcctccaattcacccattttggatttcacactttccctaattttgttccaagtcattagctcgt

SEQ ID NO: 627141 - DNA, 971 bp, Homo sapiens
gaaaggagccaagagcatggcgaaaggccggggataagagcagcaggagcgggaagaaaagtctaaaaggaaagccgctgcgaagaacttcaggaggctgcaggcgctgtgggatggtggagacggaaaacggggtgcgatcacccggctgaagagtggctgtcgtttcctgcgaggcttttagcgatttcgggagattgctcatcgaaacggagcggcagaacaggttaatgttcaccgctggtggaaacaggctgcaggtggacgggaaaaagtggggctagttaatgaaaaaaatttaaaaatagagaaagagaggctctgggggatgaagggtcgaacaaaaagcctgtaccgaatgatcgatggagcaaccagcgggtgtattgatcgagcccataggagagcctaatggatggacagagggcgctcattgatgacacgctcccagtctgaaatttgcttcttacttcaaaggaaaacgagagttctcccgagaggattctcatctagcaataatcgagataagacctcagggggagaacgagtacgaaccctgtgaaccagctcctccacaagttaataccaaactcactgtgttgatccaccggaacgaggacgtgtgtctggaaagaaagttagtccacacggtgcatcgcacgagattttcacagacctgatggggcttacgggagatcgtaacacgcacagatggcttcatttgaggcacttgcagatggtcaagtggtcattaaagatgagcagggtcgctcgtacagacgtagagcgagggggccccacagaacaatgctggaaattctggaatatttacagaccggggcatcaacggcgtttgggcacctttcccaaccacatatcggaggggtgcactcccacagggagcttccatcagctaccggaaaggatggcggaccacacacgtctcaggcttcaaaaaccgcggaaactct

SEQ ID NO: 627142 - DNA, 251 bp, Homo sapiens
ggggaaaaggttttttcccctgcctagctaaccagtttggggagagcatggggatcctttttatgggggtgggtaatctggccagtaagattgagacttagttaagattccccttggaaattccttaatgtttattagcttctaactagggttgtaagtcccatgcccgaatttggagatttgggtttttcttttcaggggtttttttccctggggctaataagcttcctaataaatccttgcccgcctta

SEQ ID NO: 627143 - DNA, 102 bp, Homo sapiens
ccgttaaatagtactcgcagtgtgcgctgctgcactcatgaccctcgagattaacggtgctaacccctgtctgctcctccctcccgcagagactggtggcct

SEQ ID NO: 627144 - DNA, 1008 bp, Homo sapiens
acataggacaatggagcatgaggtacttcatcgtataattcatgatgagagcccagtggtatgaatatttcctgtagtgtactggtacagacctgatagaccaaagcaaagtgttcgcgagattacgatgcgattctctggcgagtcgtgcaatatcacaggggccttcgatgcatggagactgcaactcgcaagtgccattcattgtaattctctgcacacatgttgtagggagcatggacagacacgaagattcgtgagcaccgatgaagccatactatggagaaactcttgtaaccttcttcccatgactcgcctaggaatgatgtgtcgacgacgctccatttaaacgtagctctaaagcttcagaggttggttgtaccaaacgatacaatctctgacctgaaaagaaagcacgatttacagtctgctcgagtgctcatagaggtccaccgtctccactgccaagaccccgacgcacggtcgacgtttgtgacgagtgatagtcattggacaatgcggaagcttatgaccttgacaatccgggtagctccgatcgacgtagaacctgcgactctgcgaagatgcgtctcacgattatggaacgatgaagggagatcccagcgtctcatctagccatcgcgggcgacagacaatacgaacagttcgggctccagacaaggccgtgaaatttctgttttaccagactggggtaataatatcttcctcccaacggccacaagaacgtgggggcgtcgtgactacccccccgataaacttatttgagcaaaatctactaacgacgaattaagaacgttgtcccggtgacggaacccaatcgattagttcccagtaatgcctggcttggctaatgcacatgtacggcccaatggcacctttccgagttgatggcgtgcgaaaaccccaaggacatgggacttgggggcatagggagacacaaacgggaaggctgaggatccgggagttatagaagcaagtacattcaga

SEQ ID NO: 627145 - DNA, 882 bp, Homo sapiens
aactcccgggtgtttttaatatagttggaaggcaacaatattatttggtggcgaccaccgcgggggcaatcatttgtgaggttataacacagaatgtgatttttgtgcgcccagacacaggtggtgggtgtgtttcataccctgagttggaagaggacacacaacacatctttgtgccgcattttttttatatcaagaaacaagaggtgagataaacaacgcaggtttttttttacacaagaagggggggagacacccccacactccctcttcaggagaacaccccacaacactttttgggggcgccccccaccccctattttttttgtggggcaccccgcagaaggaaaataatcccccaccccacacccaccacagggggagcgaggaccattgtgtgggacctcttctaagagagagattttgttgcggcgccttatcctcccaccccctcccaacaacaaataaaaagagggagaggtggggttttattatctccctccaagagagagtgtgtgtgtgtgttattataacacaccacacacaaaaatatattatctctcttctttgtgggggcgcccacggctctctcacaggacagagaggtgtggtgtgtgagagatagaacacacaccacgccgttcacaccccccccgcgagaggagagaagaagaagagagaaaagaaaaaccccacatatatcatctcccgcgcgcgagaaagaaacaacccgctccggaggagggggggcgcaccaccccgcgagaaaaaaaagagaggagagagaaaaaaacagaacaaaaaaacaagaggttttttaaccccccgccccttgtgtgtgtgtgtgtgccccccacaaaagggggttttttttctctctca

SEQ ID NO: 627146 - DNA, 244 bp, Homo sapiens
gtctatcagtggcgtcgttttcattgagtgaaccacgtatagactgggcgtgattgtgacccaggcctgtgacagtccactcgcaggaactcttggatggtgctccaatctccgcgttttcctgtgcttgcaagctcagaagccagaggcgggttcggtagtggctaatgggacaatgtgctgtccagcaaagcacacattgagaagcggccccaaaattcccaccttgatttcctgcctgcat

SEQ ID NO: 627147 - DNA, 1094 bp, Homo sapiens
  misc_feature (485)..(485): n is a, c, g, or t
gtgtctacaactatacaaaaattagctgggcatggtggtgcgtgcccagctattcaggaggctgagctgggaggatcactcgaacccaggaggcagaggctgcagtgagctgagatcacgacactacactccagcctgggggaccgggcaagactctgtcttgtcttttaaaaaaaaaaaaaaaaaaaaaagcagtgggacactgaggggaggtacgacagtgcaataatagtgcgcttcatcccattttaaccgagaaatacctgggagggcattattcgcgaagaaatttgtgttaagtgcgccccgagggagaaatcctttaccaggtggtgcctatttaaattacagagaatgtgcccaagtgtgtgtaacgaatctcatttattgtcttaacatatagcgaaaccctatatttcttacacaaatataattttccatctatctatgtgcgtgctatgtgctttttttccgcgtgttccccnccgcgtgttgctgtctctctgggatttacatattacctatacaaacaacaccacgcgtttttttcttttcacacaaaggagagctattctatatatgcgggggcgatatatatttttccacacactcttctctttaaacacacaccctgtggggggcggtttttccccaaaaaccacacccgcaattttttcacaaacaacacaccaatctttattttctccccagctggggcggaaaacaaagcgtgtgcgggtttcaacaaagcgcgcgtaacaaagagaacatttcttctcaaaagacctctccacccatattaaataatcttacgaacgggcgggcgtaatgttttctccccccccgcgggggaaaaactgccccctttttttggtcataatataaagtcttcaaccacagcggggggctggcgtccctatattgtaaggagctataaaaaaaagcactgaatcacaacgaatcaaacacgaccaatgacaaagaacatgaacaaacacaactcatgggtgtgggtgcgggacgcggcgccatcaatggggggcccccatcgtatgaaggaagaaggaaggagtttttcttaagagaacaacacc

SEQ ID NO: 627148 - DNA, 522 bp, Homo sapiens
cctacgtatctagttcactcatctacatcaagcaagggttggtggactaggactctctgaccaaatcctgcctgccaactgtttttgtaaataaagttttattggtacgcagccataattcatgtatgcataactgctgtcatgctacaatggagggttgagtaattgacctacaactcctgaaatagtctctggctctttctagaaaacgttcctgacctgtgacatagagcacagcactatcagggccaagggcacaggtgttgtccctgtatgctcccttcagcgtggctttcctcttcggccattgggagcctctggtattgagtgtgcatctgttgggaaacagtgagtggagaccctggggacgccctcctctgtgaagcagcaacttaacacgcaggtccatgccatgcggatcagttttgccgtcttcatatacaaagcccatttggtgttttgaggaggggtatttctccatatactaatgagtctgtgaagcagctatttcctccttccttg

SEQ ID NO: 627149 - DNA, 555 bp, Homo sapiens
  misc_feature (208)..(208): n is a, c, g, or t
  misc_feature (297)..(297): n is a, c, g, or t
ccaggttcaaggcattgttgctatcggggactacatggccccgtcggtctgggtgttaagtgctccaaggaggtggcccccccatcccgtggggccatcattctggccaagctctccatcgtccccgtgcgcagagggtactgggggaacaagatcggccagccccccactgttccctcaaaggtgacaggccccttcggctttgtgntggtacgcctcatccctgcccccaggggccctggcattgtttccgcccctgtgcctaaaaaactgctcattatggctgggatcgatgantgctacccctcagcccgggggtgccctgcccccctgggcaaatttgccaaggccccctttgatgccctttttaagacctacagctacctggcccccggcctctggaaggaggctggattcccccagtttccccatcagggggtccctggccccctcgtccagaccccccccagagtttccgtgcagcgggctcagggtcccgctgtgggttccacataggggttttataccagaaaaataaagtgaatttagggtgga

SEQ ID NO: 627150 - DNA, 434 bp, Homo sapiens
  misc_feature (133)..(133): n is a, c, g, or t
ctcggaacgctatccaggattacgcatgaccaggaatcagaatatgactgggaaagatgattgactacggaaacatgctgtgcatgaggcgtagaacagcatttgaccaagtaacaggtgtgcacagaaagancgagtaatattcaaaattccaaatttatcactaaggagcaagaagaaaatgtggccctaaagggggttagttgaggggtagggggtagtgaggatcttgatttggatctctttttatttaaatgtgaatttcaactttggacaatcaaagaaaagacttttgttgaaatagctttactgtttctcaagtgttttggagaaaaaaatcaacccgtgcaatcactttttggaatcgtcttgatttttcggcagttcaagctatatcgaatatagttctgtgtagagaatgtcactgtagttta

SEQ ID NO: 627151 - DNA, 411 bp, Homo sapiens
  misc_feature (37)..(38): n is a, c, g, or t
ggtacgacaaagtattaggaactacacacatcaatgnnaaaatggaaaaatcacattctgtttttgaaaagtgatcttcccatgaacatattttcagtgacattaagagtttcagtttaaagttgggtatggtggctcactcctgtaatctcagcactttgggaggccgaggcagaaggattacttgaggtcaggagtttgaaaccagcctggccaacgtggtgaagccccatctctactaaaaatacagagatttcccgggcgtggtggtgggcacctgtggtcacagctgctagggatgctgaggcaggggaatttcttgaacccgggaggcggaggttgcagtgagccgagattgcaccattgcactctagcatggtgacagagtgagactccatctcaaaaaagtcg

SEQ ID NO: 627152 - DNA, 268 bp, Homo sapiens
agcgagagaagccccttatgggtctttcaactctcacatctatttagatgcaatcggaggccccgcaagggaccaccatgtcaatttaaaggtccggaatcaaattagcttccagggtttaaggcaattattttgggaggtggccagtcaattaaaaattgagggttaggtaacctccaccttttccacccaccagcattgagctttccatggatttgaaaaaaagaaaaacccatgtcagccccagcctggggctacctgacctgac

SEQ ID NO: 627153 - DNA, 346 bp, Homo sapiens
  misc_feature (164)..(164): n is a, c, g, or t
  misc_feature (209)..(209): n is a, c, g, or t
ttaagaaggagaacaaaaaggcgcacacatcccacccgaaccaagataggtgggagaaggcgcttttgccatatgagtgtgaacacaccgtgtccccaagtgttttgcgtgctcccgctctgtggtgcaggcccataaagccttacataggtgtttaatatctntccagagaagctgcgcctgggagacaccgtgtgtgccttgtgttngtggatttctttcctaggaagaactttaattcctcctgaggagactctactttttgagcccaactgctaatttttttgcggaactgtttagaagatcattccagagaccctgcagttgcactttctcgtaaaagtta

SEQ ID NO: 627154 - DNA, 261 bp, Homo sapiens
gacatacaggtcaccgcattactcactgtctcccttcttgccacctaacctcactctgctatcaagatatgaagaaattaccaaaccaaaaattaaatctagggggccaggcatggtggctcatgcctgtaatcccagcactttgggaggccgaggcaagcagatcacttgagatcggagtctgagaccatcctggaacatggtgaaaacctgtctctgctaaaactacaaaaattagccatatcttcttttattttcttg

SEQ ID NO: 627155 - DNA, 357 bp, Homo sapiens
cattttgcccagatgtttcccatttcacaaatgagggaactgaggttttgagagcttcccctgaggactttgcaaaacaaggtggtgtctggtttggatgaaagtggtcggtgattcctcaaatcctgccctgcctcccttttctggttcctccctaacatgttaagctcttgttgggggtgggatgccctaggcccaaggttaccaaatcctgggtttggaaaattgctgctgggggtgggatttaggaccaaaaaggaatttactatttttactgtgaaaaaattcagcagggggtttttttactttttccctttgaggacaaagtttttttcgaataaaaagactgaagcaaga

SEQ ID NO: 627156 - DNA, 934 bp, Homo sapiens
gcatcttgtgcgagaagccgagcgccgactcttctctcgcgcctcgcctcttcctccgcctcctccttcgcctcttcctgcctcctcccggttccgcgcgtcactccagcctaatcccaagcaccagtgtgcgacgcgttcccttattcatttccgtttatctcgcccacctacccagcctcctgaccaaggttgatccgtggcgggcccccgcccagcgaatatagataccccgctccacgcggctccacactagctatcgcatgtccactaaattccagagaaacctaccaaatctataccagaccacccttttggactggatgcaattacagggttgaacggaccatttagcttccccggaaggggaaaccacggaggggaataataccacttatcgaattaatacaacgaacactaccatgggcaacagggtggaaagcggaggcaatgcaaacaggacacacgcgggacccatacaccgggctaccacgggggccagtatcgcaggacatcgacatttccttagaccacaaaacaaggaaccacttttgatgagaaagagtcgtttagacaaaaaaagaaaaattagtcggccagtgatacaaagggcacgacaccgggctcgacctaagggaacgccaccccgaggccaatctacccggcaagaaaggcgatatacatccaccaggcacaaccaacaaagcgggacggaacccacaacactgcacaaacacgaacgactatcgtggggccgcacgacagtgcacatacacaagcgacagcagcagggccacattcggcaaaccgggcaacggacacacagccagcgcaaggagtactaaacgggacagctccacactccagtggacacacctcaaacaaacgtggtgacgacatcccacctaggccacacggccagggcacacccaca

SEQ ID NO: 627157 - DNA, 118 bp, Homo sapiens
  misc_feature (26)..(26): n is a, c, g, or t
  misc_feature (68)..(68): n is a, c, g, or t
  misc_feature (92)..(92): n is a, c, g, or t
gatctactcccagtttttaacttttnacagaatattgttgctttcctacaacaatgtacatatatttncagttgtatatgcttttttttttnccaaataaagtttgagttctaaactc

SEQ ID NO: 627158 - DNA, 890 bp, Homo sapiens
  misc_feature (1)..(1): n is a, c, g, or t
  misc_feature (65)..(65): n is a, c, g, or t
  misc_feature (235)..(235): n is a, c, g, or t
  misc_feature (372)..(372): n is a, c, g, or t
  misc_feature (409)..(409): n is a, c, g, or t
  misc_feature (415)..(415): n is a, c, g, or t
  misc_feature (506)..(506): n is a, c, g, or t
  misc_feature (569)..(569): n is a, c, g, or t
  misc_feature (631)..(631): n is a, c, g, or t
  misc_feature (661)..(661): n is a, c, g, or t
  misc_feature (683)..(683): n is a, c, g, or t
  misc_feature (698)..(698): n is a, c, g, or t
  misc_feature (701)..(701): n is a, c, g, or t
  misc_feature (712)..(712): n is a, c, g, or t
  misc_feature (719)..(719): n is a, c, g, or t
  misc_feature (750)..(750): n is a, c, g, or t
  misc_feature (763)..(763): n is a, c, g, or t
  misc_feature (780)..(780): n is a, c, g, or t
  misc_feature (874)..(874): n is a, c, g, or t
ntcaaatatgttaacccacctcattctattgtcttatgttgtttcagtcatgatcctcttctganatcaggaatacgaccccgagaaatgagtgagtgatatttgcttttatatctgatgcgttgcaagaattcagtgtcacaaacagttgagccataaattaaaaatggtagactcacatttgaatagcagccagtcatatataaaaaaatccaaattttttaaaaagtgactngtattaataaaaactggtgaataaatcaccaatgatttgtttcctcatgctgtcatattattcttcagatacaaccataaaggcaaataagccataaagacaaacaagatgacatattaagaatgtttaaaattgcntctcccgaattttccggattctactggcaaagcgaantttggncatctcctttttctttttcaaagcttttgcacatgcacgtctgccatcctccctgccaacaaagtcattgtcattccctccacagccagtntaggtgagagcatcacaggtaccgtatctcggattaaaacaacagcgagttacattggcagancacagtccctcatcttttggactgttgcaaaatgatggaattttctttggtgcgcagaagcncaaacaagtagcatcaacaggaaaccagtncacaaaccgggtccggggacanccaccggaaaagaantanacacaagtaangggactnagattaaagaaatacttttctgtggaccccncacactggtcgtncacactcacttgcagcnggcaaactttgggaactttttctattctccagcaagcttcgtcgcaagcctcccaggtgtagaaattgttggcgttgccctcgcagcccccgtncaggaactggcggcac

SEQ ID NO: 627159 - DNA, 841 bp, Homo sapiens
aaaggcaggaggaagagagagaagagcacggcggcaacagcgcacgggagaagagaagagttgaagacattggaacagccagacgcatagggaaaccaccgggcgaaaagaccggaacaaggagagcagacaccatgacttttaagtgctaagaaaacaggagtaaggcactgggacagagatcaagaaaagagaaaaaccgtgagaacgacaaacagaagaacgaggaagccaaacaggaggaaagaaaactggactgaactgaaaaagagaggaaggaaaacaaacacgaaggcaaaaagtataagcagaaaaaggacggtagaaaaagaagaagagaaggaggcgaggaacaaaaagagagagacaaacagggcgggactaacagggaagaaaacgaggggagagagaaagaagaaagagacaaatgggaaaaacggcacaatataacaaaaggggagagagacgagagaaaacacagaagaaagaggaccaggagcaagcaaaggagcaagtgagggcggagcgggagaagaagagcagagagccggagcacgggaggaacaataggagagaagcggagcgaggagacgggaggaggaatgaacagcggaggagcggagaagatacagcagagcggagagaaggagacgaggcgtcaaggaacgagacagagaacggactgaaaagagaagagagagaacataacgagtagagcagacagcgcgagagcggagtagacggaacgagacgcaagcaaaagcggacggcgacggcatagtcatgacgaagggacgagaggaagagggcgcgcaacccacgacagacacaaacacacact

SEQ ID NO: 627160 - DNA, 151 bp, Homo sapiens
ttggggcctcattcaggaaaatactaacctagatgagaaatcagagaaggactctcagaagtgatgtttaagcagaagctcaaaggatgaacaggaggccaggctcggcggcctcccaaagtaatcccagcacttggggaggccaaggtgg

SEQ ID NO: 627161 - DNA, 353 bp, Homo sapiens
  misc_feature (67)..(67): n is a, c, g, or t
ccccccccatttttgggggcccttttaatcccccaatttaaataaggctccaaaggttttgcctttnccgggttttttttaaaacctttaattttttttcctggggccccgggtttattttttttataatgtgtttccccaaaatttgtttgattgtttttttttcccgtgggcctttaaagggggggggggagttttcgggtgaccatgggttaccaaaaaccagtttttggaaattttttaaagggtgggaaaacttgattccaaattccccaaattaaaaaaaaggtccccctttttttaactttttttttttttttttttaatgtgttattaagggggcccccttttta

SEQ ID NO: 627162 - DNA, 108 bp, Homo sapiens
ggcacgagcttgctttttctaccacatctacagtgattttcctccaataaagtcttgaaaccctcagagtcatccattgaggacctggattcatcttaccttgtatca

SEQ ID NO: 627163 - DNA, 459 bp, Homo sapiens
actctgttacccaggctggagtgtgtagtggtgcaatctaggcttactgcaacctctacttcctgggttcaagccattctcccacttcagcctcccgagtagctgggattacaggtgcttgccactaagcccagctgatttttttgtgttactagtagagaaggggtttccccatgttggttcctggctggtcttgaactcctgatctagtgattcgcctgcctcggcctcccaaagtgctgggattgcaggtgtgagcccccgctcccagccccgtggctctttttaaacctaagtgtcccttgtgatgctcaaggtccttaagtcagttgacctttgctttttgatcttattttcttacggcccttacttattgcttattgtgtaaaaaatactgctatgtgtcccatccttttaatcaaggtgattgtgattttgactaataaaaaagaatttgta

SEQ ID NO: 627164 - DNA, 1273 bp, Homo sapiens
gagagagagagagagagagagagagagagagagagagagagaacgtgactcacagagtgacagcgaggagagacgcgatgatatccgtagaagagctatcgcgggccgctgctgcgtggaggctctcccggggcctggtaagagggacccagattggagaaacgtgaatgtttgaagtggcttgttctctacgctatatagcgatgtaatttacagagtcttgtatctgatgtgactccaaagtctcctgctctttgctgctgtctatctagctgcccccgaggacacccagtagttgggctgagaaacttgctggtgtgctgacatatagtctagctggggacatgctgagggcccatgggtgcgcttctggtctcagacgctagggaacacaaacgctgaagggcaatctatgggtatgctgggaacactggctgacgctgactgacagtgagtacgtggacgctcacttgacacctacctttggacgacccccgttgatgcaacaaactggcttattctatctgagtatggtctatcctctacagctgctgtgcacggcagcagcagcaaatgctcgtatgaccctacatgcgacgccaacacgaccagcagaagcgtgagagtctgaggattgacataccagcattcccatgaacttctcatgactgactcccgcaaccaaatcaccaaccaaggtcagatttcaacccccatgagatggcacagtacatatccatcgaacagacatttcacacaccttctaaaaacaaccccatgacacatattcacctcaacaggacataacccatgtaatcccacacatcaaaaattcatctaatcaacacaggggcttataaaatactcccagaccttgaaatccctaccctaacagtcaaacccccccccacatcttataaactactaatacaggacccggagggcatactacccagacacacaatagccattacataaccccccaatagagattaccacaacctctaacagctctttatccccattcaaacctgccaagaacaaagtaggacaacaaatttacaccagcagagctgcaacaacgagacatcaacctaagtgaaaactagaaaataaaaagcgccaacacaactcaaactgagctcatggaaaacagactcaaccatcagtaagcatcacaacagccagaccagacaaccatactctccctctctctttctccttctccctctcctcctcctctctacgcgaaaaaagcacaaacaacaaaaca

SEQ ID NO: 627165 - DNA, 125 bp, Homo sapiens
gcttgggctgtgcaggaagtgcctggtggggctggtgcagccggccagcgcaaccctgtacgactactacatacccgatgcgcagatgttctggtgttttacaggggcaccaacgtaagagcaga

SEQ ID NO: 627166 - DNA, 1497 bp, Homo sapiens
  misc_feature (1261)..(1261): n is a, c, g, or t
ggcaccccgatgtgtttgtgcccccccggtggtctatgagaacaacaccatgttgggggacaaaggtttctttgtctcgttgtcaacacagtgacaatatgccaccaatgtgtgttggatagatattgtggggcacaaaagaataactcttgttttgtgggttgtgggaagaaataaagtggggggaaaagctgttactcatcctggggggatagataaatcttccctcgctgtcgccttgcaaaaaggtttgctgccaaggtgcaaccactatgctggatgttgatgcggggggtccctttccgaaaagaggagcccctctggatggttttcccccccaaaccccgtgatttcccaccccctcttataagaagaagggggatccaacggggcttttaaggggggcgacatttgtggggggcccacggggaatggggccgccaaccacgttctctgcggtcgttgtgttggccgcccccgttgtaggttcgtagggggatagttctgtttcccaacccccgcgagggtttctctgttgtgtgtgacgccccccccccaggggtttcttcgtctgtctccccccgcacaataagctcccagagtccgcgccccttgtgtctccgtgggggaatatgttctctaatcactgtggggttcgccaaatagttgtggcaacattctcacaaagagtggtcggtaaattgttgtgacgcgctaagagccacacacttgtcttcgctcttatgacgccccactgtgtcgctgggccccacagtcttctgtgcgctgcccctcgtgtgtgcacaaacgtgtcgtgtcaccacacactgtgtttgggttgattggcgcgcctctgtcccaacagagcctctgctgtgcccacagtgtctctttattgtggcgtctttataagagtgttcacactctttgggggggcgccacccaacagagacgcctcacacagagagtctaaatagttttttctggggtgtttgttggggcgtttttgaaaacacccaaaaagctcttgtggagatttcacctctcgcacagggcctctggtgtgtgtgtcctctggcactagtctctgtgtgtctcgcgacaacacacgggtgcccctccgccctccttgtataagagaagcacgcccctctcactgcggtgtctacacaggcttaatatctttggttcttctctctgttcttctgtgtctttatagataggtgtacacctcgttataaaaccacaccacataacaccncctgctagagctcggagactcgttgagagcacggcctcgttcttctcctatttaaagtgataaaaatataaataagtaagtaagtgaagtgttgtaaagctaatttctgaccacgaaaaagacccaaggtgtactaattgtgatgagataagtgttgttttatatggaagaatgtaccagcttatggaccaaatgtcacacctttttgttacctttaataaaaaagtagtaggata

SEQ ID NO: 627167 - DNA, 266 bp, Homo sapiens
ggagctgggcaaacaccttcgggaggccgggccataaaaccgaaaccgggtctttccttctggccgtgagggggactccccaggccttcagaaccttcagtacagccctccgcgcagcacagccctgggtgtgagggccccctgtggccctgctccttagcaaaaaaagcatttggagttgaatgctgttcccaaaaacaacatgtgtatctgccgattgttttccatggttccaacaaattgcaaataaaactgtatgggaacga

SEQ ID NO: 627168 - DNA, 270 bp, Homo sapiens
acttagaggatctccgtggagccttaccctccggagccttacctcatctgcccctcccctagtgctgcagaacggctgacactgtcacactttcagaagaactggaggttgggtcctgatcatattacatgaagccttccaccattgtgaacaattaggcaaggcatggaagtgacagaaggggcatcgctggataaatacagagcaaatactgggggcagtgaaagaaggaaagcttacaagaagaacattccggtgttttcctttcaa

SEQ ID NO: 627169 - DNA, 109 bp, Homo sapiens
gcggtatatgcagatccagcagctctctggttacagtcaggacagaacagctggtgtcagactgggttagaggtttgtcaacagaggcagggccagtcactctttggag

SEQ ID NO: 627170 - DNA, 207 bp, Homo sapiens
tggcagaattccattaacaaggcccagttgctggaatgttggaatagctgatatgtcagttatgggcaggctacatggaactccagtactggtattaaatgaattccgtagaagatcagtaccggttgcagaaactgttttaccttgtgattgcaactgactgttgccatcagtttggacttccgaattgacctttggagggcaggg

SEQ ID NO: 627171 - DNA, 258 bp, Homo sapiens
tactttcaccatagcaaatgtataggaagttcatccatgttgtggcatgtaccaatactttattcctatataaattagctgaactccattgcatgaatatacatttagtttatctactcaccaattaatggacattatggattagtgtctaatatatggccattaggaatcatgctgctgtgcaaattcacatacgtttttctagtgtaggatatgaattaatttctctttaaggtaggttcctcaagagtagaattt

SEQ ID NO: 627172 - DNA, 403 bp, Homo sapiens
taaactccgaggatccccgacgagttgtccgagttaggacgagcgaacaacaacgaaagaagaagcgtgcggctcaacaagctcgacaccaacgaagggctaggaccgggttggggaggaagcattgagtgagagaggagggtgatattgcgggggcccgggatcggggattgttgggttgacgagatgagggacgtttgagcttggacttgcgggtggatcgatcgggctggatctcgatggtgaagctttgaagaaccgctcggcgtttgactcttgccaaccacttcttctctggtttccaaccctacgtgatatcctggtcttcaacgtctgctagatatatactttcctttaacgacctttttacgttaactcggacaactcgtcgggtaccgagctc

SEQ ID NO: 627173 - DNA, 150 bp, Homo sapiens
tccttcgaggacgcattcacccgtgtctgtcatgcaccacgtccacctttgtctaggttgcaagttgggcagcagctctggttcctctttaagtggtcatgcttcatacctaactttccccaatagtcgcctgaatggtcgtcgacgttg

SEQ ID NO: 627174 - DNA, 382 bp, Homo sapiens
  misc_feature (187)..(187): n is a, c, g, or t
  misc_feature (233)..(233): n is a, c, g, or t
  misc_feature (381)..(381): n is a, c, g, or t
ctttgatacatagagagccacactgaggagaagcactctgaattcagtggcagtaggaaagctgtgacctgcagctcatcctcacttggcattgaagaattccttccagagataaactctatgagatatgtgggaaggccttttgcaagtgggcccacatcatcaacgtcagaaaaattcaaatggnaaaaaactttgcacaaaaacgagccaaaaatattttggcccacaanaaatatctcctccggcatcgaaaaatttttccgggaggaaaactgttggttattgtgcacttaaaagaaccacccacacctctctccatagtttatatcactaagccacttcaggattttttttttttaagtaagaagagaaatgtana

SEQ ID NO: 627175 - DNA, 191 bp, Homo sapiens
aaaataaaaacagactcatctgagctgtcctgctctgacttgaggggagattagaaaccttctctccagatggtcaccacaatcacaggtagaccaaacgagctgacagtggactgacaggaagatgggtgcacacccgaggagctcgaggcaacataggaccctcgtacatcctcgaaccacccctttgg

SEQ ID NO: 627176 - DNA, 451 bp, Homo sapiens
gtaccccaaaactttgcccggagcgaggtccacattgcccatgttcattgcattttgttggataatcatcttaacactgaagggacttggaagagaacagactgtggacacttaggagccaaagggcctaaggccctcaagggtactgcctactgccacctttccctccccattgccttgatctgtggagacataggaggtgggagccacggaaggaggctgttaatggctgttgagggagctggaagccaaatgcattttttctgccatgttgcatattttgagaaaactattcgcaaagatgcttaaaggccattaagacgttcaacctcattcgcctaaaaacaaacatttatggcgcatatggagtatcattcacctgacttcaccatagtgcattctcatttgagccaggcaaactgaagttaaaatccaatctccggcagagact

SEQ ID NO: 627177 - DNA, 286 bp, Homo sapiens
cattttttaaccccaaatttgcccatcctttttaatagttctttttttataaaaaaaaaaaggaatttaaggccaggccgtagttttttttaaaatttattccccaaaccccttaactgccccgttggtattagcggcctgttttaaaacgaaagtttttttattgaaaccccaataaatttttttgtaatattttatggtaaataaaaaacctttaattgtttgacttgtttaacttggccctgttagtttttattaataaaacgcgcatgggcctttttaccca

SEQ ID NO: 627178 - DNA, 910 bp, Homo sapiens
gccgggcgcggtggcgcgtgctgtagtcccagctactcgggaggctgaggtgggaggatctcttgagcccagttcgagactagcctggggcaacttagtgagaacctgcctctaaagaaatataagaaaaattagctgggcctggtggcacacacctatagtcccagctatttcgggaggctgaggtgggaggattacctgaacctgggaatcaaggctgcagtaagccacaatcccaccacattggcactccagcctgagcaatagagtgagaccctgtcttttactaccctgatcttagccaaaaggcagagaaatgatgaacctgtcttttaaaaaaacacaaaaacacaacaaggacgcggggtgggggccgcataaccgacagtggaaatccccagccattggggaagcggctgaaggggggcgggaacaccttggaggctcggcatgtttggacaccacgttgtgacccacctcgtgggagaaaacacaatcttgtggggggaaatggcaaaaaataagcggggaaggggtggtggcatgccctgtgttaaatccccagttgcctcgggaaggctgacgcgaagcaaaattgcgtgggacatccgggggaagggcgaagtttcgttgggaagccgggagaacccgagcctggggaacaagaggagcagacttcttggtgccaacgaaagcaacacaccaacaaaacactttgtggggggccgccgccaaaaaaatgtgtcaacaacatctgtgtgggcggccgcgccccagataactgccactgggcacagtgtgccacagagaatccggctcgacagcggttggttcccccaaaaaaccggcggcgcggggtctcgaccccgagggtcggctctcggttccaggggcagtagcggcgcgcgag

SEQ ID NO: 627179 - DNA, 461 bp, Homo sapiens
ctctgttctcctcctcccctcttttccccacctcccaaaattggcagccagtctgtggctctcggtctggggtctggagggtggggaatgtgggtgtgggggccggctggagaagctctcgctagcgctgcctgtggccagacccgcctcttgtcccctttcgggcgcacacacacgtccacccagacactccgcgcgctccctcgcgctttcgctcgcccgcccgccgccgcctgctctctccctcctgctctcgccggtcgccttctcctttttttttttttttttttttttttttttttttttggtaccatagagttgctctgaaaacagaagatagagggagtctcggagctcgccatctccagcgatctctacattgggaaaaaacatggagtcagctccggcagcccccgaccccgccgccagcgagccaggcagcagcggcgcggacgcggccg

SEQ ID NO: 627180 - DNA, 339 bp, Homo sapiens
atgaaactattttaatttgttcatgaatagttctgataatttggggaaatgaacctgattatatttatgccacgattgttgattaagtcatggcagatggtgcctaccatgtagatattgatgaatcttacttgagaagtttattaatactgaactatatgagagcatgtgaattaggcttatcagagtaatatgctataatgggaaatacaggaataatgtatttattcagatctaatatgaactttcttattgcatgaataagatggataaacatgccattttacaatgaagagtctaatagttcatctatattgttcattgttccatggtttcttt

SEQ ID NO: 627181 - DNA, 299 bp, Homo sapiens
aggtacaggtgcctccctttgggtggcgcatctgtgtggctcatgagtttagagagaagaggatgcctttcaagctaacaccgtctcccttagcaacatgataaagcatataggcatgggcttgaggtacctggagtggtggtacaggaagacccatgtggaaaagaagacagcgtttcatgcgacatgatcaattctgtacccctaagaacagatttatggtggtcccttgggtggcatcgggggaggcactattacccgggggtggagagggcagtcctgtcgttgtgagacatgct

SEQ ID NO: 627182 - DNA, 109 bp, Homo sapiens
tgccgcgacatcaagtgagatgacggtgccatcctgggatgcggtacctcaatgtcatccgagcccgaccgatcgtcagggccaggggccctttttcattcacgatgat

SEQ ID NO: 627183 - DNA, 916 bp, Homo sapiens
ggtgtacccgcacgcaaacagtggttcccacatggtgaacaatctgagaaaaacatcgtgtccctctcttggtccgcctgagctctttcgtaggcacaagggtttttcccggcccagtatctcacaatcgctgcagggggaaaaacgaggcgccgggctaaaaggaacagccgcccccggtcttttcacatgcagactgcaacaccgcgctccactgtagtcctaattaagaccgttcccttccccccgctcactaatatatgagacctcctcttttatattcaaaagagccaatacctcagcacatgtttgcaaaacaactctttcctgagcaaaaaccttttcttctctaaaaaaaccgcttacaaacggccaattcctctgggttcacaccccatttttgtaccatcgtcgcccacctttcccccctccgaaacaaccttggcccccaacgacaatattgttcccttcaaatcatcacgcgtcaaggcgcaccacgattggacgccacacccaattgtctgcaggaatatctcttatctcttgttctgcgacaaaagatccacataaggtatgccttcactttgctaatggatgaaattctattcccacataattgagtgtgaaacaataatcttgagtctgcatcaagctcctatgcgtattgtttaaattagataccgcccctgcgggatggcgctctgtagatataataatgtaacttgccgtttatttgtaaaacaccctactccgcccccacgcgcctcacgcggtacgaccgcccttggtaactcccaaccagacctgggagagaaatgaagtgaggggcggactttcagagagtccaggggtctagaagaaccgcgatctgccgcacccgtgggaaccccattttttataacggcccacaataaca

SEQ ID NO: 627184 - DNA, 1078 bp, Homo sapiens
ttaaggctatcgtcgaccacggcgtcggtggaccccacgagtgcgggagcagaaactgcagcaggagcgcctggcgctcaagcagcagcgagcagctgcagaagcacgctccgtgtacgctgagtaccagaaacagcgatgaccacctgacaaggcagcatgaggtccagctgcagaagcacctcaagcatgcagcaggagatgctggcatgccaatgcagctagcaggagatgctggcagccaaatgcgtgcagcatggagctggagcatcagcggcatctgggagcatgctatgcggtctggaagagctggagaaagcagcggcttgagcagcagcttgctcattcctgcgggaaacaaggagaagagcaaatgagagttgccattgcccagcaactgagggtacagcctgagggctccaggaaattcctcttgtcgaaagtcaacaggaggccccaaacccaaggcgggcctcaacccattctcttcccagagtaccccaaattgcctggtgagccccaccatggcttctttggagccagagttccccatcccgcaagagcgtgcacaccttgggaccgccatccgcttcgctacaaacttgccttttgccctggtgccctacgacaggtcggacgacgacttttcccctcttccgtgaacaatatgccttatgaaacaccagactttgaaacggagccgtacaagcggcttatacagcagaagggtggtctgatgcggaaggaagccagtcccactccttgcgctcgcagggaattgagacctgttagttagcagaccttttaaagaaggagaggcatggtagacagactcaccagagttgcaggggccccttggggcgtttctgatcccggtgagttattacagacgcgatcagccatggacatctcagtgacgcaggtataatcacggaaaggaggtattcccaagaggtcgaccgctccgggttagaaaatttgggtatacgatggggtccgggtgccgcgagtattccgccaactgaagattgtgcccttaagctgtcgaggacccctctcatttgggaaagggtatgcc

SEQ ID NO: 627185 - DNA, 687 bp, Homo sapiens
gagcggagcggcggctcgacggggtcatccgggcgcaggcgcagtgcggtgttgtctgccggactgacgggcggcgggcggtgcgcggcggcggtggcggcggggaaggatggcggcgtcctccctggaacagaagctgtcccgcctggaagcaaagctaaagcaggagaaccgggaggcccggcggaggatcgacctcaagctggatatcagcccccagcggcccaggcccagccctgcagctcccgctggccaacgatgggggcagcccgctcgccatcctcagagagctccccgcagaaagcccagagcccaccgacgcggaacccgccaaatgctggggctcccagtcgaaaccgtgtgcacaccccgcagcatggagagcatggagatgtgaccagaagcggcaggagatcatgaagcagacgggactacctgaacatcgggggccagggctaccaggcagaaatcgacgacctgtgagaacttgggccgagatggggcagcggctacctgcggccaggtgtggacagatgcgcctaccgagaagaaccgggccacggtcattggccggtgaagccacatgccggaagcatcagggaaccaaggacggagcaccaaggtgcagtcttcaatggcacctggcatgtggtgcttgaaagaggccacgactgggcaccgtaaagt

SEQ ID NO: 627186 - DNA, 1400 bp, Homo sapiens
  misc_feature (738)..(738): n is a, c, g, or t
ggcagagcccggggacgaagggggcggcgaggtcaggtgtagcgctgccctggcgagggcttggatccccaggagtcaagtgagcggtctgctcactcctcagcgtgcaggagccatggacgtgtggagtccgcagtcagaggcgcaacactgtgttctcattcatctcgctgctgagaaaaggtgccacccgtagaggtgaatacgagagtggccatgagtagtgagagatgccgtgtgcagttgacacgacggtagggtgtgtcgacagctgagaggcagcaaggatcctcgacttcggaagcactgagcactcactgggatgctagaagcaccgctgtcttgcggagatggaccgtagtgcagatgcggtggactccgtggggtacctataggcggtttgcctgagggcggtatcgatccgcattgtcgcgtcaccgacatggaagcatagcgtatactaacggctagtcgtgggtaggcccagtatttgcggcccagaagtgtcccttatgcataagggagcgttctaggccttaccgtgcctcaaacggggatagccctctccaaccgcttatgcgaaaccccgttaggaacagggcctctgtggacaggctatccaagttggtgagcaatgcgctattgggaggaaggggccatgcaatatttgttgcggacgcccttcttatttggttagttttcccggcttgccatgtttagtcgcgcgaccttatgcgnaaagacgctcgccttaggcgcgcaggtacgttggcctaatttgagagcgcgaccgccaattggaaaacggggggggcctctttatgggggaaaacctgcagacgggggccaaacgggggccttgtattccaggttgcaacttttacggacgggcaaatttccgcacttgcggcgccgcaccctactttcgactgagaatccgcgaaatgggacattgccccaaatggacccatcgggcttgctgggcgcaacgcaaactttacctgttacgcacacaagcggccgccaggctactactttggaccacggggctaacacactgataccactttaactctgccggggcggcctcccctcaaaacgtgacatactgggggataccgctgctcgctgtacaccccgtttccctgataactgcgctgcgcgacgtcacctcgctgtgggcttgggacgccgctactggcgcccttggcgccactgcatgcgtgaaatttccccgtatgtgggtatgggttggcccctgtccgcctgttggtgccccacgcgtgtgactctgatgctgctgacgggggacctttcggcacacttgcgttgctctgtgcgcggggctcgttttccgggtgtaggctgcgctccgcctcgtggcgccgtgcctgctggta

SEQ ID NO: 627187 - DNA, 1474 bp, Homo sapiens
gtacgtgtccgagtgttatggctatcgtcgacccacgctgtacggtcgatcgaggaggtgctgccgccgctgccgccgccgctgctgccgccgccgcccgcgaagccggagctcgagccgcacgcggggattcgttctgagatgcctgactgcctcgccccgaaggatggcctcggatggagcattagaggcacggcgagacccgggctcccgtcccagatccgtctgtctgttatcgtctgtctctctttgacatcaccgcagatccaccccgctcccgtacacagaccaccaacgccagcttccatgcaggacacagagcacggcatgaactctccacaaacgagatcggatgggaagtaagagatccggaaaaaaacacatagcaaatcacagacagagaaaccaacaaacctgcaccagccaaacccaagctgcacaagagcgacagcgacaagccagaagaaaccagacacaaccaacacaagacacaaaaacacaaagaacacgagacgggaaaaagaaaaacacaaacaaccaagaacgctgagcgcacgactaaacaaaaaggacaacagagcagaggacacacagagaaaaccagacaacaaagagcgacacaatgaaacacagaacccacacggaagacaaaacagcaagacatcaaaagacgcaaagacagcaagaatcacaacacaaccaacgcacacctacacacccgaaagaccaagcaacacaaaagcacatgaatataacaaacacagaagaacaacagtgcactagccaaaaaaagtcaccgaaaacaaagaaacaaaccaagcactcaccacgaaaagcagaccaaggacagaacagacaacgaaacgacaaacaaaacaaaacacaaggcacacacaccaggacaggccaaacgaggacaatacaagcacagaaatgaacacagccacaccggacctcggacgacacaaaacccaccagagacaactaaagatgaatacgcaaaacacaggagaccaggagacacaaagaacacacacaacaccgtcaacagaaagcagccaaaatccaacaaaaagcagaacaaaacaagcctaagaaaaacacaaacacagctcaaacatccacaactcacaacaaaacatcaccactccacagccatttcaacaacacccaacacacagcagcgcaaaccaccgtagcaccagccgcaaacccgaaggaccgtcgcaacacgccggcaaacgacccggagacggtggcagtaacagagaatgcgggcagaagaagaggacgggcgggacaaagtgcagaggcaccgcgcagtcgtccaagacaacacatgaaggggagcagagggtgctgcgagaccactccagacacagcgccagcacaaccaaacacgaagagcgagagcacgcagcataacagggcagagaagagcgggagaaggcgcacccgcaccccacagcggacc

SEQ ID NO: 627188 - DNA, 215 bp, Homo sapiens
atcgttatggctggtgatgggaagtgttaaaactatcgtcctccagcctgggcaacaaaagtgagaccctatctctactacaaatacaaaaattagccaggcatggtggcgcatgcctctaatcccagctactggagaggctgaagcggcgagaatcgcttgagccagggagatggaggttgcacgtgggcccaacgatcacaacactgcactcc

SEQ ID NO: 627189 - DNA, 370 bp, Homo sapiens
  misc_feature (4)..(4): n is a, c, g, or t
  misc_feature (45)..(45): n is a, c, g, or t
  misc_feature (202)..(202): n is a, c, g, or t
  misc_feature (204)..(204): n is a, c, g, or t
  misc_feature (239)..(240): n is a, c, g, or t
  misc_feature (243)..(243): n is a, c, g, or t
  misc_feature (249)..(255): n is a, c, g, or t
  misc_feature (258)..(259): n is a, c, g, or t
  misc_feature (261)..(261): n is a, c, g, or t
  misc_feature (265)..(266): n is a, c, g, or t
gagntaattttctggtttgtgggttgaaataaagctgtgaattantgtaggctgtgtttttgtatcttgtctgtaaataggtccctgcttttttagaagtagctttatggtctcatgcttaatcttgtctcttttttcttttttatgatgttcactttaaaaacaacaaaacccctgagctggactgttgagcaggcctgtntntcctattaagtaaaaataaatagtagtagtatgtnngtnagctannnnnnnagnnangcannggttactaattgtatgatagtgtttttatatggaagaatgtacagcttatggacaaatgtacacctttttgttactttaataaaaatgtagtaggataaaaaaa

SEQ ID NO: 627190 - DNA, 161 bp, Homo sapiens
acgagtctgaaggacgagaagggagtaatggcaggacaagacgtttagaaagtttcttaccactactttgaaccgagtattggttgaaaggagtgactgctgaaactgtaaccaaaggaaggcattatgacttccagaaaatctcaggaagtgcaagcctt

SEQ ID NO: 627191 - DNA, 105 bp, Homo sapiens
  misc_feature (2)..(2): n is a, c, g, or t
gntgatctagaggatccctcgatcgacggttctcatgagtataaaacaatgaagatgtgggccagtggtcacgctgtactccagcactttgagaggcagaggtgg

SEQ ID NO: 627192 - DNA, 302 bp, Homo sapiens
atttggattcagataaaaagatgtcgaattttggcattgtttgaaactgaaaaaatttgaaatcaattgtcaactgaagaatgtactataatatgtttattcattcttcagttgacaattgaagaatgaataaacatattatagtacattctaacaatggaatactacacagctgtcaaaaggaatgggtaaatctacatagtgctgaaggttgcacaacaatatgaatgtccttaaaatgtcactgatctgtacacttaaaaatggttaaaattataaattttatgttatacatattttac

SEQ ID NO: 627193 - DNA, 374 bp, Homo sapiens
gtatatttatacactggaatattattcagccccaaaataaccccacaatgaaggatttgatacatattacaaggtggatgaactttgaaaatattatgcctaagtgaaagaaatcagacacgaaagattacaaattttatgattcccatttatatgaaatgtcctagaatatgtaaattcatacagacagaaagcagattagtggttgccatggtctaggggagggaaggatggagagtgactgcttaatgagtacagggtctccttttagggagatgaaaatgttttggaactaacagtggtgatggttacacaacattgtgaatgtactaaatgccactgaattatacatttcaaaatggttaaaaaaaaaa

SEQ ID NO: 627194 - DNA, 465 bp, Homo sapiens
ctcatctctactaaaaatacaaaaaaaaattagccaggtgtgatggtgcgcatctgtaatcctagctactcaggaggctgaggcaggagaatcgcttgaacctgggaggcagaggttgcagtgagcctagatcatgccactgcactccagcctgggtgacagaggaagactctgtctcgaaaaaaatataaaataaaataaagaaaagcacactatatattactcttggttattattatcatcatcaaaagttattgttactattataagtcctggcatttcgaaactctgaagatgcaagtccattctacctcttgcgagggagtagatggcatctcattaccaaatgtggaccaggcatggtagctcatacctgtaactgagcattttgagaggctgaggcaagaggatcgcttgagtccaggagtttgagaccagcctgggcaacacagtgagacccccatc

SEQ ID NO: 627195 - DNA, 1061 bp, Homo sapiens
  misc_feature (384)..(384): n is a, c, g, or t
gaatgtggtgcgcctgactagaaggggtactggatactgaggtcttagccgttgtctcagagtctagagggagcacctatattcagcctttggatggactgtaacttccgaggcgctcaatggtgcgacgtacagttaccaacgctctcctgacgccgtgggtgcgccccaggtggcgtggcatggaattgcacttatcctagaggttcttcttccggaagtttgaaagagagaggtcacaaaggtctgtgggactctgccaggggatgtggactcgagtaatgtcagaatgccgacttgagattcatttgggacaactgtgacctctggacgctcaggttggaatgaccagggatcctgtgacttcagagattccacagtctngaacactcgggctctcgtgtgatgagcacctttgtacccaggtctgttggatcctgactatatactcttcggggaccaaggacacgactggctttgcgtggcacgcggcatagacaatctttcaatgttggtaggggaggtcgtgtccagagaggagatcttcctgagacccggctccgtgtgatgggtccccgctgacgtcaggaggtggtgatgagcctgtgcgagtgctagtcctccctgctggagtcgatgaaggctgaaatccgggattcgctgtgcatgcggattgtggtccgtgaatgactatctatcctgacctgcatagggtgcgggcttcctggcggagcctggaggttccacgcactgtacaccatcccgcctgtagcgagggagctctgaccggtgccttcaaagtccttggcgctggaggtctgctgagcagaacgcagggcgggtgcaaccccgactggggcagaagcatccagaggatgctggccacggcctgggtgccaaggggagaagcgcgctcagaagccaagaaaggcgctgggaaggtggagcagacacagactcggaggacagggccggtggtggggacgggcccccagggcgcccctctcaagggggccaggggtctgcgcaccctgggggggtggcctcgcccacacacaaag

SEQ ID NO: 627196 - DNA, 4428 bp, Homo sapiens
  misc_feature (4092)..(4092): n is a, c, g, or t
  misc_feature (4099)..(4099): n is a, c, g, or t
ggcacgaggctttcacccccccccccccggccattaccgaagcggatgaaaacaaacactaacgatggcggcgccgggaagcgaccggctgctgggcttaaggcgggagtgaccgcttaaccagtgagggaagcactgaagagcgccagtcgacgtgggtgcgacaactcgcggagtcttaggagcaaaacgtctggggcctgcgagccaggacccttctgaagccttaggtgtctatcggcgacgtgtacggtcactgcagctccggagcgcggaaccctcagccaggaggcgcggctggtcggtcccaggtcccggcctccgtaatgagagcccggaaccactctttgtgccgcagcttcgcagcatcttggactcaagtgattctcctgcctcagcctcctgagtagctgggactacagattcctataggcaatggaaactgatctcaattcccaggacagaaaggacctggacaagtttattaaattttttgccctcaagactgtccaagtgattgtccaggctcggcttggtgaaaagatttgcactcgttcatcatcttctccaacgggttcagattggttcaacttagcaatcaaagacatcccagaggttacacatgaagcaaagaaggcactggcaggacagctgcctgcagtcgggaggtccatgtgtgtggagatttcacttaagacttctgagggagattccatggagctggaaatatggtgtcttgaaatgaatgaaaagtgtgataaagaaatcaaagtttcctacacggtgtacaacagactgtcattgctgctgaagtcccttcttgctataactagggtgacaccagcctataggctctccaggaaacaagggcatgaatatgtcatattatacaggatatattttggagaagttcagctgagtggcttaggagaaggcttccagacagttcgtgttgggacagtgggcacccctgtgggcaccatcactctttcttgtgcttacagaattaacttggcattcatgtctaccaggcaatttgagaggaccccacctatcatggggattattattgatcactttgtggaccgtccctatcccagctcctctcccatgcacccctgcaattacagaactgctggtgaggacactggagtaatatacccgtctgtagaagactctcaagaagtgtgtaccacctctttttccacctccccaccatcccagctgatggttcctgggaaggaaggtggggtaccccttgctcccaaccagcctgtccatggtacccaggctgaccaggagagactggcaacctgcaccccttctgacagaacccactgtgctgccacaccctccagtagtgaggatactgaaaccgtatcaaacagcagtgagggacgggcctcccctcacgatgtcttggagaccatctttgtccgaaaagtgggggcttttgtcaacaaacccattaaccaggtgaccctgacgagtttggatataccctttgccatgtttgctcccaagaatttggagctggaggataccgatccaatggtgaatcctccagattccccagagactgaatctcctctccagggcagcctgcactcagatggctccagcgggggcagcagtggcaatacccatgatgactttgttatgatagactttaaaccagctttttctaaagatgacattcttccgatggacctggggaccttctatcgggagtttcagaacccacctcagctgagcagcctctccatagatattggagcacagtccatggctgaagacttggactcattaccagagaagctggctgtgcatgagaagaatgtccgcgagtttgatgcctttgtggaaaccctgcagtaaaagtatccttgagtcccagcagcaccccctttttgtggccccagggcataagcagcctcccatgcatcagctgctcccacccctcatcctgctctgagccaggtggaagggaggctggcttctcccatggggacccagaagtccctactcttggacctcctggagactccgtggcggcagtcaagcccagtgcccagttggagaagactcacgtgctggccttggagatgggaagaaccttcgtacgaaaaagccctcagcagggccatctgtgtgccctgcccatcaccaactgcttcccaagggtgtcatcctgttcctcctgctgccggcctcctgcctgggcctgccttgcagctggccccttccctgcctgctgtcaccatccactgtttgacattccagctggtggccaagagattggtgtggaggcagaaagaggaaggagacagtgccaggaggaagaaggaaggagtcccttagctctcttcattgtcccctttacttcctgctatcttcttctcctcttcttctctctcttgcctctatgcctgtatttctggcaatatgacaggcctgcctacccaagatcagaactccaaaaccactcccacccctgaaggtcgggagggtctgagcagccctggtggctgcctgtgctcaggtcctcagctccatgggaaataaaaatggcaccctgaatctctaggattttgtcacttggagtcacagcaaagttctcttcctcttgtccccccgttgctgctccttggttatagaacatggtaaatatttattactttcagagaaaccagatattttatagaggaaatatgtttgaggtgagttgtttttcacttggagaaggcggagggctcttcctgggacggagacctcctcctccggaggttattgagaatccgggctgctgctttgaggatcttcccaccatacagacagcgagatccaagaagagggctggccgggggcaaagtcacctcccagtgtggctgcactggaactgactaaaggctttaccttggatagttgcgtattcctggtgagagccttacatctcccacagtttctgcagagtgactgactccattctggcagcccaggaagtcctgggtgctaaatgtgatggccacatgtagtggttaggggatgttgtgtgtgtcccccaactgcctgggtacttgttcctgatccctggggctgtcctgtggagcttttcctcctgcttgggcctagctaccatctccctctaatcccaggttctctacactgccctggggtttaccagctggattggcttctggttgagaaatcaaagctgggcgtatgattgacttaacccttcaggtattgttacttgaataagtcaagtgcctagcctcacccacctatgatctgtcctttcccagcctcgctggtagtcctggtcaaggagatctaggtctactccattcctcctggcccacctggggcattcactggcagcagctgtgcttcagtggagcaggtggttctcagctgcttgttagtatactgcatgtgacactgttcccacatacaaggctgacttctgaggattggagcaggctctggcggggaccagagctctgcgtgctgctgctgccaccaagaagtgttagcagaagcagtagcagccaactggccctcctgactttggcccagagcacatgcgtggcttgctgaacccaggctcaggtttatccccaaggccccagctttgagaagggggaaggcccctggtaagttattgatgcccccatatttcagctactgctctctttccaaggccttgcatggaaaggcctagccattgtctgaggcagcaatctttggcatctacaggtggcagcagcctttcaccagggctccatctgtgaagagtctcagccatgactttgagctgagcttgggagaagtaaagcaactgttaaggccagcccttgcccctcagacctgccatgaaaggaatgagccctagactgactcctgcagcacccccgggacaggctgggaccagctgtttgtctccaggtgtcagagtccctcctcctcctccaacctctccaacctactttgtttggaaataccgagctacacttcaaaatgtattcaagggatttccaataaatttttttctgtactttaaaaaaaaaaaaaaaaaagaaaaaaaaaaanagaaaanaagaaaaaaaaaaaaaaaaaagaaaaagagaaaaaggacgggcggggcgggggccaagcatagaacacccccacgggaggcgccgacacatgaagcgccacactaatatgtgagaagaggggcgcccctctcgagagaggcgatactaaaaacagaacgacggaggccggctcaaaccaaagggtgtgggaagacaaaacacaagcgggggaataaggagagacccacccgcggggggggagatcgagcggccaccccccgagagtgcgcccgcgggaaaaaaaggcggcgggggaccacccatcagggggaaacaccgcgttatcttc

SEQ ID NO: 627197 - DNA, 135 bp, Homo sapiens
ctggggctgtcggccgcggggcggaggcactcgcgcggggggatggcccactgcgtgaaccttgggttcaagctgtccaattccctgtgaacaattttaattgacaagggcaatcagcttccaggcttgacccac

SEQ ID NO: 627198 - DNA, 4112 bp, Homo sapiens
ggcacgaggctttcacccccccccccccggccattaccgaagcggatgaaaacaaacactaacgatggcggcgccgggaagcgaccggctgctgggcttaaggcgggagtgaccgcttaaccagtgagggaagcactgaagagcgccagtcgacgtgggtgcgacaactcgcggagtcttaggagcaaaacgtctggggcctgcgagccaggacccttctgaagccttaggtgtctatcggcgacgtgtacggtcactgcagctccggagcgcggaaccctcagccaggaggcgcggctggtcggtcccaggtcccggcctccgtaatgagagcccggaaccactctttgtgccgcagcttcgcagattcctataggcaatggaaactgatctcaattcccaggacagaaaggacctggacaagtttattaaattttttgccctcaagactgtccaagtgattgtccaggctcggcttggtgaaaagatttgcactcgttcatcatcttctccaacgggttcagattggttcaacttagcaatcaaagacatcccagaggttacacatgaagcaaagaaggcactggcaggacagctgcctgcagtcgggaggtccatgtgtgtggagatttcacttaagacttctgagggagattccatggagctggaaatatggtgtcttgaaatgaatgaaaagtgtgataaagaaatcaaagtttcctacacggtgtacaacagactgtcattgctgctgaagtcccttcttgctataactagggtgacaccagcctataggctctccaggaaacaagggcatgaatatgtcatattatacaggatatattttggagaagttcagctgagtggcttaggagaaggcttccagacagttcgtgttgggacagtgggcacccctgtgggcaccatcactctttcttgtgcttacagaattaacttggcattcatgtctaccaggcaatttgagaggaccccacctatcatggggattattattgatcactttgtggaccgtccctatcccagctcctctcccatgcacccctgcaattacagaactgctggtgaggacactggagtaatatacccgtctgtagaagactctcaagaagtgtgtaccacctctttttccacctccccaccatcccagctctcaagctctcgcctttcctatcagcctgctgccctgggcgttggatcagctgacctggcttatccagtagtgtttgctgctggcttaaatgctacacaccctcaccagctgatggttcctgggaaggaaggtggggtaccccttgctcccaaccagcctgtccatggtacccaggctgaccaggagagactggcaacctgcaccccttctgacagaacccactgtgctgccacaccctccagtagtgaggatactgaaaccgtatcaaacagcagtgagggacgggcctcccctcacgatgtcttggagaccatctttgtccgaaaagtgggggcttttgtcaacaaacccattaaccaggtgaccctgacgagtttggatataccctttgccatgtttgctcccaagaatttggagctggaggataccgatccaatggtgaatcctccagattccccagagactgaatctcctctccagggcagcctgcactcagatggctccagcgggggcagcagtggcaatacccatgatgactttgttatgatagactttaaaccagctttttctaaagatgacattcttccgatggacctggggaccttctatcgggagtttcagaacccacctcagctgagcagcctctccatagatattggagcacagtccatggctgaagacttggactcattaccagagaagctggctgtgcatgagaagaatgtccgcgagtttgatgcctttgtggaaaccctgcagtaaaagtatccttgagtcccagcagcaccccctttttgtggccccagggcataagcagcctcccatgcatcagctgctcccacccctcatcctgctctgagccaggtggaagggaggctggcttctcccatggggacccagaagtccctactcttggacctcctggagactccgtggcggcagtcaagcccagtgcccagttggagaagactcacgtgctggccttggagatgggaagaaccttcgtacgaaaaagccctcagcagggccatctgtgtgccctgcccatcaccaactgcttcccaagggtgtcatcctgttcctcctgctgccggcctcctgcctgggcctgccttgcagctggccccttccctgcctgctgtcaccatccactgtttgacattccagctggtggccaagagattggtgtggaggcagaaagaggaaggagacagtgccaggaggaagaaggaaggagtcccttagctctcttcattgtcccctttacttcctgctatcttcttctcctcttcttctctctcttgcctctatgcctgtatttctggcaatatgacaggcctgcctacccaagatcagaactccaaaaccactcccacccctgaaggtcgggagggtctgagcagccctggtggctgcctgtgctcaggtcctcagctccatgggaaataaaaatggcaccctgaatctctaggattttgtcacttggagtcacagcaaagttctcttcctcttgtccccccgttgctgctccttggttatagaacatggtaaatatttattactttcagagaaaccagatattttatagaggaaatatgtttgaggtgagttgtttttcacttggagaaggcggagggctcttcctgggacggagacctcctcctccggaggttattgagaatccgggctgctgctttgaggatcttcccaccatacagacagcgagatccaagaagagggctggccgggggcaaagtcacctcccagtgtggctgcactggaactgactaaaggctttaccttggatagttgcgtattcctggtgagagccttacatctcccacagtttctgcagagtgactgactccattctggcagcccaggaagtcctgggtgctaaatgtgatggccacatgtagtggttaggggatgttgtgtgtgtcccccaactgcctgggtacttgttcctgatccctggggctgtcctgtggagcttttcctcctgcttgggcctagctaccatctccctctaatcccaggttctctacactgccctggggtttaccagctggattggcttctggttgagaaatcaaagctgggcgtatgattgacttaacccttcaggtattgttacttgaataagtcaagtgcctagcctcacccacctatgatctgtcctttcccagcctcgctggtagtcctggtcaaggagatctaggtctactccattcctcctggcccacctggggcattcactggcagcagctgtgcttcagtggagcaggtggttctcagctgcttgttagtatactgcatgtgacactgttcccacatacaaggctgacttctgaggattggagcaggctctggcggggaccagagctctgcgtgctgctgctgccaccaagaagtgttagcagaagcagtagcagccaactggccctcctgactttggcccagagcacatgcgtggcttgctgaacccaggctcaggtttatccccaaggccccagctttgagaagggggaaggcccctggtaagttattgatgcccccatatttcagctactgctctctttccaaggccttgcatggaaaggcctagccattgtctgaggcagcaatctttggcatctacaggtggcagcagcctttcaccagggctccatctgtgaagagtctcagccatgactttgagctgagcttgggagaagtaaagcaactgttaaggccagcccttgcccctcagacctgccatgaaaggaatgagccctagactgactcctgcagcacccccgggacaggctgggaccagctgtttgtctccaggtgtcagagtccctcctcctcctccaacctctccaacctactttgtttggaaataccgagctacacttcaaaatgtattcaagggatttccaataaatttttttctgta

SEQ ID NO: 627199 - DNA, 3441 bp, Homo sapiens
ggcacgaggctttcacccccccccccccggccattaccgaagcggatgaaaacaaacactaacgatggcggcgccgggaagcgaccggctgctgggcttaaggcgggagtgaccgcttaaccagtgagggaagcactgaagagcgccagtcgacgtgggtgcgacaactcgcggagtcttaggagcaaaacgtctggggcctgcgagccaggacccttctgaagccttaggtgtctatcggcgacgtgtacggtcactgcagctccggagcgcggaaccctcagccaggaggcgcggctggtcggtcccaggtcccggcctccgtaatgagagcccggaaccactctttgtgccgcagcttcgcagcatcttggactcaagtgattctcctgcctcagcctcctgagtagctgggactacagattcctataggcaatggaaactgatctcaattcccaggacagaaaggacctggacaagtttattaaattttttgccctcaagactgtccaagtgattgtccaggctcggcttggtgaaaagatttgcactcgttcatcatcttctccaacgggttcagattggttcaacttagcaatcaaagacatcccagaggttacacatgaagcaaagaaggcactggcaggacagctgcctgcagtcgggaggtccatgtgtgtggagatttcacttaagacttctgagggagattccatggagctggaaatatggtgtcttgaaatgaatgaaaagtgtgataaagaaatcaaagtttcctacacggtgtacaacagactgtcattgctgctgaagtcccttcttgctataactagggtgacaccagcctataggctctccaggaaacaagggcatgaatatgtcatattatacaggatatattttggagaagttcagctgagtggcttaggagaaggcttccagacagttcgtgttgggacagtgggcacccctgtgggcaccatcactctttcttgtgcttacagaattaacttggcattcatgtctaccaggcaatttgagaggaccccacctatcatggggattattattgatcactttgtggaccgtccctatcccagctcctctcccatgcacccctgcaattacagaactgctggtgaggacactggagtaatatacccgtctgtagaagactctcaagaagtgtgtaccacctctttttccacctccccaccatcccagctgatggttcctgggaaggaaggtggggtaccccttgctcccaaccagcctgtccatggtacccaggctgaccaggagagactggcaacctgcaccccttctgacagaacccactgtgctgccacaccctccagtagtgaggatactgaaaccgtatcaaacagcagtgagggacgggcctcccctcacgatgtcttggagaccatctttgtccgaaaagtgggggcttttgtcaacaaacccattaaccaggtgaccctgacgagtttggatataccctttgccatgtttgctcccaagaatttggagctggaggataccgatccaatggtgaatcctccagattccccagagactgaatctcctctccagggcagcctgcgcctgccttgcagctggccccttccctgcctgctgtcaccatccactgtttgacattccagctggtggccaagagattggtgtggaggcagaaagaggaaggagacagtgccaggaggaagaaggaaggagtcccttagctctcttcattgtcccctttacttcctgctatcttcttctcctcttcttctctctcttgcctctatgcctgtatttctggcaatatgacaggcctgcctacccaagatcagaactccaaaaccactcccacccctgaaggtcgggagggtctgagcagccctggtggctgcctgtgctcaggtcctcagctccatgggaaataaaaatggcaccctgaatctctaggattttgtcacttggagtcacagcaaagttctcttcctcttgtccccccgttgctgctccttggttatagaacatggtaaatatttattactttcagagaaaccagatattttatagaggaaatatgtttgaggtgagttgtttttcacttggagaaggcggagggctcttcctgggacggagacctcctcctccggaggttattgagaatccgggctgctgctttgaggatcttcccaccatacagacagcgagatccaagaagagggctggccgggggcaaagtcacctcccagtgtggctgcactggaactgactaaaggctttaccttggatagttgcgtattcctggtgagagccttacatctcccacagtttctgcagagtgactgactccattctggcagcccaggaagtcctgggtgctaaatgtgatggccacatgtagtggttaggggatgttgtgtgtgtcccccaactgcctgggtacttgttcctgatccctggggctgtcctgtggagcttttcctcctgcttgggcctagctaccatctccctctaatcccaggttctctacactgccctggggtttaccagctggattggcttctggttgagaaatcaaagctgggcgtatgattgacttaacccttcaggtattgttacttgaataagtcaagtgcctagcctcacccacctatgatctgtcctttcccagcctcgctggtagtcctggtcaaggagatctaggtctactccattcctcctggcccacctggggcattcactggcagcagctgtgcttcagtggagcaggtggttctcagctgcttgttagtatactgcatgtgacactgttcccacatacaaggctgacttctgaggattggagcaggctctggcggggaccagagctctgcgtgctgctgctgccaccaagaagtgttagcagaagcagtagcagccaactggccctcctgactttggcccagagcacatgcgtggcttgctgaacccaggctcaggtttatccccaaggccccagctttgagaagggggaaggcccctggtaagttattgatgcccccatatttcagctactgctctctttccaaggccttgcatggaaaggcctagccattgtctgaggcagcaatctttggcatctacaggtggcagcagcctttcaccagggctccatctgtgaagagtctcagccatgactttgagctgagcttgggagaagtaaagcaactgttaaggccagcccttgcccctcagacctgccatgaaaggaatgagccctagactgactcctgcagcacccccgggacaggctgggaccagctgtttgtctccaggtgtcagagtccctcctcctcctccaacctctccaacctactttgtttggaaataccgagctacacttcaaaatgtattcaagggatttccaataaatttttttctgta

SEQ ID NO: 627200 - DNA, 652 bp, Homo sapiens
  misc_feature (390)..(390): n is a, c, g, or t
  misc_feature (639)..(639): n is a, c, g, or t
ggcacgaggctttcacccccccccccccggccattaccgaagcggatgaaaacaaacactaacgatggcggcgccgggaagcgaccggctgctgggcttaaggcgggagtgaccgcttaaccagtgagggaagcactgaagagcgccagtcgacgtgggtgcgacaactcgcggagtcttaggagcaaaacgtctggggcctgcgagccaggacccttctgaagccttaggtgtctatcggcgacgtgtacggtcactgcagctccggagcgcggaaccctcagccaggaggcgcggctggtcggtcccaggtcccggcctccgtaatgagagcccggaaccactctttgtgccgcagcttcgcaggtactaacttttgcgggggatacncaagatctctcagcgcccccgggtgggaggctgtggatctgcggccccttggctgctgcttcgtggaagtagaagggattagccacggttcaatccctgggcccctgagttttctgtgggaagttgagttggtctaggccccgttggcccctgcttgtttggcagagaatcccctccaccccagagctttcctctccactttttcagctccttgggttaggtcgtcaggcgttttggaggtaatttggngggccataacccc

SEQ ID NO: 627201 - DNA, 721 bp, Homo sapiens
  misc_feature (416)..(416): n is a, c, g, or t
  misc_feature (448)..(448): n is a, c, g, or t
  misc_feature (484)..(484): n is a, c, g, or t
  misc_feature (524)..(524): n is a, c, g, or t
  misc_feature (529)..(529): n is a, c, g, or t
  misc_feature (551)..(551): n is a, c, g, or t
  misc_feature (569)..(569): n is a, c, g, or t
  misc_feature (573)..(573): n is a, c, g, or t
  misc_feature (585)..(585): n is a, c, g, or t
  misc_feature (633)..(633): n is a, c, g, or t
  misc_feature (654)..(654): n is a, c, g, or t
  misc_feature (713)..(713): n is a, c, g, or t
ggcacgaggctttcacccccccccccccggccattaccgaagcggatgaaaacaaacactaacgatggcggcgccgggaagcgaccggctgctgggcttaaggcgggagtgaccgcttaaccagtgagggaagcactgaagagcgccagtcgacgtgggtgcgacaactcgcggagtcttaggagcaaaacgtctggggcctgcgagccaggacccttctgaagccttaggtgtctatcggcgacgtgtacggtcactgcagctccggagcgcggaaccctcagccaggaggcgcggctggtcggtcccaggtcccggcctccgtaatgagagcccggaaccactctttgtgccgcagcttcgcagcaatcatttgtgacatcaaaggtgaattcatccatgccatcaagccatcnatgaagtaagcatggggacatacaagaattcnataataaggcaaatgggaaaacatgaatcatcaaanttccccaaggaacaagaaaagggacacatgtgaacaaagntttanttaaaaatttttttttgcaccntcaaagaacatgctccanaagntgaatttgatcnaagcgcatcaggcatttgtggtgaaaaaagaatttttgcaacatcagnttcaatcaatcatttcatccnaaacagggggttcaagaatttgtggttcaaacattaagcaaaatcaaaaagaacaatcnccaagaag

SEQ ID NO: 627202 - DNA, 885 bp, Homo sapiens
  misc_feature (43)..(43): n is a, c, g, or t
cacgccggtacagaattatacggacattataatcaaccgcagngcccatacagacgttaacaaatccgatgctaacacaaattctcccatctcgcacccagccggccgcctctaaacaccatactatcccttctgaaccactgtgtaaaaccctgcccgcaacgggtccttaatgcccttaccacacccccctggtatgaactagatgagaattccatacttcacaaaggaacagaggcttctaactccacaactgtgtcctggccacgagtcaaaaccaggccggcttttacccaagtggaccaagcaatacatagttttgaaaccacattataaacccatgaagctcagttaagccaacgtcactaatttgacagactcgacatattgacagtggacatagaaagaaccccaccgtccgcagaaagccgcgagcaggacaaaaattgagcccctgcccagcaacaaactgacttcccaaaggggataatcctgttcctcattgcggccgactacatacaaagggcgtgccgaaccggctggcgcaaatcctagcatgctgtcaccatccactgtttgacattccagctggtggccaagagattggtgtggaggcagaaagaggaaggagacagtgccaggaggaagaaggaaggagtcccttagctctcttcattgtcccctttacttcctgctatcttcttctcctcttcttctctctcttgcctctatgcctgtatttctggcaatatgacaggcctgcctacccaagatcagaactccaaaaccactcccacccctgaaggtcgggagggtctgagcagccctggtggctgcctgtgctcaggtcctcagctccatgggaaataaaaatggcaccctgaa

SEQ ID NO: 627203 - DNA, 435 bp, Homo sapiens
  misc_feature (73)..(73): n is a, c, g, or t
  misc_feature (92)..(93): n is a, c, g, or t
  misc_feature (420)..(421): n is a, c, g, or t
ggggggccataactccggggttgggtgccaatatgagtgaggtaggttttcattcaatcaagatttgctgagngccaaatatgtactccgcnngtcaggtgagggtgactgttgactagtgaaaaaagggacccatggttcacgactgtcttcttactggcagtggaacgacctgtggaaacctgtgatccattctcattaaataaatctctgggtaagtggctaagcaccttcttgagctcatcactaattcttcccagttttcacttttccagtgagttcccagttagcctggtcaattcagcgtagcatttcacttttggtatttcttcgttctctggccaccccgcagccaaaaagaaaaaagagattttaaaaaaatacctaatttctcattacacttagtttaaaactcatctnnctaagtgatagaat

SEQ ID NO: 627204 - DNA, 903 bp, Homo sapiens
gataggctggtgtcaccctagttataggctctccaggaaacaagggcatgaatatgtcatattatacaggatatattttggagaagttcagctgagtggcttaggagaaggcttccagacagttcgtgttgggacagtgggcacccctgtgggcaccatcactctttcttgtgcttacagaattaacttggcattcatgtctaccaggcaatttgagaggaccccacctatcatggggattattattgatcactttgtggaccgtccctatcccagctcctctcccatgcacccctgcaattacagaactgctggtgaggacactggagtaatatacccgtctgtagaagactctcaagaagtgtgtaccacctctttttccacctccccaccatcccagctgatggttcctgggaaggaaggtggggtaccccttgctcccaaccagcctgtccatggtacccaggctgaccaggagagactggcaacctgcaccccttctgacagaacccactgtgctgccacaccctccagtagtgaggatactgaaaccgtatcaaacagcagtgagggacgggcctcccctcacgatgtcttggagaccatctttgtccgaaaagtgggggcttttgtcaacaaacccattaaccaggtgaccctgacgagtttggatataccctttgccatgtttgctcccaagaatttggagctggaggataccgatccaatggtgaatctcagatccccagaaatgatctcctctcacggagcctgagttcaaatggtcccgcggggcgcattgatcccagaagacttgctgaagacttcacacgcttctaaagagctctcgacggcgggacttatcggagtaaccccatggacctccatcttgacgctgctcat

SEQ ID NO: 627205 - DNA, 318 bp, Homo sapiens
ggggggcaaaaaaattttaaaaaaaaaacccccggaatgggggggttcggggggggggttttttaaaaaaattgatttagccttcaaattttccctttttttccccaataaaaggaagccaaatatttgccccaaaggggcccttttttcaaaaaaagcaattggttttggcccgggccaatttttattttttccccggggtcccccaaaagttttttttttgggcaaacaaaaaaaataaattggcccccttttggaaatgggggaggttttaaaaaattgggaaaaaaaaaaaaaaaagcaggtttggttttccca

SEQ ID NO: 627206 - DNA, 477 bp, Homo sapiens
ctgcaatagcgcggctgggggtgtaccgctaaaatgcacatgatggaatgtccgtagccaagcaggcccctaaagtaggacttatctaatggcgacctcgactacaggtggggattcaagagattgtgacaccgtaatcccaccagtctcgacggaataaaaaaaacagcggctatttttaatgataaggaaaccacctttgccaagggcctgtgccaccctcacgtaccgagtcatttgtattgagcgttacccctttggtgatagggacctttaagggctattgcatggatgtccctatgagatcattccatcgatgccaagtgatcgtgcccgaggagccaacaggccggtccgacatgtgaaatgactcccgtactggcctgaggtcagtgttcactgcagagcagcctctgctcatccaatggttgggtgttgaggtgcatatgactctctgcgattatctccacgggtggt

SEQ ID NO: 627207 - DNA, 4054 bp, Homo sapiens
ggcacgaggctttcacccccccccccccggccattaccgaagcggatgaaaacaaacactaacgatggcggcgccgggaagcgaccggctgctgggcttaaggcgggagtgaccgcttaaccagtgagggaagcactgaagagcgccagtcgacgtgggtgcgacaactcgcggagtcttaggagcaaaacgtctggggcctgcgagccaggacccttctgaagccttaggtgtctatcggcgacgtgtacggtcactgcagctccggagcgcggaaccctcagccaggaggcgcggctggtcggtcccaggtcccggcctccgtaatgagagcccggaaccactctttgtgccgcagcttcgcagtggaacgacctgtggaaacctgtgatccattctcattaaataaatctctgcagattcctataggcaatggaaactgatctcaattcccaggacagaaaggacctggacaagtttattaaattttttgccctcaagactgtccaagtgattgtccaggctcggcttggtgaaaagatttgcactcgttcatcatcttctccaacgggttcagattggttcaacttagcaatcaaagacatcccagaggttacacatgaagcaaagaaggcactggcaggacagctgcctgcagtcgggaggtccatgtgtgtggagatttcacttaagacttctgagggagattccatggagctggaaatatggtgtcttgaaatgaatgaaaagtgtgataaagaaatcaaagtttcctacacggtgtacaacagactgtcattgctgctgaagtcccttcttgctataactagggtgacaccagcctataggctctccaggaaacaagggcatgaatatgtcatattatacaggatatattttggagaagttcagctgagtggcttaggagaaggcttccagacagttcgtgttgggacagtgggcacccctgtgggcaccatcactctttcttgtgcttacagaattaacttggcattcatgtctaccaggcaatttgagaggaccccacctatcatggggattattattgatcactttgtggaccgtccctatcccagctcctctcccatgcacccctgcaattacagaactgctggtgaggacactggagtaatatacccgtctgtagaagactctcaagaagtgtgtaccacctctttttccacctccccaccatcccagctgatggttcctgggaaggaaggtggggtaccccttgctcccaaccagcctgtccatggtacccaggctgaccaggagagactggcaacctgcaccccttctgacagaacccactgtgctgccacaccctccagtagtgaggatactgaaaccgtatcaaacagcagtgagggacgggcctcccctcacgatgtcttggagaccatctttgtccgaaaagtgggggcttttgtcaacaaacccattaaccaggtgaccctgacgagtttggatataccctttgccatgtttgctcccaagaatttggagctggaggataccgatccaatggtgaatcctccagattccccagagactgaatctcctctccagggcagcctgcactcagatggctccagcgggggcagcagtggcaatacccatgatgactttgttatgatagactttaaaccagctttttctaaagatgacattcttccgatggacctggggaccttctatcgggagtttcagaacccacctcagctgagcagcctctccatagatattggagcacagtccatggctgaagacttggactcattaccagagaagctggctgtgcatgagaagaatgtccgcgagtttgatgcctttgtggaaaccctgcagtaaaagtatccttgagtcccagcagcaccccctttttgtggccccagggcataagcagcctcccatgcatcagctgctcccacccctcatcctgctctgagccaggtggaagggaggctggcttctcccatggggacccagaagtccctactcttggacctcctggagactccgtggcggcagtcaagcccagtgcccagttggagaagactcacgtgctggccttggagatgggaagaaccttcgtacgaaaaagccctcagcagggccatctgtgtgccctgcccatcaccaactgcttcccaagggtgtcatcctgttcctcctgctgccggcctcctgcctgggcctgccttgcagctggccccttccctgcctgctgtcaccatccactgtttgacattccagctggtggccaagagattggtgtggaggcagaaagaggaaggagacagtgccaggaggaagaaggaaggagtcccttagctctcttcattgtcccctttacttcctgctatcttcttctcctcttcttctctctcttgcctctatgcctgtatttctggcaatatgacaggcctgcctacccaagatcagaactccaaaaccactcccacccctgaaggtcgggagggtctgagcagccctggtggctgcctgtgctcaggtcctcagctccatgggaaataaaaatggcaccctgaatctctaggattttgtcacttggagtcacagcaaagttctcttcctcttgtccccccgttgctgctccttggttatagaacatggtaaatatttattactttcagagaaaccagatattttatagaggaaatatgtttgaggtgagttgtttttcacttggagaaggcggagggctcttcctgggacggagacctcctcctccggaggttattgagaatccgggctgctgctttgaggatcttcccaccatacagacagcgagatccaagaagagggctggccgggggcaaagtcacctcccagtgtggctgcactggaactgactaaaggctttaccttggatagttgcgtattcctggtgagagccttacatctcccacagtttctgcagagtgactgactccattctggcagcccaggaagtcctgggtgctaaatgtgatggccacatgtagtggttaggggatgttgtgtgtgtcccccaactgcctgggtacttgttcctgatccctggggctgtcctgtggagcttttcctcctgcttgggcctagctaccatctccctctaatcccaggttctctacactgccctggggtttaccagctggattggcttctggttgagaaatcaaagctgggcgtatgattgacttaacccttcaggtattgttacttgaataagtcaagtgcctagcctcacccacctatgatctgtcctttcccagcctcgctggtagtcctggtcaaggagatctaggtctactccattcctcctggcccacctggggcattcactggcagcagctgtgcttcagtggagcaggtggttctcagctgcttgttagtatactgcatgtgacactgttcccacatacaaggctgacttctgaggattggagcaggctctggcggggaccagagctctgcgtgctgctgctgccaccaagaagtgttagcagaagcagtagcagccaactggccctcctgactttggcccagagcacatgcgtggcttgctgaacccaggctcaggtttatccccaaggccccagctttgagaagggggaaggcccctggtaagttattgatgcccccatatttcagctactgctctctttccaaggccttgcatggaaaggcctagccattgtctgaggcagcaatctttggcatctacaggtggcagcagcctttcaccagggctccatctgtgaagagtctcagccatgactttgagctgagcttgggagaagtaaagcaactgttaaggccagcccttgcccctcagacctgccatgaaaggaatgagccctagactgactcctgcagcacccccgggacaggctgggaccagctgtttgtctccaggtgtcagagtccctcctcctcctccaacctctccaacctactttgtttggaaataccgagctacacttcaaaatgtattcaagggatttccaataaatttttttctgta

SEQ ID NO: 627208 - DNA, 4114 bp, Homo sapiens
tctgaggggagtcccactgtggctgccgcagcgaatgaatctgactaggccctatgtaggttgaaggttcactccctggcctcgctcagatgggttaaggatctggcgttgctgtgagctgtggtgtaggtcacagacatggctcagcggtcgacggacggtccgtcgaccgcttaaccagtgagggaagcactgaagagcgccagtcgacgtgggtgcgacaactcgcggagtcttaggagcaaaacgtctggggcctgcgagccaggacccttctgaagccttaggtgtctatcggcgacgtgtacggtcactgcagctccggagcgcggaaccctcagccaggaggcgcggctggtcggtcccaggtcccggcctccgtaatgagagcccggaaccactctttgtgccgcagcttcgcagcatcttggactcaagtgattctcctgcctcagcctcctgagtagctgggactacagattcctataggcaatggaaactgatctcaattcccaggacagaaaggacctggacaagtttattaaattttttgccctcaagactgtccaagtgattgtccaggctcggcttggtgaaaagatttgcactcgttcatcatcttctccaacgggttcagattggttcaacttagcaatcaaagacatcccagaggttacacatgaagcaaagaaggcactggcaggacagctgcctgcagtcgggaggtccatgtgtgtggagatttcacttaagacttctgagggagattccatggagctggaaatatggtgtcttgaaatgaatgaaaagtgtgataaagaaatcaaagtttcctacacggtgtacaacagactgtcattgctgctgaagtcccttcttgctataactagggtgacaccagcctataggctctccaggaaacaagggcatgaatatgtcatattatacaggatatattttggagaagttcagctgagtggcttaggagaaggcttccagacagttcgtgttgggacagtgggcacccctgtgggcaccatcactctttcttgtgcttacagaattaacttggcattcatgtctaccaggcaatttgagaggaccccacctatcatggggattattattgatcactttgtggaccgtccctatcccagctcctctcccatgcacccctgcaattacagaactgctggtgaggacactggagtaatatacccgtctgtagaagactctcaagaagtgtgtaccacctctttttccacctccccaccatcccagctgatggttcctgggaaggaaggtggggtaccccttgctcccaaccagcctgtccatggtacccaggctgaccaggagagactggcaacctgcaccccttctgacagaacccactgtgctgccacaccctccagtagtgaggatactgaaaccgtatcaaacagcagtgagggacgggcctcccctcacgatgtcttggagaccatctttgtccgaaaagtgggggcttttgtcaacaaacccattaaccaggtgaccctgacgagtttggatataccctttgccatgtttgctcccaagaatttggagctggaggataccgatccaatggtgaatcctccagattccccagagactgaatctcctctccagggcagcctgcactcagatggctccagcgggggcagcagtggcaatacccatgatgactttgttatgatagactttaaaccagctttttctaaagatgacattcttccgatggacctggggaccttctatcgggagtttcagaacccacctcagctgagcagcctctccatagatattggagcacagtccatggctgaagacttggactcattaccagagaagctggctgtgcatgagaagaatgtccgcgagtttgatgcctttgtggaaaccctgcagtaaaagtatccttgagtcccagcagcaccccctttttgtggccccagggcataagcagcctcccatgcatcagctgctcccacccctcatcctgctctgagccaggtggaagggaggctggcttctcccatggggacccagaagtccctactcttggacctcctggagactccgtggcggcagtcaagcccagtgcccagttggagaagactcacgtgctggccttggagatgggaagaaccttcgtacgaaaaagccctcagcagggccatctgtgtgccctgcccatcaccaactgcttcccaagggtgtcatcctgttcctcctgctgccggcctcctgcctgggcctgccttgcagctggccccttccctgcctgctgtcaccatccactgtttgacattccagctggtggccaagagattggtgtggaggcagaaagaggaaggagacagtgccaggaggaagaaggaaggagtcccttagctctcttcattgtcccctttacttcctgctatcttcttctcctcttcttctctctcttgcctctatgcctgtatttctggcaatatgacaggcctgcctacccaagatcagaactccaaaaccactcccacccctgaaggtcgggagggtctgagcagccctggtggctgcctgtgctcaggtcctcagctccatgggaaataaaaatggcaccctgaatctctaggattttgtcacttggagtcacagcaaagttctcttcctcttgtccccccgttgctgctccttggttatagaacatggtaaatatttattactttcagagaaaccagatattttatagaggaaatatgtttgaggtgagttgtttttcacttggagaaggcggagggctcttcctgggacggagacctcctcctccggaggttattgagaatccgggctgctgctttgaggatcttcccaccatacagacagcgagatccaagaagagggctggccgggggcaaagtcacctcccagtgtggctgcactggaactgactaaaggctttaccttggatagttgcgtattcctggtgagagccttacatctcccacagtttctgcagagtgactgactccattctggcagcccaggaagtcctgggtgctaaatgtgatggccacatgtagtggttaggggatgttgtgtgtgtcccccaactgcctgggtacttgttcctgatccctggggctgtcctgtggagcttttcctcctgcttgggcctagctaccatctccctctaatcccaggttctctacactgccctggggtttaccagctggattggcttctggttgagaaatcaaagctgggcgtatgattgacttaacccttcaggtattgttacttgaataagtcaagtgcctagcctcacccacctatgatctgtcctttcccagcctcgctggtagtcctggtcaaggagatctaggtctactccattcctcctggcccacctggggcattcactggcagcagctgtgcttcagtggagcaggtggttctcagctgcttgttagtatactgcatgtgacactgttcccacatacaaggctgacttctgaggattggagcaggctctggcggggaccagagctctgcgtgctgctgctgccaccaagaagtgttagcagaagcagtagcagccaactggccctcctgactttggcccagagcacatgcgtggcttgctgaacccaggctcaggtttatccccaaggccccagctttgagaagggggaaggcccctggtaagttattgatgcccccatatttcagctactgctctctttccaaggccttgcatggaaaggcctagccattgtctgaggcagcaatctttggcatctacaggtggcagcagcctttcaccagggctccatctgtgaagagtctcagccatgactttgagctgagcttgggagaagtaaagcaactgttaaggccagcccttgcccctcagacctgccatgaaaggaatgagccctagactgactcctgcagcacccccgggacaggctgggaccagctgtttgtctccaggtgtcagagtccctcctcctcctccaacctctccaacctactttgtttggaaataccgagctacacttcaaaatgtattcaagggatttccaataaatttttttctgta

SEQ ID NO: 627209 - DNA, 652 bp, Homo sapiens
  misc_feature (358)..(358): n is a, c, g, or t
  misc_feature (373)..(373): n is a, c, g, or t
ggattggtgtatttcgctggccataaaggcaaaggttccccccttgtgggttgaagcgtcccaaggcctctttccccccgctgaaaaaaaaagtatgatgtggaccccctgggccatggttttcctcgacccttggaaggaccggtccctcccggacacccttctcttgaaggaatgtggccttctgcgaaaggggccagtgttactggctgacaacgtgatctgcccaggtgcgccagacttcctagcacacgtgcgcgggagcagctgctttgagtgccccccctaccaatcgttcctggaatacagggaggtggtggccggcctggaaaaggccatttacaagggcccaggcaanaaaacagggccctgnttgccccccccggcccccctttggggctttttcacccagcctggtactaaaggtgccaaacgtgctcctgttgcccttttgcggctccgggctgtgtcctaaatgcaaagcccccctcggccgaggcctgcgccctgacatgctaacctttttgaactgcaaccctggattgtttttttttaagacccaatcatgacttttttactaccccgggctagctatattatcttaaatactaaaatcatgttttaaaaatataaaatagaaattaagaattta

SEQ ID NO: 627210 - DNA, 137 bp, Homo sapiens
tcccggggccctatgggaaaaccccccccccccccagggaaaaaggggcctttccccccgggcccccccccaaagtttgggggaattccggggcccttttgggggggggattttattaaaacccctttttaaattta

SEQ ID NO: 627211 - DNA, 1345 bp, Homo sapiens
  misc_feature (1192)..(1192): n is a, c, g, or t
ggaggactattctcagacaagtcagactgtcgatattcctagaaaatgtcgatattactcttgaagggacgcacagtatatctgtgaagggcccctagaggaatccctgcgagagggacttcaatcacattaatgttaaactcagccttcttggaaagaagtgaaacgaggctaccggagtagatcaaaatggtgggtgtacactatgcatgagtgaacctggcctacgcgcttctggacttcattgtgttacctcagtgttagcatgacatcattgcactcacatggcgtgtgtaacactagaggcttatcgcagattcacccatacaaattgcaggggattctagtggcctaataggcgtccaactatgcactcgcaagtcaaagcacttcgttctcattccctaggtggaggcagaacttgggggttcttctgtgtgctgtcagacagattccctgcagaggaatttgtcctttggtgggttggtagataccattcaaccattttctgtcttagtgggttctccgggcactttaggaaaccaccgcgcctggtaaggtcttctgccttgcacggtgtacttgccttgcagagggcccgcgcaggaacccccggaaggtgcacacttttctagaatcccccgttgtggacacacgccgacacacttgcaagcaggttgtgcaatgggcttgcggtcagagcagaagtactcttcaatgcccgttgtcctgatatgggatactagtgcgatgtccaatagggggccgagccaataggcatgtctgttgaacactggagccacctcggaggcagtcacttctaacggcgcaaaaatactctcccttctgggtcacgtcgcgggtcacttccatcactcgcgttcccgtccttgtacacacggatacccgggtaaaaacgtctgctttccctaggtcgcatgggaccttggcattgtggataggtaactgcaacttccgtagaggaacgagctctaaccgcgtggtgccctaggccccggaacacagggtacagggaatatggtcccccaggcagttgtaaccacctctttcagacggaagccagtaaacctattgccttggcaattacattccttgcagaccactgggaattcgtcgcgcaatttacacatacgaggcaacctctcacttttgggcaatctctgtgtggccncccgtcttcgtttgtcgttctccagcagcaaaagaaaccctgaacacagaaacccactgaggaccctagcgagaacaaacgagacatactatgagtgagcggccccgaggtggatcgagccctacagaccacacaagaaacctatattcgcag

SEQ ID NO: 627212 - DNA, 285 bp, Homo sapiens
aggaaaggcaacctgaggagagggcttgcagccagagaggggctgaggactgtgggaccgagagctagcagacgcactttagttgcttatagctcttcctgctggaggaggaggtggtggtgtacttgatggtggaacttgccgcctccaacagagctgaggccaccccccaatggctctgccagtgttggaattgaagccacctccaacgccaagaccacttgccataggagtagctgtttcctccacccaggcctaagccaactgccgaacaccacttggcac

SEQ ID NO: 627213 - DNA, 925 bp, Homo sapiens
  misc_feature (267)..(267): n is a, c, g, or t
  misc_feature (427)..(427): n is a, c, g, or t
gacagcagtccgtgccgccgtcccgcccgccagcgccccagcgaggaagcagcgcgcagcccgcggcccagcgcacccgcaagcagcgcccggcagctcgtcccgcgccatgttccaggcgtgcgagcgcccccaggagtgggccatggagggcccccgcgacgggctgaagaaggagcggctactggacgaacgcacgacagcgtgctggactccatgaaagacgaggagtacgagcagatggtcaaggagctggcaggagatccngctcgagccgcaggaggtgccgcgcggctcggagccctggaagcagcagctcaccgaggacggggactcgttcctgcactgtggccatcatccatgaacgccaaggcactgaccatggcaagtgatccgccaggtgaagggagacctggccttcctcaanttccagaacaactgcagcagaatccaatccactgtggttgtggatcaccaaccagccagaaatggctggaggccacttcctgggaagctggttggtgatcctggagctccgagactttcgaggaaataccccctagaacttgcctgtgacgcagggcttgcctgggccaagcgtgggaagtcctgaatccagtcctggaccagccccggaactccaatccattcctgaaggggtaccaattacgagtgggcacacgttgttctaacactttaagcttctatcaatggttacctggggcatccgggggagcaaaggggtccaatgagctgcagacgcgcaacgcccacagaaccctgtgaatgcgccgagctggccttacactccgcaagtgagcatgcgaaaatactcgacctgttggcaccctcgtagaaagcggtgtgcggcagacataacaaacacgaacctcacacgaggaatagtcccaaacacagcgcaccg

SEQ ID NO: 627214 - DNA, 101 bp, Homo sapiens
cctgctttttgctggtcgcctcttgtggatcccccccgttccgattgccctgccgatggccatgttgccccatgtcctgcatggttcggaaaacaggtctc

SEQ ID NO: 627215 - DNA, 1283 bp, Homo sapiens
gcacgggccctttccctctccaggccctctccttatctatgtgaagtcctgctggctacgtgcttaccctcaggaaagcctcagtggcccccatggaggagggcaggctgcctgatgtctactacctgttgcagtactggaattcgtgagccggtatacatatatcgataaaagactgagcacagcgatgtataacaataacttgggagaaaaccgccggctgatgcccgggtctctctctactgctaatgatcctcaatggcggtcaggcgtcactcttttgtgctacaccatgaacccagcgcatgtgtggggacttgttgggtgcagaacttatttggggacttgcaagccctattctataaatgcactgataatataagacctcaaactataatgcctctaaatggactaaatgaacctaaccgaagcgccaaaggtacttgtgaaaaggatgactggaggtaatatacaccacaagtcgcccgagatgatgactgggtattactggcgtaaaatcatgcatggggaaaatcaagctctattatccatctgggatagacatagcacccttcccatagccccgggggcaaaacaggagcaattgaatactaaggcagtattccaagataatctataatgaatgctctcgggggggcatcccccatggacaccgatccatcatatcacaccttactatattccaggtcccccaagggccgatactccaacacatgcaatggcaatggcgatcgacttaggttgcgactcattccctacctatttaatgaccgaaagcgagtcactttcaattaggcacggaaaacagccctgaccttctatcgtttccatgggcacctggccccacggtacattaaacaatcaaaggcgacgagccaccaaagggtggactcccgctataaagcaagaatgcaagttaactctgggaagcgttaccatctataagggtttcccccaaggatacatattattccaagaagaatagactcaacttaagagtggactctctataaccaagataattacttggaacgcaaattcgagacactgtgattgtgcttgttggccattttaaaatcctctttacattaccccattaaagtttattgaaccactatttggcccgaaattctttacctgttgccaaagtgggtctcccttaattttatttaacgctggagctaatcctcaagttggctttggcttggagatcttcctcctgtatccattttagaaaacacgggaggatgcactgcgcgggt

SEQ ID NO: 627216 - DNA, 896 bp, Homo sapiens
gcgcctctgtggttggttagcgtgcgggtctagggcggcctcgtgggggggggctcaggtggtcgtggcatctccgaggtttgcgctctggatcatcgcatcggtggctttggtcctggggtcctgcgacgtcggctggggcgttcgagtcttgctctggacgggggtcgctacggcgattggtggtggcccgcggttccttcgtgtgttggtccttcctaccgtgttggccacatttgggtggcgtgggggatttcccgggtggagcaggagggcgagttgttccatccggcctccctggggatgcccacagcgcagctcctcacgctgtgcccgggaattcacgatcgaaacccgccgtaggaagggcctcagtgaagatgtgagcagtcaggcaaattcgtcgatggatcctattcgttcgctggaacttgccatcaccaggatgttgtgctcaacttaccccatgtgagtgcgtggacctcctgggagctcctgcgtccctacagtggtgctgcaactcctgtacttgaagactgagacctcatatgatcgtggccttcgtgttgtcagagagtgtctggaagctgcttgttgccatcttgtactactcaccaacctccaacccagagcctcagtcagagaggagcatatggcctcctgcattccttctgtggcctcagccgggctccattcccgaggaaaaagtgaggagcttgggctcacagaaagagaagggcgatgataccccaaggggccctatctttgggatttacatggaattgtcattttctacaagtctggaccttagccatagtttgcaagtgaacagaacattctgacctctgttctgctctgctcctttcatcctctctttactccccgtcggtgctaac

SEQ ID NO: 627217 - DNA, 134 bp, Homo sapiens
  misc_feature (2)..(2): n is a, c, g, or t
anttagaggatccctggaggcaggacactggggctcacaggtcgctctgccatacaaggcgtggagaaggacttgtagtcgatgggcaccgggcacggtgtcagggccctgtgtatggctgccatgcgggcgat

SEQ ID NO: 627218 - DNA, 732 bp, Homo sapiens
gctctttcccttcggtgtgccactgaagatcctggtgtcgccatgggcgccgccccgccgtggttaccggtatggtaagaacaagccggtacccaaagtctcgcttctgccgaggtgtccctgatgccagagattcgcatttgtgacctggggcggaaaaggcaacagtggatgagttcccgcttgtgtcggccacatggtgtcaagatgaatatgagcagctgtcctctgaagccctggagtcttgcccgaatttgtgtgccaatacgtactctggtaacaaagtggtggcaaagattggttccatatccggggtgcgggtccacccctttccaggtcatcccgcatcacccaagatgtggttccctgtgctgcgggctgacagtgctccaaaacagggcattgcagaggtgccttgtgaaacgccccagggcactggtgggcccagggtttcacaattgtgccacagttatcaatgtccatccgcaaccaggctgcagacaaccagggaggccaggttgaatgtaagggccccgtgcgcaggggcccagggtccaaggtttacctgtgcccgccagaatgtatccacattctcaccaggacaggggcggccttacacacaagttccaatggctgctgcattttggcacgaacattggggcttgcaaagggctccatcccatcatgcctggggggccaggtacttccccagtcgtgcccttctgacccagg

SEQ ID NO: 627219 - DNA, 717 bp, Homo sapiens
agaggctgaaaccactgtatattaaaagcttcgagagcactgttgggccaggtgcagacacatacatctacatcttcagggtgtgccgggaagctggtcaaccacactctctgtcggcaggcctggttgcaaagtcaacaaaaagtaatgggaaggagacagtggtagggagactcaacgagactcacatcttgcaacgtgaagtaattgggtatcgatgctgatctataaacgggcgtgtgatgtaatatgacgaaccactgtgtgcgaaggatgcagcgtcgtgcacgtggtgatgatctcctgccaactcgacgagcaccctagcggacaattgtataaccctgtgtctgagtgagcgtggtcaaagatccaagatagtttctacctcttttgatggatggactagcaggcctggactgtgcaccaagagatctcccagcctacagtgtgggttccactcttacttgtcactgtactagcatcacgtggattgctagtctatagtagttaggggggtacctataccagcgactggtagtaggagagccaactggaatggagcagtttccccacttagccttctggcaggatcttggtcaaactggtagcagatgagctgtgactttgtctgccgttctaacctcgaaatgtgcctgcagcatatcagaggtgtgagggatgaccagctggggaggatccacaagaaaggatgac

SEQ ID NO: 627220 - DNA, 158 bp, Homo sapiens
gccattggtccgagagaaattagtatattactgtgatggtagtacaatggttgtgttgtagaaagggaaccagagtatgaagaaaatcatggggactcaaaagtacaagttccttgaggacatctatacaggcatttctaatttctctcggaccaatg

SEQ ID NO: 627221 - DNA, 280 bp, Homo sapiens
cattgggtccgatgagaaattaggagtattaaagagtgtacagataagaataaatggaaataaataaatctccgtgcttcagtgtgcatcaacgattaaatgcggaaccatattgaaatactgtgctagataaatacgtgcttggtatattactgtgatggtagtacaatggttgtgttgtagaaagggaaccagagtatgaagaaaatcatggggactcaaaagtacaagttccttgaggacatctatacaggcatttctaatttctctcggaccaatg

SEQ ID NO: 627222 - DNA, 371 bp, Homo sapiens
taatctaccatacactgagtgctacgatcctgtagcaggagaatggcagtcttaggctaagctaccagtagtttaccaaatcgagagtatgcagtctgtgctctaaggaatgacattctatgtattcaggtggaagaatcaacagccgtgatagtctggatttataactcacagttaaatatatggatcagagtagcctctctcaataaaggcagatggagtcacaaaatggctgtcctccttggtaaagtatatgtggtcggtggctatgatgggcaaaacagacttagcagcgtagaatgtaatgattcctttacaaatcgatggactgcagtagctccccttaaggaagccgtgagttctcctgcagt

SEQ ID NO: 627223 - DNA, 786 bp, Homo sapiens
atatgggaggaactaaagcatcctgtttgtatctgtccatactcagttattttctgtctcttgttgtttacttcctggttcagtgatactttcttaaggggtcgagaattgaatgatgtatctccacctaaggcgtgcatgaatattagagtctattacctagcgcccaaatatagagtaatatagcctggtggtgaggacaactgtgagtcttagttgcaatagcatcctgttatgttctatctccagttcattcaacatcatgtgctgctgaatgacactcttaggactcctgaactgttttatagtgcctaaagtcatacatatgttgagcttgtacagtcgagctataagacgcatacgtattagtatagaagcaaagactaaacaaaagtgtttgaagttgtgtatcctctacttactggatgtagaggctattgggacactctttttgactgagtgcctatatagacattctctgattattgtgaccaagctctaaggacctgcctgctttgagtctaaactgtgagaatcatgctgcgattgctctacagggtgtttatttaatgcagactctcagagaactgaggaaactgatgctggttcggtttgcttcttatggatgacagaagatgtctgaagaacgttgcaaaaatggtacgatgtttgagtagctttaagcgcacttccgtatcacttaaatacggggacctgtttaatactggggttcatttgtaaactttattattcgccttattagaagcaactgggaggttaaaatta

SEQ ID NO: 627224 - DNA, 541 bp, Homo sapiens
tcgtcttttgtttcaatgagaatatagatgaggaaaataaaagtgaaggagaaatttagagcgacttacaggtttctgtgttgtgtgatttggtgggaggtaccattccttaagggagaaaatataggaagaagagcaggggcagagaaagggaagatgaagtcggttttggacatactgagtttgagatatgtatccaagtggaggtgtacagaggcttggtgtcccatacagtttctcatttaatcctttctataatactgtaaggtagatgttactctgtttttaagagatgaagaaaccgaggctctgaaagggtaatttgcataaagtcagttagccagacagtgggcagcactaggatctaaatgtaaatattctaattctcttattcttattgaaagagagggcttttttttgggttataaactcatctatattacacctagacttttaagcatctttttaaagttgttatattcattagtttttatattcattacctaatataatttttggtatacattgaaacaaaagacga

SEQ ID NO: 627225 - DNA, 438 bp, Homo sapiens
cccgatcgcagttagtcgctccatccatgtcttcaccgtccgcggtcccagtgtctacaccatgtgctatggagacatggcggtgtcgccaccctgtgtcttagtgtccccaaatccaagcggattcagctgtaccttccgcacaggcctcaatctgctttctgatggcaagatctgctcaccatgcatccacagtaacctcatcttcgccaggcggatagacattcgcattgtctccctggacatcccttatgttgctgatgtggtggtacccctcaacattaccattaagaacaccattgccattggagtaaatccccaggaagggaatgtgtactgatctgacaggaaactggaaaggatcagtcgagccaatctggattgctcacagcatgaggaattcatcaacacaaggctaaagaacaaagataggcaccc

SEQ ID NO: 627226 - DNA, 277 bp, Homo sapiens
gttccccgccgccgcgtgggttgcgcttattgtacttgtcctgcccccgtcgccgcatactcctcagcgctaggtgtcccctccatcccctcgtacgtcagctcctcacagacgcccgcgtcgatctcattgagcgccttccactgcctcgtagggcagccgcagcgcctcggccgctctggatcgtgctccttcagccctggctggctccacaactcggcacggtcccttcacggttcatgcctcctccacgaaactcacctcagagtcacctggg

SEQ ID NO: 627227 - DNA, 731 bp, Homo sapiens
ggccgccctttttttttatttctggattgggaaaaggaaggttttaacccttaaagttaaaaaaagaaaacatttctcacacagaagaataatctgcttgtgagaaataaagaaattagaaggtgtacaaaaaaatttttcaaaccccaaataagtgataaaaatagagtgtatcctcgtgtaaaaatcgtggacgtaaactattcggctcatgcagggttattcagtattcagagcatgaagtgaaacaccgaagagtataaaaaattaaaaaaaaaaaaaagggaactccgaaaatacgtgccgtgtgggtggccggccctcggcgtgtggacgccccgaccagtgggccacgcagggcgctcggcctcctctcccaccttctccgaagaaccatcaggcctctaaagagctatctctcctgtggggcccgtgcctacagtttgggtggcatgtgttccttctctattaaacttgtgcctcaaatgtgcgctccaaaattctgtcgtgttcttccaacccttacaaattttaaacaggggtccatttgtggcgtcccacagtgggggggggcagaagtataaaagtgtgggggagaagagcccttcacaaccttatattaggcggggctccgctgtggggagaccgtctcagatgaggccaaggaggggggcgggcttccacactctttggtgggcagaaattgaccccacagggcggcccccttgttt

SEQ ID NO: 627228 - DNA, 468 bp, Homo sapiens
gttcctggaagcccatgggggttgaggttttcaagactatcccccttggggtggctttgctgtttgtgatataagacaaccagttgcggggggtgtcatcaaaccagtggacaaaaaggctgctggagctggcaaggtccccaagtttgcccagaaagctcagaagggtaaatgaatattatccctaatacctgcccccccccttttaatcagtggtggaagaacggtttcagaactgtttgtttcaattggccctttaagtttagtagtaaaaggctggttaatgataacaatgctttgttaacccttcagaaggaaaggggaatgttttgtgggcccctttggtttttttttttggggggggcggttttaaggtattagtttttaaaatcaggcctttttaatgggaaccacttggcccaaaatttgtcccagaattttgggacccctttaaaaagtttaatggga

SEQ ID NO: 627229 - DNA, 230 bp, Homo sapiens
aagactcaatgaagtataaataaactacactataatgatctatgtagtaacattaacctgctgaaaaacaataaagaaaactagccccagccagtactattctagaaagaacacagaattggttcccagttcacaccagttccctaagtactcacaaaacacccagttaacaattaattactaatagcaggggtaggtacaacctaccacctagcaggccataatctggc

SEQ ID NO: 627230 - DNA, 589 bp, Homo sapiens
gctcgctacctgtggctgaaggtcaatggtacttctgtttatcatgtccatttgtcactttttgctttcgttacaattatttttgggatctttgtcatgaaatctttttccgttcctatgtccagaatggtattgcctaggttatcttccagagtttttatagtttggggttttacatttaagtctttaatccatcttgagttgatttttgcatatggtgtaaggaagtggttcagtttcaatcctctgcatatggctagctagttatcccagtaccacttactgaatggggaattctttccccattgcgtatttttgtcaactttgtcaaagattagatggttgtaggtgtgtagctttatttctgggctctctattctgttccattgatctatgtgtctgcttttgtaccagcaccatgcttttgtaccagtatcatgcagttttggttactgtagccctgtagtatagtttgaagttgggtaatgcgatgcctccagctttgttctttttgcttaggattgctttggctttttgggctcttaattggtttcaaatagattttaatgctctatgcgtctgattctgt

SEQ ID NO: 627231 - DNA, 213 bp, Homo sapiens
aaaaaattgtgaaactccctgttgtgttctgtaccagtgcacgaaacccctgtcacatagcccctagattgctcaatcaatcacgaccctttcatgtgaaatctttagtgttgtgagcccttaaaagggacagaaattgtgcacttgaggagctcagattttaaggctgtagcttgccgatgctcccagctcaccaaagcccttccttttcca

SEQ ID NO: 627232 - DNA, 178 bp, Homo sapiens
gatactgagatctggggtgtctctcccttccaggaatgctgggcccccagacctggccagagtagagagactgtcaggaagggtcggattctgtaaaagcagcatacagtttggcttttttcactattgatcatttctatatgaaataagaagatcctgcatttatggtgtggttctg

SEQ ID NO: 627233 - DNA, 332 bp, Homo sapiens
cacctatccaaaacatccctcccctcgccgccatgtgcggaaaacactaatctattatctttctctgtgaattctctcctattcctgacacttcatataaatgtaatcatacaatacatggccttttgtgtgcggcttttttctcttagcataagtttccaaggttcaaccattttgtagcatgtacttcattactaaatggctaaataactcactgtatatatatatatcacattttgtttatccattcatcactgatggacattgaggttatttccatttttttggccattatgaataacgttgttatgaagaggtggcatcgataaaca

SEQ ID NO: 627234 - DNA, 714 bp, Homo sapiens
accggtccgtccgtagttaatttgtctccacaaaaggttagtaaagctagggcacaatacatcgctgtgcaggtggatttaaacacccagactttttgccacatttcaatgtgtgcccagtcagaagcaaggatacctatgaagattccgcacgtcctcttgactattgttacttgacatacagtatactgtatatctatagagcatgccaatctttcataagtgtcgacgatgcatgtgagtacgcatgtgctcttcaagcattaagtctgttgttcgatgcaacagaactcagaatatcaaaccgtgttaattgagctcatctcacagtatttatgtgtggttgtaaggtggcacagacctcataaggttcggagtgtgatttaagctgtacaagatctcttacttcgtgaaaaaacaccttaatacgctcctatggtaggagtgttaagtaacgtcaatttttggccgggtttttttgtgttagcccgtaatagttcgcaccccttatacattgtacagaaaagggcactgttttacatatacctttaaacattttgagttgattgatctatatagattgtcagcgacatcattgtcgagtaaattgtcatcacggtgcatttatacatcctcggatattcttcccccagccgcagtgtcctgtgtacatagttgatgcacaaggagtaatctcttaatatacgggaacat

SEQ ID NO: 627235 - DNA, 253 bp, Homo sapiens
ccgcaccgcaccttatgaccttggcaacggttacggccacatcgctttcgccgtcgatgatctcgaagcggcgcgcgcgaaaatcgtcgaagcgggctatcagccgaaagacatcaagaacatgacccacgacggcaagccgttcggcacgttcttcttcatcgacgacccggacggctacaagatcgaagtcctgcagcgcggcggccgtttccaataacgatttgaggacaagatggctgacgacgatttc

SEQ ID NO: 627236 - DNA, 529 bp, Homo sapiens
tcgggctgcgccagtggtggtgggatccgaaggccgaatcacgccgcgtgcacgaccctgaacccgggtccggctcggcgtggatcgatgcacacgcgcacctcgccgggcaagcgcgcactcgacatcggcgtgcggcggcggcatcctgtccgaatcgatggccggactcggcgcacaggtgaaaggcatcgacttgtcgaccgaagcactcggcgtcgccgacctgcacagcctcgaaagcggcatctcggtcgagtacgaggccatcgccgccgaagcgatcgccgcgcgcgaaccgggcagctacgacgttgtcacctgcatggaaatgctcgagcacgtgccgtctcccggcgatatcgtcgccgcgtgcgcgacgctcgtgaagccgggtggctgggtgttcttctcgacgctgaaccgcaacctgaaagcctacctgttcgccgtgatcggcgcggagtacatcgcgcaaatgctggcgaagggcacgcacgaatacgcgcgcttcatccgcccgtcggaa

SEQ ID NO: 627237 - DNA, 356 bp, Homo sapiens
aactgcctagtaggggggacttctggtgctcgccaccgcgcctggctcattttttgtattcttagtagagacagtttcatcatgttagccgggatggtttggatctactgacctcgcgatccgcctgcctcggcctcccaaagtgctgggattacagacgtgagccaccgcgcccacctttttgtatttttagtagagaccgggcatcaccatattggcccagttggttttgaacgagatccacctgcctcggactcccaaagtgctgggattacaggcgtgagccaccgcacccagcttggctttgcctattcttgaacattacataaatggaaccacagtatgaactcttttgt

SEQ ID NO: 627238 - DNA, 235 bp, Homo sapiens
atctagcaggatcttatttgcggtgcctttccctacagctgtgcatattcaggtgacggcatggtccggtgggtacagtgaacaccaacacatcctacaaagccctcagcgcaggggggaaacagcccggtgtcgcctgctcgtgggccttggaggccatcaactattacactcacaggtgagggggctgggggctaaagtgaatcttgtggagcttgggagaatcccgggataa

SEQ ID NO: 627239 - DNA, 685 bp, Homo sapiens
  misc_feature (7)..(7): n is a, c, g, or t
  misc_feature (157)..(158): n is a, c, g, or t
  misc_feature (195)..(198): n is a, c, g, or t
  misc_feature (201)..(202): n is a, c, g, or t
  misc_feature (214)..(214): n is a, c, g, or t
  misc_feature (310)..(310): n is a, c, g, or t
  misc_feature (358)..(358): n is a, c, g, or t
  misc_feature (368)..(368): n is a, c, g, or t
  misc_feature (525)..(525): n is a, c, g, or t
  misc_feature (683)..(683): n is a, c, g, or t
gtcgggnggtttgttttagagctactcgatatttataactttttataagcaccggtcattttttgagaactgatttggtttgtccaacaaagtaaacaattttttgctgtgtggcagtttctttttttagaaaacactgagctaaaacacagaatgnntatttgtttagaaaaaaaaaaaaaaaacttttgagannnnaannaccctgaagaanactgaagacatttacggggcatattaaatggtatcttaaatactagttgtatacctcataatgtctaaggcggctattttttttctaaagaaagtngcatttcattcaggggctgcccagggtttaaattcccccatagttttnctttctttcngcaaatcattctttctgttttgcagttttttccaaacagggccatattggtgggacaaaagtttgatgttcatgcccaacaagctctggtattttatggatacatttgtataacgcaggccttcttgctctgaaccctgggtgaccacaaataaatngaggggccatgattattggatgctgagagaaagtagcatacttaaacccacagtacagataatcaggaggcaagcaaaaacaaagctataacttggcagtggtattcacccaccacttattccaaaaacatattttgcttattaaataagggaaatangg

SEQ ID NO: 627240 - DNA, 469 bp, Homo sapiens
  misc_feature (6)..(6): n is a, c, g, or t
  misc_feature (47)..(47): n is a, c, g, or t
  misc_feature (108)..(108): n is a, c, g, or t
  misc_feature (120)..(120): n is a, c, g, or t
  misc_feature (127)..(127): n is a, c, g, or t
  misc_feature (138)..(138): n is a, c, g, or t
  misc_feature (198)..(198): n is a, c, g, or t
  misc_feature (267)..(267): n is a, c, g, or t
aggagncaggaaggtcttgcttggtgagggtaaaactatgccagagntgaagggcaagtctgaaatatgcccttccagtgatcagtaaattcatctgaagcattactnccgataagaaanttacagntcgtgtaccanaatcgattagtggagatttaaaaataactttaaaaatttggctgggtatggtggctcatncctatgatccccgcactttgggagaccgaggtgggaggatctcttgagcctaggagttcagtaccgccntggcagcatagtgagaccctgtctctacaaaaaaattaaaaaattagctgggggtggcagcacacacctgtagtcccagctacttgggtggttgaggtggaaggatcgcttgagcctgggaggtggaggctgtgctgcgtgagccgtggtcgtcccactgcactccagcctgggcgacagagtaagaccctgtctcaaaggt

SEQ ID NO: 627241 - DNA, 636 bp, Homo sapiens
  misc_feature (427)..(427): n is a, c, g, or t
  misc_feature (481)..(481): n is a, c, g, or t
gctctttccctgccgccgccgagtcgcgcggaggcggaggcttgggtgcgttcaagattcagcttcacccgtaacccaccgccatggccgaggaaggcattgctgctggaggtgtaatggacgttaatactgctttacaagaggttctgaagactgccctcatccacgatggcctagcacgtggaattcgcgagctgccaaagccttagacaagcgcaagcccatctttgtgtgcttgcatccaactgtgatgagcctatgtatgtcaagttggtggaggccctttgtgctgaacaccaaatcaacctaattaaggttgatgacaacaagaaactaggagaatgggtaggcctttgtaaaattgacagagaggggaaaccccgtaaagtggttggttgcagttgtgtagtagttaaggactatggcnaggagtctcaggccagggatgtcattgaagagtatttcaaatgcaagaaatgangaagagtaacattgtttggttcacgatgtggactagtgtggagtggtgtgaatgtggggggggttaaattcggggggcgggaggaatgcgggtaaattgagagggggctggtgctaaggcggttccgggaacgaagtgttttttgaccagggggg

SEQ ID NO: 627242 - DNA, 644 bp, Homo sapiens
cagttcattatggaggtatcatggcaactttctgggaagacttaaacaaaagacagaagagaggcatagcgtttgattgaacttgggaatggaccatttattctgagaaacagatgaagtgcccctttagaggtcctgccagtctgatggatggattctctacctgtaatgaaagtaataggaaggatccccttgcccaaagcatggtgggaaagctagcggtgattcttgtgggaagaaaagcataagaggaaatttccaaccaccaataccttgggacattctctgcaagtcccatgagcctctgaaagaggttgaacactcagaagtcacttttgtggtgcttgactggcctgacatcttgcaaataaaccttatcaaaagatggtggaagatgcgtactaagtattccgtagtaactgagagttagtcttttttcacagcctttgttggaggagaggtacttgtaattcacatgtgtaaactgctttataatttaaaaattctttggaatatcttacttgatctttatcatagccttttcagacatgaagagtaaaaaataccgttccattgtacaactgatgtgcagagttgtcaaggtttctacagctgaggagtgtcagagctactggacccagatc

SEQ ID NO: 627243 - DNA, 952 bp, Homo sapiens
gccgaacacctgcgtgaactgcctagcgatggagactaggtgccgagtggttgtctggtgccgaacgtgtgaactaatcgtcgtagtgggtgactgtgctccaacgcggtgtctgcatttccctaggagtagcagattttgatttcggagaggcactgtgtgacgatgtggaaggtgttaagcgtagcaatagttagtatagctggttcttgtgagtctatactcggacgagaattcagcacatgggttcagtgggatacctagtagtgagcagatgcgatgccttgtcgatgggagtgagacgtcagcaaatttgaaaacgcaataaaaggttgtagtgcgaaaagagcgaatttacttgcaagattaggcggactgaaatagactgtgtggagaggatgtccctacaggtccaagccttatgtgaggggaagtgagtaaagacctgactgtgcagaggggtgacaaatcgagtttgtccgccgtgtgtcagacctctgttattggagagctctgtgggcaccgtacgaagtgggatacattctgctggaaggaagttgagcattctcgaaaagtgagaatcatcacgacgagtgtagaaagaattccttgagtgaaggagtggggatcagtattataaaatatggggttgaaattttggcctatcgtttcggtgagcttatcaacagtgacagtatccagagtctcctagaaggtcaatgtgagtctgagctgggttcacatggatcgagagcttgtacctggggggcttcgagtatgtgatgttcacagcgtgaaatggcatttgacacgcatgatgtcaaaggaattgggtggttagaaaaccatttttgaggggtctccactgtttggtggtacctagggatcttggtaacaccgggggaattccaagggggggggaagcggcggttacacacattttttaggggga

SEQ ID NO: 627244 - DNA, 764 bp, Homo sapiens
  misc_feature (238)..(238): n is a, c, g, or t
  misc_feature (262)..(262): n is a, c, g, or t
  misc_feature (290)..(290): n is a, c, g, or t
  misc_feature (295)..(295): n is a, c, g, or t
  misc_feature (339)..(340): n is a, c, g, or t
  misc_feature (342)..(342): n is a, c, g, or t
  misc_feature (556)..(556): n is a, c, g, or t
  misc_feature (610)..(610): n is a, c, g, or t
gctctttccctgccgccgccgagtcgcgcggaggcggaggcttgggtgcgttcaagattcagcttcacccgtaacccaccgccatggccgaggaaggcattgctgctggaggtgtaatggacgttaatactgctttacaagaggttctgaagactgccctcatccacgatggcctagcacgtggaattcgcgagctgccaaagccttagacaagtacgtgtatcagtctcaatactgngggttcttgcaaccggaacaaaantgccacccaaggaagaaggcatggagtncatgngtagcgcaaaattctgaatggcatccgtcctacggaaactaggnngngcgcaagcccatctttgtgtgcttgcatccaactgtgatgagcctatgtatgtcaagttggtggaggccctttgtgctgaacaccaaatcaacctaattaaggttgatgacaacaagaaactaggagaatgggtaggcctttgtaaaattgacagagaggggaaaccccgtaaagtggttggttgcagttgtgtagtagttaaggactatggcnaggagtctcaggccagggatgtcattgaagagtatttcaaatgcaagaaatgangaaataaatctttggctggcattcacaagcacgcacaaccaccacacaataacatcaaccacacccaacaacacaacaacaacccacacagagcgacaatacactaataacagcaacacacaaacaaatgtggccccccgcccaaaagaagcta

SEQ ID NO: 627245 - DNA, 1580 bp, Homo sapiens
tcccgggtaccctttgtctgacctgcagtttcctgatatatgaaatgtgtgtaagtaagctcatgtgtgcctgaatgtgtgtagaggtcggtgagggattatccaactcataggattattttaaggattgaatggtaaaatgttgtaaagcagctaagcacttcctttttatttccgagctactataaaactgatgtgtgatttcttttagatgttttcagaagtgtttgcctgtttaacatatacacgatcgtttgttactctcctgttaaactagttttaaaaacatcagtgttcatgaaagtcaaaggagagcaagtccggtcatgtcccaactctactcttaattatgcccctatttatgcagattgtgaagtcattaaagatttgccttctatgtattatttgctattttggggtctacacaaccctatttgcattttctcagggcattgcaacaacatacattgcttggccaaagccatcaaccagattgctgcagctttgtttacaattcacaaaggaagcattgaagaccgtcttaaagaatttctggcgcttgcatcctccagtctactgaaaattggccaggagacagataaaactacaacaagaaatagagaatctgtttatttactgctagatatgattgtacaagaatctccattccttacaatggatcttttggaatcttgttttccttatgtcttgctgagaaatgcataccatgctgtctacaaacaaagtgttacatcttctgcataaaattacctacttaatcaagataagcacgcatttttgttgccttggttttacctgtagactgtggaactattttaccttaagacctgaaaaagttttgtggattataaatttctttcatacggttgtattttctgatcattggtttcttaatatggttgtactacagtatacttggttgatttaggttgcacattcactgaattcactgagattattcctataattttaaagtatcatttatttgaaaaacatacattatcaacatgtttttgatatttgataatgaaaaaaatctttgcttgtttatttctgaaaaagaactgtatttagtgattattttagatagtgatattatagcattcatctgtgtgtaaattatttcatatagggaagagttctgatctgtacctatggttcttattgaaaacaacattggatgtgcatttctgtgatgttatgaatacatttctactttattttgaaacatttgccaaactaaatactgtaacactgtataacatttaaaaatgttaaagaactgcttagtattagaagcagatcatttcccaaaattctaagagcagcagcatatgttgttgcttgtataaagcctagcgataatttttagactaacttccatggtgccctgttggcattagcactaccattgtaccctgctgtataataaacaatcttagacatttatcaactgttgatacaaatgttagtccctaaccactttttatatatgttttaaatttttgaaattcaagtgtaccttccataacataaaataaacactagactgtatcaca

SEQ ID NO: 627246 - DNA, 513 bp, Homo sapiens
  misc_feature (191)..(191): n is a, c, g, or t
  misc_feature (215)..(215): n is a, c, g, or t
  misc_feature (243)..(243): n is a, c, g, or t
  misc_feature (248)..(248): n is a, c, g, or t
  misc_feature (292)..(293): n is a, c, g, or t
  misc_feature (295)..(295): n is a, c, g, or t
  misc_feature (453)..(453): n is a, c, g, or t
  misc_feature (513)..(513): n is a, c, g, or t
gctctttccctgccgccgccgagtcgcgcggaggcggaggcttgggtgcgttcaagattcagcttcacccgtaacccaccgccatggccgaggaaggttctgaagactgccctcatccacgatggcctagcacgtggaattcgcgagctgccaaagccttagacaagtacgtgtatcagtctcaatactgngggttcttgcaaccggaacaaaantgccacccaaggaagaaggcatggagtncatgngtagcgcaaaattctgaatggcatccgtcctacggaaactaggnngngcgcaagcccatctttgtgtgcttgcatccaactgtgatgagcctatgtatgtcaagttggtggaggccctttgtgctgaacaccaaatcaacctaattaaggttgatgacaacaagaaactaggagaatgggtaggcctttgtaaatgcaggagggnacccttgttgttcatttgagagtaagctatgcagggtccagccagtgcatgaggattctn

SEQ ID NO: 627247 - DNA, 761 bp, Homo sapiens
accataacctggtcagctcacaccctaataagtccacatcttctcagtgtttagctgttttttcattaggttattttctgatcattggtttcttaatatggttgtactacagtatacttggttgatttaggttgcacattcactgaattcactgagattattcctataattttaaagtatcatttatttgaaaaacatacattatcaacatgtttttgatatttgataatgaaaaaaatctttgcttgtttatttctgaaaaagaactgtatttagtgattattttagatagtgatattatagcattcatctgtgtgtaaattatttcatatagggaagagttctgatctgtacctatggttcttattgaaaacaacattggatgtgcatttctgtgatgttatgaatacatttctactttattttgaaacatttgccaaactaaatactgtaacactgtataacatttaaaaatgttaaagaactgcttagtattagaagcagatcatttcccaaaattctaagagcagcagcatatgttgttgcttgtataaagcctagcgataatttttagactaacttccatggtgccctgttggcattagcactaccattgtaccctgctgtataataaacaatcttagacatttatcaactgttgatacaaatgttagtccctaaccactttttatatatgttttaaatttttgaaattcaagtgtaccttccataacataaaataaacactagactgtatcaca

SEQ ID NO: 627248 - DNA, 635 bp, Homo sapiens
  misc_feature (427)..(427): n is a, c, g, or t
  misc_feature (481)..(481): n is a, c, g, or t
gctctttccctgccgccgccgagtcgcgcggaggcggaggcttgggtgcgttcaagattcagcttcacccgtaacccaccgccatggccgaggaaggcattgctgctggaggtgtaatggacgttaatactgctttacaagaggttctgaagactgccctcatccacgatggcctagcacgtggaattcgcgagctgccaaagccttagacaagcgcaagcccatctttgtgtgcttgcatccaactgtgatgagcctatgtatgtcaagttggtggaggccctttgtgctgaacaccaaatcaacctaattaaggttgatgacaacaagaaactaggagaatgggtaggcctttgtaaaattgacagagaggggaaaccccgtaaagtggttggttgcagttgtgtagtagttaaggactatggcnaggagtctcaggccagggatgtcattgaagagtatttcaaatgcaagaaatgangaaataaatctttggctggcattcacaagcacgcacaaccaccacacaataacatcaaccacacccaacaacacaacaacaacccacacagagcgacaatacactaataacagcaacacacaaacaaatgtggccccccgcccaaaagaagcta

SEQ ID NO: 627249 - DNA, 288 bp, Homo sapiens
  misc_feature (13)..(13): n is a, c, g, or t
  misc_feature (74)..(74): n is a, c, g, or t
  misc_feature (77)..(77): n is a, c, g, or t
  misc_feature (134)..(134): n is a, c, g, or t
  misc_feature (172)..(172): n is a, c, g, or t
  misc_feature (209)..(209): n is a, c, g, or t
  misc_feature (234)..(234): n is a, c, g, or t
  misc_feature (241)..(241): n is a, c, g, or t
ccgagatggggcngtgggaccgacctgccttctcatcacctacaccactaacgccttccccggagagtacatcnccnccgtgtttgacaactattccgccaatgtgatggtggaccgcaagccagtgaacctgncgctgtgggacactgctgcccaggaggactacgaccgnctccggccgctctcctatccacagacggacgtcttcntcatctgcttctccctcgtccagcncagcctncttatgagaacgtccgcgccaagtggttccccagaagtgcggtcacc

SEQ ID NO: 627250 - DNA, 1912 bp, Homo sapiens
tttttcccctcttttttttttcgcccccctgtaacgacgccagtccagctgcatcctccagttcactctagagatcccctcgcgaacgtgttatcccaacaatgacttctcatctggaaatacgctttaccaagtcaattgttgggatgactatgtataatcaagccacacaggaaattgcaaaaccttcagaacttctaacaagtgtaagagcatacatgaccgtactccagtcaatagaaaactatgtgcagattgatattacaagagtatttaataatgtgcttcttcaacaaacacaacatttagacagtcatggagagccaaccattacaagtctatacacaaattggtatttggaaactttgttacgacaagtcagcaatggccatatagcatattttcctgcaatgaaagcgtttgtgaacttacctacagaaaatgaattaacattcaatgcagaggaatattctgacatatcagaaatgaggtcattatcagaactactaggcccatatggtatgaagtttctaagtgaaagccttatgtggcatatttcatcacaagttgctgaacttaagaaacttgtggtggagaatgttgatgtgttaacacaaatgaggaccagctttgacaaaccagaccagatggctgcactgtttaaaagattatcatctgttgacagtgtcttgaagaggatgacaataattggtgtaattttatccttccgatcattggcacaagaagcacttagagatgtgttatcctaccacattccttttcttgtaagttcaattgaagattttaaggatcacattccaagggaaactgatatgaaggttgcaatgaatgtgtatgagttatcatcagctgccggattaccttgtgagattgatcctgcattggtcgtagctctttcttcacaaaaatcggaaaacattagtccagaagaagagtataaaattgcctgccttctcatggtgtttgtggcagtttctttgccaacactggccagtaatgtgatgtctcagtacagccctgctatagaagggcattgcaacaacatacattgcttggccaaagccatcaaccagattgctgcagctttgtttacaattcacaaaggaagcattgaagaccgtcttaaagaatttctggcgcttgcatcctccagtctactgaaaattggccaggagacagataaaactacaacaagaaatagagaatctgtttatttactgctagatatgattgtacaagaatctccattccttacaatggatcttttggaatcttgttttccttatgtcttgctgagaaatgcataccatgctgtctacaaacaaagtgttacatcttctgcataaaattacctacttaatcaagataagcacgcatttttgttgccttggttttacctgtagactgtggaactattttaccttaagacctgaaaaagttttgtggattataaatttctttcatacggttgtggcaaaaaagtatacaaaaaatgagataaacaaacaaaaacatttttgtggggcgcgccataggcgcaactgaaaaaaaggttttaaaacacacacattcaggtgaggcgcgaccgccgaccccccacaaaatgaacagagacaaaaatcagtgtgcagaacacaaacgggcccacgcagaaagaagcacggccggcggacgtaacgcaacaacgacgcggccggcgaactcactccgcaccaaagataaaaagagaaaggccgcacgggggaaaaccagagcgcgagggctgtcgacacaaacaatcagcagaagagacatctgccggagagcggaactaagagaggggacatcatcaccagcgacaggacacgacagacggcgccgagatcataaaaagtaccccgacccgatcaga

SEQ ID NO: 627251 - DNA, 148 bp, Homo sapiens
caggcgttcaaagggggggactacaagcatgagccaccacatccgggcgagcatagtatcttactagggtactttaagtatccaggcacctcacttgtttcccatagtttctgggcaagactcagtgtcttttttgtggtcgtttctg

SEQ ID NO: 627252 - DNA, 1792 bp, Homo sapiens
  misc_feature (1792)..(1792): n is a, c, g, or t
tttttcccctcttttttttttcgcccccctgtaacgacgccagtccagctgcatcctccagttcactctagagatcccctcgcgaacgtgttatcccaacaatgacttctcatctggaaatacgctttaccaagtcaattgttgggatgactatgtataatcaagccacacaggaaattgcaaaaccttcagaacttctaacaagtgtaagagcatacatgaccgtactccagtcaatagaaaactatgtgcagattgatattacaagagtatttaataatgtgcttcttcaacaaacacaacatttagacagtcatggagagccaaccattacaagtctatacacaaattggtatttggaaactttgttacgacaagtcagcaatggccatatagcatattttcctgcaatgaaagcgtttgtgaacttacctacagaaaatgaattaacattcaatgcagaggaatattctgacatatcagaaatgaggtcattatcagaactactaggcccatatggtatgaagtttctaagtgaaagccttatgtggcatatttcatcacaagttgctgaacttaagaaacttgtggtggagaatgttgatgtgttaacacaaatgaggaccagctttgacaaaccagaccagatggctgcactgtttaaaagattatcatctgttgacagtgtcttgaagaggatgacaataattggtgtaattttatccttccgatcattggcacaagaagcacttagagatgtgttatcctaccacattccttttcttgtaagttcaattgaagattttaaggatcacattccaagggaaactgatatgaaggttgcaatgaatgtgtatgagttatcatcagctgccggattaccttgtgagattgatcctgcattggtcgtagctctttcttcacaaaaatcggaaaacattagtccagaagaagagtataaaattgcctgccttctcatggtgtttgtggcagtttctttgccaacactggccagtaatgtgatgtctcagtacagccctgctatagaagggcattgcaacaacatacattgcttggccaaagccatcaaccagattgctgcagctttgtttacaattcacaaaggaagcattgaagaccgtcttaaagaatttctggcgcttgcatcctccagtctactgaaaattggccaggagacagataaaactacaacaagaaatagagaatctgtttatttactgctagatatgattgtacaagaatctccattccttacaatggatcttttggaatcttgttttccttatgtcttgctgagaaatgcataccatgctgtctacaaacaaagtgttacatcttctgcataaaattacctacttaatcaagataagcacgcatttttgttgccttggttttacctgtagactgtggaactattttaccttaagacctgaaaaagttttgtggattataaatttctttcatacggttgcaaaaaaaaaaaacgaataacagtaacaaaaaactggtgtgcgcccgcacggcccctagaaaaagtcttcataaaccaccttggcggtgggcagcgcgggcccaagtaaagggtataggcaggacccttggccataaggcggtccacagagagagcccgggccaaggcactagtgggctggcttttccaacaataaaaaacgcgcgggggcaccgacgcgttctgacacaacccaaatggccgttcagagccctcccggctacacacagggtccagcaagcgattatctgcccgcggggn

SEQ ID NO: 627253 - DNA, 337 bp, Homo sapiens
cctggctctgaacttagtgcatcagatttttatcagcttaaaatggcttgtcgtaactgtgaaatctgttggtaagcctcattttaaccacggagcaaagtcctacagtagttaacacaaaagataaaaagtggggaatcggggctgggcacggtggctcacgactgtagtcccggcactttgggaggccgaggcgggtggatcacgaggtcgggagattgagaccatcctggctaacacggtgaaaccccgtctctaacaaaaacataaaaaattaaccaggtgtggtggcacgtgcctgtggtctcagcaacttgggaggctgaggtggaaggat

SEQ ID NO: 627254 - DNA, 573 bp, Homo sapiens
ggcagtacattgatctggatccaggctgttacattgaataaaaagattcgattatgcactacgttagcactagtataacttcattttagttgttgcgtgaacaaagagattaatcagtggcactggtaatatccgcacaagtagacaataaaggtccacggggaacgcaccatttctgaaactatcgagcggctacagcagctctataagagttccgcagctaacaggcagaagaagaattttaatgaaaaaattacccacgattggctccatggaaaacggagtgaacaggcgttgtccgtgaaaatttagactgtctgtaactctcgaaaacagtcaatgtgataattgaacttaggacggagtttggctgaagtctgaatatggtcaacctgcaggggtaacttatttttgacctagtcagtttttatacaatgtgcatttgaaggagtgtaattaaaagagagccaataaaatgattttagtcattcagtatatgagtactggaagtgaaacatgaggaatgctttagtgtaatgtgggtgaactttgtggtaaaataatgcacgtaaa

SEQ ID NO: 627255 - DNA, 186 bp, Homo sapiens
gtgcatctaaggttgatctagaggacccctagtgtgaaagcgatgtggtgcagctggggctgggtgagaatgtgatggagaggaagaaggctggccgtgtgtactcattccggagagatgttgtgcatggctgagtgctgggtggcatgcacacctgtgtgtctaagcaacaagtggccagtgtct

SEQ ID NO: 627256 - DNA, 704 bp, Homo sapiens
gacaccttgctccagagcgccatcagccacagccccactccacagcgccgacctggtgtcagcatacaccccgccttgctggccccagcagtgagagggccccatccatggcccctgagtatcctgtaccgtgggcattcatgcggtccttctcgagagaacccgaaatcccgaacaagggctggagagcacagaggcgtagtaaggcttaagcaaggggacacgacttacccaggacccgcctcaggcatgccactactacgggagcagaggtacggattcaaaccacgcatagcagtatccacgagaaggtagacacgagagagggaggcgacacgtcacaatactgataatacacagaggaactataaccgaaatacctaccattgaaggcgtatcccgtagagagaagtaagcactctacgagagaaaactatagtccaagaagatagggaacccacagacagcgataagcgcagagacacggtggaaacacataaggaagtaggcgagataagccaatagagggcgcgcagaaaatacgaggagaagggcaaacggaaatgaggaagaggacaacgaggaacacaaatagagacaaaatgcggaaggaccgcaaagaggaaacaaaggagacaaaagaagagagacgcacgatagagggaacagtaggaaaggcgtgaataacggaggcacagcagggg

SEQ ID NO: 627257 - DNA, 192 bp, Homo sapiens
acaggtgtactaacaagtaccatgtataggttctagtagtactaaaggcctactaccatgacacacggatgctacatagcactcctgctagcacatcttgatactgtggaatagtaacatatacttgctttttagctacatactagctgtaggctataatatcacccctgtattcactaggggatacctcta

SEQ ID NO: 627258 - DNA, 111 bp, Homo sapiens
cactggaattacagatgtgagccaccacacccggccagaacttctgataattacgggtgaaataataaaagtataggccaggtgtggtggcatcgataaacaccgggtacc

SEQ ID NO: 627259 - DNA, 433 bp, Homo sapiens
  misc_feature (183)..(183): n is a, c, g, or t
gggcagcagccaccctcgagtacacagttgacacagctaaccttaccttatgagcacgcctctgttggctcagcagtcagagtaataatggcccgctgcttgatcgtaaagattacgcggctcaggtcagctcagtgtagtaatctgatgcagatgtaccagcaaacgaacgttgctcatganccgtgatactgcacttagttcttctatagggtgatagtctggtacactcgagcgttagtagctccgtcatcagcatgatataaagtcagtgaatcgtcgtttagcccatacgctttctccactgcaggtgtcaggagactggcaatcagtgaagcatcatacactctacctgcatgcagtgtcccagcagtcgattcgtctgctcctatggccattatccgatcaaggtacaaggctatctacacgctag

SEQ ID NO: 627260 - DNA, 285 bp, Homo sapiens
gaactatcacctgtcatcataacagaattctgcttgtcactccacacaacaacaggacttaagacaaatgggcctgatgtcatcttgagctcttcatttatattgactgtgatttatttggcagtggcaggcattgtgtttcaagcacaaacatgtccatgtcagttgtctaaaaataaactgcatttcaaactccatttgcgcgcaatgccttttagtttcatgcatatttaacctcccttgatcctgtagtgtacctggcgaagctagagcctgatagtaggc

SEQ ID NO: 627261 - DNA, 369 bp, Homo sapiens
tgttcagtccccgttgaattccccccggagggttgttttcaaaaccaaccttcccgaatgaatgtcgctcttcaatggaacgtttttcttttgcttgaaggcatttttctctgggtgtaattctaaattaccgggtcagttgagctttttcccctccccctagtatccttaccggggccgggaagggccatagcggatttttaatttttggcgaagttaaaatacaatttttttggggtttttcctaaacctatttatttggtggtttgggggggatccccccctaagggaaccttggttgcctcggctattttgctggctggacacttttgtcacttttgaagcctgttaataaatggccctggttta

SEQ ID NO: 627262 - DNA, 339 bp, Homo sapiens
atagactaagaaaggatcaaccagcagaagcataatagaggatgacgcaattagatttccagaagatgcaaattttcttactgtcaactacacattatccatttatcatcataaatgacttgaactccacaatgactaaaatgtagaactttatactcactttgctatgttaagccccaaagtgaagtccaactggaaacagaaaaataattaaaggaaacttatgctgaccaaaaatgaaggctttataaaaacttgcataccagtcattacaacatcctacctagtgttacatgatttttgtgtaagtgccttatataataaagatggtgtatttca

SEQ ID NO: 627263 - DNA, 309 bp, Homo sapiens
tagcatcatcagcacattaaggccaggcacactggcttacacctataatctcggcgctttgaggtgctgaggagggtggatcacttgagtccaggagtggggaccagccaggcaacatagcgagaccccatttctacaaatggtcaaaaatagccaggagtggtggtgtgtgcctgtagtcccagctgctcaggaggctgaggcaggagaattgcctggagaattgcttgaatctgggaaggtgaggctgcagtgagccatgatcatgccacagcactcagcttgagcaacagagtgagaccttgtctc

SEQ ID NO: 627264 - DNA, 374 bp, Homo sapiens
ggcccttttttccccccccccccccccttttttttgagggccttttaattttgggccctttagggggagggggggccccccggtccccctaaatttggttttatctttcccccccccccccttattggggggggtaataaaaccggggggggtttaaaaaaacccgggccctaagggggaaattccttcccaagaagttaaatttggttttcagggccccggtggctttttttttaatttcccccccccccgggggggaaaggaacgggggtttttaaaaatggggtcttgagcccgttttttggaaaaggttttttggaagggttttttttcccccccccaggggtgaacccaaaaaaatttttttaaatgta

SEQ ID NO: 627265 - DNA, 960 bp, Homo sapiens
  misc_feature (960)..(960): n is a, c, g, or t
gagcaaatgcagaagctgctgcgcgatgattcgcccatggatctgaaataagttctttcgtcgtgctgccctagcgactgccctctcacctgtcctaaagcaaaatataacagttgaacgagattttgggacagagtgaacgagctaggccttgatttccaatattattacttcctgagtgacatttggtcgttcaagataaacacacatctgagattctaataagaccatcccccggctatttatttgatagagtggcctggcttgaaagaatgaatgtcttgatctacgaagagttttgctgatagggcttcaataacccttgtatgttctttacaaagaaaaatcgtccatgaggtgttaattgatgaataccttagcatgccactgtatcggtttcatgctttgggacatctcgtcagataccatctatgtttgggaaacgacgcgattgctcaattaacgataaacttttttgaacggttgcgtgcaatggctgggatgccaaagtgcagtgcctctttttcaccggcctgccttctgtgtaaaccgtccttcgtgcatgacttcatatggaaggaatgtccatcatggcaggacttgagttattgtcttgtgagccggtgtcccatttgaactgttgcttgagcctccttatctgggagcttaagcaggtgtagggccgcgccctagtcgtatcctcctgtgtggcgacccgctaggttcgaaaagaggagttgctatctttggccccgatgtttgccttcacttgggcttgcctttgcgggcagacatttttgggcccttttcttaagattattgtggccggaaattcgggcttcgcagtttagctgtgactgggcacctctcgcggttttccggtgtaacggcggtgtagggcgagttaccgcggttctttgcgcactaggcggggtgcctccacatgagcggcatcatggn

SEQ ID NO: 627266 - DNA, 771 bp, Homo sapiens
agcggggaggtgggagggcaggagcgtcgtcttgccctggcagaagaagcggtaggctctgtctgcgtggcagctggtccccagccctaggagagaagctgtctgtcgttgccatggcaggtgtgaaatacccgggacaggaccctgtggatttagacatataccaagctcccacatggtcgactatcagccctacaggaagcacaaatactccagagtcacgccgcaagagcaggcaaagctcgatgctcaactccgggacaaagagttttacaggcccatccctaaccccaaccccaagctaacagatgggtaccctgctttcaaaagaccccacatgactgccaaagacctgggactccccggcttcttcccatcacaggaacatgaggccacgagggaggacgagcgcaagttcaccagcacctgccatttcacatatccagcttcccacgatctgcacctggcccagggtgaccccaaccaggtcctccagagtgctgactttccgtgcctcgtggatcccaaacaccagcctgctgcagagatggccaaaggctacctgctactgccagggtgtccctgtcttcattgccatatagtcaaggtccccatcttgaaccggtggggacccttgatgccattttaccagtaggaaggatgaaaataccttccaaaggctcttccaagggcatgtggaaatcctatgaccttggagtgcagagaggagaactgaaaataaaactggaaagatgttccaactgcaaaaaa

SEQ ID NO: 627267 - DNA, 109 bp, Homo sapiens
cttctgaggatcccaaacgtagccggaggtgaacaccctgaagagaccctggaggaggaggcaagaccacgaggcccagatccaggagatgaggcagaagcactcacag

SEQ ID NO: 627268 - DNA, 353 bp, Homo sapiens
  misc_feature (300)..(300): n is a, c, g, or t
  misc_feature (353)..(353): n is a, c, g, or t
aacccttcgctgacgccataaaactcttcaccaaagagcccctaaaaacccgccacatctgccattcacctcttacatcaccgccccgaccttagcttttaccatcggtcttctactatgaacccccttccccatacccaccccctggtcaccctcacctaggcctcctatttattctagccacctctagcctagccgtttactcaatcctctgatcagggtagcatcaaacttaaactacgcctgatcggcgacttgagcagtagcccaacaatctatatgagcaccctggcatcattntactatcaacattactaataggggctccttaaccttccccttataaaaaaagn

SEQ ID NO: 627269 - DNA, 213 bp, Homo sapiens
ggcggggatcacagatgtgagccatggtgcccagccaagatttacacctattatttcatagagggtatggcaagtggggttgggctcaggataagatgcacatctcaattattttatacctttaaaattttactggacaaaaatggtaccgggaaaatttggtattcccaggggtaccgggttttccttattccctcatccttaggggatcat

SEQ ID NO: 627270 - DNA, 644 bp, Homo sapiens
aagggcgcagtgaaagccaccgcaatttattcccaccatttttattagggacaacacagggggcattttttaaggtggtcaaaaaagggccaaactttcatacccctaaaaaattcaaactttctccaccggtcctgcggagcacccggacaatttaaggaggaaagcaaacccccaattgttgggcgaaatccgaaaaacccccactgattcttaaaagaacacagggtttcttttttggggggcctttccctttaaaaacaatcagcgtctggctccacaagctttaataaaaaaaactggtttttttcatttggtttagggagccgagggaccaaaaaaccccttttaaggaaaaaaaatcgtttatttttaaaactttgcctaaaaacaaaaaaaagggataaatttcttttatcaccggccccctggaaaaaaaactgagccacaccccaaaaaaagaaacaaaatttaatttcccgggtttaaaaaaaacctctttgtgggaaggggtcaaggaactgaaaacaggtgggctctcctccaatttttcccaaaatttaaccctcaacaccctcttggccgggaaagaagagaccccttttggtgtccttgggggccaaaaacaaacaaccctggaaatt

SEQ ID NO: 627271 - DNA, 1133 bp, Homo sapiens
ccaggggtgtctatcgaagatcccttggaccaggatgactggggagctagggaggatagttcacagccacggtgcaggaatccgaggttagtgggggatgatctcacagtgaccaagcccaaagaggatcgccaatggccgtgaaggagaagtgctgctaactgcctcctgcatcaaagtcaagcagatgggctccggtgaccgaggtctcttcagggcgtgcaagctggcccaggccaactggttggggcgtcattgtgtgtctcagtcgtacgggggagactgacagataccttcactcgctgacctggttgtgggggctgtgcagctgggcgagatcaagatctggtgccccgttgtccgattctggagcgcttggccatatgtagctaaccagctcctcatgaattggaatgagggatgctgggcaagaatggctaagttcgcctggcaggaacgttcagaaatgccctatggacagagtaagcggttgggcaggcaaggcgcgcttgcggtcacctgtatggctacacagactccctccccatcgtgtcagctacaggcagctcgaggccgccggaacaagcacttgcagggtgtcccgtgctagtgtagtgcccacaactgtcgtggagttcgtaccggcttccttagaacttctacagaaagccaagcatcccgtgtagcccgtgttggcagcgtctagctttgcagtcgtgtacttggccaagtcatgttaccgtcggcctcaacttccaccaagtggtctagaggcatgggacgcccgtgtcatctccggggctggccacagggctaaatcccggggggtcaggggccaaaataaaagcgccagtgacctggcgaaacacacccaaggggcgcgcccacaaaccacaagggccccacgtacacgcccacccgcctcggacacaaggggccccaagagcgccaaccaccacgcagcgcgccgttaccgcgcctccggaacacgcacgcgactcgcgagccacacagcgggagcaagcgacaccccacagcacaactcgagacacacagatgtacaccaccgcgcaaatgcataaaaacaacagactgacagacgcacagacgatcaacagagcccacagaacaac

SEQ ID NO: 627272 - DNA, 303 bp, Homo sapiens
tggaatgcaaacatgatatagtatcaggaaacctattattatagttcatcatattaatatatttaagaagaaaaagcaaataattgctgacatagatactgaaaaagctgccaacaaaattcaacaactattcagttgtgttcaccttaatcccaagtactggattacaggtcataccaccacacctggctacttgggagctgaagcaggagaatcgcttgaacccaggaggcagaggttgcagtgagccaagatctcaccactgcactcctgcctgcgcgacacagtgagactccatctcaa

SEQ ID NO: 627273 - DNA, 966 bp, Homo sapiens
  misc_feature (425)..(425): n is a, c, g, or t
  misc_feature (496)..(496): n is a, c, g, or t
  misc_feature (557)..(557): n is a, c, g, or t
  misc_feature (623)..(623): n is a, c, g, or t
agcggattcctttgcggaatcaccatggcggctgggcaccctgtacacgtatactgaaacacctggagggcgcttcagaggtctctcatcgctgctcagtacagtggggctcaggtccgcgctgcgtctccggccagccgaccccgaggttccagtgtgtggcgcgagaagccaagccggagcccctgacatttctcgcgtgtaaattgtccgtgcatgcgctgagtgaggtagatggaatgtaatgatgagacaggtcgactggctgacttgagcgccaaggagctgaggaaccccgttcgatgtcacactgccgcaagcagttacactttagtggtcgggatgtacattcttaatgccgacataggtgagctcgcaagtgtagcgatcaactactctctgatgggcgaactggtcccatagtntatcctgggagtacgacaccgtttgtggactgacacgcgcatgcgtgttaggatcgcctggtgagtaaccntctaggaggttcatctgcgttacccgtggaaaatgaacttcgacatctagggaccgtgtcnattgacgcgtgcaagagtgcactcatcaacgtaggagcactgttcactacgcgcacataggacaangtcttgaagcgagagaattgccttcagccgagtagtcatcccttttctaggatagcctaacaatgagctagactcctatgtctctggggagatcgtggtgtctttcccgaaggttaggcagcttagaccttttcgcgctagaatcccaaattgggcaaggtgggaacttacggagatcagtatccactattgtgcggaacactgagatcctggcaagcgaggaggacccagtaccgcgtgggttaccgaggaggtactttatcctcgggaaggtgggccattccagcgaatgtgtggcaaaagtctttcaactcagggcacagactctttccaagatgaaacc

SEQ ID NO: 627274 - DNA, 275 bp, Homo sapiens
  misc_feature (6)..(6): n is a, c, g, or t
  misc_feature (63)..(63): n is a, c, g, or t
  misc_feature (86)..(86): n is a, c, g, or t
  misc_feature (134)..(134): n is a, c, g, or t
  misc_feature (176)..(176): n is a, c, g, or t
  misc_feature (179)..(179): n is a, c, g, or t
  misc_feature (185)..(185): n is a, c, g, or t
  misc_feature (223)..(223): n is a, c, g, or t
  misc_feature (229)..(229): n is a, c, g, or t
  misc_feature (237)..(237): n is a, c, g, or t
  misc_feature (269)..(269): n is a, c, g, or t
aaactngggccccccaagttgtaaaaatgtatgtttttccctgccagttatcccccaggtagnctgtcaagttgagaagagtgaancaataacttgtatttgttttaaaaattaaattaacccttgataagagngcttttttttttaggagttagcccttgccccctagtttgatnccntccccnttttgggtgccctgtttccccagcaggcctgttcctcnccatgnctaactgngtaagggcttaaaatggaataaattgcttttntccata

SEQ ID NO: 627275 - DNA, 913 bp, Homo sapiens
gggcatgaacattgttaccgtaaatggcacatgatcatggactgaattatgtgacttaaaggatgtaactgcccaaatttgcagattctgggtggtctatgtgaccatttgtctcgtatgcaaaaaccccggggctatttggaacccttccaacacttttgtccttgtgtcatagacaagtgtatatataacgttaccaagatgttggctgtccgtggtgtattgccagacagctctctttgggttcccattccaaatgtgctgcgtgtccttcttatgcatttcacaatatcaaagaaaccacagccttcttgcctaagcagcattttatgccttttattccacattaaatgggaattgtgcctacttaggagtgcccctccaattaacttgacatgtgtccagagaataatccaagctagagacgcaaggtgggaaaaactatttcgaagaaacaaaaagtccgcttaaggcctagtgctttggtctgaacacggtattttattcacaccttggacaccttatatatgaggctataggagctgcaggtggttcatcagggtaaaattgtaagaaaggggaaggatgtgggggttctatgaagaagattatttgtctcattttacccttttcttttattatcctctttgtaagacagagttacctctccaaattgtctgctggcggattcagggagcctttgcaaaccacgggcggcggtccacacattacggctggggcaatacttccggaggtccactgaattgtaagtttgagagttcaataccgcggtggtaatttcgcggtggctagtgtgcctaataaagactacatgttgctttagactctaccccgttttataaagttgtgagagaaattgctacgctgtgaagacacacactgtgtgggcaaa

SEQ ID NO: 627276 - DNA, 234 bp, Homo sapiens
  misc_feature (213)..(213): n is a, c, g, or t
gttgtcgtgaggtaggaggaagacagatcacagcactggtcttgtagtatctgagcgcccggccagccgggccaacaccgtgaggagcttccatccacgagagcatcatcccttagaacgaggcgatctcctctgtcagagcttcggctcttccgggcagcaggtggaccacgggccctgacttgggtaaaggggcttccaccggtataaacnatttatcgaggttatagaagc

SEQ ID NO: 627277 - DNA, 898 bp, Homo sapiens
  misc_feature (330)..(330): n is a, c, g, or t
  misc_feature (340)..(340): n is a, c, g, or t
gcattcatcgtagaaaatgctacaaagctgtctctcttccccttctctcatgtttccctcttttcatcaagatgaaggctgtggggtaagaaaactaagtgatttaacaaattcatttatgatttaaatctttaaggaaataaaacctaaggaatttttgtgggtgttcccttttattcataagcggggtttgcaactggtatattttaactggatttggttagaacctttggaattgggcttctaggaatggtggcactggactaaaccctgtgtgtgtttttaacttcccttttgtggtgtcttggggttctcgggacaacgataatncttcccttgntgagggacgcttctgtgttttaggaaatttttaactactctggttaggggttaacttcccctggagacttttaagtgtgggaaaacgaactatttaagacggtattttaactaatatggggccaggttaatttttatacttttaaaaacctaaatttaaggttctatcttcaaacccctttcacacggcgttagttcacttccttttgtgcaaccatctttctaagggttcaccagcggtggtgtccccacaattataaacgcaaaagggaaagggacattttcccctttcacaagggatctctcggcgagttggtggcactttcaccagcgcacacggagcagcgacacgaccatttttctcgtgggctgggggtacacacatttcaaacgttggggccgacgggtcttcccaggggactttaatgggacttcccaatttaaacacgtggggagagccccccaagagaaacatttcgtggggcgcttccactacgcgaaacaaggtgttgcccacttttcccattaaggacttgtggttttcgtctcaacaatctag

SEQ ID NO: 627278 - DNA, 486 bp, Homo sapiens
  misc_feature (164)..(164): n is a, c, g, or t
ttcattaccacgaggcagagacgctgaaagacatagcaaggagatgagacattaggaaatcagctggcagaacaaagcctcctgggagcagtttttccagatagtcccaatagctaacttggcagcagcaggcatatttcagacatgagccatagaccttttgnctcctatgggcaatgcttccgattctctggagttaatattcgatcccgattttgttcaaagagttctaacatcctctccatgtggtggtcagcctcaatcaccagaacaggggctggcatggggaaaaggctagctttgatgagccactcctcatggagatggtgaattgcttccaggtattccagcggaatgaccttctcctcttccctgcatctcttctttaacctctggtaacaagtctcaggattggtccgaaggtaaagtatcaaatcaacagacacgtccatgttcctccaagatccagtcaaaccattccgagga

SEQ ID NO: 627279 - DNA, 1008 bp, Homo sapiens
ttggacaggctgatctcgaactcctgacctcaggtaatctacccgccttggcctcccggaatgctgggattgcaggcgtgagccaccacgcctggcctattttgttatttatttattttgagatggagcctatctcggctcactgcaacctccgcctccttggttcaagcgatcctcctgcctcggccctgctggtggctgggattgcaggcacatgccaccatacctggctggtttttggatttttatgtggagatggggttccgccatgttggccacggctggtctcgaacttctggcctcaggttatccacccgccttggccttccgggcatgctgggattgcaggcatgagccaaccgccgcgtggcctatttttttattttttattttgagatggcgctgatctcggctccccgcacacctttgcctcctgggttcaagcaattctcctgccgcggcctcccgagctggctgggattacaggcacccaacaccatgctgagctaattatctcttttattttgtctttctgagacagaagtctcattctgttgcccagcctggttgcgttggacacgatctggcttccttgaaccctccactgtgttcgcagtgatcttgtctgcctcaggcctcctgacgtggatgggatcgcaggtctgtgccaacacacttccggctaatctaccatttatgcacaacctgggtttccccattgtcgcccaaggctggtcttgaactcatgaccctcgcgtgacttcacctgcttggctatcccaaagtccatttgtatacagaggtgagcccaacgcaggctaaatctcctccctcatgaaccacgtaacctctcggacattagggccctgtctgtcgctcaacccgttcggacacactcccgcctcgccggacgcgcactcccatacctctatgacctcactacacacgttcgcacactcccatactcacgtgacagcatcatactgcttcctctccttccactattcc

SEQ ID NO: 627280 - DNA, 106 bp, Homo sapiens
  misc_feature (53)..(53): n is a, c, g, or t
cgactctcgcaggcatccccttctgccttttttggccagctttgcacattccntccccaagcacacacatgttcttgtttctgtttattttctcacccaccatggg

SEQ ID NO: 627281 - DNA, 163 bp, Homo sapiens
cagtgaagccacatatgacgaaagaaagagctctatctctctatactacatctccctacaagatctccttagttataacgattgcacagccacagaactaatcatattttatatcttcttcagaagccacacttatccccgagcttggccttgccatatgcaa

SEQ ID NO: 627282 - DNA, 462 bp, Homo sapiens
  misc_feature (415)..(415): n is a, c, g, or t
atggtccaggtgcctggacgtggggtaagaaaagcccaaaccggcatcacaggggtcaagggactctttaggaaagcccatctaactggccccagagttagtatgcttcctgtgtatttttttctggctacgcgataacaatattaacttgctgtatgacgttgtcaattgacttttttttttttctattgggtgtgtcttactttcccctatttctgaaatgagtgttaaatatggaggtgatatatatccatcctggaatgtaagcttcactggaatagcaattcctgtttattttgttccctgctgtctccaaaataccagaaacgctttctcacatgtaataagtgctcaacaaagatttgtaaaaacaattaattaagttacaaatttcggaatccaagtatctttttanattgtacctttcttcacattataataaaataaatgattataattaag

SEQ ID NO: 627283 - DNA, 785 bp, Homo sapiens
  misc_feature (282)..(282): n is a, c, g, or t
ggcgagaatgaagactattctcaggcaatcacgactgtcgacatttccagtaaaatgtcagactagttatcctcgtgcaacgggaacgcactagtttactcgctgaagggacccctagagagaaaccctgccgtgcatgcggaacttcaagtctagcatccaagtgtcaggaagctctagtctcttctctcggggaacacgaaacagattagaaggagcgcgtccagggttgactaaatgcgcttgggcgtaacgagcacagagagaagctggcctcacccngaactggacgtattctgtgagtcgatgatacgagcacaccagtgcatctcaagggctgtatacgactaggcgcttgccggttgagcagagatggagcgtctgttggtatgcgtcagcttctccacgatcaacgattgattcatccaagtgacgaatggggtctcttggttgaaaatccgaaaaatttcataggagtgcacacataatagtatccgcgagggtctcggcatgagcaccaggtgattgctatgtatcacgtatctcacagtccctagataacggatcgaattaaatccttgagagtgaagatgagccatttggaggcttgtagttatccaacagtttccaggcggggcctttcgagttccagggcatagcccacaaacgacggttaataaacaccaagggattatccaaggaacaatccttatgggatggggtatctgatgcttcttcttgaaataacggaaaccgtgtccaggcaggctagatgaactaagatc

SEQ ID NO: 627284 - DNA, 1696 bp, Homo sapiens
  misc_feature (250)..(250): n is a, c, g, or t
  misc_feature (404)..(404): n is a, c, g, or t
  misc_feature (1008)..(1008): n is a, c, g, or t
  misc_feature (1686)..(1686): n is a, c, g, or t
gagccaggaccttcgacaaaggacgtcaggagtgtattgaatgtgcatcgcacctgctatcgtcatatacggggagtattccccaaaagcatgggctgtgtggctcacaggggtgccttctaccgccggcatacacctgcataaggctctcatggctcctggtcgccgttggaagatcataggaaagtccaaggaagagcggtctggacaacccttgacgcagagattactatcgttgcgcactcgcatntgtagtgctcttacccaatcgcgaacgactatcgcatctgatcgccaggatcacggtaaaccttagagacgcgaaaaggcaggcttgaatttgggcctcctagttatccacataaaaacacaacgagcatgggacgagcgacctgcgcgtctgnttgtcctcgtggcgtaccaattgcccatcgctcagagttccaccagggcgaaaattttctcgcgcgaatgggacatcgtagacgttcgtgggtcggagaaatccaagccgagggggttggcagaccactacctacgcaatgaataacattctcgtgtgcgcccagagccactgtgtgtgaacacaaacaccctcgggttgcataacgactatagaaaaacccatgcatagagatacacgttgtactcgttgtgggcctacttgggggttgtgtcggctactaggaccctggtgagaggtccccactagggactgagcgtgccggaagggaaacgtggccttttgcaagcggccaaagtgtacgtaaagctaccgttcctatggcatagcgcttgtatttggaagtgagccgccgccagaggtggttggcgaatgtgtccaacggttcactggaccgccacctacgggttaaccggctaccttggcaacgttgttgcccgaactcgagtggggctgggaagctagcccgaggcctatggcattgtgcctacatcgttcgattcaaaattcataggccccaaaaaaattcacccatagggggaggngcgccgaacacgcggttccccttggagagagaacacatcccccggttggaatggcccgaagggctcccaaagaggcgcttttagaggccacccggttttagcgcgcacgttaggtatataccctgggggggggccacccacaaacaaaagggataggcgcaccacacaccaataatacacgacgaggagaaaggcctcggaaataagtagaaaataaaagaacacacacaaggggcagaccaagggccgccgacgaacccgacaatgtaccaccccaaccagtggtgcgcttgacaatgtgggggaccaacaagacagtggccaaacggcatagtgcggaaaatttgtactggggaaggccagaagggggaaacccctattaatacatctatgggggtggggggtaggattgaaccaaaataaaatttgtgggcgaacaaaaacagataacctgataagacgaagaagaaaattatacaagagagccagacataaagaggggtaaacaaatatattgactgacgttgttagtaaagagaggtgatcttaaaagagggtgatctataacaacaataagggtggcacatagtgatgcatagttgatggacgaatatgagacatagaatgtagtgataggaacacagcgaagaaaatgagacataatacagcagagacagnttgttatacg

SEQ ID NO: 627285 - DNA, 385 bp, Homo sapiens
tgtacatcatacattggctgcaaatccatggaacgaaatactccgccttcgacccatcaatggtcagtgccgaggagcttgaggtgcagaaaggcagtcttcgcatcagccaggaggagcagtagtgtgtctctcgctgtcaatgatgagttgacccggtgtgttcttgtatagtcagtggcatcagcacccgtcaaccggccttttccttcaggtacgtcaggctcaccggttctcactgtgtctgggaagtaggaccgatggtcatcttcatgacaggcggcatctccactaagcctgtgtaactgttccctctttggttttcttagcttctgaatcagacgacgtacttttgaagactcccattttaagaaccgtgcacatt

SEQ ID NO: 627286 - DNA, 117 bp, Homo sapiens
ggttctgagctaggagcccgaggaagagaacccgatgctgggcttccgcggcgcttcgcgctacatcgccgacgacttcgccgagtgcttccgcatggaatgcgaagcgctcaagaa

SEQ ID NO: 627287 - DNA, 417 bp, Homo sapiens
  misc_feature (16)..(16): n is a, c, g, or t
ggaaatattcagatgntgctttggatccacaggaagtaggattccaaattgggggccctcagtggaggacaaaagcattttgcatattgcagtttcattttaatgatggaaagtggtatcaatatagcagttgattagtaagagtgtgtaggtgtaattaggttaaaacttgttcttattgccaagatttttgtaccttaaatgattcactacattttacagcaaagtataattttagttaggcaaattgatgtaaataatacaaaattgaggagagtgaaaaataaaaccctttcccttgtgtgctttcctttgaaattgtttttaagcaaatttttattttttatggaatgttcagaaaagaatgataaattttctaaataaataatccaaataaaaagaaactctgaatgatga

SEQ ID NO: 627288 - DNA, 341 bp, Homo sapiens
caatttaccccttttcctgaataaatttcccctggggtatttgaaggattggcccattttcagagttctgaaagggttaatcccgcccagctttgcaagggccctagttgttttaacccatgaaagaattttccatccccctgaggctctcatttcccctcccatctcccatctattgccttttatttgaaaaaaggttaaattaatattggattcctctagggcaattttctcccctaaccgcccttctaataaatggtccaatggttttttcaccctttttctaaatcctatataacccttgcatataaaacccgaataaaagaccgggttaaaaccca

SEQ ID NO: 627289 - DNA, 164 bp, Homo sapiens
catcctcatccacctcgcccatcccatccctacgcatcctttacataagcgacgaggtcaacgatcccgtcccttaccatcacatccattggccaccagtggtactgaacctaacgaatacaccgactacggtggaataatcttcaactcctacatacttcccc

SEQ ID NO: 627290 - DNA, 873 bp, Homo sapiens
agcggcgggccctgagcctttaaagaatgaaagccctgttatctcagcaccagtcaaggaccacaggtccctcggtcccagttcctccaaagaatcaaagtcctatggttccagcagaaagttaaggatcaaggctctgtggtaccagagtctcgtacagaggatcaacggtcctatggattcctgagccgtgtgaaggaatcaaagcgtcctagtggtcccatggcatcctgtcaaggatgaatggtcccatggatctcagcaatctgtcaaggatctagaggtcccatggtctcagcaccttgtcaatggatcaatggtcccaatagtcaccagtcacctgtcaaagggtgaacggtcccatagatccctagcacctgtcaacggatgagaggtccctatggtgctcagcgacctatcaaggagtcaagatcccatggtcccagagtcgatccgcaaggatgaacagtgcgcatgggcacagcacccataaagaatcaaagttccatggtctctgagcctgtaaagaatcgaaagtttacgtggtctcagggcccacgtcacaggatcaacgatgtggtagtcccagagcagtgcgaacaggttcacgattctgctagattgtcggcgacctgtagaggaatcacaggtcctgtggtccccgagtccgtgaagaatctaagacccccatgctcccaagtactagttaaggatcaagggcccccacagtcctacagtcgtccaaggaatcaaggtcgtatagtccctgaacctctgaagaatcgaagtgcctataagtcccagtgcctctgcaggatccacgatcctctgggtgccagtaccagcaaacggaccgagggtcctggcagtcca

SEQ ID NO: 627291 - DNA, 161 bp, Homo sapiens
ctgtgagagctggggtggagtgcagataggactgacctgtgatttcatggtccacaccaaatcagtcttctagactcagagctattgttattgttgctgtctaatacatagtgagcttttattgtttgccaagtaatccactctccttcactcgcctttcc

SEQ ID NO: 627292 - DNA, 382 bp, Homo sapiens
attcatgcagtgccggaggctaatgctgcgcattcattcagcgccgtccgtaaactgtctgaggcctgctggctccactgaaggcatagttctggaactctggtggtcttcttgtccttctgttgtcctttggctcttctggcactttctttttttaatttatttttgaaacatggtcttgctgtgctcgccctatgctgtactgcagttgtcatgtattaatcctgtgcgtggcgagataacccgtgggctcaaggcgatcctcccacctcagtcctcccaagttgctgggactacaggcacgcaccaacatgccggccatttatttactttttgttgaattttaagggacctcaagtgaaataattatcggtgaattcag

SEQ ID NO: 627293 - DNA, 514 bp, Homo sapiens
  misc_feature (28)..(28): n is a, c, g, or t
  misc_feature (113)..(113): n is a, c, g, or t
  misc_feature (192)..(192): n is a, c, g, or t
  misc_feature (197)..(197): n is a, c, g, or t
  misc_feature (247)..(247): n is a, c, g, or t
  misc_feature (277)..(277): n is a, c, g, or t
  misc_feature (316)..(318): n is a, c, g, or t
  misc_feature (320)..(320): n is a, c, g, or t
  misc_feature (323)..(323): n is a, c, g, or t
  misc_feature (339)..(339): n is a, c, g, or t
  misc_feature (344)..(344): n is a, c, g, or t
  misc_feature (346)..(347): n is a, c, g, or t
  misc_feature (372)..(372): n is a, c, g, or t
  misc_feature (376)..(377): n is a, c, g, or t
  misc_feature (384)..(384): n is a, c, g, or t
  misc_feature (387)..(387): n is a, c, g, or t
  misc_feature (458)..(458): n is a, c, g, or t
ataatttaagtaatatttacaatttttntaagaaagagggcaaacaggctctgagccaggcctcagctttagaggcccatcctggagaggaaatggcacttgcagggaacatnagcccaatcactattgctcactaagcacagggtcacactggagtaatcttagggaggctgcgaggaagaaaagggagtncacanagccatgaagcaactactttaaattctgaatcttgctgtgttcccactgngcatgctgccttcctagagcaggccttggngccatcccagggactaacacagatccttcctggggcccnnncntcncacactagcgtagggngcctngnncatcctcatcattgtttatcatcanaganntcgttcngcnggccagaaatcttccctacttgtggctttaaaacaccagcagggggggagtcaaggaatgttcttgttagnataaatccatagcaaaaacgatttgagaactggatggttcccagggttgggagggg

SEQ ID NO: 627294 - DNA, 461 bp, Homo sapiens
cttgacttgcttctgagaacgggaagaactccggttccgggagttgtgtggcttctggggatacttgcagtccttggtcttccgggagcgcgaatctcagagcctttgtagggcgctctgcggggtcctgtctcggtgggtagtcactcctgctccgggagcggctctgcggtttggacccaccagatgtggagccgctgtcacttttcctcctcttaggagacgctgttcggcgatggggacctcgagtagctctgctcgcggctccggtccgacttccaacctctcgcccctttgcaagccgtcacggtggctgtccgacgttggtttgttggggccctccagtctcctcttggtgtacttcacagacagtggggaaggcttgctccctttaccttctttgggggattccaccagcttgggtgcaggatagtacccctaaggtaccatccagcacctat

SEQ ID NO: 627295 - DNA, 1053 bp, Homo sapiens
ggtgaactggaccgagcactagcacatggtgtcttgtctgtgtatgcctgcgctacccggcaccccaagcgcagggtctgattgtgaacagcgtctcctggaactccactgtgctctgtgtgtggcctgtgccatacgcgtcggtgaaccatggggattggagcacgcttaagtccttcgtgtgttgcctggaacctggaacgtacgagacctgcgatgctcagacatagcgctcggcctgtggtgtaggtctcccctggcgctgtctgtgtgtctgggactctccagcccactcaggcctcccacgtcgccggagggttgtgctggtggtgagggtgtcggtgttggaggttacgctgtgttgagtgccgggctgttcgaggaggactgtgccgtgaccgactgacttcctctatcagttgtagactgtgggttccacgtgttcgggcggtcggagcccgaagggctgtgctgacccgtacatccttaggggcgagtgcgggttctttcggtctgtggcgcgtgcgtgtggctgtgcggagagtcgtcgttcttccacctacatgccgggcgcctgacgtcttcatcgctgtcttgacaccatcgatgtactgccgtgatcgacgtgcatggatggtcactcgcgagtgatgccggtgtgcgcgactctagcgatgggctggtccgaagtttccgctaggctgtaccttctgggacacgcgggggtggccgacccactgttcacgtgaggcccaggagaagggaagtactaaagcaagaaaccatgccgagataccttgtgtgccagctaaccgggcagttgccccgctagaggagatatgttcttgggcgtgccgctccaggagactcttagcgctggacgggggatggtccactacaggggcagcccattgtgtggcccgcagattgtgtcttgtctacatcacgttttactcgtagatgagtctgtctaacaccacttacagagagcgtctatgaactttagcagggtgacaccgtcggacatcttgtaaaatatagtcataatggctc

SEQ ID NO: 627296 - DNA, 808 bp, Homo sapiens
ctcaagcctctaatcccagcacttgggaagctgaggcgggcggatcacgagttcaggagatcgagaccatcctggctaacatggtgaaagcccgtctctactaaaaatacaaaaaaattagccgggcgtggtgtcgggcgcctgtagtcccagctactcgggaggctgaggcaggagaatggcgtgaacccagaaggcggaacttgcagtgagccaagttcataccactgcactccaacctgggcgacagagcgagactccgtctcaaaaaaacaaaaaaaacccagaattcttcttttttttttttagacagattctccctcgtggtcccccaggcgtggaggtgcaggggcacaatcacagctcacgtgcagccttgacgtaccgggctgaagcgatcctcctctctctgtctcccaagtagttgtgaccacaggcatgcaccaccatgcccagctacattttgaaatttttggtagaaacagggtctcctttggccccttttctcagcctcccaaagtgctggaattacaggcatgagccactgtgcctggcccggcagtattctatctccgagcttgggttggactccaacgcagtagagcgttggaggtacctgggtccgtctatggaccttaggggtcataacaacccatggggagcataacagattgggctgctggccaggactcggcgaacatgggacacgacttctgcagaagtcactcgaaggcagcgcggtgctacacgggggctgccgcggtgtccatggcccgggcgtccctgccggggcacggcggggcgggaa

SEQ ID NO: 627297 - DNA, 936 bp, Homo sapiens
  misc_feature (293)..(293): n is a, c, g, or t
cacagacaggtcgtttgtctgctctgaatctcgttaagtgaacgcgttgggttactccggcgcgtcaccgtgtagaccccccggtggaggaccgccttgctgggtatgacgcgttttctgggttaattagaccgtgttcccgttaagaatcataaatggcccggtgtttttagaaaaatacgggcggggggggaaacagccacaagagcgccgggtgtttccttgcaagcccattacacgggtattatgggctaaaaacgcggcggagatatctgcacgggtggcccctcgcntctaatgtgcctggggttcctccccctctccgacctttacaatgtgggggcgtaagcccgcagaacgaaggtgcccccgttccagacgccgaaaggggggcccgagcacagccgggagagaagccctgagccccacacaagagtgacgggaacgaatcccgggtgaatatcacaatactggctccaacgaattccgacgaaccattagtcagcaaacacggaggggccaaccatcggtttataacatagaaggctcccgcgccccccccttccaaaaaagggacgccacccaaagggcgacggccaacaagttggcacctatatccggggtcacttttgactcccccccatgtacacaaagaagggactcataggatgccatataaaagccgataagatgactgcgacacattcctgatggaagaagaagcagaacgcgtgctcaacctgaggagtggtgctattaagaacaagtgtttttgcagaaaaaatgcacccctgtgcctgaagtccccttgtccacccacaacaggttatgtcgaccagactgtatcggaagagacattttttcagtaggggtaaacatcaaggtaactttaaaaagcgaaaaaaaaacagttacacttttcgcccgacatgacaa

SEQ ID NO: 627298 - DNA, 326 bp, Homo sapiens
  misc_feature (72)..(72): n is a, c, g, or t
  misc_feature (189)..(189): n is a, c, g, or t
  misc_feature (209)..(209): n is a, c, g, or t
gatcgagctcgtaccgctctctgtgctgatgccagaatgtatggtgttctcccatggatgctttccctggcnaggtttgtggctccaaccttctgtccatctgcaaaacagctgagttccaaatgaccttccacctgtttattgctgcatttgtgggggctgcagctacactaggtttcccctgctcanccttcattgattgctgccancttacaatctttgccgtcctatgaaactcatgggcctgaggcaccaatgttcctgatccccgcgtagaaaatcccccctattctctaaatatgcgagtgctctaaaccacgacagcc

SEQ ID NO: 627299 - DNA, 798 bp, Homo sapiens
gcccccggtataccaagggaggctcccttctcctagatgggtgtgagtgcatggtcctatctgtacacacacccatctgcatgagggagcccccggtataccaagggagccagttgtgttcatacacaaacatcacagcttgaatcactaactgatgcctttccatagctccacagcttcccacctcctccccaccaataccggggttcgtaggagttaaggatggggggaggcggtattatactgcctctgatctgtactccttcaacctctcgtcagctgtttgtacggggatgagggggaaagaggagctgcctttttggaggcccccttcacctggcagctatgatgcccttccccttctcccctgtcgctcaccatatgccttatccccattctactccctctgtctatgctacagtgccctctggtgtgcttggtccgaacccccttcagcaatcaagagctcatctggggaacgacgagtaatttgaacgaagtgcttgacagtcagcgtctgcctacttccagaagatgacccctcattcttcctttgcgggtatgatgtggaagactggtttcagcccaggaccaccacatgaggagaggatctagacaggtggttgcctagttccaaggggcccttcctggcctgtagaaggcctttgtctgactcaaaaatatacatcagcagacctgcacacatatcacagtttcagcacgagcccctgattgattctctgtacatctgtctgttctattaatcacgattggtcgacctgttcaccccaaaaacaa

SEQ ID NO: 627300 - DNA, 1657 bp, Homo sapiens
tgatattcaagccagagaagcaactagggaccctgaaaactagtaccctaccccagcccgctaccaccctactctgtagccctggatcccctatgctagccatgataggcatgctagtatagtagatatagctagtattagtataatatgatccaaacatagtatatttatcatactaacacaactgtattaggatcgtagcaacacattcaaagacgcactatacatatatcagcaaacaacatagagatagagaagacaagagagaacagagagaagatacattatagaaaaacaaccaaacaagcaaagagaaaactaaacacatacaagcgtgtgcgcggcgagccctgcctccacagaacattaactccactcacccgaccgcgcccggcgccgcccagcagtagcccgccgccaacaacgagtcggtagcttggatgagctagacaaaaacaagaggaggtcctcggacaggaagaagcgacaaggagaattatgtctgagagtagagtgtgagatagtcattgtgtctagagcagggccgttagcgtcgtcatgcggggggtgcataagtgcggtgtggtaaatacagagcgcccgcgccgtgcgggttgtggttgcctgtgctggtggggtggtggaggtgtcgcccccgcgtctgtagcgcgacgtcgtgcggagtcgcgatgtgagtcgccgctggcagctcggcagcgcggccgcgcagccgcccgctgacacccacacgcccccggccgcgcttctccttcgcctccctcccgctcgcccagtgaagcactctggccagctctgacacacgcagcacgactgtcgtccccccccgccgccggcatcaacaacaacgacaagacagtagcagacgaaacacatgacgacgcgcgcccgccgatgtgcagagagactcacggatgcaacaagcaacacgactgacatacaaacaccgcacgaatcgattcgtccgcatgcgtaaccgcaactgtcgaccacactcaccaccatagcctacaattctccaccaacctatacctcatcatatctatgaccatcaccctcggcagcgcaccaccacacaaccggcagccaaaccacggacgccgagggtggtacgcgccgtcgaccgcagccgccgcgcccgcgcgcgatcgcctccgcgcgacgcgcgccgcgccagcgcctccgcccaacagcacgcgacgggtgccaacgcacgtacacgcccgaccggccaggcagaggacaccccacgccaccagcacgaacccaacgatcagccaccctacacccacccgccgcgcccggccccggaccccagtccggctgctcgcgctgccagtgcgtcgtccacaccggcagccctccctcggctgtgtctggctgtcgcttccgcccccgcccggcggcggtgggctcgcgtgtctgcgcgggcggctggtgcggcgtctgcccggctcggcgccccctcccctcacgcgcgtccgcccgccgccacctcagcgcgcactgcgcgtagtggcgccgccgcgtcgcggcgctgccgcgctgcttctcggcggctcgtctggccgctccgtcccggctcgcgcgccctcgcgcccctcgctgaccgattcgcccccctctcacgacgtctctc

SEQ ID NO: 627301 - DNA, 318 bp, Homo sapiens
gcacgaggaaacatctccaagctcaattgaaacaaaactgaatgcaacaagtgtaatcaatgaagaggggcaatcaaaggtgacgaaggaagctgatattgatgacttgtccagccattctcaaaatttgagggcctcattggttaaagcgggcgataatatatcagaagcaccatatgataaagaaaaaaaaattcttgatgttggtaataccttagctgcacataaaagtaatcaaaaaccaagtcattcagatgaacagtttgatcaggaagatcacattgatgcccccaggagtaattcatcaagaaaaagcga

SEQ ID NO: 627302 - DNA, 196 bp, Homo sapiens
gcctggccaaagtggtgaccaccgttcctactaaaaatacaaaaattagccaagcctggatggtgcacacctattaattccccgctactcagaagcctgaggagggacaatcaccttgaaccttgggaggttggaggattcaggtgaggccaagatcatgccacttcactccaggctaggttacagagcaagactc

SEQ ID NO: 627303 - DNA, 198 bp, Homo sapiens
gggcaggttcagaaagcctaaccatataagatgggaaggacatgagggttgacaaaatatgtatagggtacaatgtatcactgtttgagtgatgggtccactagaagcccaaactatcaccattatgcaatgtaccatatatacgcaatgtaacaaacctgtacatgtaccccattcaatctgaaataacagttgttt

SEQ ID NO: 627304 - DNA, 351 bp, Homo sapiens
agtatcacgagctctggaaaaggggacggacgtaaacgtgttcagttaccatccttaccaccagaagctatccacagactctcagcgatgagtgtgtcacgaagctaaccatgtacagtaggcatgagatgaacgaagttctggacctggagttgaaaggtgacatagagacctgcctcacagctatcgtgacgtgcgccacacagcaaaccagctttctttgcagagaagcttcatcaagccatgaaaggtgttggaactcgccataaggcattgatcaggattatggtttcccgttctgaaattgacatgaatgatatcaaagcattctatcagaagatgtatggtatc

SEQ ID NO: 627305 - DNA, 189 bp, Homo sapiens
tctaaaggtatgaatgtatatactttctcactacttgctaattactcctcgatctcttataatagatcactctgacatgtatatattgcttatttgattattgactataccactaccatgtagacttcatgaatccagatatctcatctgttttagttaccaatgtatctccatgttcttaaaaacagt

SEQ ID NO: 627306 - DNA, 150 bp, Homo sapiens
ctgggttctgctaacatcactccagtttagatgtatcttagcagagagacatgcttgttcctctggattggaacagatgatttactctcgggaatcttctctgtcagcctgtacatcttaaaggcatgaagcactcaaattgggcaatta

SEQ ID NO: 627307 - DNA, 193 bp, Homo sapiens
  misc_feature (165)..(165): n is a, c, g, or t
ccatggtcctgaccaccaactatgacaacctgcatggaggcctttgcgacaggcagaacaagcccatggagtccctggacttgaaggacaagaccaaggtatgggctgggggtgcgggaggccatttgcgacaggcagaacaagcccatggagtccctggacttnaaggacaagaccaaggtatgggctgggg

SEQ ID NO: 627308 - DNA, 374 bp, Homo sapiens
gggctcccataagttgctggggataacaggcatcgagccatcatatctttaaaaatgtaatagaatggaaaatggcaaagcgcgctgcttatcatagaagagactatcgcattggggttcttctgttggccctgcctgtgctagcacgtcctgcttcacagtgtaaagcgcaactcttgctgtgccttattgtaacaggtatagggtggatgctgccatcatgaagagagaggagagctctttgcttattataataccgtagagtggagaacaggatgtgccggcttaggagagggaagaggtacaggcccgctctgcccgagctgcagatgggacacacatatcccgactcagaggggagtcgagtctttctc

SEQ ID NO: 627309 - DNA, 367 bp, Homo sapiens
  misc_feature (317)..(317): n is a, c, g, or t
cgtaagcctgccatttgcattgagtttagaaaatcctcctttagcctcggaggagtttgtattacccaccttctgaagcctacgttctgtcaattcgtcaaacgcattgtccatccagtgttgttcccttgctggcgaggagttgtgatcctttggagaaggaaagtcattctggtttttgaaattttcagcctttttgtgctggtttctccccatcttcgtggatttatctaactttggtctttgatgttggtgacatctgtacggggtctctgagtgaacgtgctactcctttctgtttgttagttttccgtctnacagtcaggcccatctgctgcaagtgtgctggagtttgcttgagggttca

SEQ ID NO: 627310 - DNA, 129 bp, Homo sapiens
  misc_feature (25)..(25): n is a, c, g, or t
acaatgcacttgttattaacccacnaagtgctttacggtgcacaccagtgtctcttgtctggagaaaagaagccattgaaccactaattaaatcatatttcacgtagagacccttgttcttcctctctt

SEQ ID NO: 627311 - DNA, 438 bp, Homo sapiens
  misc_feature (84)..(84): n is a, c, g, or t
ttttatgtcaaattgactttatcctagtgaaaggatagtatgtgaaataaaaatatcttaaaaatggaattgtataaagaatanaatgtctctttttctacacatttattgatatgatttggtggtgtccccaacccaatctcatcgtgaattctggttcccataatcctcacgtgtcatgggagggacccagtaggaggtaattgaatcatgggggtggttaccctcatactgttcttgtgataatgagtgagttctcctgagatctgatggttttataaggggttttccctccttttgttctgcacttctccttgctgttaccatgtgaagaaggacgtgttttcttccccttccgccatgattgtaagtttcctgagacttccccagccatgctgaactgtgagtcaattaaacctcttttctctagaaattaaa

SEQ ID NO: 627312 - DNA, 267 bp, Homo sapiens
tgcagggtcagaaagggatataagatgaagtgatagggtaaatggtgaaattgaagtggtgcataacattgccaaaatagtgtgccagtagaaatggtgtaaaggctgtcttttttttttttttaaagaaaagtaataaccatgtatttggtgaggcaggttaacaaaattacaagttttgatttaagaaggaaagaggaaaaaagaaaaaaaacaaatacccagattaaaaaaaaaaaacacgcgccatggtctaaggagtccatt

SEQ ID NO: 627313 - DNA, 246 bp, Homo sapiens
tcgtttctggctcgggcattgcaccacgcctggctagtgtggtattttagtagagactgggtttcatcatgttggccaggctggtgtcgatctcttgacctcatgatctgcctgcctcagcctctcaaagtgttgggattgcgggcgtgagccgcatccagctaattttgtatttttagtagagacagggttttgccatgttgtccaggctggtcttgaactcctgacctcaggtgatccgcccgc

SEQ ID NO: 627314 - DNA, 598 bp, Homo sapiens
atatctttagactttataaaaacttttggcatatcacttatatatttcatgtagtcaaacaataatcttttcctttatggattccaatttttaaatgatttatatttttaactaaattttcaagactgaaaataaaaatatgaatgaacaaacccctctcaagcaatcatatacaaccaccctaaacaataaaatataatacattcataatacaaattaaaaaatatcatgacatacacacacatacaactgttaaaattccttttcttaataaatgcaaagaatcaagacttcttaattacttacttaaataaatattatacaaacttcattcaattccataaaaactcatagattacactacttcaaaatcaaactatcaacaaatccgcaatacactttttaactgtacattgttccaatacacatttataaattttcaatcaacaatatactttcaaacttaaaacaaaccttttactcttttcaagaaaatagacatcttatatcaaattctacatcaatatcatccctatcttattaacaattaccatttcctcccatagtcatattcaattacaatcaacttccagatcct

SEQ ID NO: 627315 - DNA, 154 bp, Homo sapiens
gaaaatatggtaataaagctagccaaggaattaccgcctccttctgaagaaataaaaacaggtgaggatgaagatgaggaagataatgatgctctactgaaggaaaatgaaagtcctgatgttcggcgagacaaacctgtgacacgagaaccag

SEQ ID NO: 627316 - DNA, 133 bp, Homo sapiens
ggccgctgccgttcccgaagaggatgaggtttccagcacaagcgaaactgctgcccgggtcggccatccaagcccttgtgggttgtgcgcggccgtggtctgggcgctcctgcttgtgtccgccgtctatcca

SEQ ID NO: 627317 - DNA, 343 bp, Homo sapiens
aaaaaaaaaggaagcactagatgaccaaaaacggggtaattggactcaagtcaccttgaaccttatcatctgacagctttaacccacctacttgacttcatgtcccctgcaggcctcgcacctgagctctacatgcatctgtccaggtgtctcttaaggtgtatcatgtctcatcaaacaggcatctccacattgaggtgtccaggagtggctttttaaacccccaaacacatttcggtgcagtctacacatctcagatgagggtgtggatgtacctccggaaactgccgaacttgacagcactgtataatataccctgtgaaataaattaccctttttgcta

SEQ ID NO: 627318 - DNA, 209 bp, Homo sapiens
gcgatgtgagagataccagtgaagctatcatgtgagaataccagtgaagccatcatgtgagaataccagtgaagccatcatgtgagaataccagtgaagccatcatgtgagaataccagtgaagccatcatgtgagaataccagtgaagccatcatgtgagaataccagtgaagccatcatgtgagaataccagtgaagccatcatgtg

SEQ ID NO: 627319 - DNA, 193 bp, Homo sapiens
tcgatcagaccgtgacggccgcctcggccgacccgaagctttcgcacggcaagggcatgatcaatggcgtgctgcgccggttcctgcgcgagcaacctgcgctggtcgcagacatgcaggcggatccgtcggccgccaccaactacccgatgtggtggatcgacgccgtacgcagcgcgtatcccgacgcctg

SEQ ID NO: 627320 - DNA, 135 bp, Homo sapiens
agggtcatggcatggcactccagctggggcaacagagagacctgtgtctcaaaaaaggaaagggaactccaagttcggaaagtaaacaagttatgcagtacatgatgcgggggagaggatgtggtcaccaacctt

SEQ ID NO: 627321 - DNA, 372 bp, Homo sapiens
  misc_feature (22)..(22): n is a, c, g, or t
  misc_feature (76)..(76): n is a, c, g, or t
  misc_feature (98)..(98): n is a, c, g, or t
  misc_feature (109)..(109): n is a, c, g, or t
  misc_feature (167)..(167): n is a, c, g, or t
  misc_feature (172)..(172): n is a, c, g, or t
  misc_feature (174)..(174): n is a, c, g, or t
  misc_feature (180)..(180): n is a, c, g, or t
  misc_feature (182)..(182): n is a, c, g, or t
  misc_feature (186)..(186): n is a, c, g, or t
  misc_feature (190)..(190): n is a, c, g, or t
  misc_feature (194)..(194): n is a, c, g, or t
  misc_feature (219)..(219): n is a, c, g, or t
  misc_feature (233)..(233): n is a, c, g, or t
  misc_feature (244)..(244): n is a, c, g, or t
  misc_feature (255)..(256): n is a, c, g, or t
  misc_feature (279)..(279): n is a, c, g, or t
  misc_feature (318)..(318): n is a, c, g, or t
tttagaaatccccttacgctgnttaactcaaaagtcccttcagagtcaagaaccaacctttcatggtccataaatntggtatttctggtttcctgttnagggggcttgnaaacctaaaaatgttcttccttccaaaaactaactaacctgaagtataaaacctcagncggcngnattttntntttntggnaaanctggctgcgctttgtttttgggacncagtggggcaagtncctgtggcagngaacgaattgnnccctcggcctctgtatgtgagancagcccagccacacccaggaggaggcatcccccgatgcnctgcagcgcatcctccttagagagagaacgcctgtcaggtttcggcaaagaaaa

SEQ ID NO: 627322 - DNA, 387 bp, Homo sapiens
actggacacgtaactcactgtgtgagaggccccagtgaggactagaccatctccacctgccccagctcctgcagggatggggtcctgaacactgatggcatgatcttggtgcatgtgcttgacccatgcagacacacttcaccctgcccacgatggctccagcctgtcacctcactgacacacacctctggggtgcagctctctgccagccccgagaccggctttgttttgttgggcacgggtcttcgcctcacttggagaccagccggctttcctgggggacacacggggcccccggattgcctctgaggagccccagaacaagcacagacccgtggactaacgatccagctcgaaccatgggccccgagtcaggaagacatgcgt

SEQ ID NO: 627323 - DNA, 168 bp, Homo sapiens
gctcggcccggataagcggctgatgcttattcacattaacagaagggtggtaacacatgctaaaatacattgaatcatctcaggtttctgtataatgaggcctgcattcaagttcagcaagataatgatccttaggaccaaggggaggaatttaagggaaaaataacg

SEQ ID NO: 627324 - DNA, 170 bp, Homo sapiens
ctggaatataatttgcatgagggtaaacattcttgttttacatcattgccatattttcattatgttgaacagtgccttgctcttagtaaaggttcaaggacatatataagctcctggctgactaaattaggttgaggaggttgggggacaattctctgcatatatacaga

SEQ ID NO: 627325 - DNA, 551 bp, Homo sapiens
ctagggggaaagcgaccgtgaacccggggagagagctggcagtgagccggagatcacaccacggcactccagccggggcaacagagcgagactccatctcaaaaaaaaaacaaaaaacaaaaaacaaaaacaagaaagggtgcagccactctagaaaacagccgggcagttcctcagaaacttacacatagaattaccatatgacccagcaatccaacacctaggtatataccctaaaaaccggaaaacagggacacaaatacttctaccggtatttcatagtagcacttaacaatagccaaagggagggaaacaagctaaaggtccaccaaatgatgacgggataaacaaaatgtaaaggtagcctagccatacaaggaaatattactgggccataaaagggaatgaagtttagccaacaggggtggctgggaacggtagtctcagctactcaggaggctgaggcgagaagattgcttgagccggggaggtcaaggctgcagtgagctgtgatttacaccattgcactccagcctgggtaccagagtgag

SEQ ID NO: 627326 - DNA, 158 bp, Homo sapiens
aagagtacattcttcttgagagtagcctctataactctgaatattttatcactagtattccttatggctgccactcttatttacctttaaataatttctgaaatgtaaccttttcagaactgcattgttgaaacaagataaagatcgcctttcgatag

SEQ ID NO: 627327 - DNA, 981 bp, Homo sapiens
  misc_feature (21)..(21): n is a, c, g, or t
  misc_feature (77)..(77): n is a, c, g, or t
  misc_feature (84)..(84): n is a, c, g, or t
  misc_feature (89)..(89): n is a, c, g, or t
  misc_feature (235)..(236): n is a, c, g, or t
  misc_feature (239)..(239): n is a, c, g, or t
  misc_feature (243)..(243): n is a, c, g, or t
  misc_feature (255)..(255): n is a, c, g, or t
  misc_feature (261)..(261): n is a, c, g, or t
  misc_feature (274)..(274): n is a, c, g, or t
  misc_feature (285)..(285): n is a, c, g, or t
  misc_feature (625)..(625): n is a, c, g, or t
  misc_feature (764)..(764): n is a, c, g, or t
  misc_feature (767)..(767): n is a, c, g, or t
  misc_feature (860)..(860): n is a, c, g, or t
ctttttcttcacagcttgtantgaacacaatattgcccggttttaaaaaaaacaaaaccaaaacattccgaaaatgntccacancctcncgcctacctgcccttcccctcacctcttgcgcctgggctctccccctatgcccccatccctccttccctcagattgtctgggttgccgtagtgtgttgggatgtagtaggagattctcaaagtcgtgtggcgcaggttgcccaggnntangtgngcacttgttgtngtgtgngcgtgtgtgtgcnggtgtaggggnaggcaggggggtgggggggtgtggggtgtgggagggtgggtggggggagccagatgaaatgaacagaaaaggggaaaaaacccagacgactgaactgcccacattgacttacttgtcccagaggcgaaagtcagaagcaagggcacggatcatgctctccgctgggggagtatgggggcaggcaggtgggcgagggaagaggcagggaagagggcacggagcacagatgtgaggaagcggcgccaagtcaccacggagaagcgggaggtgctggcggaccaggacgcagaggctgctgtagctgccgtcccctgggcagctggccgacaagactgttttnttgcagagtgcgttctcttgagagcgtggtggggcccatcttccctctccccaccctttagctagcccagcatggttctgaacaaaatgaaagtcttaagggccatagaggggaaagaaaaaaaaagagaaccagcacnttncaaagcgaccatccccacatccattcctaggacgggccctcagggcggtgggtgcatcgtgaggagggagcggcatgggatgttagcaccagntatttacagaacagctcgagagcgcttcaggaacgcgggcaagtccaatctgcagagtggccaaatgagcagtccccacccagccaaacctcagaaagccaatcagatggtttcagaacag

SEQ ID NO: 627328 - DNA, 1420 bp, Homo sapiens
  misc_feature (1)..(1): n is a, c, g, or t
  misc_feature (947)..(947): n is a, c, g, or t
  misc_feature (1081)..(1081): n is a, c, g, or t
  misc_feature (1090)..(1090): n is a, c, g, or t
  misc_feature (1094)..(1094): n is a, c, g, or t
ntactacggggctgctttttgtgtgcatccctctgcagttgccctcggcggtccccgcatctcaccgccgtggttgttggccccttcccattaggaagagccccgcgtggtcccggttttctgctctctccctggagttttttagctcctttagcccccgccggggggccggtgattacccaaattttgtccgaccacacccacggggaacccgccttgattgccccccacttttaggcccctatattttttaggggtgccacaccttatgtgaggacaacaagggttgtgtgtgccccaacaaaataccctactggccttgggtgtaccccggtgttccccgggaaatttttcccccccggggattatttgctgtctgagcccacacaaggcggtcctctcgcccacacttcgggccaagggccgggggccaaaagaaagggaggagattcctcccgggggcgggcgggccccggtgccgttgggggaagacccccccggggggaacacacaccacacaatggggtaaaaagaaaagcccgggaaaaaagagccccgccgcttcgcttgtagtctgaacttctgcggaaacacaccacagaaggacaacagccgggtcacagcggacggcaggagaccccctgtgaatcacaacgaggacttctctctgggtgcccccctcgggccacaaaagtctgagataagtgcgcccaccgctggagactctctcgagagggagagaaaagggagggcccccccctcgctggagaggtccacacccgctctgacaaagacctctcggtgcacgagaactctcgcgagagacacgctgtctcgagcacacagtggagacggagtggagagttggacacactttgtgggagagccacacatataaaaagtataagagaagagataagggaggaaaatagccaccgagaaaatantatagagagagaagagaaggggagacacccactgagaagagaaaccacgggcccacacacacacaatctggcctccctccacggccacgtttcacgagccacaaagacacacgttttcacagctcgaggaggcntccacagcncccntcgagagggagaaggtgtataagtgtgttcacagagactctctcgagacacagcacacccacagcttcctctctttccacagtgtcacagagattcacagagactctctttcctcacgaagaatgaaagaagtttccactcgatgggctatggaggaagacctccactgggaggatgagggagagacacacgggcccgctctggagaacacgatgaccacgagaaaagaagaagagagcccagaactgttcacaatcgcacataagagaagagggaggtgttgtaaaagaagatttgaaatccagaaaaaacttaaaaccagccca

SEQ ID NO: 627329 - DNA, 689 bp, Homo sapiens
ggtcagtcaggctgtgcgtagtcgagcattacatcgacgtctgtgctgcctgtgaccgtgagtggccttcacgatccgtgagtacctttgaggctcgagcgtgtcgtcggggtgttgcgacaccatcaatgtttccgtcctagcatatcgtctggtgttccttggttgagtgtcgaagctggtgctgctgtggatgtgtgtgtgtgtgtcgctagcccggacggccgacgcagtcgtgtctggacacacgacgccgtgagtgctggcgcagcgcgcagagcaccaagcacggagaggtggatgcctggcccggccagcgagtagtcgggtcgcaccgtcagtcctgcgtggcctgtcgccacctgcccctctccttcctctcctccccggggcagcgggcattgctgctgggcgaagctgcccgtatcctgtgagaaggtgggcgagcggggctcctgcgagcgactgccagcagatgattgttaagctgggtggtggcactgccattgccggctcctgagcagtcatggctcaggccacctcctccacctctactctcgatttctctctctccccctcagcagtcttcccgtgtggtagtggctggggaggagccttgtctggttagctgtcagctgtgcgaggcgttctgggtgactcaggcgcagtgccagccctgggcatgaggc

SEQ ID NO: 627330 - DNA, 102 bp, Homo sapiens
tcttattgaggatccctagctgcatatggtgtaggcatcactggtggctgatgcagtggcgcctgccttggtgaccagagcggcacagccaagccccagctg

SEQ ID NO: 627331 - DNA, 184 bp, Homo sapiens
  misc_feature (103)..(103): n is a, c, g, or t
agcatacgcactatgcctaggttcatttgtatcatagtagagatggggctatcacaatgttgggcaggctggtctcgaacttctgactcaggtgatcacctgnctctgactcccaaagtgctgataaatatctaagaactggccgggcactcaggcctgtaatcccagcactttgggaggctat

SEQ ID NO: 627332 - DNA, 1337 bp, Homo sapiens
  misc_feature (1)..(1): n is a, c, g, or t
  misc_feature (312)..(312): n is a, c, g, or t
  misc_feature (463)..(463): n is a, c, g, or t
ncacgccaccccccccgctcgttgaattggggggcgccccaaaagatagagagaggaaggaaaatataaatgttgggggcgcaaaagacgaacaagcgtcgttctgtgggtctccaactccccgagggggggacccctccctctaatgaggggcgaccaccaccaacaagaacgtctggcggcaaatcctgctggtagagtggggggtgtattctctccaaaaagaggggattctctcatggtggtggtttttttgggacaagaagatgggtagatgggatcgttcttttttccgctgatgatgaattttcnggccccaaggagatataggagatagtgagaaagtgtcgccgcaagatatttttgatgaagaagaaaattgttctcatacgacgctgtgagtattgttcctctgggaaaagagagtatgttttcctcagggggggggtgtttagaagaaacntctgcgcccgctccttcgggacgagattgtaaacaagatgtgctccactactaggcgccgcatctagaagggagtactctggtggaccaccccccggtggcgacacacgaaaaaataggaggggggcgtctcacaatgggggtctccccagatatatagtgcggcgcgacgcgacccacagagagagtgtgtatagactctctcaccggtgtggagagggtctcacagagacacttacaccggatggagggtaacactttgtggttctgtgtctctgtgttctctgtgttgtttgtggtttgttacagtataaataaaccgccccccgcccatcttctaagatatatctcgcgagaagagcctttctttatatgcgctctatggcgcgccccaccacagagatctccgcccaacatatccccggagaagagaagagatgtatgtgtgaaaaattatcggagccccgaagagaggtgccacagagcacagaatgaacttgtgaaagaaaggtgggtctcaataaaatggaggttccacagacgcacgcacattgtggaaaagaacacaataggaaagggctgttccacactctttttatttctcttcttccacatgagaggttttctggtagaaacaagattaaaatagttgtaagaaagaccccacgatttgtaattgtgggaagacttcactggggactttcactggtgtaagagcccgcttgatttctgggaaagacccctggggaaccaaacccgcggtgcttaaattgttacgcgactgatggatatggaccccccggcccccgagatttgtttttaaggttccagacttccaattagtggccacaattaaaagtgctatttttggaaaa

SEQ ID NO: 627333 - DNA, 270 bp, Homo sapiens
  misc_feature (189)..(189): n is a, c, g, or t
aacgatggtcctcagcttccttgaagtagcttggccaagatggcgaaacccatctctactaaaaatacacaaattagccaggcgtagcgtgtgggcgctggtaatcccagttactcagggaggctgaggcaggaaaatggtttgaaccagggaggcggaggttgcagggagccgggagatgactcgcantgtgccgtccagcctgggctgacaggtgcgaaagctccgttctcaatgacatacaaaacaaaacagaaatttcgggtgtag

SEQ ID NO: 627334 - DNA, 1022 bp, Homo sapiens
ggagaactagtctcgagttttttttggggttttttggatgttaatgactttactttgagaatatgatggaaaaatattacaggtacacttggaaaagacttgatcaccaagtgaaaacaatctaaccaaaaagctttaacgtctgtcagttaagctgaagctgaaattcgggggagctatgactatgctgcagggccaaaaggaatggataattagttattcctctccttcttcctacacccctttatacccccttctagagccaaaaatataaaaaaaacaaaaaaaaaaaaaaaaaaaaaataaaaaaaaataaaaaaaacaagataatcctggagggataattattatttgggggggggtggagaaaaaaagggagttaataataagatgagggaaatgtgtgtgtaaaaaaggagtagtgttatctataaacaaaatattattttgttgtacaaaaagaggtggtaaaatactgatgagggacgtccctataaaatataaaggagacctaagtaaatatataatctctcctcaataaacccgcgagaaatacaccccctgttttatatcattcttctcaacaaccaacacatatatatacaacaaacaacaacaaacaaaaacaaataaaacaacactaactaaaaaaaacactaagaaaaaaaacaaaataactaacataacacatacaatagtatgaaaaaaaaacaaaaaaataataattacacaaaccacaacataaaaaaacataataataaaatacagtaaaactacaaacaaaaaacaaaaataaaaaaaaatatattagaaatgaaaaattaacacaataatatatcaattatcataattatagattaaactaataattaattaaataatacaagtatagcaaaataatgagaagataataggcaaatagacaaacacgagacgcagaaataagagaagaaacaatcagaaaaccagcagagaaaaaaaaacagaaaaaaaagaaccacaaaaaagtaaccagaaacaag

SEQ ID NO: 627335 - DNA, 369 bp, Homo sapiens
tcagcattaacattaaaatagggatcctggccaggtgccatcgtcacgcctgtaataccagcactttgggaggctgaggcaggtggatcacttgaggtcaggagttcaagagcagcctggccaactggtgaaaccccatctctactgaaaaaacaaaaattaatcccagctactcgggaagctgaggtaggagaatcgctttaacccaggaggcagaggttgcagtgagccgagattgtgccactgtactccagcctaggtgacagagcgagaccctgtctcaaaaaaacaaaacaaaacaaaacaacaacaacaaaatttagagatcctagtcgaccggccgcgaatttagtagtagtagtagtagta

SEQ ID NO: 627336 - DNA, 196 bp, Homo sapiens
tccagtacccgagcatgcatgcctgcctgccggtcgacgtgtattcaacactgcggtgcatgcctccctgaacaagttccgtcgaaacgatgagcaccgatgctgacctaccaaatatcgtaaaagctggagccaggtcgacgtgtatacaccactgcgatgcattgcctccctgtaacaagtaccgtcgaccacg

SEQ ID NO: 627337 - DNA, 137 bp, Homo sapiens
tgtattttcagcaaggactggtctattctatactacttgtaattacactgaattcacccccactgaaaaagatgagtatagcctgcgtgtgaaaccatgtgacttatgtcacaaggccaaagacataagttaagtgg

SEQ ID NO: 627338 - DNA, 152 bp, Homo sapiens
agctatggtatgcaagtccctaacacacagttccataaactttacctcaccctctttatcaccctaataaaatgtttgcatttgggtcaaaagcgatggctcacgcctgtaatcccagcactttgggagcacaaggtggggaagcacacagg

SEQ ID NO: 627339 - DNA, 1185 bp, Homo sapiens
aaacacagaactaaaagaaaaaatccaacggtggcttgcagagaggaaacaacaaaaggagcaacttgaatagatactgtgaactaaccaaaccaaaaccaaccccagagtgcagataaacaatgtttgtggtttctctctttctggttctgttccttttctttcttcttttctttttctttttttttttttgttttaactaaattagaagaactgggtctggctggaaattatggatagttaagattcctaaagaacttgacaaggtgtcccctgggcttgcagggaaattatacttattatagcatcaccaagtttagaaatcatcactaattttcaccctcgtggtgggtctcgttcaattttcttcttccttttcctaaagtgaaattatagttatttcaactactaaaagttccgggcacccgggctattgctcttccaattacgggttcaaacattttggggtgaggtgcggctttgataacatatgtgagtgtcacatatttcaggtgacagcgtgagtgttatcgagaaaaatccgggtaatccggggatatatactagatcctcagtgatctagacgttaagccgttttcgtgtgttacaggagtaacgttcacataaaagcagataccttcaagtttggtgtagacttctgaatcacgatgatagaagaagaaatttgtttaacacgggattcaagggaatctgtgcacactccgtgggaaaaagcattaaacatgggtaacaaggctttaaagcgagcactggctagggcaaccgaacacatggatggggcctagacaccgttgcgaccctatacgctaggaaatcggtcacacaggacaggcccaagaattaggccagcgatcaacccagaaacgcactaccaccaatcaaagcggaattcagggagaaatacatagatcacccggcatcaggggaactggaaagcacaaattctcagaagatcatgatcggaaaacacaatactgcgctcgcaaattacgagcgtgatagagctcctagaaaagtgaaatattctttttttttctttcttttctttccttctctcaagaaaaaaacgaagaaagaaaagcaaagagaagacagaaaaggaaagaagaagcgaacgggaggaaggaagagagaagagagaaagagagaaaggaaagaagaggg

SEQ ID NO: 627340 - DNA, 269 bp, Homo sapiens
catgatcagagtcatagttctaggaacaggaagacaaacccagattatgcgcacacaagtgtataagtacatgtgagccctcactcatgttcatacaacatggcagtgacacacatacattagacaagagattattacacactgagactccacccagtctccctatatatcctcccatgggctcctaattgatgactaaacagtgcattgctgggtggctaccagtagtttcatacttcacctaagctgaaactatagaactgacggtg

SEQ ID NO: 627341 - DNA, 928 bp, Homo sapiens
gctgtggaattgagttgacaagagcatgaaggcatattcccagtgtcggtctgatactatttcgcatctgaagaatgggttgactcaagatcttgggttaccaagatgtcttcaatgtgcagtgaatatcttgcttacagtccagtagctctaggagcatgttgctgattgagtatccacacttatagatacgttggggctacagcttgttacctagaatttgagatactaagagcaagtgcgagtttgaaatgcccactgggtttctatctgtgtgtatggagagagggtctcattctgtcacccaggctagagtactgtggggacacgggtcatggctcactgcagcttaagctcactgcctgggctcaagtgatcttactccagcctcccaagcagctgggactacaccacgcacaggtatgcaccacatacctggctgatttttaaaattttttctagagatgaggtctcactatgttgcccagctggtctcatactcctcagttcacgcattcctcccactccactcccaaactgtgggattacaggtgtgaggcacatgccaaaaccactgatctttaatcccacatgtgggcataaagaagtcactatattaatgttcacggaaagccaagaatttaacgaacatttctgactatggaaaaaatgtgtcctttcagttgtctggtgaatttctagacaaagtgacggttgtcaacctcagagtaatattcttaaaatgtactctggttttatcctgcttcttatggaattggatattgggtgaattattacatgttcatacagggggttgatatggcccatgatttaggggcggttaacgaattacccaccggtgacagccaccgaggacagcgtggggacccgggtatagggtcatacaaaaaaatttggccgagtacag

SEQ ID NO: 627342 - DNA, 394 bp, Homo sapiens
ggcaatgcatgtgagaggcgggggcacgacgacggaccctcaccccagacaccatgagcaccaagcagatcactagcaggtattctatgcatagtgcgtgtagggaaggatgtcaatgcctattctcacatgacttggccaacagtagaccgttcaccatctgcatgtactaccagaagggctactgtgcctatggaactcgcgagagatatgaccacacgacgccctctgctgcagctggaggtgctgtgtgcaccatggaccactgtgtgccctacccaagtttgcacaattctcagcctagttccgagggcacatgcgtccattgtgaagactaactgacatgatccaggatagcgtgaaatgagcattggttcttagagccgtctctctg

SEQ ID NO: 627343 - DNA, 609 bp, Homo sapiens
  misc_feature (345)..(345): n is a, c, g, or t
  misc_feature (348)..(348): n is a, c, g, or t
gtcctcatgggctcctgccctgggcctggtggtaggttcacatgtcagcaacacgagctaatctcacctcacagttactctaatttctcgtgtctgtcaagtttcccaaggaggagttgttttcccaaatcagcctgtttctttttataatataagctgtttagaggccaggcacagtggctcacacctgtaatcccagcattttgcgactcccaggcgggcagatcacctgaggtcaggagttccaggccagcctagccaacatagtgaaaccccatccctaataaaaatacaaaaattaggtagggccaggtgggggcccccggggggggttgggggcttcancgncccataaccccaggactttgggaggccgaggtgggcagatcacctgaggtcaggagaccgggcctggccaacatggcgaaaccctatttctggtaaaggtacaaaaattagctggtgtggtggtgcacgcctgtggtcccaactactcgggaggctgaggtgggagaatctctagaacccaggaaacagaggttgcagtgagccaagatcatgccactgcactccagcctgcgcaacagagtaagacactgtctcagaaaa

SEQ ID NO: 627344 - DNA, 1564 bp, Homo sapiens
  misc_feature (1205)..(1205): n is a, c, g, or t
  misc_feature (1358)..(1358): n is a, c, g, or t
ggattagacggcgaccgtttgatcgtacatcgtgtgtcacgccgccagacgtctgatggtctcgacaagtcactggcgtcttgtgatccgtcgtgtcgacctctcaccatggtcctagacgcatcattggtgcgtaccgtagatgtatcgtgccaatagagattagaggaacagattccaagcacgccataaaggacgtactcatcgaacccgccttgtgatagaccataggcaccctgggtacttgtcagagctattcaaggggactgatggagccgatatccaatcttcaatcactcgctggcacatgacaatggttgccattcgccctgtggaactatcaatgccacgatgtccgcgcacaatgttgtccctcgtaaaaaacccagtgctagagatctatgtcagtacgatcacaagtcactagggataataaacgctgtgggtcctctcaccatgggcgttatcaatgaggcccagtacgtcactaagaaggcacaaggaacgcatagaatacgacacgtaggtacctggggtattgcgaacacgcagagagacaccgacggcacatgtatagcggccttgtggtgtagagggaaagcaccgagtggaaaccaggttgggcctagaaacgtgggaagagcaccgcaccctaagccttttgatttggcttatgctcgattggaccatcgtgactgtttcgccaacaagcaccggtttctacgcgaccccatgtaggggcatggacacgcacatccaacacgaaaaactgtccttctaatgtcgtaggagaatgacggttgaaatcatgatggcaagcagaagcaagttatgttagacttccccaccaatttgctgtgagggaccatagtgtgtatagacacactttttccttatgggctctttatgggcccccgtggcattaggttcccaggtaaaacggatcaggtttagcgagggggaggatcccccccgtttaaccacgttggtcgacttccaatattccaaccagtggcgaacaacaccggggccatacgggaacctttgtcaggaaccacggttctttgacggattcacccaaccacatgcgtgcagattagaccaccccttgaggcaacaccaaactattggtatacgacgacccttgttctcacgccaacacacaggtgtttgaaaaatcattatccgcagggcatacacgaccnagaacaaagaggcaggctttttttaggaggcatttaaacagcactatggagtagaggaaaataacgcttatttccaacagcgaacctctaattttcacaccaaacattaggaaccccagaatcttaccgcggcattagtatagcgaaatctcnccaggaccccgggtaccacaacattagtaggaaggagtgcaggccacactaggtgtccctcttaggcatgagtcaccccaagacgagggtcctgtgggtgacggacgacacgggttaatttccagagccagaagaagcattaccgagagagcagagtcgccaagtacacgggcgttaacaagcgaacattttgagactccactatc

SEQ ID NO: 627345 - DNA, 397 bp, Homo sapiens
atgtacagagttcagcaaaggacaatagaggcccacaaaatactagttcacatccacttggatggctatataaaaaagatagaacaataacaagtgttcacaaggtatgtggagaaataggaaatcatacactgctggtggaagtgtacagtattgcagctgctttgtaaaatagtttggtaggtttttaagaagttcaatgtagagttacacaagacccagcagttcccctcctagatatatacccagtggaaatgaaaacccacatccacagaaaaacatacacatggatgttcatagcagccttatttaaaatagtaaaaaagtggaaacaatccaaatgtccacctcttaaattactacaacaataccaataaagttatagcaaatacagtct

SEQ ID NO: 627346 - DNA, 790 bp, Homo sapiens
aagagcacctttcacccgcactgtttagttcggcccaccctacccctattaaaggttggaaaattcctgtttaagggctttatataccgaaggggggtttctcccgcgcaaatagaattcggtttgggcctagattaaacatatccagaaccagccagccggcttttataatttgtgccaaggaagtaaagttcaagcccagtcttctcaaaggggcaactttaagggtaataaacgcccccgcagtctcggccattgcttctctataacaggtatcgtatgtgcagaaatccaaaaaaaactgtacactataacctaggggtaaaggttgggtactagccggatgggatcgtgggcatttcacgtaacaagtcctggccgtgctctaaagtggaaatgtcaccaaacaacaggtgcatgccagtgaaatttgcagaaattaaatgggcctcatagagctgctcgttagtggaggaccagtccgtcctagccctttaataattctgctgcctaagctggtgggggaagcctacacttccgtttcccaactgtagctgttaccctcagcttgttttgatagaaccacaatcagcacagcaagatagtgttgtaggccagccagggagcacttgtgtcatagaggcgtcatgcccggccctaggtttatcgggatttaaacaggcccaggagtggtgttgatgcgtgtagtccatgcccgtaggagcatgactttgagaggtccacttgggcagatatgttcggtcccagcctggacaacagtctgagcccc

SEQ ID NO: 627347 - DNA, 780 bp, Homo sapiens
cttcctttcaggacgaggccttttaccccccctggttaaatggacctgggtccccccactgtgttatatcttgtagagttcttaaatgatttctaccccgttccccctttgagtgtagagtattaaaggttttcacgggcccacctgtttccttgtgctgttataatgtctggttacctcgtctagtatacatttgtcttttaaagttatggagtgcttttttaaccacgccctcttatgaaggccgcctgcctgaaacattgaatatctgggggataagggttaccccgtatgcctcttctatgagccacgaaaaaggggacagaagacgcgtgtctgtatcttcctcggtttggtaaccctccacgtctccctgtacagagcgctcctaaccacacactggcgacggtatatcaccccatcacggagaagggtatactgcctgcaataggaggcctcgcttgccgagtgtacttcccttccccagtattattcatccacgacttatgccaccacgtgcaccacaaagccaacctgctaagagagccacgtggacaccccagcttttcccccgctaggtgccttttacatcgggtttgttctccttccctggtgtgttgctgaccttgtccctgagtcccctgtgaggtgctggtgagtattacctttcatctgtgccctgctctagaaccttgaccttgatagttcaccccctctgatggatcccctgttttaaataaaaaccattcacctttcaagccttacaccaaggaaaaataa

SEQ ID NO: 627348 - DNA, 143 bp, Homo sapiens
cgaaaattaactttctgcaatcacatagaaaggttgtgctgtgctttggcaccaaaccacttgttgtccaatcttgttaataattcctccggttttcaacaactccttcagcaccaattatgacaagatctgctttctccatg

SEQ ID NO: 627349 - DNA, 115 bp, Homo sapiens
cttccctcatgtttcagaagcctgctgacagctgaatctgtgacagataacaccttttcatctacagtggtccactggagtgactccagtgagtctcggtatggcttgaaacccc

SEQ ID NO: 627350 - DNA, 182 bp, Homo sapiens
  misc_feature (72)..(72): n is a, c, g, or t
  misc_feature (93)..(93): n is a, c, g, or t
ttcactgccattcactgcacgcactgccatcactgccatcactgccatcactgccatcactgccatcactgncatgcactgccatgcactgcnatgcactgccatgcactgccatgcactgccatgcactgccatgcactgcaatgcataacatgcagtgcatgcactgcatgcactaagcg

SEQ ID NO: 627351 - DNA, 858 bp, Homo sapiens
gctgttcttgcctccggagccctctgatcctgtatatgcagtgatgctccgagggccaggcacctgcatgctctgataatagattcagcccctttacagaccgtcgtcgcgttaacacaacaggatgctagtatgactatatgatcactactagcctctcctgccgccagctgcatgctagccgccgccgacacaccagccgactgagtcactccattactagctatatctacttactacctgcatgacagttgttattacttacatctgagcagacacacagacttaccagatgctcgaggtgagaaacatagcctatttcagttgaggagctaactaggtattacttaattcatcagccggacagcctccgtcgatactatatatcgttccctgtcctcttgacgagacccgggatggtataggagtagcacttaaaagaactagaaaagtggcaccagaaacagcagcttacacgaattattacgatactactatgattaagtagcaagctaggagactaacttaccccccttgcatctttactgaactcttcttggactagtaaaatacatggggctatgagactttggaacgaatttaatagacttatccacctgtaagaatgctgtactcactcaggttggagggggcctatggcgtggttcaatggaccgtgagcagcggccaggactctactggagggtgaccccatcgagactaatcccccagactgtacgaaagagacgacggaaaggtcctcaaccctccaatcatagaggcagaccactctaatgggttcgggacaaaaatgccaagcccaataactggcacccttatgtcgccgcgcacccgtat

SEQ ID NO: 627352 - DNA, 1340 bp, Homo sapiens
ttagtgtcgccgctctgccgctgctttgctcctaggctgcttgcttaggcctggaggatcgaagctggcggctgtggcggtggcgtgatatggcggcggctggtgatgcggagcgggacgagggaacgggaggaagcgagcgaggagcgcgcagagcgcgcttttccgtccgcctgaggagccgaagcattccccggccccgcgctgcgcgtcgccttgcccagttctgggacaaatgccgagatgtccgctgcccacagcgcattgtactcggtcatgcctgggatgctgggcaccagcccaagccaggagcctgcgccataccccaccctggaacctgtggccattcagcgaatgccctggtgcaatgtttacctcatgactattgcaccaaagcccggggggacgcgtcttctccaccacaccgggaggaactcgaagtcagtttatgaccagaaagtttctgttggatcgtcgcaattctcccatggctcagaacccaaccctgacatctgcccaatatcccaggcagtcactagccctggcaaccttaattgaaggactccaaagtagaagtaaagcaatttgaacaacttgaacaatcacgacaggaaacatgcagttggggatgatgctcagttcggagatggacattcttgacttctccttgcacaggatttagcaagaacacagccagcaaacactgatacttgtagtgcacctgatttggccaagtaaggatcaaacaagtgaatacgcaccgaagaaggccataccatctagtccgccattacaagtctccaccttcccagtataccgtccttggtgttgccaaaattgaatgggggagaattgatcgcatttcattctgggccagttgtctatagttaccgtgtttacggtgtatccccttacacagtttaagccagggctacgaattgacattgccactgcacagtataactgtagaggaatggaggcgcttataacggagcaacggtctcgacgcgcttacgaattattcgctagttttgttatgtcttgatataggagaggcgccgagctttataaaaacccgtgtgtaaactttctggtgcccaccagacgtaagggtgttttaacggaagcaccaacaacgaggtagccaggaggccgagacgagcgctgagggggagaggtgtagaacagcgagtgcgtgtggcgctcagaacagcgtatgtatattgttcctactcgacggtgtgctgatctcctagtgtataccagacagatggcactcggtcgagcactctacgtgttagagaaggtagaatatactagacacaggccggtgataacaa

SEQ ID NO: 627353 - DNA, 256 bp, Homo sapiens
gggattacaggcatgaccccccatgccagacttcccattttactttttgcaagctgtttccctagcagctccctttaggggagaggtgaaatcttgcaagttgtagcaagagcccccaggaaacccctaactttcttataccccacccgccttttcccctttttgtcccgggatacctgggggcaaaagactttttggctattgtccatgctcccagaatcaagcataaatgccagacccggggattgagaagcca

SEQ ID NO: 627354 - DNA, 877 bp, Homo sapiens
agaacaccaaggcgagtaatgtagttatttccgctcctgtctccatctgacgacgagtgtagttccacggcgctcaatgttccctccccctccactgcttggcccttgggttgggcggcccccgggccaagttccgacaccatgccgcctactgcgcgacgaccccccaagccttccgggccgtaagccagccctcttgagttctgccgcccacaattcggtgggcaccccgatattgtggtccagcgcgcttcctcactcccctgtgaaagcggcgacaccctgggttttcaaagcccactacccggaacttttccctaaagggcaccaaggggagcagggtctgcgaaaaaacccacgcaaaggaccatgggcccactactttttgtcacgcggcgtagacctgcttccccgagaccgacgactacggtttctagcgtgggacttgcgttcttcagtagaaattctctctgtcggcggcggcgcagtaacgagaaaatcttttggtagccggcctgtatacgccccacccagggtgggcacagcatgaacaggcatccaccggctaagtttccgtgtagatcagatttccctgtgagaaggtgaccccggacgattataaggcacccttaatgcactcacacgcctattacgaagatcacctgacagaattagttacccagacttcattcttacacccacatccacagtcacacgttacagaatcttcctgaaaccgtattgttagtactttgaaagattacggcattagactaccacgtagagcactctcagggaggacgtccacaccttacttagagggaaaggagtttgtccccgggatttttactataatgtttatgatccggcaacatga

SEQ ID NO: 627355 - DNA, 489 bp, Homo sapiens
ccagaagcattaaacatattactagaacattaatgtaaaatgaacccctttactgcgtcaaaatgcctaatgcgaaacagccggcgacatttatataaagacttaaaataaggccaaaggaagagaagcatcaggaaaaactttcaatgaaaacagaaaatttttgccaatcttaaaaattacaattactcatatcattgtgcacaggatttttcttgcttccaaatgaaaagttagaagtgcttattttgtatctaacagctcttgaaacatcagtaggttgaggaaggtgctcattaaaaccgatttttttactcctgcagtttgaatactgagaatgtcgacagtttgttaacacaattgacagatgtaacaatacataggaacccttataaaatctagagtcatgagaagaaaaactctctaatattgaaaaaccttcactttgctttaaggaacaagtataaataacaattaacatttaatgag

SEQ ID NO: 627356 - DNA, 1031 bp, Homo sapiens
ggagaactagtctcgagtttttttgattttttatggggaatcgaatattttattaacatggtacgttgcctttgtaacatgtgcacacacactcgcacactcaaaatgatctgccggggggaaaaaatactaaaatagtgcctaggaggggaacagtgaaaaataaaaaaatctccgtgtaggtttccatctatggtaggcaattatgtccacatcacttacaagagctatggccaaatcgtgtccagaggaagcagagttgtgaatgtgagggcttagagaacgaggaaattctggggaaaaaattcaacaaggtggcatagcaagaagactctcgaatatgagaaaagcgtgactatagagtggtgggacttatggcgtggtgaaaatttcctctttgtggccaaaacaatattgcggcgaaagacagggtttaaattacaaagtggggccagacaaaaaactaaaggaagacagagagccgcggtgtgtgaaaagcactcagcggccctctccgatgacagtcactcaacactcctctacctccttacacaaaaataactgtgcgtcaccacggggatccaactcgaaacggaaaaaaacgtggccctataagccctactgttcatcacacggtgggaaaaaacccgaaggatgttacgaaagacaaaaccgtttcttccccccaaagtgagggacacagagggggctcgttttcaccccccgttcacagtccctcgattataagggggtgttgtagacagctgtaacccacaaagatcgtggaagcggggacaaaggctccctcatagaccacggggggtcttctctccaagagggggcaacaaaacattgtgataccccccgtcgaagagtgccacccccattataacaatgctcataacagaccacaacgactgctacatattacctctgaggcaaccctccgtgcaagagttttctacacccgcaaaacaacccggtggcgtgtctccgaggcggatctctctattaccgatttaatatctaca

SEQ ID NO: 627357 - DNA, 440 bp, Homo sapiens
  misc_feature (387)..(387): n is a, c, g, or t
aactatcatctgttgaacgaagccgccttcgaacagatgaaaaatggcgtgatgatcgtcaataccagtcgcggtgcattgattgattctcaggcagcaattgaagcgctgaaaaatcagaaaattggttcgttgggtatggacgtgtatgagaacgaacgcgatctattctttgaagataaatccaacgacgtgatccaggatgacgtattccgtcgccctgtctgcctgccacaacgtgcttgtttaccggggcaccaggcattcctgacagcagaagctcttgaccagtatttctcagactacgctgcaaaacttaaagcaatctgggaaaaaaggccgaaaaccttgccccgaaccgaacttggttttaaatccttggccggntccccttgcattccaaggggagctgatttcagattaatccccaatgacccttt

SEQ ID NO: 627358 - DNA, 104 bp, Homo sapiens
agtaacatatagtactatatagttctgagtgatgaaaaacagctttacaaaccccatatttcaaagatctctcaggctgcgcttacaacacacactgttcgcct

SEQ ID NO: 627359 - DNA, 1400 bp, Homo sapiens
acaatatttaaatatctaaaaatttaagagatccatactttctgtagctttacaattaactttaacgtactacacacacagaccaacggacatctcttcttacacgacacactttatacgcactttactgtgtaactttaacactgctaacgtccagaacgtactctgcaccttacggtactacccatctttactagccacactacactgacattcttaactgacactggctcttctatcacacgacttgtacaccctataactgacacggtaacactactactggctatctgatagtaattacttgccacacggcttaccgacacttacaccttggaatctctcgctacacactgtacttgagtgcaacacccttcgataactttaaaacacagctcgagaccacacacacacaacagccacacgattatatatcgacagcggtaactatttaaagaaccttctaacgtaacacctttcgcctaataattggacaccttacaacacaaccccttcggacataacagccctaatgaacatatcctttggttaacgattatacacgtgctccggggaccgggtttgcgcgacaggacccgcccttaaacgccgccctatcacacacttagcaacaattcacaaacggccaaatattacacaaactgcggtatacaccttacatcaatactacttaggatggaaaggattctcacagtttcaagtacgatccgcaccagggcaaccaacagtacgtcgcatgccatagaggcccacccgaaatatgctatattatggaagtaccgtcatactatcccattatccaaaccaacacgcgttgaatcactttattacacccaacagtttcaacccttgtccttcaacctttagagattacaaactcacaacaaccttacaactatcacattttccccccaacagacaaacaatttacaccacttaaacattaacaagcgacattaccttattgatacgccacgccaccggtattggcgagacagcatctgcaccaacacaacacgattcggaaggaaaccgatataaaaacttatgcaccacaacgaacaacatagttacacacaccagtcaactaggtcccgagcaagaagacgacttgatgccgctataaactcggaacatacaggagcaaaccccactagatatcctagctactatgggggagcccatatacctatcgacaatacagacttaaacgatttactatctgaacgaacaacgatctcgtataacaactattaacagatcaagaggaactcttacgaccgatgcagtcagtcaaatcgcattaaatccgcgtgaccaactatacgggcacaataacaactgcacacatacctttaatccttatagtgcacgctcca

SEQ ID NO: 627360 - DNA, 143 bp, Homo sapiens
tctatttaatgatattcacagacttgacattattactcatgtgaagaatcttgggcccaaatcactagctaaggaaaagtcagcttcggggactccttagggcaaacctgcctcccttctttcaaaggcatcccctgctcact

SEQ ID NO: 627361 - DNA, 395 bp, Homo sapiens
cgacagtatgccacaggtctgacccattcacccaggcggtacagggcgttggagaacagcaacgtatgacggtcatccagcgcttcgccctggggttgagcggcgtcgatcttgtcgcgcagcaggcgccagctttccagtggcgcggcttcggtggtgctttgcagccaggcgctggcatctttcagcagcggcgtgagctgatcgagaaactctggcgcacggtgctcaattggcgtacaccgcatcgtccaaagcgtcgatcacttggcagcaggtgaatcatgcgcccgcgcagttccttggtgttgcgtaccgtctgcgggcgtgcgccttcgtggggcagctggccgatcatcaaattcaagggtgttgaaggacattcggggctcaag

SEQ ID NO: 627362 - DNA, 257 bp, Homo sapiens
  misc_feature (218)..(218): n is a, c, g, or t
caggaaattcagaacagaactatgagaagtacaaattggttatagtatatgtatcaaatttctatatagattttatacctcagtggggaaaaataactgattccaatgacatgcatttagtattcatctgtgatagtcatggatgcttgtattgtccttggggtgctgaaattgaggaggaataaagaggctcttggaatatggttttaatttctctnctacaggttattttttggttatggtctggtgggactgtc

SEQ ID NO: 627363 - DNA, 107 bp, Homo sapiens
gcggccgcctactactactactgctcgaattcaagcttctaacgatgtacggggacatgccactgcactcctgcctgagcaacagagcaagaccctgccccaaaaaa

SEQ ID NO: 627364 - DNA, 109 bp, Homo sapiens
ctgttaaccatctatggcattccccatctcagtctatggctgttccatccttctatgctcaggacaaaatgcttagacttctcctattgctcctccgctctcacaagcc

SEQ ID NO: 627365 - DNA, 193 bp, Homo sapiens
tgactaccacaaagggaaagggcccctggtccaggtggacacgtgactcgggtgaactatcgatcattggagatgactagcactcctcttggaagtccctcatcttgattaccttatttaagggcacctcctcacagggcctaatcttttttttttttttttttttttttttttttttttttttttttttttt

SEQ ID NO: 627366 - DNA, 270 bp, Homo sapiens
catgtgctgtaagccagcgcccagtacctcacgcagacactagtgctcagtaaatgttgtccgtgattgggataaccttcgggaacatctgaagtgcacttctaggtcatcaggtgacatgattggcgccaacacatggtactcttgatttagcacatctcagctgaggcacctcattgatatttgtttaaaaacaaaaacaaaaaaccttggtgattctgctgtgaagtcctggccagaaacctccagaccgctggcctacagcacatg

SEQ ID NO: 627367 - DNA, 346 bp, Homo sapiens
  misc_feature (291)..(291): n is a, c, g, or t
tgtttttgttattgttgttttgtgatagtcttgctctgtcgcccaggctgcagtgcaatggcacaatctcagctcactgcaacctcgtgcctcctgggttcaagcaattctcctgtctcagcctcctgggtagctgggactacaggtgcatgccaccatgccttggctaacttttgtatttttagtagagacagggtttcaccacgttggtcaggctggtctcgaactcctaacctcaggtgatccacctgccttggcctcccaaagtgctgagattacaggcgtgacaancagcgcctgggccctgtttgtttttttaacatgatttttctctaagcttaaatac

SEQ ID NO: 627368 - DNA, 140 bp, Homo sapiens
  misc_feature (3)..(3): n is a, c, g, or t
  misc_feature (47)..(47): n is a, c, g, or t
  misc_feature (64)..(64): n is a, c, g, or t
  misc_feature (116)..(116): n is a, c, g, or t
tgnagaaacggacactttgaatggccagtttatggtgggctttatcncacacataaaagggttntcggggccactcaattctaatcatggctactgttctgtggaaattgtatcgntacaattccacaacataccacccg

SEQ ID NO: 627369 - DNA, 241 bp, Homo sapiens
aaagaatttattcacaaggtattttattgggcagatgccttaaatgtgccaaatgaattattttggtgtacagactactcaggtgacatctaaagagaaattgcccactatttcataaggtgactctctgtttagctcttttttgaaaggggaaaggaggatgtgagtatactctgtatcatctcacatttatataatagcagcacgagtattatagagtgtgtgtagagtagcgcataga

SEQ ID NO: 627370 - DNA, 400 bp, Homo sapiens
agttataagccacacctcccccccccccctccccagaccacaactcagtttccccaacactgcgtgagagttttgcttttactatgcaagaaaagatggtgggttgtgctttccacattttggggggagggcggagtgatgacgaccaccgatctaactactctagaccagcatgtaagaatatcacaaagctggacgacaccacccaccacacacacaaaatcctttctatattccccgaccctcgtgcaccgaaactacaatcaccaccctctcatacgcctcctttattgcccggcgggggcgctctccttcctcccactctccgaaaaactacaacatacccaacaagagctctcactccccgtcgccgcgatactccgccccaccctcccccacc

SEQ ID NO: 627371 - DNA, 81 bp, Homo sapiens
aaaaattttaaacccccccttgttaaagccccaaaaaagggggggggggggggctattaaaaccgcttttttcccgtttta

SEQ ID NO: 627372 - DNA, 846 bp, Homo sapiens
cagtacacattttttttgcgtgtgagttttctctccctttattgggcacccctttgcgtgtgaccttgtacgcgcgggttcctaggccacatcatattcttttgctggctcctctggtgtacggacaccgcggccctgtgtattggggaaaatccccgtgctggtccaccggacacgggggtctttccaaaggggccctgttttataacccagcccttgtcttgacacacaagctgttctcatgtcaaacaccatggggcccccccacactggaagtatagccgccaactattctgctagtagtcaggatgcccccggcccccatcgctgtgttgcacaaaagcatgtgatatagtgccccaaagcaacagagatctggtgttttgaagcagacaccccgtgcagtagtcgcgtccaaaatcaacagttggaacggattggggctatattcatgctttggggaaaaaccccccttttgccctcctgtggcattcgtcttcgttacgctctcttacataactcagaaatccgcactaagacgtcattgactcactccccggtcgttacacaataggcatcgccccacacagtaaatccgctgtaatgccctctgttatcaattggagggcattcacaaggttcattcctgaatccccgcgaaacaccaggacattattaaatacttcctcttgtataggactccgttacacaggtacgggccaatctgttcattaacgagagggacgaaatcatcttcatgcaccccaacaagaactcctagaaggtaggtcttgcccctcaacctcaacgggtttcttttgccttaaaaaaacattcgtcatgtca

SEQ ID NO: 627373 - DNA, 301 bp, Homo sapiens
  misc_feature (37)..(37): n is a, c, g, or t
  misc_feature (154)..(154): n is a, c, g, or t
atctaatactacactatcttaatcactataataatcnctcgtacgcacaacctcttccaactctttatcggatgagaaggcgtaggaatcatatcattcctgctaatcggatgatgacacggacgaacagacgccaacacagctgcactacaangcaatccatatacaacgcgcatcgagagacatttggaatttgtccgtaatccatagcatgattctttaaacccactcaaagcgcatgcagattttcacacaaatctttatactaacacaatgaatgcccaaacataccattaatcgg

SEQ ID NO: 627374 - DNA, 342 bp, Homo sapiens
  misc_feature (9)..(9): n is a, c, g, or t
  misc_feature (27)..(27): n is a, c, g, or t
ccacccccnggccaccaatattaccanatatggcccccctaccccgagggagggaaaagaggatggggtaggataagttcaaactgcctttaaagggctaacaaaattcacctttattccctttttatttttagttgacatgtaaaaattgtacatatttattggctacagagtgatattttgatacaagtataaagtgtgtaatgatcaaatcagagtaattagcacatcaatcacctcaaatagttatcacttatttgtactgggaacactcgaaatccttttctagctttgaaaaaatatacaataaattattgttaactgtattcaccacatagcact

SEQ ID NO: 627375 - DNA, 130 bp, Homo sapiens
ctattcaggtgtgtgctgcggctctgcctcttattcaaagaggggcagacacccagtagacatattgaggcagtcgcctaatctccactgatgggagagacggatggacgagttctccaaggctctcatg

SEQ ID NO: 627376 - DNA, 232 bp, Homo sapiens
aggatgtcaggtgcagggtactcccgtccacatctatccttctttatttatcgtataaaaagaggtctctatcccgctattgtggctctcgcaccggtttaacccgcccttttgactcctcttcactatatagtttgcgttttttcttttgattcgtactccattttctcaccgcaccttcttctcctcggtccatctttgcattgggttttcatcccccagccccgtcttc

SEQ ID NO: 627377 - DNA, 739 bp, Homo sapiens
catggtcccgtttccccgcgcacatttttcatgcccgcgtttgcccccctgacccaccgggccaaccccccagtaccgggcctgaccgtgcccgagctcaccccagcagatgtttgatgcccagaccatgatggctgcctgcgacccccgcccatggccgctacctgacggttgcccccgtgttcaggggccgcatgtccctgaaggaggtggatgagccaatgcttatgtcccaaaccaaaccgcagctattttttgagtggatcccccaccaatgtgaaaacggctgtctgtgacatcccaccctcgggggctataaaatgtccgcccccttcattggcaaccagcacggccatcccggagctgttcaagcgcatctctcgagccagttcacggcccatgttccggcgcaaggccttcctgcacatggtacacggggcgagggccatggaccgagatggagttcaccgaggccgagagccaaccatgaatgaccctggtgtccgagtacccacggcagtacccggatgcccaccaaccgaggaggagggcgagttcgaggaggaggctgaggaggaggtggcctagagccttcagtcactggggaaagccgggaagccgtgtgaactctttattcactccccgcctgtcctgtggcctgtccccctgtgtgcccttgctgttttcccgtccacatccctgctgtaccagaccaccccacccttaaagccttttcata

SEQ ID NO: 627378 - DNA, 100 bp, Homo sapiens
gggtatagttctcatccaaaccactaatttcttcccacccattgggggaggagggaaatccactccaactctgttttgttgtgctttagatccagcagtg

SEQ ID NO: 627379 - DNA, 174 bp, Homo sapiens
ctaatctttattatttcttccttctgctaacattgggtatagtttattctttttctagttcttaaggtgtaagatgaagttgctgatttgaggtctgtttcctctcttcttttcaatccttataccttatatctctttttttctcttattattcctttggttaggtctacctgg

SEQ ID NO: 627380 - DNA, 858 bp, Homo sapiens
gaaaaattaggaatatcttgaatttgaaagggacctaatgcctggcacagtggctcacgcatgtaatctcagaactctgggaggcagaggtgggcggatcgcctgaactcaggatttgagaccagcctgccaacatggtgaaaccctgtctctaagaaaaaataaaaaaatttagccagggtagatggcttgcactttgtgtgtccccggttacttcgggaggctgagggctcggagaatcgccttgaacctggaagcccagggtttgcggtaactggagatcaccccagttgtctgggttgacaatttgataaccctcgttgtttaataacacgggataacggagatgttcgcgtgaatctgggaatccctaaatctgtggtttacccttgaacttttcctatatgtgcccagcgttttggaacatattttgggccctctatcacctttacgtgtggtccatttgcgaacggtaagagtactccacttttagaatgtgttcttgccttaaaagagtgggctaattggcagtgcccagaatggaaccgttgacgagtccacaagcggtggttcgacctcatggggggggtagaccatcaaagttttttggacccccccttttctctccctattccaaggacgggtaaataagggccatcccctcaatagggaattattaattgccgtcccctttgtgtaatgcccgtaaaggttttccacttgggacaaacatactccccatttaacaacccatataaggcccgagaggaaatttttttggtcccccactctcggttccctccagaatacgtgtgagacgcggtaatctatgcactatgtttaacggcgctaagccgc

SEQ ID NO: 627381 - DNA, 166 bp, Homo sapiens
cacaaccagagcggtgtgccctaaccagccccatatgtcaaccatgaggacggtgccccaacaaagaaatgttgggacagcttctcccaagccggttggcatctagggctgttgagtggcaccaggtatttcccatgtctcaactccatgtcacccccagggagca

SEQ ID NO: 627382 - DNA, 102 bp, Homo sapiens
gctggacttatttcttcttattgcctttattcctgtgccatttcccccctttgttgctttttataacaaaggtgttaatagaaagcaataaagaaggaaaat

SEQ ID NO: 627383 - DNA, 361 bp, Homo sapiens
tttgagagaccattggatgcttactttgaggtgataggacccagcctgacttgccccctaccacttatgattcagagactaggaatcctgtatctgaagagttgcaggggtctagtagttctgatcctgacagagacagatctgcagaaaatggaaggggtgttgaccaagcctaggaatctggaagtgacattttagaagagcaaataacaggtgtctccagagagcaagaagttacatgtatcgatggaggcaagaccctccccaaacagccatcttcccagaagtctgagcctctgataccttctgcttatatggatgaggaacaaggggacacttgtacaatatgtctggaacagtg

SEQ ID NO: 627384 - DNA, 445 bp, Homo sapiens
  misc_feature (153)..(154): n is a, c, g, or t
  misc_feature (174)..(174): n is a, c, g, or t
gacaaatcctggtgacaaactggggcttcagtgcggacgaggtccctcagaggtcaatcgccacaaaggtgacttccgcgcccaggagaatgtgccttcctgctgccacaggggtcactgccaccaagaacgtagcagagagatgagagctcnngcctgcagccctaaagccanccccaagggccaccactgtcctgtcaaaaacaggggcatcagagacagagacagcagttgggccccacctcccagggagcctgtgtccccagctggtccccaccaccacaggccaagaatggcaagcacctcgggcggcccccatccacagctgcaggaactgatgtctgcacagaggtgtcttgcctcctgaactagaccagtcttcttgcatgtctcctgggggagacagggggttctactcaaataaaactgatgcctacacaaaaaa

SEQ ID NO: 627385 - DNA, 179 bp, Homo sapiens
  misc_feature (16)..(16): n is a, c, g, or t
ttacgtcagtggttantgaacctaactacatcatgaggatgtaggtttgatccctggcctcgctcagtgggttaaggatccggtgtgccatgagctgtggtgtaggtcccagatgtggctcggatccagcgtggctgtggctgtggcataggccagcagctgtggctccgatttgactc

SEQ ID NO: 627386 - DNA, 1101 bp, Homo sapiens
aaaatggtggtgttcgggtatgagggctgggactaagccaagggattcaggtgtggtgccggtgggaactgaggaagcgcccaaggaaatgaaacacgatttccaaaatgaacttaatctttcatgagaaactgaggatagagatgtcaataagcagccactgtttccacctccccacctgaagagctaggaggacaactatcaaactaccactaagccaagggattcaggtgtggtgcctgtgggatctgaggaagcgcccaaggttttcaagatggcagcatctatgcatggtcagcccagtccttctctagaagatgcaaaactcagaagaccaatggtcatagaaatctaggactaagccaagggattcaggtgtggtgccggtgggatctgaggaagcgcccaaggacacaaaatatatatcaaatggcgacatttggaacaacagctggtttctctggaatattctcaaacttcctgttcagacgctgcttcaaggttaaacatgatgctttgaagacatatgcatcattggctacacttccatttttgtctactgttgttactgacaagctttttgtaattgatgctttgtattcagataatataagcaaggaaaactgtgttttcagaagctcactgattggcatagtttgtggtgttttctatcccagttctttggcttttactaaaaatggacgcctggcaaccaagtatcataccgttccactgccaccaaaaggaagggttttaatccattggatgacgctttgtcaaacacaaatgaaattaattgcgattcctctagtctttcagattatgtttggaatattaaatggctataccattatgcaagtatttgaaagagacacttgagaaaactatacatgaagagtaaccaaaaaaatgaatggttgctaacttagcaaaatgaagtttctataaagaggactcaggcattgctgaaagagttaaaagtaactgtgaacaaataatttgttctgtgccttttgcctggtatatagcaaatactcaaaaagtattcaataattcaatcaataaatataagtttcatcttacacgtaagatacaaaaaaa

SEQ ID NO: 627387 - DNA, 157 bp, Homo sapiens
tgtggtgttctagaggatcccactgttgtcatacctgcactgttgttcatactgcactgttgttcataccatgcactgttgttcatacctggtcgctgtatcggggggatggagtgagagtgtggtgggtacacctggtggggggtatgaacaacag

SEQ ID NO: 627388 - DNA, 876 bp, Homo sapiens
gggcggggggacccgtgctgaggcggcggtggtcgacgtgggctgcgcgcgggcccgcggcgtcggcggcctggtgcgcgaatgtcgggcgctggtgggtgacgagcgcggtgcgtgatggcgatgggcgcttctacgtggggaaccttccgaccgacgtgcgcgagaaggacttggaggacctgttctaccgaagtgacggcccgcatcctgcgagatcggagctcaagaaccggcagcggcctcgtgcccttcgccttcgtgcgcttcgaggacccccgagattgcagaggatgctattgatggaagaaatggttatgattatggccagtgtcggcttcgtgtggagttccccaggacttatggaggtcaggaggtggagtgggcccgtggtgggaggaatgggctcctacaagaagatctgatttccgagttctgtgtgtctggacttactctccgttcaggcgagtggcaggactgaaaggatcacatgcgagaagctggggatgtctgttatgctgatggtgcagaaggatggagtgtggatggtcgaggtatctcagtaaaagaagacatggaatatgcctggtagagctggatgacacgaattctgctctcatgaggtggagcttctaaattcgaggtttatctgagaggaagcaccaagctattggtactcacggtctcggctggagcacagggcgtgatttcatacgaagcgggtttccgcctatttttccgtttggctactggaaggggggggaatttcttcagtgaccggtgtttggcgaacttttcggagggtttgttggaaagtattttgctagaaacaaatttttcgggcaacgacagaatacaaggggggaaagaatttcg

SEQ ID NO: 627389 - DNA, 210 bp, Homo sapiens
taatggaccctgcgctcccctcccattgtacacggctgtctgcccacccccattctcacaagacttcagccccctaccttagtacggcatctgcacagaatgaagaacctgggaatcagaccctgagaccctgagcaatcccaggtccagcgccagccctatcatgaccaaggagtatcacgaccttcagcgtctggacaatgaggggag

SEQ ID NO: 627390 - DNA, 836 bp, Homo sapiens
ggaaatacgaaaaggagaggtttgaagggagatgattcaacaaattaacagagacgggatgctagcctagccacatttgtcagcgggcgcttcgatgatggagacgcaacatcacttacttcgttcatacactagaccttgccatggcggttcggctgggtagcggcaggacccatggcaaagtggagctggtataggcgcatccgcctaacgagtggaggcggcggcatcgatccccgaggtcttcctctctcagcaggctgtcaccagccggagcacagtcctgggaccttggggctgtggtgtcgtgtgataccatggaggaatctcaattctctgggtactggatcgtaaggaatcaatcatgcatggtgtctgatcgcagaccagtctggttaagcacactcccacgcacgcatcgtatacaccattttgtaatgtgatgcacgtggaggcaaagtgaaagagtgatgcgataccgcacgtgagcgccgcacaacgcatacgccctttgctaccgcatggcctaccccgtacgtcgtcgaatccaggaaaccgtactatggccgccgcatcgaaatccgctcgtttgcgtgtcatggacgcgaaggtggcttggtcgtgcaacaatactcctcctgatagtcagcttgaaggggagtaccatggcaccaacgcagggactgcgaataacaagtcgccgccgcaaggcgtatcaggagacccatcttcactgtccactgaagggagccgtttgggcacggaatggccttttgggccggggtccatccgcgcagaggcacccggcttctggaaaaacccgatgtgcatcgaat

SEQ ID NO: 627391 - DNA, 415 bp, Homo sapiens
  misc_feature (60)..(60): n is a, c, g, or t
  misc_feature (92)..(92): n is a, c, g, or t
tggaagctggaacatgatacattacagtgaaagcaaatgtgtgataaaggatccactatnttccatggtagggggacctacacttacctcancataccttacaaagctgcgcatgaccacaatgaccttcgtgatgggggttatttgaaatttcagatggtaacaagcttggaattgtctttttctccagctatggactgtatcaaagtttatgggctataacgtggggttgggttctgtcaggcatcaggataactcatttgcatgactggtacaaaatttacttattcagtgaatcatgctcagctgctgtactgttcaatctgtaataataactgcagggtgactgactaacgataactaatctctcaactacaaaagcgtgtaaattagtagaataaatggttaggtgggc

SEQ ID NO: 627392 - DNA, 157 bp, Homo sapiens
tatatcgtccgtattttcgaatgatgagccgtcgtgcccccccttcccccttgtttgtcgcccaacttgagatgtatgaaggcttcgggtctccctgggagtgggtggaggccatgcagggcttacctgtacactgtactgcgacctacggcgatat

SEQ ID NO: 627393 - DNA, 175 bp, Homo sapiens
  misc_feature (171)..(171): n is a, c, g, or t
tctgaggtaataaatggattatcccgtatctgaaggccttttaggacaggctggttagagaactcctgcgtctcaagtgagttctcctggcgtcggtctcccaaattatacaggattatggacttgagacaccaagcctagactgactcatgtattctaccacggtgctantacg

SEQ ID NO: 627394 - DNA, 238 bp, Homo sapiens
atgctttttagtgtattctcttataaaaggtaatgaaataataatcccagattcaaactctaacttgaaactgactttacaaccgctttgataagtaactgattactagtacacagttcaaagactaggtcctaactgatcgctgacacatccatttgactattacctaggtgtcctcctatgtcaggatcctgttcctaccttgaaactgtgatcttgaacactggacaattgggtt

SEQ ID NO: 627395 - DNA, 822 bp, Homo sapiens
gaccagggctttgccactgcacgcttgaacttctccggacagaggaacatctgtaccctctcaacgatccagaagttgccacgggtgctagttgcgtcatccagtgacacctttatatgtacaattggatcctcaggatggaggagagtgtgtcttaatcaaaacccacagcttgcttggtcaggaacaacagacagagaatcacgaaaatgacctcagacttccttacctcagtcttatgcagcgaccgtagccagaccaagtgcaatcttcagcctccaggtgccaggctatatctgaggacggcggggcggcttggcagagaagtaattcctgaaccatgagttgtgcgacgggcaccagttgtgtctagatgatgacgaatgcagtttcctccctgtgagcatcaggaaccccgtaactgggcggctcagtctagtgttgcttagcaaaggaaaccttcgcttcataacgacgaggcagagtcccttttcccctgttgctaatctataacaaactaattctctggctcaagtattcgcacacgcagaacaaagaaaagcaacgaccaaacaccacacaccagctttgtgcgtcgccacgcgcccaccaggaagaacgattctagaacacattcgatggacgacggcccccccgaggaaagcgacagcatgggacacagggcgaccaagagacaccgcggcagagaccagcgccggatccaccaaataaacacggcgggacacggggtctaaacaccagggggcgagcaacgggcaacacgggcacggggaaacccgccgaggcacgcccgcaccagga

SEQ ID NO: 627396 - DNA, 454 bp, Homo sapiens
  misc_feature (176)..(176): n is a, c, g, or t
acagaggtgaggcagcaggatgcctcacccctgtagaccaagcacttttggagcctaggcaagtggatcgcctgaggttgtagaccgcagctaccacgcctagacagaaatattttttaaaaagagcaggattctctcgtgctcacatcaaccacagtatcattttgtgttatttncaagggccttatctgcatacctcccaaaactcacagatgcatgcctgaggcccagaaagtggctgctgcatagagcctgcttccgttggtgcaagagctgagccaggagctagcaacctggcaggtccttaagaggtggtgagcacacagccagcacccagcatctgaagtctttgaagtcaggcctggggccccagagcctaaagaagaaatgggcagaatttgccacagctttagttcatcaatgtcttccctgaattctagatttccaaatggat

SEQ ID NO: 627397 - DNA, 365 bp, Homo sapiens
tgggtaactctactccccatcatgcatctgaaaatggcgcactgaggcccgggatgtatgcactggaccgcacctaccccgtgcctctgtgccccacaaaccagttgatgagcctcgtttagctgccgtgccacatccatgatgttccacgactcctctctgctcagctaccagttagccaggctgatgcccaacttctgggctgccaacctgggcccccgtgaaatgtcacgatctgtcgactgcctaccaactgtgggtcatcctctgggccgtctgcatgctgtgcagggacatcgattgtagcctgcatcgtcccttgtctgctatccccagccgtcaagactccatactcctccgatccg

SEQ ID NO: 627398 - DNA, 725 bp, Homo sapiens
  misc_feature (167)..(167): n is a, c, g, or t
  misc_feature (290)..(290): n is a, c, g, or t
gaacgcattattgagtggtcctctaggccccccggctacccttagctccgctggatgttggggatttggagggtacctttccccagaaccgctatacatgtttggatttatcggctctcttagggattgtgccccggcgccagaatcggcccagggtggtcagcccnaccaattttaaaaaggaaacagaggctccctcccccatgtttccgggggtttggggcccttggttttaaaaggcttccgtcaattaggggtttttttggccagggccccccccctttgggaantgggagggagtcccctccccccccctttagggggggttcccaaggggcaaaaaaccagtttttggaattaaaaccccccggggaaaggggggcccccggaggcaggctttggaaccgcttggatttttttagggggggggggggggggcttttttcaccatgtaattggggaaccccccgggtttcctaggggggaacccaagggggtttttaaagacccaaacaaaccttttttttgaaaagggctggaaaaatatttgggccctgggtaaagtttaatggaaaacccggaaatttttaaaaaaaaaaaagggttttttttaagaaaggcccccttttggccggtttaactgggcctttttcctttttttgggtcttgtttgtttaggtatgaaaattttaaaaaaaatcaaaacggggccccgtttttcccta

SEQ ID NO: 627399 - DNA, 278 bp, Homo sapiens
aagctacaggaccatgtgccgcgcttaccttctgagctcctaggggtgaagtgacacgccgcccgccctcggccccgcagtccagaacgcgtgaggaggcccgaccctctgtcaacctccatgtcttaaattaaagggggagggatgcgttgcccttaaatagcaaggagccgagacacagaacctctctgagctctacctatttgagtgtagatatactctcctctacttctcactcgagagctctctcgtctcacagtgtaagtgactctacagag

SEQ ID NO: 627400 - DNA, 271 bp, Homo sapiens
ctggcgtcgcgtgtccccaacggcgacgcttgtggctggcctgcgtcatgtctgggttctgtggctgggctgtgccactgtgtgtggaccgtggaagtggccgggacccttgttgctgctgccctgcccctcgcagcggcagcctgccccatggttcagcgggctcttcatggcgttgtcgatgtggcccacttcgtgcctgcccatctcatcctgaatgtcaagcccaaccaactcgcagtgcagactgggtaaactgatgttcagactg

SEQ ID NO: 627401 - DNA, 349 bp, Homo sapiens
tggggtcagtcttttccctcatcccctccctggggagattggactagatgagtcctgagaggacccttcccacaagagacatttattttctgatttttcctgaaaatggtagtagtttacatttatacagtacagtttatgaagccctttcatacgcaggcatttcttgttacctacatttaagctgtttccgaaagagtggttcagaaccccacagtattgggcaatattcgataagcatattttccctgcccttgttataaaaatgagtggtgaaataatgtttggagacataatgaaagcgatttacctttggcaaaatataataaagcccttttgtaattggtga

SEQ ID NO: 627402 - DNA, 1811 bp, Homo sapiens
  misc_feature (1420)..(1420): n is a, c, g, or t
  misc_feature (1603)..(1603): n is a, c, g, or t
  misc_feature (1634)..(1634): n is a, c, g, or t
  misc_feature (1811)..(1811): n is a, c, g, or t
tcccaaaaaaacaaacctgtatatttttaaatttaaaaaatatttatgggagaacacctaaacgtaatctgggagatattggctatcctcacatcgggggttcttctgggcaatgtcggagaacgcaccacctctctccctggtacgctcgatggctacttcagcgttacacgcatctccaatattcttatacggtggagtattgagaaaacgcccctattgggttctgggtggtgtccacagagaactataccacgccgcgggtgtggtgtggcggaagaaattcgcctggcatgtggcaccaagtcttctccgcagaaacataaatggcctggccattatgggggagcaaccaccgtcgcggggtctttgcgcgggcaacgctctcgcgtgagcgagaaccagataagtgaaacacactctctttcgaagcagtggataaatatacctctcactataaccatgcgtttactccccctatttatcatagtaagtttaaccatatccctccaatgaaagagccacactaatagagggacacctctttatataacaaagtgtccaccacgtgtgcgcgataatgtttgtgcccaccccctagtagagtttgtgagaaaacatctcgtgaagaagcggcgtcatatgagagacgggagatattatttgcggcacgtttgatgatctccccagaaaatgccctgaaaaaaaaggccccaacgttcatctttcttagagggaaacggcccctctaataaaacgaagtatttgtcacgcgggagcagtaggagaaaaaacaccccaccaaggcgtgcccatcctgtgtcgtgcgaccaccatataaaacacgaagccaaccgcagcgacgacaccacgcgaaattgtgggggcgcccccattcacactatcacacaacaaacatcccggcgtgagaaaagagagcggggcatctagcgccgccataacaagccgggatacttccctagaggggcacccaccacagtgagactataacccgaggagaccacacacttggggtatgaagatatctccccccgcagagaataaaaacattctttgtgagacaacttcactacttccttcatttgtgacctcctccatacaaagattcatgccgcctccctcgagaagatcatctactctgtgggacggtgggcgagcctcaaccaagaaataatgtgttattgccgagcataacagccggcgcgatctaatttactgtctgtgagtgacccgcaagcgctctaaatgagcaccaatcgattgagtcgagtcccgcccaataattctctctggtgggtcctcccgagagggtatttccgaccgcatccgtgctgctgtgatgttatattaaactcccacggagcggaaagaactctcttgtgggagcacaagatatacngtccatcatcagtcataaggagagttcacaataatctcgcgaataagccgcccttttaggtaaacacatagcacacaggagaactttaagagctacaaggaatgaaagggaccgccagcgaatattactgaagaagcaccaagagcgcatctcgttacacgtgccgacgactcactctaactnagtagcagcagcagcggccgacttatgacanccacttctccaggtaaaagaaagagctgacgtcgccttttaacacgctgagtatctaagtccactggtgtgtctactgtcgcgcctccttgctacttttctgcgctcttgctcgcttcttgtctataatgggtaatagatacaagacgcagaattactagagtctcgcatgtggtgn

SEQ ID NO: 627403 - DNA, 766 bp, Homo sapiens
  misc_feature (278)..(278): n is a, c, g, or t
  misc_feature (416)..(416): n is a, c, g, or t
  misc_feature (436)..(436): n is a, c, g, or t
tcatttcagtccaggggcgggtctttattgtagttccactggtccgtcggtcgccaacatgtcaggtgggagtcatattacaaaaccgagggcgatggagaagcagaggaagaacaagaagagaaccttgaagcaagtggagactataaatattcaggaagagatagtttgatttttattggttgatgcctccaaggctatgtttgaatctcagagtgaagatgagctcgacaccttttgacatgagcatccagtgtatccaaagtgtgtacatcagntaagatcataagcagtgatcgagatctcttggctgtggtgttctatggtaccgagcaaagacaaaacattcagtgacattttcaaaacatctatttacgatcttacaggagtctgcgataatccaggtgcacaacacngaattctagcagcttgaccnagtctcaaaggggcagcagggacacaacaacgtttccaagacatgatgggcccacggatctgactactcactcagtgaagtagctgctgggtctgtggccaacctctttagtgatgtccaattcaagatgagtcataagaggatcatgctgtacaccaatgaagacaacccccatggcaatgacagtgccaaagccagccgggccaggaccaaagccggtgatctccgagatacaggcatctatccttgaccttgatgcacctgaagaaacctggagggcctagacctatcccgtcccccacatcacctcgcaaacaaaacagagaccca

SEQ ID NO: 627404 - DNA, 207 bp, Homo sapiens
cagtgcatactgctgccaaagcagagtaggtgaggtcacagcatcagtagctcccaggtagcatcttcctcatgtgtccatgtggcgcgtatcctcattcagccctgggagaggtgttggggtagtgtcacaatgtgctcggtctgattgggcgtgcacctgggacccttacatctggacccccaggtgtgatctggggcctacgtg

SEQ ID NO: 627405 - DNA, 363 bp, Homo sapiens
tcatttcagtccaggggcgggtctttattgtagttccactggtccgtcggtcgccaacatgtcaggtgggagtcatattacaaaaccgagggcgatggagaagcagaggaagaacaagaagagaaccttgaagcaagtggagactataaatattcaggaagagatagtttgatttttattggttgatgcctccaaggctatgtttgaatctcagactggtagcttcaaacatctcacagttaaggaggctgtctgaatggtttggtggccactgaggtgttgatgtggtttatgtcggagagattataggcaagcgggcatcattggctatatgtttgagaccaatctttacatctgattata

SEQ ID NO: 627406 - DNA, 174 bp, Homo sapiens
  misc_feature (14)..(14): n is a, c, g, or t
  misc_feature (21)..(21): n is a, c, g, or t
  misc_feature (48)..(48): n is a, c, g, or t
  misc_feature (92)..(92): n is a, c, g, or t
  misc_feature (126)..(126): n is a, c, g, or t
  misc_feature (145)..(145): n is a, c, g, or t
ctacgccacgacgnagtcgcnagacccaatccctctacatccctaacnccaggactcttgacttcaagtgacagccccaggtggccaggccnccaggaggccccaggcaggccctgtatcaggctnggacgctctgagctgtgcntgtacatatatacatatatagatacattt

SEQ ID NO: 627407 - DNA, 177 bp, Homo sapiens
gtcgaccaaaaaaagtccaggaccagataggttcacagctgaattctaccaaacattaaagaagaattggtaccaattccaaaagattgagaaagagggaatcctccctaaatcattctatgaagccagtatcactctgataccaaaaccaggaaagaacatttaaaaaaaaaagtc

SEQ ID NO: 627408 - DNA, 474 bp, Homo sapiens
accacatcagaaatgtagtttagtgtagttagagcatttctgtagttctgtgtttggagtagtgtgtttgtaacggaaacctggaaaatgcttgaatacttgtgaatcaattattgatctgcaaagaagcttttgattattttatttgcatattgtgtacttggttgtatatgagaatttttgctactacccctattggaactgaaagtcatggaggcgaatgttttatatggtaccaatgcaactttgtttttctttttgtcttgaaactgtttaaagtataagagtttaatgtctgtcaacacccaggttttccaacttttgatactttttcaacaatactttttcaacttttgatactttttcaactttgatactttttttttttatatcttccaaaacattttgtacgattttttgtaaggtattttgtacactgtccaaataaatcttttgtttaagaattgcaaaaaa

SEQ ID NO: 627409 - DNA, 846 bp, Homo sapiens
  misc_feature (5)..(5): n is a, c, g, or t
  misc_feature (27)..(27): n is a, c, g, or t
ctggncagcatcggtttttattctgtnatccaaagaaaataggaatatcagtagcagagaggaagaccataatgaaaatggccacatttcttcacaggggcagcaatcaatgcagggggcctgtaagactaaggctgtagttttcagtttgtctgaatactgtaataacctgagggttaatttgaaggaaaatatcttgatgtcccggcatcaccccagactcctagagaatttggaagtagaactccaatatcaggacttcagaaaactcctcaggtgattccaatgtgcagcaaaatggagaaccaacaatctaaagaaaaatccatccaccaaaggccagaggaaacagacagagtttctgaaagtccatcgggcagcaaaggcccagccacattgggaagtccacaaggaacagaggcctatgagatgcagacttctaagggctctttgggtgggcttgaggactgcacacagaagaccatggcttggtcttgagtgatacaggatgtgctccttttgttgttccccagaatgtggtgaagtcattcagccagtgcctcttctgtcctatggcacagggcaacctgaatgaacacaggttgggcctcttctgccactcttgaatacaacatgccagcaggtgtgtgcttggctgctcaacagcccagctcctggcacaccacggccacatccttcatgtcccagctgtcatcacacacggtacctcagtgaccttcctgtccacttccactcttcctttgcagtggtgaggaccattaatcaaacggactttggtcgggggctgtgtagcggtggtaggttaagagagtcgttgcagcataa

SEQ ID NO: 627410 - DNA, 551 bp, Homo sapiens
ggcatagagctgatgaggtgagccatggtgtctggaatgttaatggcaagcgcgagatgtgtggctgtacggccttcactggagactcagacgcatcatgcttctctctcttctcactgaacagggcagtgatcgtcatcttaatgtttgtgctcgggaacctgaatgtgcacacgcgcggcagctgcagcggcggcgccccgcgcctctgaaacacgccgtccacgaataccccgttcttgcccaagcagcgcaggtagaagtcgccgccggcgtcgggcctgggctgcgcgggcggcagctccggagcggccccgccatggccgccgccgcccgggggcgtgaagatctcgaggtggcgccgggagatgaagctcgagtggcccatgctcacgtccaccgagccctgcgacgagttgcggccgatggtcaccgagcgcttcttcatcagatactcgaactcgcggccctccaggcgcgccacggcccagccgcccggcggggacccgccgcccccggccccgacgcccccggccccgccgcccgcgggt

SEQ ID NO: 627411 - DNA, 305 bp, Homo sapiens
  misc_feature (12)..(12): n is a, c, g, or t
  misc_feature (102)..(102): n is a, c, g, or t
tgaaaccctgtntctactaaaaatacaaaacttagccgggagtggtggcgggtgcctgtaatcccagctactcgggaggctgaggcagtagaatcgcttgancccaggaggcggaggttgcagtgagccgagattatgccattgcactccagcctgggcaacagagtgagactccgtctcaaaaataataataataataattattattattatattgggggagagagttagaaaattacctatcaggtaccaatgtttacttattttggggtaatggctattacttggaagcccactcccagtac

SEQ ID NO: 627412 - DNA, 686 bp, Homo sapiens
  misc_feature (5)..(5): n is a, c, g, or t
  misc_feature (27)..(27): n is a, c, g, or t
ctggncagcatcggtttttattctgtnatccaaagaaaataggaatatcagtagcagagaggaagaccataatgaaaatggccacatttcttcacaggggcagcaatcaatgcagggggcctgtaagactaaggctgtagttttcagtttgtctgaatactgtaataacctgagggttaatttgaaggaaaatatcttgatgtcccggcatcaccccagactcctagagaatttggaagtagaactccaatatcaggacttcagaaaactcctcaggtgattccaatgtgcagcaaaatggagaaccaacaatctaaagaaaaatccatccaccaaaggccagaggaaacagacagagtttctgaaagtccatcgggcagcaaaggcccagccacattgggaagtccacaaggaacagaggcctatgagatgcagacttctaagggctctttgggtgggcttgaggactgcacacagaagaccatggcttggtcttgagtgatacaggatgtgctccttttgttgttccccagaatgtggtgaagtcctgagaagttgtcagaaggaaaggacatgaggtatggatcgagcaataaagatattattcaatccttgctaccctccgagagagccaaaaatttgtggaaaagaaagggaacaaatacttagtaagggaatgtgtttac

SEQ ID NO: 627413 - DNA, 369 bp, Homo sapiens
cagtccgatagaagtcacagagcatccatcctccgctggaaaacggtccagcccctccgtccgtgtccatgtcacagagcacggtcaggggcaggcagtcgggcaggtagatggtgttgcagccgctcaggaaatacccccggtctagcatgtccttgcagatgcgtgtgcctttgcctcctgtgcacgcggccttctagggtagataatagtagagcccacgttgtcatggaagggattcaggtgatatctggccattactcgagtgattgacggggggatgataggtgcagacagggttcttgtcttaagattccgtaacgtgaacgtgttgcagctgccccaggggtgggggccacgcttgggtac

SEQ ID NO: 627414 - DNA, 153 bp, Homo sapiens
acacctgttaatcgccagcacgttgggagggtgaggtggaagggccattatgaagcgaggagtttgagattagcgctgggcaggtagacccggtgtctacaaaaaagtttaaaaattagggggctgtggcggcacgtgcctatagtcccagta

SEQ ID NO: 627415 - DNA, 471 bp, Homo sapiens
  misc_feature (417)..(417): n is a, c, g, or t
  misc_feature (454)..(454): n is a, c, g, or t
gacgcggagaacccactgcatgctgcctgctctaccccagacgctgattgcattcctttgtgccctgttcctgcttttccttctgtctggagagttcttttttttccctttgaaatgcaaggccttgttcaaaaatatcttcctccatgaagttttcttttgttctattttgattttttaaaaatctttttggtcaaaagtaatcagccttgtattgttccttgtagttcttcgtttctgcctttataactgtctgcttgatgtaataattatccatttgcagcccatctttctactctagattccttggtttaaaaaattatatatttgtaggtactaacctacatggcttaaaaaaaaattttagtgagaataatagttatgtgattttttaaatgcaaaggtataaaataaagnctgtttcccttccctctccttagtccttccccacagngaccaccattaatagta

SEQ ID NO: 627416 - DNA, 1271 bp, Homo sapiens
ggtcgtgtgctgaagacatgtaatcaatgaaccgcatttcggtgaaggtgcatgcactgggcatgcacacggctggtcacatctgcccatctgctgctgccctggaggatgggtgtgcactctgaccatattcctcacgatgcagtgacatgctcttgattttgggtgtgaaaacagggtgctaaagccaaccagccttatgggtcctggagcaggtgggagctgaaaaggatcgaggcatggggcctgtcctttccatcatgaccacaatccccagagcccagctcattgcatctcttgtgacgtgcactgtgaatcctggcaagacaagcttgagtctcaaggtgtggcacggtcactgtcactgccgacatccctacccccagcagaatggaggcaggggacaagggcggcagtggctacgtggggtgaccagctggtgccaaatagacccagactggagcccagtgcagtgtctgccataggcccagagtgaacctgtccttacacacatctgggtgcccatgaacgggaccttcccacatcaccacactcctctaaagacaaagtagattcttaccaggcaccattaccattcggaacaaaaacacgcactacacatttcttcttgagttcattgcaagcactttccaaaagcaccatgcgctcatggtgtagccgccatgactacgacgacatagcagactagaccaccagggcgcacctgacgcaccacggtggcactagcacacgggccctggtccacatcctgtgtccctggaacttgacctccatcgacacactgaacgcaacatgccctacatataactctaccggcgtcattcacatctacctccttgtccaggagcgcggccaacacaacgaaaaggaaccagaaccaacacacaacaacggacgccccgtgaacaccaacgagacaccaaacaccgaaacaatgacaacaacacgaccacaagaagtgcacacggacatgagacgacccaagactcgcggtgacctgacacaatgagaaaggaaaaccagggtacacgtgaaaccgcacgagagaactactacccagaaactagtaaacgattcaccagccgaggataaaacgagacgaaacacacacacccctcgtaacaagcgagaaggacggaaagaccaatagacaaacccaacaagcccagaacgaagagacgacacacacgaccagaaaaccagcacagagaacgcgaaacaacacaacccgacagaacagagaactcgta

SEQ ID NO: 627417 - DNA, 225 bp, Homo sapiens
tatcattagatttacacagaaaccctgcaggtcagggatagagtgaaaaaaaaaaaaaaaaaaaaggcaaacaaaattttcttgctccaaagaaagaaaaaaaaacccccgggaacccattaaggttgcccctcagaaattagagggaaaaatagggctttccccagaacaattaaaacctgaggaaagttccacatagaacttggctttataagaaatgtgcca

SEQ ID NO: 627418 - DNA, 685 bp, Homo sapiens
taaccagtgctctgcttatatcgggggataaaagcattttctttatcatatcccgatcttcccatttcttcatagaaatgtgataagaaggtacatccctgtgatcctgctgcttcagataaacctcacagcgcaccctacgccgagttagccactgaccatctggtataggacgactatttgccgggacctatatctatcagttacttcccatcctgtccttgattaggcaaatatgttaagaagctgctcccatactaatattcacttagctcttgtcttactaatttgcgtccaacccctgctattactgctcatgctgcttaaagcaggcagggtactaggagaaacaaggcatttctaggcaggcctgtgtgcagctagaaaaccgacttttacacgccttataaaagcagtcacggagatagatccgtaggtttcgatccttcacatctaataccaggcgctacatgggaaccaaggtttaacagggtcctggtcatgctaataaacttgaccaacttagtgacaatttaaaattactgctttttttcctgcctttaatctagataagcttcctcaatatcctacttgtggtatactaggaaccatgcttactctgatctttctctttacaaacacacagggcagagtcattcactattgcactgtgtgttcacgacta

SEQ ID NO: 627419 - DNA, 984 bp, Homo sapiens
  misc_feature (130)..(130): n is a, c, g, or t
  misc_feature (275)..(275): n is a, c, g, or t
  misc_feature (289)..(289): n is a, c, g, or t
  misc_feature (475)..(475): n is a, c, g, or t
  misc_feature (506)..(506): n is a, c, g, or t
  misc_feature (553)..(553): n is a, c, g, or t
  misc_feature (579)..(579): n is a, c, g, or t
  misc_feature (657)..(657): n is a, c, g, or t
  misc_feature (676)..(676): n is a, c, g, or t
  misc_feature (680)..(680): n is a, c, g, or t
  misc_feature (748)..(748): n is a, c, g, or t
  misc_feature (864)..(864): n is a, c, g, or t
agcgggcttgcgctgagcagcccgcgagggcgtgaagtgggagctgcgacctgctgctccctgtgaggtgggtcaagcggacgaaatggcgccctccgggagtcttgcagttcccctgagcagatcatgntgccgcttgctgttggggatgcgtccctggaacgcacggggcggcggagcaaacgattcgcgtacactcacggacgacgaactgggagagaatctgcatgggaaggacgactggaatgattagatatatttatgcacccgttggntgccactgcgttgntcgaaagatcgttcgaaccaggaaagtgtggagaaggtgtgttgcgtgacaatgggggacgaaagagttcttgacggtctaaatagtatgcagagaaggtagactgtacagcaggatgcagtccatgggatcgtgacgatgggtacgggtgtatactctatataacttgcatactttcccatagcntactgtgtagtcgaattcgataagatgcatntgtgtggagattttgaggagctgccttaatcacgcggttcccgacangtgtacgtaataggaatagtgcactntcgaataatacagcttctgtacgtaccatggtcgagtacacaccgaacgtcgcgacaccgaacgtcatcgtggatgcnaccagatatatctagatcnactngggattatgggtcaacagagggtatctgagatatactggaattggagactaggtgatagcttctgagnacagcctcccttatcaagacataattcgtgatgctgaggagtccatgcgaacgatggacacactacatcagtacgtattactctggaacgcacgctgtagcgagtatagcaccagnatgtatggcgtgcactctatgtactacatagcgtgtttgagacatctatagacaaatcgtactgttatgatctcccgtggacctcgtatgactctagggaaccatcatgggtatcgaggc

SEQ ID NO: 627420 - DNA, 500 bp, Homo sapiens
ttaaagatgaattagaaaaatcttatgtaattagacaaaaaccaaaaaaacaaaaacttattttagaaagacttggataatgattgattataaaaaaatgattgaccatactttattaaaaccagaagctacatctaaagatattttaaaacttatttcacaagctaaagaacatggatttagaggagtttgcattaactcttcttgagttaaattagcaaaagaaaaacttgcaaatacagatttagatatcgtttcagtagttggctttccattaggtgcatcaaacacacaaaccaaggtttttgaagcaaaattagcagttgaacatggagctactgaaatagatatggttataaatgtgggtaaattcaaagaaaaagtttatgactacatcttaaatgaaatccaacaagttaaaaaagcaattggaaataaaatattaaaagtaattatagaaacagcgcttttaactaaagatgaaataaaaaaagcagctg

SEQ ID NO: 627421 - DNA, 554 bp, Homo sapiens
  misc_feature (144)..(145): n is a, c, g, or t
  misc_feature (147)..(147): n is a, c, g, or t
  misc_feature (181)..(181): n is a, c, g, or t
  misc_feature (191)..(191): n is a, c, g, or t
  misc_feature (201)..(201): n is a, c, g, or t
  misc_feature (206)..(206): n is a, c, g, or t
  misc_feature (240)..(240): n is a, c, g, or t
gttcttcctgccagcctctccgcttgtaaaccgaagccgtgcctggagccccaagatacacccctcttctaacacccctttttgcgctgtcattccactgagaacgttttcattgggagatctcccctacatgcagaacagggnncngaacatggctcttatgctgacgtcggtgaaaacnattcccttcnctccaggccnggatntggggcgttatcaggtgtcctggagcctggaccncaaaagggcccccccaggccccttttaggtttaattttttgacgaggagtcctacagcctccccaggaagggtcaaaggaataaagagggcatttccctcattccccctcttttttcagtcagggtggaccatcggggcccttggaacgggccctgggtgtccccttaggtgctggcttcggcgatcggccttttgatttactacttggccttcagtgcgaaaaaccccatccaggcctgaggggggccccccagccctgcccttgcttccttcaataaacatcccagggcctggggctgcccagggcctggga

SEQ ID NO: 627422 - DNA, 836 bp, Homo sapiens
ggctggcagtgcgtaggccgctcgatgcctggagttactgtgaaagacgtgaaccagcaggcagtttcgtctacgagactctggccatgccttcctcaagaaagtcctggtgaaggctgtaataggtcaccctcatatggcgatgtgataccagtcaaagcttgtgcgcacacgactagcaaacgagtcttgcttcccgtaccgatgagacactggtttctacgatcgcgtaggctgcgtatccacagtcgcagggcaccatgtaccatccaggtggctgcgcgcatgagtggcttggcatcctaatgaccaacgatcgtatgtgggcgacagtcagtagaaagcgggccgtcagtggcccagccacttcagcactgatggacttccaaggagtagtggcccgaccgtggtcctccaaagcccttggaggcgtgctgacaccatggtggaccatggaccaagatggccggccgcagaatctgaccagccttcaaggggacataaggagatcgtggacacgaatcgccgtgatcaggtggcaagctgcacaactagaggaaggcagttagaagcaagaccatgctggggttaataaacttgcctcatttcgtagatcctgataaagataaggccagttacagtgggtacgacaagagaagtagcacaacaacaagaagtccacagagaagaatcaagagaagaggcgaggaagaggacgcatagagcaaaagagatagctggacgggtgggtacaccaagataagccatagagagagcagtgacccgtgcagaggtgcttagatgtggtacagaggcaggcgacgaaacttagcggg

SEQ ID NO: 627423 - DNA, 468 bp, Homo sapiens
  misc_feature (50)..(50): n is a, c, g, or t
  misc_feature (91)..(91): n is a, c, g, or t
  misc_feature (149)..(149): n is a, c, g, or t
  misc_feature (157)..(157): n is a, c, g, or t
  misc_feature (176)..(176): n is a, c, g, or t
  misc_feature (189)..(189): n is a, c, g, or t
  misc_feature (314)..(314): n is a, c, g, or t
  misc_feature (355)..(355): n is a, c, g, or t
  misc_feature (368)..(368): n is a, c, g, or t
  misc_feature (412)..(412): n is a, c, g, or t
  misc_feature (435)..(435): n is a, c, g, or t
  misc_feature (462)..(463): n is a, c, g, or t
aaaaaccttaatttggaattaaccccatttggactcttacctccaaaacnataacaaatgtccgttatttgtaactgctgggtttgtggtnatttgttacaacccactttaggaacactgacccggaagaaggtgaggatagagaagcnagagtcanacagagttctgggagcggnagaagaggagggncgagctgtataccagacagtaagaggggagagtgtttgggggctggtcagctgcataagaaggcagagggacaaggccactgagttgggtgcgcagaaccaagtggcagcttgacaggagctgtncctctgaagaaagaagacccccggctgctgtggactgaagnttttgctcgtttnctcacctagatgcccctttctgctgctacatcccaggacccagnagcactcggtcacacctacgatnacacccgactctgactcttcaccctcnnaccac

SEQ ID NO: 627424 - DNA, 443 bp, Homo sapiens
caggaaagggtttgtggttcagttctgatgtgtgacccatccataggagaatggacacctcagactctctcaatcctggccagtggcaggtcccagtagctgccttccctggctgtccttgaggctcactggaggatacttctttttcattctggcaaattttaaaaaattcttctatagatctcagtgagttcaaagctgcctgtgtgcaggcatagatccgttctttgctgagcttccactctagttggctgaaaggaaagggtaatatagctggaaaaggtatcctggggtgattagaggattctacatttcatcttagaaagggatattgacaggagaccagaacttccagatcctcttgaatttcaagaactacttccaagcctggacaatatcgggaggcctcatctctacaaaataaaaattaagaaattcaaaaa

SEQ ID NO: 627425 - DNA, 485 bp, Homo sapiens
agttcgacggaggactctctatagttaggtagaatgaaataattcagccttgggacgacgggacaaaaaccagatgaaagcaatggggatttcgagatggcaaagggtacagagaagtcacaagagcaagggagaaaagctgtgcactttttttgtttcctgaagtagagtagtgcaactggtctgatgaataatcaggacttacaaagtgtagttataaagcaactgtatttcccactgttcctttaaacttggtaggtatggttgttctggcaggttgactgaaaattcaaactttctttttttttttttcccaggttatgtttggaagatacggtctcacgtgtgtaatgagaatgaccatttccagtgttaaggggcaaagattccaacctggtcaaatttacaactactcttaagtcctctagctggggaaggaaatagggatagcggcttggtattcttctcctattccttcttcagtc

SEQ ID NO: 627426 - DNA, 306 bp, Homo sapiens
  misc_feature (169)..(169): n is a, c, g, or t
gagtgactagcaggatcttatcagtgggaagagcgctgttcaaggaccatctgagcgtgactctgtggctgctacagcgtgtcagtgtcctgctgggctgtgcgagcatggaaccatgggaagacttcacttgcactggtgcctaccccgagtccaagaccccgctaancgccaccctctcaaaatccggaaacacattccggcccgaggtccaccttcttggcggcgccgtcgggaggaagctggccctgaactagctggtgacgctgacgtgccttgccacgcggcttcagccccaaggacgtg

SEQ ID NO: 627427 - DNA, 218 bp, Homo sapiens
cctaagttgcaattctggttttccacaagatataagacatgttacaaacagttaattgtctttgtttctcatctggtaacatccacccactgcacatatttcttaccttaaagagtttaaaaggcaatcgtataatccaactctgccaacactttcgggaccccttccacactctggaagctttgtactcttgttctgctcgataaaacctactgctc

SEQ ID NO: 627428 - DNA, 242 bp, Homo sapiens
gggagagcttgaaggaaattaattcagtcttaattatctcaaggtttgaagtccctgttagacaattaggcagagctagtcttgcaactgcattatgcgtaaactggtgtataacatggactcatctccactatttagctcagcaaaatttgtcccatgcttaatgctttgatgtacaacagtaagcgaagcacatcgtatggatttcatatcccgtcatggatggccattcaacgcctccg

SEQ ID NO: 627429 - DNA, 268 bp, Homo sapiens
gtgggaattcttcagtctaaaactgctctccggctgcgcgctgctggctcacacctgtaacccccgcacttcgcaggctgcgcccggacgattacttgacccccagagttcaagaccagcctcggcaatctactggaccccgtctctacacaaaattaaaccacttagccaggtgcggtcgcctgagcctgtcgtcccagctacttgggaggctcgaggcgacaggtcacttgacccctcgcaggcgtccagcctgcagtcagccgac

SEQ ID NO: 627430 - DNA, 586 bp, Homo sapiens
tcccctgacaccaagaaaacattcaaacagcatagtttttaactgtattttgaaaggtttccttagttccctttgacccttcctcttttgcatatcagttcctggccataaaaataaaaaatgctaggacagaattgcgcatctgagctgatttgccctcaaaaagtttcacagtggaacaaaccgcagggaggagttttctgtggctcagttaaatgtcgggggagggtggtgtgaaagccaaatgggattcctgctttcctgtttaaatcttgtttttcattgttatttgcaccagcaatactctgtggaataatcatgaaaatgtgtagatgggcagctaattttggaaaaatgaaaagaatcagaaatgaactaagagtgctcggaagtttttatgttctctcaacctgtttggtcaaattgttacgaaaacctataaggtctctttgactagatacaaagactttgcacattgccttagctttctcttgaagcatttccttttttaaaataccgtgtaattcacagtgatatgatagatttgccaaaggtaaatctaccagtctgaagattaagggcttgt

SEQ ID NO: 627431 - DNA, 394 bp, Homo sapiens
cccctccatggtagtcctgtggaaactctctaaccatagctagatagcattctctatgtagttctcacatgcaccaatgaaggagcacagagttgaaaaaagatatgcactcacccatgctcactgggctcattttatatgccctttaccctcaagtgggccctcagtgctgtatagccaatttgattcattttcataattggttcactcacccactttcagagtggtgattcttcactctaagttaatgactatagattattattctgctgaaatctacgaatcagttgagagagacacattcatatgggtctaccccaaacctattatgccatcctcatctgagctcacatactccattttccctcatgctctgtgtatatatcctctgtgt

SEQ ID NO: 627432 - DNA, 892 bp, Homo sapiens
catcaccatgtacagatacaatacatggcgtgcatctgtaggccccgctactcaggagggtgagacaggagaattgcttcaactcgggaggcagaggctacagtgagccaagatcacgccactgcactccagactgggcaagagacagcgagactccatctcaaaaaaaaaaaaaaacaaaagcgttttttttttccttttttgaacccctttgtgttcccctcttaaaaaccttgttgtgttgcaccttgttctatagtttatctaccttctgacattcagtgggcggggaaataatcccataatttttcttcaccacataccacatattgttgaacctattacaaaccaacacctgatttttcgtgccacgaacttctgttgcgaacccagaaagtaattaccccacaggcaggcaactgctcttctgcaccactatcttcccacctgggtgcccctgttaccccatttttcccaggcgccacaaattcacaattaccttggccacctttatgtgcccattctttaaggcctctcatctgctcaacgctattaaacaactttacaacatattgacccgtggaagattcccaaccccctcaacataaatcggcgggacgcaacaactttcttcgccaatccttaaccccaattctttggaacaaaggcggccataatactcccaacaattctctcaccaaagaaatcctacaacccaacttcttcccccgcacgaaacacttcccaacacacccacccttcaacacactctgggccacccggcattgtgcacccagcacccttctttcaaccgaacagcacctttttctcccgcttacccagcacaccttgacaaaattgtgcccatccaccttaatccctccaaccacgc

SEQ ID NO: 627433 - DNA, 267 bp, Homo sapiens
aacagatgcgggagtcataacagacacaggtagtaagtagctataccaagggatacataaatgaagaatggcactaaaagttacttgagatacttaatactctctgccttcagcaatcaattccattcatacatcagcactctgctggttctgcttgaaatatgttctgtatgtaaaactcaaatctagttggatctcggcggggcttgtgaccaatgaagtcatattagttgatggttgaccaagcttgctccactccatcagaga

SEQ ID NO: 627434 - DNA, 554 bp, Homo sapiens
  misc_feature (8)..(8): n is a, c, g, or t
  misc_feature (29)..(29): n is a, c, g, or t
  misc_feature (97)..(97): n is a, c, g, or t
  misc_feature (112)..(112): n is a, c, g, or t
  misc_feature (117)..(117): n is a, c, g, or t
  misc_feature (170)..(170): n is a, c, g, or t
  misc_feature (193)..(193): n is a, c, g, or t
  misc_feature (228)..(228): n is a, c, g, or t
  misc_feature (246)..(246): n is a, c, g, or t
ggacggcntggcctaaggctcctccaacngcaccatcaaggcccgggagcctgccagaactgatcccttggtgtgggaggactgggtaccacctacncccaacaagtcatgngggantctaattggtaggattttgacggttttgcaacataggtctattattagagtcnccatgacaaaaataggggttacnagatatgcccaagtcagcatttgtcctgggtcccntgtgtgatctgtttgganatgtttccttttcttctcccacttgctcagcagcttgggcttccattctagttcttttaccagatttttgtgtgacctgttgacttcatttggattgccctctttcaatttccttgtgaaaaacccttaactttctctttacccttagctgaaatgtttacatagcttctggtgatatcttttcatgattttatatctcttaaaatggtgatggatgtgacacctcataaaagtgagctttgaactgtagataactcttaaagaaaatgtcattttagacaattaaaatatttgtgctcaactgcttg

SEQ ID NO: 627435 - DNA, 180 bp, Homo sapiens
cgcgtcgaccgagcctcatactgtcctcttacgttcgatagcaggtgtatcctgctttctttcaaatacgctttcattcccttgccagtcgatacaccgccagcgccgtcaattctaacgtcttgctcggtctgcgcatattgctgttgtgggaaaacggtcatgcgactgctggtgatg

SEQ ID NO: 627436 - DNA, 317 bp, Homo sapiens
ccggaccaataacccaaataagatcacctccccacgcaaccccctgtccaacagaactgtctgtgcctggctggccaagggtgcaggggcagtgctctggctgggtgccctggtaaaggcagggcaccctccccttcccgtggatgcagtgattggtaactaggcagggtgggcagaccaggccaggctctcaaggtgtgttgccaaacccataggtggagtctaggctcggtcctagagagagagcaaggggagatgtagagagatgtaggaagagaaactgggccttgcagaatctatctctgagaggttggaag

SEQ ID NO: 627437 - DNA, 125 bp, Homo sapiens
  misc_feature (21)..(21): n is a, c, g, or t
ttattgacacccccgagtatncatatgtgaccggcgtcgcgagcgtggatctccctcttcaggccataatgaagggcctgatcctgaagacatggcatcgcctgctggaggcccagaatcgccac

SEQ ID NO: 627438 - DNA, 192 bp, Homo sapiens
  misc_feature (158)..(158): n is a, c, g, or t
tcagaaccaccggccagcggacccaatgcctggaggtcatcaaaggtgtgctgttcaggatcttcatcatcagggccatcgctagttggttccgccgagggcgcccctcaggacaggcgtgcccgggaggagcccacgcgtcgcagccgcaacctgtnccccaaagacattataatgaacctgcatgtgtac

SEQ ID NO: 627439 - DNA, 155 bp, Homo sapiens
tggtgctgtgatctctctgtgtggaatgccttggtgagagagatgcttattatgactattatcatttctgaccaagctttctattaagttttatttctaattaatacactattcttgatggtacctcctccagaaaaattttctctgctcaggtg

SEQ ID NO: 627440 - DNA, 498 bp, Homo sapiens
cttttaaaaagtgtcgtgtacctatcacttgcgcataaatgtgatgcagggacttcatgtaaatttatataagttattagtagatactggatattagacctttctcagatggacagatagcaaaatttttctcattctgtaggtagtcttatcactctgatgatagtttcttttgctgtgcagaagctctttagtttaattagatcccatttgtcaatttaggcctttgttgccattgcttttggtgtattagccatgaaatctttgcccatgcctatgtcttgaatggcattgccaagattttttcctagggtttatatggttttaggtcttatgtttaagtctttaatccatcttgagttaatttttatatacggtgtaaggaaggggtccagtttcagttttctgcacatggctagccaagttttcctaacataatttattacatagaaatacctttcaccataacttgttttcgtcaggtttgtcacagatcag

SEQ ID NO: 627441 - DNA, 353 bp, Homo sapiens
gctgactgatcaaggtaaggttcttggttctaagagatgaaatggccgtggcaatttcctaaaatactcacagtaaaacttttcaaaactggagtcaatcctctcatatatcctgctgctttatcaactaagttcaggtaatatttacaatatttaaaatcctttgttgtcatttcaacaatgtcatttcacaacgtcgttgccaggattagattccatcttgagaaaccacttcttttgctcatccataagaagcgactcctcatctgatcaagtattgtcttgatgcagcagttcggtcacatcttcaggctccacttctaattctagtttccttgctgtttccaccacag

SEQ ID NO: 627442 - DNA, 114 bp, Homo sapiens
ctgcagaacaatagataaaaatctaaaaggttctatatccttctggattttaaagaaacccaaaaattactggctcaagatactacattgctaaagttagggggcagatgaggt

SEQ ID NO: 627443 - DNA, 142 bp, Homo sapiens
ttttggggcccccttgggttttttttttggggggggggggtttttggtttttggtttttaaaaccgggcctttttttggggaccccctggccccaaattttgttccggattttttggccccctttaaaaggttttttgggga

SEQ ID NO: 627444 - DNA, 222 bp, Homo sapiens
tgcaactaagcaaaaactagagaaagctagaaaaccaggtacttggccatagcggaagcagtctgagggcctcaccaatggagtactgacctgcttgctggaggagcacgcaaagctgcatggcttgcagtaagatggtcccagtggacaatgaaggaatgacgtaagggcctccgttcctccccgtgcctagcagctaggctataccacctaggcactgtg

SEQ ID NO: 627445 - DNA, 783 bp, Homo sapiens
ggagccggcgtgtggggctggacgcaggtgcaacctgacatgggtgaaccccaggatccatgcggattctagtgacagggggctctgggctggtaggcaaagccatccagaaggtgtgtagcagatggagctggacttcctggagaggactgggtgttgtctcctctaaagacgccgatctcacggatacagcacagacccggccctgttgtgagaaggtccaacccacacagcgtcatccatcttgctgcaaatggtgggggggcctgttccggaatatcaaatacaatttggacttctggaggaacaaaatgtgcacattgaacgacaaggtcctgcacttccgtgcctttgaggtgggcagcccgcaaaggggtggtgtcctgcctgtgtccacctgtatcttccgttgacaaaggacgaactacccgatagatgagaccatgatccacaaatggggctccccacaacagcaatttgggtactcgtatgccaaggaggatgatcgaggtgcagaacacgggcctactttccaagcaagtacgggctgcaccctttcaccggctgtaatccaccaccaaacgttcttcgtgaccccaggaacaacttcaaccatccaggagcacgggtcgggcctgaccgtttgtggggttacaggggaaaatacggcggacggacggttcatatacttcgctggaccttggcccagctctttatctagggtcctgccgagtcacaagaagtggaggccatacacctctcgggggcgagcaatgaggttcc

SEQ ID NO: 627446 - DNA, 930 bp, Homo sapiens
gcccgtccttagctcacagggaagcggatacactggagaagaatgtgttggtggtctctgtagtcacacctggatgtaaccagcttcctacttggagtcagtggagcaattataccgcgtgaccgataaagtgagtgaccacgtgtttagctcctcatctgagactgtctggtggagctctccgaggatctggagacttttagaccaagacgttgttcggaaatctgctgagggcacattctttatcaacaagactgagattgaggactttcgcccggctttcctcaccggggcgttgctgttggatacagtctcggccattacctgccactctctagtcatcctggaacactctggatgtcgatggacggtacaataaattgaagcgatgttccactggactatctgagtagatgatccttcgttcccatatgagagcttcactatttccagagctcatgagaacatggggtcctataagcctgtgagccacatgtatacagcacaggatgtgaaggaggtcattgaatcacgcacgggtccggggtatccgtgtgcttgcagagtgggacagtcctggccacactttgtgctggaggaccaggtatccctggattactgactccttgctactcggggatctgagccctcttggcacctttggaccaagtgaatcccagtcgtcaaataatacctatgagttcatgagccacatgcttcttgagaagtcagctctgtcttcccagaatttgatcttgcatcttggaaggagaatgacggttggactatcaccttgctggcaagtcaaacccagagatcaggactttatgaaggaacgaaagggcttcggtgacggacttcccagcagctgggagtccttcataaatccagacgcctgctgcacatacgactcatcttatgggcaaggga

SEQ ID NO: 627447 - DNA, 1261 bp, Homo sapiens
  misc_feature (1119)..(1119): n is a, c, g, or t
  misc_feature (1130)..(1130): n is a, c, g, or t
  misc_feature (1182)..(1182): n is a, c, g, or t
  misc_feature (1236)..(1236): n is a, c, g, or t
  misc_feature (1255)..(1255): n is a, c, g, or t
ggggaggagtgtctccagatgtgtgtcccgcactgagcgatgagcctggtggactaaccgcctccagggggcgcgtgcatgaagcctccccgccaaccttccagaaagatgctttgcttggcagcaaacctaacaaaccttcactacccagtagctctcaaaacctgggccaaacagaagtgagtaaagtaagtgaaacagttcaggaagagcttaccccgccaccacagaaagcggctcctcaggggaaaagtaagtctgaccccctgaaaaagaagacagacagagcaccaccatctccaccctgtgatatcacctgtcttgaaagttttcgtgactcaatggttcttggatggaagcaaccagataagattggaggggcagaaattactggctattatgtgaactatcgcgaggtcattgatggggtaccaggaaaatggagagaagccaatgtcaaggctgtcagtgaggaggcatacaagattagcaacttgaaggaaaacatggtgtatcagttccaagtggcagccatgaacatggctgggctgggcgcgccctccgcagtaagcgaatgcttcaaatgtgaagagtggaccatcgccgtcccaggaccaccgcacagtctcaagtgtagtgaagtcaggaaagactcactggttctccagtggaagccgccagtccactccgggcggactccggtcactggttacttcgtggacttgaaggaggccaaggccaaagaagaccagtggcgagggctcaatgaggcggctattaaaaacgtatacctgaaggttcgaggcctcaaggagggcgtcagctacgtgttccgtgttcgagccataaaccaggcgggagttgggaagccatctgaccttgctggccctgttgtggcagagacccgtccaggaaccaaagaggttgttgtaaatgtggatgatgatggagtcatttcattgaacttcgagtgtgataagatgactccaaagtccgagttctcctggtccaaagattatgtatccactgaggactctccacgattggaagtcgaaagcaagggcaacaagacgaaaatgaccttcaaagaccttgggatggatgacttgggtatttacncctgcgatgtnacagacactgatggatagcatcaagctacttaatagattgagggaagaattnaaacgtttacttgctccaaccatgaacacaagttccaacttccagttaatcaanttggaatttaaattttggnaaaagg

SEQ ID NO: 627448 - DNA, 349 bp, Homo sapiens
  misc_feature (296)..(296): n is a, c, g, or t
aatgaagtcatgggaacttggagcttgtcaggggccagcagttcagcattttgcagggggccaccgggttccatttcagattttacaccaaacccttgaggttttccaccttacccaccagcagctacgggaagggcccaacatagtttgtaaaggctgtaggcttttcatttttcaggctttagaaagaggcatgtttgctgtgacttccaagaaggattttttgcttcgtttgttcagtcttacaagaaaatctccgtagatgttctacttgtcacttatacagagacagcatnttcagcgcctcagttaatgcgactgaggtgaggacctccgcagtatctcattc

SEQ ID NO: 627449 - DNA, 833 bp, Homo sapiens
  misc_feature (691)..(691): n is a, c, g, or t
  misc_feature (702)..(702): n is a, c, g, or t
  misc_feature (754)..(754): n is a, c, g, or t
  misc_feature (808)..(808): n is a, c, g, or t
  misc_feature (827)..(827): n is a, c, g, or t
aaaaaaaaaaacaaacctggaacattcaagtatctgtgatgttgtcaatgttgcaagattagcaacttgaaggaaaacatggtgtatcagttccaagtggcagccatgaacatggctgggctgggcgcgccctccgcagtaagcgaatgcttcaaatgtgaagagtggaccatcgccgtcccaggaccaccgcacagtctcaagtgtagtgaagtcaggaaagactcactggttctccagtggaagccgccagtccactccgggcggactccggtcactggttacttcgtggacttgaaggaggccaaggccaaagaagaccagtggcgagggctcaatgaggcggctattaaaaacgtatacctgaaggttcgaggcctcaaggagggcgtcagctacgtgttccgtgttcgagccataaaccaggcgggagttgggaagccatctgaccttgctggccctgttgtggcagagacccgtccaggaaccaaagaggttgttgtaaatgtggatgatgatggagtcatttcattgaacttcgagtgtgataagatgactccaaagtccgagttctcctggtccaaagattatgtatccactgaggactctccacgattggaagtcgaaagcaagggcaacaagacgaaaatgaccttcaaagaccttgggatggatgacttgggtatttacncctgcgatgtnacagacactgatggatagcatcaagctacttaatagattgagggaagaattnaaacgtttacttgctccaaccatgaacacaagttccaacttccagttaatcaanttggaatttaaattttggnaaaagg

SEQ ID NO: 627450 - DNA, 1021 bp, Homo sapiens
  misc_feature (16)..(16): n is a, c, g, or t
  misc_feature (879)..(879): n is a, c, g, or t
  misc_feature (890)..(890): n is a, c, g, or t
  misc_feature (942)..(942): n is a, c, g, or t
  misc_feature (996)..(996): n is a, c, g, or t
  misc_feature (1015)..(1015): n is a, c, g, or t
gatcatattcccaggnttcagaagctattgaagtcaaagctgctattgcaccaccatctccaccctgtgatatcacctgtcttgaaagttttcgtgactcaatggttcttggatggaagcaaccagataagattggaggggcagaaattactggctattatgtgaactatcgcgaggtcattgatggggtaccaggaaaatggagagaagccaatgtcaaggctgtcagtgaggaggcatacaagattagcaacttgaaggaaaacatggtgtatcagttccaagtggcagccatgaacatggctgggctgggcgcgccctccgcagtaagcgaatgcttcaaatgtgaagagtggaccatcgccgtcccaggaccaccgcacagtctcaagtgtagtgaagtcaggaaagactcactggttctccagtggaagccgccagtccactccgggcggactccggtcactggttacttcgtggacttgaaggaggccaaggccaaagaagaccagtggcgagggctcaatgaggcggctattaaaaacgtatacctgaaggttcgaggcctcaaggagggcgtcagctacgtgttccgtgttcgagccataaaccaggcgggagttgggaagccatctgaccttgctggccctgttgtggcagagacccgtccaggaaccaaagaggttgttgtaaatgtggatgatgatggagtcatttcattgaacttcgagtgtgataagatgactccaaagtccgagttctcctggtccaaagattatgtatccactgaggactctccacgattggaagtcgaaagcaagggcaacaagacgaaaatgaccttcaaagaccttgggatggatgacttgggtatttacncctgcgatgtnacagacactgatggatagcatcaagctacttaatagattgagggaagaattnaaacgtttacttgctccaaccatgaacacaagttccaacttccagttaatcaanttggaatttaaattttggnaaaagg

SEQ ID NO: 627451 - DNA, 104 bp, Homo sapiens
atgtagaggatcccagagactacagtagttctacgccagtacagcacccgatcaaagcagtggttcatccaagctggctaccccaagcactggtgctcgtgccg

SEQ ID NO: 627452 - DNA, 146 bp, Homo sapiens
  misc_feature (8)..(8): n is a, c, g, or t
  misc_feature (102)..(102): n is a, c, g, or t
ctcggtanatgcaggcttggagatagagctgcgtcccagctcagcatgaaagcatcctggagtgcaacctggcggagacagagaaccgctactgcgtgaagntgtcccagatccaggggctgattggcagcgtggaggagcagctg

SEQ ID NO: 627453 - DNA, 369 bp, Homo sapiens
attaattgccctttttctttttttcttgcttttaaagggtggtggccccccctgtttagaattacccctgggaacagtgaacgtaaaaaattgtttttaacaaagtttgttgcccaaatcagagtggatcatgggggtttggcaacagggaatttgtcttgtttgaagcccggcttttggctcccccccccctttttctgtccctctgcctggggtatgggaagtggggatgccaatggcccagctccccccctggggatttaaaaacggcagacccaacatgtttctccccccgggtccctcgatgcctgcaggccccagggtgtgcccccacttattttgactttagggaaagtaacccaaagtggc

SEQ ID NO: 627454 - DNA, 138 bp, Homo sapiens
cgttgatatcgttacagtattgagggtctgggtatcctttaacagcaatgccggtttaaagggcacggggtctcttcgggttgattatagcttgctggacttgttcctacctcttgtagcagctgcacggacaagatt

SEQ ID NO: 627455 - DNA, 171 bp, Homo sapiens
gtttttactgtatagactaaatatattctatttacatgtatgtcaacctcattacttttttcctgtgaaccagtattaaaaaccccaaccggcctgataataaggtgaattaacctgtgtcttcccttggtcttagggatattcctgaggattgaattgcaggtttcttaa

SEQ ID NO: 627456 - DNA, 617 bp, Homo sapiens
ggccacgtggggtgtccgcccccggggggtgcgcgataccccctgtggggggggcggcggggcgcaccccccgggggcgccccttgtccgccgcgtcgtgttgttccccccgccgatgtttgtctgatcatcctcgggggggtgtcctccgcgccccgccgccgcagcgccccccgaggggggggggcgacacccatcgaggggtctggggtgcgccggcggtgctggtggagcttggcgtgtgctcctggggtcccccccccggtcttcttcctcccccgccggcgtgtcttttttctcagcgcgtccccctctgcgggaggcgcaccgcgggcggcactctccctggcgcgccccccgtcttgttgtggtggcgttcccaccacccccccccccgcggccgcgcaggcgcccgccgcgtcgtgaagcgagctccttgcccacgtaggtggggcgtatagtgttcttcctcctagcgggggcggcgcccgccgggggccgccccctctctccggcccccccccgcccccccccctttttttccccccccccgccggcgcgggccctttttttccccccccgggggggtgaccccaaaaaactttttggggttttta

SEQ ID NO: 627457 - DNA, 884 bp, Homo sapiens
aattcggtgccgatgtttgtgtgtgatgccgtcctaagtttatttgtagtgatcgggcttgcgagttggacatatggattcctgctggcccgatttgagcggccccgttctttggggtcgaacatagagcttgcgcgcgaaatattgctcacatcagctgcgggcttgtgtttatgcgtcacggagccagatggttgtgtgtcgtccacctcctgtggcgaggatacacttatgtgcgcgcgcgttgtcttattggctaatgctccctctggcgggccttcatattgtattcttaagattctactgtcgcttgtatcgaccctactctggactgattactcgattgcctttacgggcataatttgttgaatacaccagccacattcagcccctcctgttgttttacaccgcccatcttcaattctctcccaatcccctcccgtaattatttttctcccgtggctcaccgtacattattccttatacatgttcgccacctgcgtgttttaatactcattcctaacctttatatttctatctctctcaagtcacaatccatttcagaaattatcttctagacgctcgttccaccttttgccccataatattcctctcttctcaaacttcttcaaactttgttctccccactataccacctattttatgacttttttgaccacaatagctctgtttatacccttctcgatgacccccccactattttaaccaccgtggtggtaattacttctttgctatttgcataccaacctttttactcgtgacagacaatatatcctattcctacctacttactggttcgccgccagaagtcttgttcacgcccctatttcccttaaaattttcccccaccccaaaaacaaaca

SEQ ID NO: 627458 - DNA, 140 bp, Homo sapiens
  misc_feature (40)..(40): n is a, c, g, or t
tatataacagcgagagactaatgattgaacacccttaatngagtgggcttttcctcagccagctggtggaaggttgatgggcttcaagcccagcacagcccctgtgccctgtgcccctgtgccagtcctgagaatgggtt

SEQ ID NO: 627459 - DNA, 446 bp, Homo sapiens
  misc_feature (28)..(30): n is a, c, g, or t
  misc_feature (99)..(99): n is a, c, g, or t
  misc_feature (405)..(405): n is a, c, g, or t
  misc_feature (429)..(429): n is a, c, g, or t
  misc_feature (438)..(438): n is a, c, g, or t
cagtgaactctgctagatgccaggaagnnnaaaggaaaggtcaatgagaaataaagtgctcaagggcagattcaaggaaaacatggggagcattcaganaaccaggtcttaaaagagaagttaaggagaacagcaagaagcaagcacacaggagcaggcagaggcacactggttgagaaagtaggatgcccagcagcctgggtctgattaaatcagaaattccctctgtaggaggacaagcaaagcatattatcataggctgggcagaattccaaaggtcatttcatccaacactccttcagacgctggaaacttcaaggttttcggaaggccaaaagtgggaagtgttaggacatttgcttacagattttgaagccccaacatttttgtccttttgccttttcntaatttttggaggaccaaattttnaaaccttcntggaattt

SEQ ID NO: 627460 - DNA, 723 bp, Homo sapiens
  misc_feature (27)..(27): n is a, c, g, or t
  misc_feature (127)..(127): n is a, c, g, or t
  misc_feature (162)..(162): n is a, c, g, or t
  misc_feature (192)..(193): n is a, c, g, or t
  misc_feature (622)..(622): n is a, c, g, or t
  misc_feature (697)..(697): n is a, c, g, or t
  misc_feature (706)..(706): n is a, c, g, or t
aggggcctccttttattctacccaacnaatagccccctatatccttttttccacatcaactaactcaatcttttaccacctttccacacctctttaccctcaataaatttaacactacctccctgtnaacttttaacaaaattttttattgtggagagggcnaacacacctcatcccccctttctaaacacnncaccttaatactacgtttaatttttttcacaatatcacaccgccctataaatttttcctcttctaaaaaccaatatttttttaactacatccatcagatacccaactcttctcaaatacttctataaataccaattccatccaatttgaatttttctttaacgtgcatcccaaccaataagggattccctcttaacagcacccattttgacctaatcccactattttccctaaccgcccctttctcattgtcctatatatccggcggctcttaaaaaaaccctttttatcccaaaacccaattttaaaaaaccctcactataatttataaaaaaacccccctttattccattgctttcgacttataaaaaccattccctttccaatatccttgtgaaaatactcataaaataaattcaaaccttccacnaatataaaacacccccgcacaaaatatctcaaattaaataagaacaaaattcttataacaagccgctaacattanaaacttttnttaactttttgtggaaa

SEQ ID NO: 627461 - DNA, 881 bp, Homo sapiens
agcggagttaagctacctcgagaaggttccagaagtcaaagacacaggcacaagcagtcgcttctccaccatgtgtgcaccatggtggtagaaaacttcccagacagctccgatctgtactcggagatcggggccatcaccaggtcagccaaggttgactttgatcaacttcaggataatttatgtcagatggagagaagatgcaaagcttcatgggatcacctcaaggcaattgcaaaacgtgaaatgaaaccagttttaaaacaacggatgtcagagttcctgaaagactgtgcagagcgaattataattttaaagattgtccatagaaggataatcaacagattccactcctttttactctttatgggccatccaccttatagcaatgcggggaagtggaacataaaacaaaaaacagcagagatgatcaggagtcgaacagaacatcaagaggaatacgcacagaccgagggaaagaagaggggaatcatcgagaaacagaaacggggccaaccatcagagagactaaataaagagccaaaggaatcagaacaccgaatagcggaggcagagttctccggcagttctccggcgcccccaagccagccgcagggtctaggagctatgcggaggacgccggctgagcacgagaacagatgagggctgaagcgagaaaaccgactacggcgcaccgaggaggacggccaccccgggcagggcgtccgcacacgcaggcgaagcaagcccgagggaacaactaagtccgggactatgggaactggatgatccgcccatgtcccacaagagtgccactgatgagacatggccggctcgcacgtccgcaccaggtggccagccgcgacctgggcggggcggga

SEQ ID NO: 627462 - DNA, 276 bp, Homo sapiens
ctgctttcatctttaacagaacagcctcctctagagggatatgaagcggccgccagccccttcgagttctaagctgccgctcgcaaggatctggcgagcacctttgcagatttaactgaggaggttaaggcctaaccataggggggcatctgatcccagcttgggtcttagctattgtgtgtccagatatgtgaaagccactttcgtagtctattttgtgtcaactggagttttttacaactcaggtgagttttagctttatggtggagggggtga

SEQ ID NO: 627463 - DNA, 546 bp, Homo sapiens
ccccgataattgaatttcgctactctgtctttgcactgactcagggccttgaaccttctctccccgttttaatttcctcactcttaagaaagtacacgagtgatggaaagaattctgttagaaaatgacttgatagaatacagaatgagctccgagggagggagaatttaaccactgccatagataggtgctgccacacaaagttgttgtgagaagtaattagtctggcggatctggggaagaatgttgatttgttgaatcaacaattatttattgggtacctactacattaccagtgacaaagactttcccttgaccaaaactttagtcaggctcctctgagtcctctgattgaccttgaacttccccctgtgtccttatagaatcccatttgagcaacaatcctcctaagtcaggttagaaaaaattctccacccttggaattccttgatatcttatcaccctggcctgccttcggccataatcctatcaagttgatttagccagaacacctttatccttgatatttcctgttaagtaatttct

SEQ ID NO: 627464 - DNA, 153 bp, Homo sapiens
tcattatgggccatgatcagagtaacaatgtccttcatttggcattgaggaaaatgtatgtcacgagctcatgttgtgtgaaagattatactcaaattcataaatggaggttgagttattctttgagaataatgtagtgttggtctcatcgag

SEQ ID NO: 627465 - DNA, 135 bp, Homo sapiens
aaaaaactattatggtactggtaggtttaagcggggcaactattgcttcaaatttaccttacaacgatattgtgacttcagcttcagctaaatatggatatgacccgcttttaattcatgcagtaattcaaaaag

SEQ ID NO: 627466 - DNA, 680 bp, Homo sapiens
  misc_feature (651)..(651): n is a, c, g, or t
cgtggaggctgcgatgcatgtctgttgctagttcttgattttacccgtctttacccccgggacacagagatgactagaagtgagctggttcatagccctttgagaggagcatcgataatacgtttgcattaacatctgtccatttgtctccagatacagtctgggctgaggctcatttaagtatgattctgcacacttggagcctcctaattatgttctgcacctgtgtgtagtctttgcagcatgctctggagacaccggggtccccatcaggccctcaagggttcccagcccatctgtcagcctctccatccattagctgacatgtgactcagctgctagacagagcacaggggtcaggcctccagctgcctttacctgctccatcattatagccagaaacgggtgaatgagtcttggagtgaatgtgcttctgcctggctttgctagaggctcatggaggccacccacctgggaatcttgagaccttttccttgggaagaagagaggggacagcacagagagctggtgagctccttataactgagtaataaatgaaagccctggggtatggctcctcgggccagagacaatgagagctcagaccagacttggtagtttcggcaaaggaggacttaacatttgtttcanggctgttcttgtcttactttgtatcactc

SEQ ID NO: 627467 - DNA, 234 bp, Homo sapiens
  misc_feature (11)..(11): n is a, c, g, or t
  misc_feature (13)..(13): n is a, c, g, or t
  misc_feature (59)..(59): n is a, c, g, or t
  misc_feature (100)..(100): n is a, c, g, or t
  misc_feature (104)..(104): n is a, c, g, or t
  misc_feature (107)..(108): n is a, c, g, or t
  misc_feature (116)..(117): n is a, c, g, or t
  misc_feature (130)..(130): n is a, c, g, or t
  misc_feature (169)..(169): n is a, c, g, or t
  misc_feature (199)..(199): n is a, c, g, or t
  misc_feature (222)..(222): n is a, c, g, or t
ttaatatgacngntttaatataagcatatgaaagtaaagctccttttctgactgtgaangttgtaataagaaggtggttggttggtacttaagtggtctnggangcnntattatannttttttttttgantgagttaattcccttcattagagcatgctggacagacangaggagctaagctttgtcagctctgtaaanccttcctttctcagctaaggccnggtaaagctaat

SEQ ID NO: 627468 - DNA, 1592 bp, Homo sapiens
aagatgaggaagaggaggaagaagaggaggaggaggaacgaagagcctcagcagcgagggcaggggagagaagtcagccacgccctcacggaagatttctggacccgtaacacgtgggagagccagctgtcccggtgcatggtcctcccgcgacgcatcctgcagacggtcgtccaggcgttcctggtcttgtcccatcttccatgagtaagctgcttgtcgctgtagggcccaggagactccgatgtctgtatagactccagccatgactgacaagatgctggagcaccgcgaagagaagcggtgcgctgctactgaacgcttcactgagagagggtgatcaattctgcgtgattgcagaggaacgaatagtcctaggctagtgaagcgcgattggcaaggtctgcatgggagtggcgaggtgaggaagttgcacgcatgggaaatgcgatgagacggccttgatatctaaaacatcccgtcagctcactattcgagacttcacgagagcaacacgtttcgcgtctacacgaagggcgtcgcgtcaaggtggcactctacgtagggaggtttcatgtctttccataggacagttgacactcgatcgaaagggttccgaaagggggccacacgttgggacgccagaatcgcgttggtaagctggggcgcgcgctcggtgacatggcgtcgtggcttagaaaaacgcgaatcaacgtggtggtatgtgcaacgtcgaagtgggacccttcaatatgtatccccctcgagaagggtccctgcattgcgcaacacccgcgtgtggactgttggcttagagggatggttaacagggttggaaccgcgataatggcccgccgaaaccatgtcggcctcacttgggtaaattgccctggccttccacctatccgggaccgcggactgcaacgatgattccttgcctggacaagcaaccgggtaggatgaaccaaatgtggtgccttcacggaaacttcaaaaaaggccccattcattcccagccatttcagcacatttggggcacctatggggaacccccattgttggaaagccttgtggggggcacgggtgggaccctctggtggattggaaaactcctttgaagggggcggcacacgccacgtaaccgctcgatttttgcccttatggaggccacagcgtggaaccttccagtgggggcccaaacaagggggccgaagcgcggcgggggagcttccattgggtagggttccccccagcatggactaggtctcccccagggtcccaagagggtcacaccgccaatggaggggagacaacgagccgattggatcgggaggataagcaagggactgccgccttgtttgccaagcgggcccacagaatggaccatacccatggggaccagggagaatcaacacggggagcggagacaaacacggtggactaacctaggacgaggagtcccagaagatcgccgggacaaccaggggtcagccgagaggaggaacggatcgggggcccccccagaaggagcgagacgaacgggggcacgctaaagcacgaggaccagacaacagtgtacacctcaaccacgg

SEQ ID NO: 627469 - DNA, 295 bp, Homo sapiens
agtagagatggggtttcaccatgttggccaggattgtttccatctcttgaccttgtgatccacccacctcagcctcccaaagtgctgggattacaggcatgagccaccacacccagcgagacggggtttcattatgttggccaggctggtctccaactcctgacctaaagtgatctgcccgccttggcctcccaaagtgctgggattacagacatgagccaccacggcttggccgggatagtatattttttatagcacttcccctactgattgcttgccttctctgtggctacaa

SEQ ID NO: 627470 - DNA, 163 bp, Homo sapiens
tgatgaggaaatgacagagagctgaaagagcccagactcgaggacctattgctccgcaagaatcacatcttccagaagaactagacagaaaactagcgcgtcatgggaactctgaaatccttgtatgagtagcagcatcagcctctgtccatacagcctctgt

SEQ ID NO: 627471 - DNA, 866 bp, Homo sapiens
tatgttgtccgaatttattcagacagtatgactatcttgtctatggtgtaaacattaagggcgggcagggttttcggtaacaaggtcccttcttctgatacatcaaggtgggccgatgagataacatactttacattcgtatcgtaagtacgtacggaaatgatgctatttaaaggaagtaaagtacgtattatctttcgtaagtataggtacaataactataatggaagatatgaacttgttatattaatagcttggtcaaagtagtcattgcaagggtctgtcggaatgttgaggtggatgataccattctttgatattcctcatcgtggctgatggtgcgtcgagtattcttattgactctgaccctgtctatgacgtaagaataatatattgacaagaatgtgtaggattatgattacacggtgctcggctggattcttctccaaaacgagagccatacatttatggttgattactttaggttattcacacggggtcatgaaggctctgacttctctgatctatcatgggatttggacttcttgctttattacattgtctcttaccttattacgtaatctccggagagttataatctgattcgttgtgtgatttttaatttatttatgctgggggatcggagagtacataggcctaatagtaatgtggatacctgtttacttgtctcctttatcccttacttgttgatctcagcaataatattctatctctgggggaccattgtccagtcctcgtttggaacagcaaagtgttccgggcttgctggacgattgtccaacaatgtgaccagtccttctggagatgaggtgtcaacccggttgttcagacctgtaaggagaacg

SEQ ID NO: 627472 - DNA, 115 bp, Homo sapiens
actgttgttcatacctgcactgttgttcatacctggtcgctgtatcgggggaatgctggagattgtaatgggtatggagacatatcatggtatgaacaacagtgcagtgttacct

SEQ ID NO: 627473 - DNA, 448 bp, Homo sapiens
aaactcgctcgggttgaccgtagctagtataagtagttgctagctgaccaggtaagcataaggcaggtatctacggtccccctagccgtgctcccctaccctacctacgtactagccaagcctcgcctcctaccacaccacaccaggccaccccagctgcaagtagcctataccttggagcagagaggcagcctacgtcctacctagtcccctactacctacccagccaccatacgttcatactgctaccgggcagaactagtagtaggcccctgcctagtagccagccataggggctacgggataggactaccctagggccccacccattgccaagccaggaaggcagctttcgctagttcctgcctcgggacagccccgggtaaccccagcatcctgatatgtaccctctaccccacttcagaggccacccactcagcaccaccgg

SEQ ID NO: 627474 - DNA, 144 bp, Homo sapiens
ggggggggggggggggggggcccccttttttttttttacccccctttcctttttttccccgggggggggggggggcccctggggccccccgggcccgtttggccccggcttttctttcccctttagggccccctgtggtgccca

SEQ ID NO: 627475 - DNA, 307 bp, Homo sapiens
cagtacatttatgacgctttagtcaagcactttaggtgcggggaacatttacctatgtcaaactctctgaataagaggacatttcattatcattaacattaatcatctcatgaaacccaaaggcaactggtctacaaaaaggctgtaacaaggacctggaatgccaggaagtaccaagggcaatatttgtgttttttggtctacttttctatgtgcacctgattcattggacccaaatttgccattaaacctttctaatttactttttctgtcatcaagtgaccagcccagctgaattattgttact

SEQ ID NO: 627476 - DNA, 331 bp, Homo sapiens
atctccaacaagtggtccaatttaggaacgaaaagcctagatattgttctgaaaaccgtgctctaagggcgtttgaaagactgccaggtagtgcgagcctgagatgatctggaggattctatctaatcgtgactacgttggtctgaaggtcaactgagaaatcttgtgggacagagacttgagttaggaagccctcagtcacttgccttccacggtggccagccctgctgacatcattggctgaagcaccaccaggattcacggcacccaactggttcagggtacttcgtagactctggctcactacatgtcgaaagagttatttgagttc

SEQ ID NO: 627477 - DNA, 334 bp, Homo sapiens
gaaggttggggcacgaaggctcatcattcaaatataaaacaaaataaaaaagtattaaggcattaaactaattctgaattaacatttttataaccaagaactaaacatgtgcaaattctttttgagctacaataaaaattaaattatgctattagttataataagagctctgtcgaatatacaccaaactatatacttcagcacattcacaaacaatgttgagcagcaaggcttttcaacaagacatttaatacaattagttttcaacaaccccttggtggtccacatctacaaagatatccagcccaagccaaacccccttcccatctttcct

SEQ ID NO: 627478 - DNA, 283 bp, Homo sapiens
cgttaggtcaaggtgtagcccatgaggtggcaagaaatggggtacattttttcccccagaaaactacgatagcccttatgaaacttaagggtcgaaggtggttttaccagttaacctaaaattagagtgcttagttgaacagggccctgaagggggtacaccccgcccgtccccctcctcaagtatacttcaaaggacatttaactaaaccccctacgcatttatataaaggagccaagtcgtaacatggtaagtgttctggaaagtgcccttggccgcccca

SEQ ID NO: 627479 - DNA, 944 bp, Homo sapiens
  misc_feature (36)..(36): n is a, c, g, or t
tgctgatgcgtccgccggaagggttgtaacccgccnccgtaggggaaatcggtaagccatggcaagggggcccaaaaacaaggggatgccgtgcccaacaagaggtttgctccagcgacaagtggatgttcgccgcggagttaagcggcgaaaacgtttccaaaaggcggggctctgtaacaccgggcaagggggacaaacatttgcacaaaccctcctttgggccgccctcccgagccccccaacacgggggtcggagcagaccgccgtggtgaaaagggccccccgccgaaaacactggggggcgcctccattgggccgccgcccgcaggggaaagcacgcgtgcgccccagggcggcacccaggtgttaaaagacccccgctaataagaaacagggggttcaccccattgcggtgaggcctcccctcccgcgtacatatttctgcacggcctaaatttccacgcaggagcgcttctttttccccgttagaatctggtcaggcaaccgcgcaccccgcaatgggtatactgtccgtgggtcttttttataaattcacatgcgggccacaaaaagttattgaatccgcgataaaactgtgcatcttgcatttgacaaaacgctaaaaattggggggcccctctaagaatagttatccctttctgcacccgccgcgggagaattaacagatcgctcgcaacgttagtttatgaaaaaaaataagcgatgatgatgaaaaaaggttattggacggaaggagcgtgggcaccagtacctctcgtatagtgaagtcagagtgcaagagcaaattggttccacctcctaggccattcttgggccagctgcatatccttccgtgggatccgtaataatgccaccacgatatgtttttggttgttaaaaacccttggaatcaccgccaaaaaaagaaactcaaacaaaac

SEQ ID NO: 627480 - DNA, 1204 bp, Homo sapiens
  misc_feature (467)..(467): n is a, c, g, or t
  misc_feature (859)..(859): n is a, c, g, or t
gatagctgggtctgtttctatcacatccctttcctccaggactacggagctgccagctgctgatccattgctctagcacccttcccttcaaaatcaggcaagaaaccctaggagcaaaacctgagcctcaagcctcttgtctctatcccaccctcaatacccgccatggcaactcccagcttagccttctgaagaagaaatattatcagttcttatatttcaattccctgcgtcagagcagaatttcttgagtcaacaaactcagttgcagtgatatttagttgaagcccctttaagttatgttcattttgtcgtggtggttgtaatatgatttctggactggaggcattttcatctccttcacagaggtcatccattccaccaagaactctgctttccccccgcccaccaagaaactgtttaaatcctgaaatacttcttcaccccaatcccaaaggggccctatngttgctagttttaattcctgtagctcctgttctaagtcatgcccatcgaagaatcaagattagtccctccactaaatcaagatttagtactcttgaaaaggggagatgtctggaaagaagagcaagataaaaaccctgcacatcaacaggaagtataatcctgcagttactaataattcctgtagaagcagcagctctaggagtctccagatctgattctcagtctgtgtgcaagccaggctggctctcgtgcatgactgtctatgggtgtggaatgtacgtcagagcctgtgtagagatacaggcagatgggctaactcctcatgtctagtcatgctggcagggctttccccacatccatgcttttgaaattagtgtgagtgtacaggttngtgtgtgcatgtatacgtgtgtgtgcacaggaagcatttccacttgagggaaatcctgccccatcatgcctacctccacaatgaaatcactcgttttttggtgtttgctcgcctaactgacttgaaccccattttatttatttagtttttttctcatggcaaagtagaatacgttggaaggtgtagggaaatcctgctggactgtgtttcagagtaaatcttttttctctccggaatttcttgttttgctatacacaattatatttacctgattatgaaaaattaattttccttatacattttccccttacacactagaaaagagcaccttgttactattacggt

SEQ ID NO: 627481 - DNA, 970 bp, Homo sapiens
  misc_feature (233)..(233): n is a, c, g, or t
  misc_feature (625)..(625): n is a, c, g, or t
cccaatagatgacgtttgggtaacgtttgaaatgactctgaacattatttccatagcaatttctgtggctgaggagacttaaactttacaagtatatccttttaagatcattttaattttagttgagtgcagaggtcatccattccaccaagaactctgctttccccccgcccaccaagaaactgtttaaatcctgaaatacttcttcaccccaatcccaaaggggccctatngttgctagttttaattcctgtagctcctgttctaagtcatgcccatcgaagaatcaagattagtccctccactaaatcaagatttagtactcttgaaaaggggagatgtctggaaagaagagcaagataaaaaccctgcacatcaacaggaagtataatcctgcagttactaataattcctgtagaagcagcagctctaggagtctccagatctgattctcagtctgtgtgcaagccaggctggctctcgtgcatgactgtctatgggtgtggaatgtacgtcagagcctgtgtagagatacaggcagatgggctaactcctcatgtctagtcatgctggcagggctttccccacatccatgcttttgaaattagtgtgagtgtacaggttngtgtgtgcatgtatacgtgtgtgtgcacaggaagcatttccacttgagggaaatcctgccccatcatgcctacctccacaatgaaatcactcgttttttggtgtttgctcgcctaactgacttgaaccccattttatttatttagtttttttctcatggcaaagtagaatacgttggaaggtgtagggaaatcctgctggactgtgtttcagagtaaatcttttttctctccggaatttcttgttttgctatacacaattatatttacctgattatgaaaaattaattttccttatacattttccccttacacactagaaaagagcaccttgttactattacggt

SEQ ID NO: 627482 - DNA, 1758 bp, Homo sapiens
  misc_feature (153)..(153): n is a, c, g, or t
  misc_feature (162)..(162): n is a, c, g, or t
  misc_feature (416)..(416): n is a, c, g, or t
  misc_feature (1502)..(1502): n is a, c, g, or t
gaccgctgcccgaggcccgaagctatgtgcagcagaggctccgtgggttacgtggtctacagtggtggacttggacacctcggtgcagtcctcggtgctggcatgaatggatacgaaggtcgtatggacggtccagtatggcctaatcatgcncacgagaanaattcggacgcaagagaggaatcgactgtcgcatcgaaatgccgagggagagaagggccactagaaatgccattgcgggcgtcacatataagagggttcgcttacacttgaagggagtcgatccaagacgacgtgagagggattcgattgcgatgggaaggttaccacttcgtggggccgcgggcgcatcacgagatctcgggacgtcagccttgtaatagacgaggagctcggcctatgcctaccgtgaggancaatcactactttctgtgcacccaagggcccctcgtgcgggagtacgaacctcgctgaaaaagcgagagtcttgggaaaattacgttctcgcaagacgtgcgcgaatgagcggcaccccgaaagttaatgcttgattcacccagttcggaatggcgcttacgcacggagaacagagtggcgtgaacaatacgtactcggaagaggtccacgagggtttgtacggagtgcgtaccaagcgtcttgggctttgaacatccctaactatgggggcgctccaaccccccaaaggggagttacaagaatggcgttacccaatgtgatggcatccgccccttgggagtcacggcgaggatatatgggcggccataggcgaaacatttttcctctgaggcttaggaagcggccggagggcttctccaacattgtggcggtcgcccggaccttagagggttggaaaccccttgtggaaggtgggtgcgcaacgttctctaacctggggccaaaaaagaatggccgaagaacccaattataggcggggacaacttttccccccccaaggtggccccttctgggagagaatacttaccttttgcgcttcaccaacgtaaaagcggcgccaggtgtgggagcaaagggcccacctttggtggcaggtagcaacacggtaagagcgcccttcacaaaggtgggcgcgagcaacagttcccaattgccctttaaacaagcaatggcggtcgttaagggcaataacttcaccctgggcgggataggtagaacgcgccccgcttaaacgcagtgagattcccccaaccattgggcaggttctcctcacccaaaggggggataacattacagtgtacaccacaacgcggcaacaaaggaaaatccttccggaggaagggaatgggcgcccacatgagaccgcaccaaaaaggggcacgcacacgggccacacatttataccacaccaccggttcgtagatcacaacttggtctatcgccggaagaggacttcttcgcgcaacgcgttttccacaaccgcaacaaaaaagagaaagcgcggcgggctcccgcctaattgtgtntctgcgaaagaagccggactatggacaggcgccaacaccacgagctgtccgtaaaaggtgcgtgtgcaccttggtgggtcaagacggccgaaacgcaccacacgagagattctctaagtaaaataaccaccatttacgccgtgtttgtgttgagaagagcccttcacatgtgtccacatctgggattccactccgcctctgtgataaccagtgacaaaagggtgcagagctggttgcgcatcacgggcacatctcg

SEQ ID NO: 627483 - DNA, 482 bp, Homo sapiens
ccagagatcaaagagcccttcgagccccagccaaaaggtcccttgcagagtcctaaagaagaaccccctggaaaactttagaatcctggtggagcttaacccatatgcaaaggccctgggccgggaccccattttttgccagggcaggaatccccagctccgggggggtaaggcagctgctgcagcaacggcccttccaacccaatcaaattagaagggggcgggtgccggcaaaaagcctgtgggagggaaaaaaagaaaaaaggctgctgttggggtttaaaaaccaaaaaagcctctgggggggaaaaaggccgccgcttcccaaaaaccccgccccttaaaaaaagcccgcagagaagaaaccttcttcagaggggaaaaagcctgctggattaactttttaatttggtttttccctaaagggccaatccttttgggcaggttttttttaataaaaacccggttataccggccgggga

SEQ ID NO: 627484 - DNA, 358 bp, Homo sapiens
gagagagagagagagagagagcgagagagagagagagagagagagagagagtgtgagtgagagcgccccataatccccaatctgagcccagtgttgtccccagatgacttcacaccccatagctgggctggatacgcttgatttgcactctgacctgatcggaaccatcttcccctactccaccgcttgacctcctccctttgccctatccctgctgatgactctctgctgcatcccttcccaacttctctaagttccgtttcacccaggccttgttctaccaagggatcgatttctcgatcaactttcactagatctgtatcatctttggcacctacacccccatcgtgtgccctgt

SEQ ID NO: 627485 - DNA, 615 bp, Homo sapiens
  misc_feature (262)..(262): n is a, c, g, or t
  misc_feature (340)..(340): n is a, c, g, or t
  misc_feature (412)..(412): n is a, c, g, or t
gggaagtgtgcaggggtgaaggtagagaatagagttggagaaggagaaagttatcagatttttcattcaaaaaagttcatttataaaatttatttattaaagttattaaaatgcagggtagggaagagacaggaaaggtcaaaattaaaaacatgaaatgagggaatgtttatattcttattctttaaagataagaaagacatttcattttatgtatagaattctgttattttaaaatttattttaacattgatctaattgntttttccaaatggaatagagagatggagactagatcacatcattaattaaaattgcaaagtaatggccgggcgcggtngtcacgcctgtaatcccagcactttgggaggccgaggcgggtggatcatgaggtcaggagatcgagaccatnctggctaacaaggtgaaaccccgtctctactaaaaatacaaaaaattagccgggcgcggtggcgggcgcctgtagtcccagctactcgggaggctgaggcaggagaatggcgtgaacccgggaagcggagcttgcagtgagccgagattgcgccactgcagtccgcagtccggcctgggcgacagagcgagactccgtctcaa

SEQ ID NO: 627486 - DNA, 476 bp, Homo sapiens
aatggaaccaaagacctgagatccattgtgattatatcttcaccaggtcagcagagaagggaactgcgcagttgaactctgagttcaccaattgtaatatttggaaattatctacaatgtaatcttccctctgttctctgataacctacttgcttactcaatgcctctaagccaagtcaccctgttcctatgggcaggaggtggaaggatttggcaagctcaaccacatgctatttagttagcctcagttgtccccaacattctttctgcaaagggcaggagagctttgggggacaggaaaaggcttaccaggctgctatggtcaactcttcagcacttttcagagcaatctaaaagcgccccacttcgctatgtttacagtgatactattaagcaaatgcatgtgcttctgctctgtctttccaagtatgatcacctaaaaaatttgtacatcacaatcatttctccccaaaaaa

SEQ ID NO: 627487 - DNA, 468 bp, Homo sapiens
tgaagctgtgccatcagatgtggaacggcccgactcggctgtctgactgtgctgtcggtggtcagcgagacccttgcatctctcacacgggatcggcactccagaccccttgttgcccagggatcctgatcgcacagacgagatgaagcgcaggaagcgttatcattcacatgagtgaccatatctatacggagacaccatgcttgttgaccggactgaggcagaccagcaacactggaagcgttctcctatttccgtgccaaaggaagatcatacctcctatccaagaacgggaaggcaacagacagtggacactcccgtggctcattccgaggaaccggcatgtggtgcaaccagcccggttgatcagtcccgttaagtttctatgtatcaagctaattcaccagggaagtttcgcgaatgaacacaacaaaccatggggagttcaccatggcatcgtttaaacac

SEQ ID NO: 627488 - DNA, 475 bp, Homo sapiens
aagaggtggagtctcccaagtggtgctaagtttaaccaaaaagaccagactaatatattaatatatatctagctgtccagacagcctgtatctatgggggacagggctaggcccatgcctgggtggccgcctcaccccctcgcgtctcctcactcccttctacctgccactcacacagccaggtgccttggagggtcccaagctgtgccccagcccaccctcctgtcttcccagggtagcccgcctgccagtcctagctgcacagcgcagctgggcccaaccctgtctgtagaggcgcctggttgtatctagcactgccctgcacggtgggccttgctgggggacgggggggccccagttcagccttctctccgcagtctaacccagaagaagcctctttccccatggaaagacgaggccctcgggcccagcccccacagtgctgtctgatctgtgctttccagttcacccccaa

SEQ ID NO: 627489 - DNA, 627 bp, Homo sapiens
agacagagtcttggtgcgatgcccaggctctagtgcaatggcgcgaccttggcttactgcaacctcggcttcccaggttcaagctattctccttcctcagcctcccaagtagctgggtacacaccaccacgcctggctaattttcgtatttttggtagagacaaggttgtaccatattggccaggctggtcttgaactcctgacctcaagtcatctgcccaccttggcctcccaaagtgctgggattacaggtgtgagccaccatgcccagttggtattttgttttgattttgcatttccctggtgactagtgatgttgagtgtcttatgatgtgttctttggctttggtatacttctttggagaaatgtctgctcacatcctgttcccatatttaaaatgagttggctttttattattgagttgtaagagttcatctatttttttttaatgtgcttttggtgtcagagaaactaatgtctaatcaacgtgtatgaagatttatttctgggtattcttcttagtgttttggagtttcatattttacatttagggctttgatccattatgaattaaattggggtttatgatgggaagggcatcatttttttgcatggggttaaccagt

SEQ ID NO: 627490 - DNA, 333 bp, Homo sapiens
  misc_feature (9)..(9): n is a, c, g, or t
  misc_feature (13)..(13): n is a, c, g, or t
  misc_feature (15)..(15): n is a, c, g, or t
  misc_feature (46)..(46): n is a, c, g, or t
  misc_feature (50)..(51): n is a, c, g, or t
  misc_feature (55)..(55): n is a, c, g, or t
  misc_feature (76)..(76): n is a, c, g, or t
  misc_feature (89)..(89): n is a, c, g, or t
  misc_feature (92)..(92): n is a, c, g, or t
  misc_feature (100)..(100): n is a, c, g, or t
  misc_feature (120)..(120): n is a, c, g, or t
  misc_feature (147)..(147): n is a, c, g, or t
  misc_feature (160)..(160): n is a, c, g, or t
  misc_feature (172)..(172): n is a, c, g, or t
  misc_feature (174)..(174): n is a, c, g, or t
  misc_feature (197)..(197): n is a, c, g, or t
  misc_feature (242)..(242): n is a, c, g, or t
  misc_feature (251)..(251): n is a, c, g, or t
  misc_feature (261)..(261): n is a, c, g, or t
  misc_feature (264)..(264): n is a, c, g, or t
  misc_feature (290)..(290): n is a, c, g, or t
  misc_feature (320)..(320): n is a, c, g, or t
gagagagcnagananagagagagagagaggagagagagagagaganagannaganagagaggggaagttttaatgntctgccataatgnctngggggccnttgtcttctgtgtaaatggnactagagaaaacacctatattatgagncaatctagttggntttattcgacangnaggaaatttccagataacaacantaacaaactctcccttgactagggggacaaagaaaagcaaaactnaccataaanacaattaccnggngagaagttgcataaacagaattaggnagtatattggagacagcatcattaaacagntatgttgttctcc

SEQ ID NO: 627491 - DNA, 410 bp, Homo sapiens
cgagggttttaaaaatgtgattttcttcttttgacctgtgaggaggataacttctttcagcccccagattttaaatacaagcaaataaactccctatttttagacgtttttttcctccaagggggttttcttttcttaaaaaactcgatctggacccagctgggtagcagccagcaaaggccatcagacaaccaaaagcccatccatttttgtagtgtcacaaacatgtatatgcccccctttgccccttaatgaaaaactttgaaacagaagttattccctgggtttttgatgatctatctgtattggaaatatgttcctggaaaaagcctttaaataatagtaaattttcttgcatgttcccttatacgggttttttaaaagctgttcaatacagtattccctctaga

SEQ ID NO: 627492 - DNA, 346 bp, Homo sapiens
  misc_feature (32)..(32): n is a, c, g, or t
  misc_feature (51)..(51): n is a, c, g, or t
taaacccccacatttaccctttttgaggaacngcccaaactgtttttccanagtggctgcacccattttagaaatatcctaaaggcggctgggtgcagtggctcacacctgtaatcccagcactttgggaggatgaggcaggcagatcacgaggtcaggagtttgagaccagcctggccaacatagtgaaaccccgtctctaacaaaaatacaaaaaattagccaggtgtggtgcaggcgcctgtaatcccagctaatcaggaggctgaggcaggagaatcacttgaacctgggaggcagaggttgcagtgagctgagagagccattgcactccagcccgggtgac

SEQ ID NO: 627493 - DNA, 625 bp, Homo sapiens
atgtgaaaactccttaagtttcttaagttaaggatgttggcttttttctttaattttttaaaaaccattttcctatgttaggagtgcaagaatagccagcatttccgatttggacatatgtcattttatgcatatttaagaaattatagctgcatatcccttctttcaaaaaatgtgctttttttttttaaagggaatttaatatattcctttaaaagaaagcaatttaactcaatggcaaagcaattatataaaaccacaaagaatgtactggaacctattaaccctttaacatacagttaagggtcctagcgcagagtcctgtgttaaaggtcatggacctcatcatctgtcagtaatgagaggatggccagaataatttggcatacaaatgaggaccttaatttggtccgaaaaataatctctttaagttccttgaaaatggagtgggttaacggttctctaaattgctatctgcttttacctagtagtggcctacatctggggacttcagagaagaattatattgcgccagtaagtaagaccaggggttatggacgcatttctttacagtacccttacgtgttggtctgaaattaaatggctataattaaaattggcgaaa

SEQ ID NO: 627494 - DNA, 179 bp, Homo sapiens
cgagccgccgggagggaatgacgtttggcttctccttttggttgcggggaggtgggtgggcttgtgccttacagaccttggtgtggattgtgtgagaggcactcaatttcctttaaaccctgtctttcacttgaccccgtagttttaactccatttctcttaagaggcagccccactac

SEQ ID NO: 627495 - DNA, 279 bp, Homo sapiens
ctgtgtcccggctgtgagagtggtgtagctcaagagagggagcgatgaggttggtggccatagacagcgtagagtctctgtggtggcatgaccccggaggtcgcatgctgtccgcctgtgccaggcaccatggaacaggggcactgagaagttcgatgaatggagagggcgtgtgacctgtgaacatgtgtggccgtttctgtgacttgtgaaggtgacagccagactcacacgtgtgagctgcagatccaggtgagttggtggtttaccgtggctatg

SEQ ID NO: 627496 - DNA, 195 bp, Homo sapiens
  misc_feature (142)..(142): n is a, c, g, or t
  misc_feature (148)..(148): n is a, c, g, or t
atatgatacaatttccccataatattggaaactagacatttttaaagtatgcctttagcaaataggaataaaaaatgattgagtccagcagcagcccagtggcttatcaaggatgactttaaaaccacccattttctttggntatggntatgcaactgtttcttacacaaggatacaatgaaatattatattttg

SEQ ID NO: 627497 - DNA, 140 bp, Homo sapiens
gggagcacacagagagatggcagccacctacaagccaagaggagaagcctcacaatgaaccccccccccaccctgctggcaccttattcttcgacttccagcccccagactgtgagaaataaatttctgttggttcagcc

SEQ ID NO: 627498 - DNA, 153 bp, Homo sapiens
  misc_feature (91)..(91): n is a, c, g, or t
gatcgacacctaaagtcaggctctctggcagcgaacactttcacattacagtgcatgctgagacaagcagctgacagaatgctaccagcantcttaacagcttggtgcggatagtctgactagtttaaggagactggccgaagctctgcccaa

SEQ ID NO: 627499 - DNA, 1142 bp, Homo sapiens
gggtcgacccctcccccgttctcggcgtcgtcgaagataaagaatagttggcctggccgagcagcctagatgtgtctcccgacgccggattcggcgggctgcgtgggaccggcgggatcccggcacagccggacatggcggggctgtactcgctggagagtgaggcgtacttctccgaccagggcgggaggaagtacatggaggacgttactacaaatcgtagtggagcccgaaccgacaggctgaagaaaagccctcgccgcgcgcgagtcgctgtacctcagcccgtatgcctccgaaggcacgtcgccaggccgacctatcccggacggcgaagtactcggggcaaaggcccagacggaggcaagacacgagaggctacgcgaaccctctaccacggaccgccgcgagcactacacacggcacctaagcccgacagctgcccgccgaccgaaacctcgcgatggaccctactacacagaccggtgatgacgaacggggccaccggcaggagcgagaaaggcgcgcaccagaatggggcccacggagacgcaactatgctgcgaggttcaacatacaagacaagcagcaagaggtagtacaccaacgaacccgaccccgggcctacagggtctggcggactgcaccatccggccaacgggcttacctcggcttggacgcccttgcccctgcggcaaagacacgggcggacatggcccaacgaacatgaccgggttcaccctagcgacatcagggcaccaatggccacgagagggaccacaccagaccgcagcaaataacccaagcactacagcgcacggtacggagcacccacgccgcggccaaggccaacccacgaagacccggacccacagcaccgccagaaacagccgacgaaccagacaggcccaaacccaaacgcccccaggacgcgagacctcaggaactgcaggcaggagagcaagcgaggacacagaaggcggcccggcgcagcaacagcgcccaagacgcccgcccgcacccaccaaggccgcgcagcggggaacgcgagcaacgcggcaagagagcgcaacacgcgccgcccgacacaccggcaaagacacgcgcgcagccaccaccagagaccacaaggggcagccacc

SEQ ID NO: 627500 - DNA, 293 bp, Homo sapiens
atcgttatcggcatggcggtctgtactcggtgtgagtagtgtcactgtctaagggcccaggtgctagggtcacctccagagtgactgcagacatctgtgaagggaccctgcctgagcttgcctgtggtgtgtgtgtgtgtgtgtgtgtacagggtaccgcagggcttgcccgcgcttgcgcaactcactcctaggtgctcttagtgcaggggtggaggtgtctctgcactttacttcctgcgaggggctggcgcaccttggggtcaagtcttaagcttatatgctctccctat

SEQ ID NO: 627501 - DNA, 144 bp, Homo sapiens
ttagctgcggagttggtggaaagtaaggatgtggcgagaaactatgctgaggcaaaggatgtcttcctgggcatgttgtggtatgaatatgcaagacaggcatcctgagtgactcgtgtcggtgctgcgtgctggaggacttgc

SEQ ID NO: 627502 - DNA, 202 bp, Homo sapiens
  misc_feature (193)..(193): n is a, c, g, or t
ctcctcagcagacgcagctccaagatcacccaccgtatcactgggaatctgccagcctcctgcgatcagaagagaccaaggaaaatgagggtttcacagtcacagctgaaggaaaaggccaaggcaccttgtcggtggtgacaatgtaccatgctaaaggccaaagatcaacctcacctgtaataacattcgnacctcaagg

SEQ ID NO: 627503 - DNA, 300 bp, Homo sapiens
  misc_feature (28)..(28): n is a, c, g, or t
  misc_feature (55)..(55): n is a, c, g, or t
gcacttgaaatgtcctttgtcctaactnagaagtattggccaggagtggtggctnacacctgtaatcctagcagtttggaaggctgaggtgggaggatcacctgagcccaggagtttgagaccagcctgggcaatatagtgagaccctttctgtatttaaaaataaataggctgggcacggtggctcatgcctgtaatcccatctctcagggaggcagaggcgggaggatagcttgagcccaggagtttgagacctgccttgggcaacatagcaagactctgttctccacgaaaaggaag

SEQ ID NO: 627504 - DNA, 485 bp, Homo sapiens
accctcaaagaggtttaccgctccaagatggatggcgaggccaccaggcccccttccccggaccgcagggccctcccctcctcctctggtctcctcctcctcctcccagctcaggtggtacctgggggtagccctccccaaagaggcctatcacccagaagtggcacgggcagcttctcgggaagaacggaggcacatgcaggacatcgagacaagcgccaactagctctgcagcagaagggacaccaagtgatgaagagcagcggcggtgactggcgtgagctgaagcagaaagcggcagctgaggcacagtgccagtgggatgcccattcacggggcagcacccttcccagctgggcccctcgggcttcccccctctcatgcacccaatctatcctagaaccacatgcctgaggggccgggagcgtggggtggagggtgagcacgcctatgatacgctgagtctggagagctctgaccacatg

SEQ ID NO: 627505 - DNA, 625 bp, Homo sapiens
aggctgagcctgagcgcgctgttggccggagggaagccggaggagaccgggtcgatcctggtgcagagcggcagagggtcgaggagacctggtctagcaggcccagtggagtaccgaagtggtgcatgtggagcatgcggtcacgtgagtggacgcggcgccagagaaatgagacttgggtccctgtactgcagcctcaaggctcgcaggacccaagaactgggtaggggcccaagggccttccaaaaggccgtggccttttaacaacccacaattccaagggaggggacgagacccggtgaccaccaaggaggggacctgagagcctgaggcaaacggtgaggaccatgtgcgctctcagtcactgtcctttgcccgcggggggccacaatcaccgggatgaccatgctgtgtggcagagcgtggaggctcaaggggagaccgatgttccgggggcaggtgggaagttacccccgccgattaggccccgtggagattccgagggaagacccaggttttgcccttgggcctggaaggcctggtttgggcaggaaaggggcttggccatgagggcactctttgcagaggggcccttgattttccacggttgcgccaggccatggcg

SEQ ID NO: 627506 - DNA, 354 bp, Homo sapiens
  misc_feature (225)..(225): n is a, c, g, or t
  misc_feature (231)..(231): n is a, c, g, or t
gtcttgctagagccttggagtaccctgagacgtgtgaaccctgcacctctggtccaatcaagaaccttctggcttcatggtcgctcatgcctgtaatcccaatgctttggaaggctgaggcaggaggattgcttaagccaggagttcaagaccaggctagacaacaaaagggcccccccaactctataaaaaataagttaaatattagccatacacagtggtatncacctntagtctcagctactctgtaggaggtgggaggattgcttagtccaggattcaggctgcagtgagctatgattgtgtcactgcactccagcctaggcaacaaagcaagaccttaagacctcttct

SEQ ID NO: 627507 - DNA, 737 bp, Homo sapiens
  misc_feature (565)..(565): n is a, c, g, or t
  misc_feature (641)..(641): n is a, c, g, or t
gggggcgcagctgttagtcgcgggccgtctgctgttgatccgtcactcgccgaggttccttgggtcatggtgccagcctgactgtaaagaggacgctcccggcagacgaatgaggaaccaccttctactactgctcaagtacaggggcctggtacgtaaagggaagaaaagcaaaagacgaaaatggctaaattcgtgatccggccagccactgacgacgactgcagtgacatactgcggctgatcaaggagctggctaaatctgaatacgtggaagaccaagtaatcttaactgaaaaggatctgctagacgatggatttggagagcacctgttttaccactgactggttgcacaagcgccgaaagagcactggacttcggaaggacacagcattgttggcttagccatgtactatggtacctatgacccgcggattggcaagctattgtatcttgatgactacttcgagacgagtgattatagaggctatgacataggatcagaacttctgaggaatctaggcagcttgcaatgacgtgacgctgcagcagcgtgcacttatnggtagcagaatgtaatgatcatgcatcgactactattgatgaagaagtgcttatgatctgtacaatgatgatgatnggagactgatcaagatcgccaagagtactcgctttggcacttagaatgaagactgctgctgatgatgacacctacattctatttgagtttcccctt

SEQ ID NO: 627508 - DNA, 1077 bp, Homo sapiens
ggctgtcgccgcgcgagagccggagcaagacccatggcgcgagaggagtggaggaggatgaggaggagggtgggaggcaggtggcatgaggtggtaggaggtgtctgggaattgtgggggatctgatcgagctaattatagacacgagatcaccaatcatgtggtgaggtagtagaatacgtggttgtctggatacaaaggtaggccgtcggtaagtctggttcatggcagggtcgaggttgtctcaaggtaaatgcatgcttgaatgagagtaatgaagctcggataggtgaatagataagaatgcacttgactagtaaatgcagtgcttgggaaggtactgaatatagcacgaaacaaagatgggtttagcgtatgataaatcgcatggattagctggagcagtggcaccaaggagttcaaattttaatgggcgaatttgtaggggatatggtaataggtgaacgacagcggatcgatggctcatttggcaacatcatgtagtagatactgggtttatcgagacattcgaagatcacatcgtgttcagacgtaactttacagaggagccatagatagtgcatacacgaattttacaaggagattagtgtgagcgacagcgagagaatgttctcatattgattacttggattttggcgacttgaaactggagagccttgggaagggattcgaagccgatgttggataatgggccacatcggaagcaaggggacactggaagtaagtacgaacaaggaggatgggcgatagttgaacttggcagggccttatgtaaaagcaaacttcctattgttgacaattatgttgcgaaaaaaggaagtgaaatcgtttgaaatgtaggaagttcttgttatttttagagaacctggctgtggaaggaacttgagatttaggacttaggtgcaagaggctcaacccagaggtggtgaacatctggaattgaaatggttgtaacaaaaaagggaatagttccattgggtaagggttgggtcacaagtggagcaaattatgttggagacaagagacgcatttgatcgctgaatttacaagggaatg

SEQ ID NO: 627509 - DNA, 116 bp, Homo sapiens
gggtgcggtgtgcggtgtgtggcgtcgcgtcggtgagccccttggtgcggagaaacttggagatgaatgacacgggcggcggcgatctcgcctatcgtagcctggcagcaagatcg

SEQ ID NO: 627510 - DNA, 205 bp, Homo sapiens
  misc_feature (95)..(95): n is a, c, g, or t
gaaaaagaaaattacctgctggcacagttttagattgatagctttagattgaaactttcacatttttattttgaagattacagaggataaaagtnctggttaattgtgaatgttgatattttaaaataaagctgttaaaatcctcatttaaacctgcagtgaagtctaaatatacaccatttgatttgatttccctcatcttttg

SEQ ID NO: 627511 - DNA, 142 bp, Homo sapiens
acgactttctgcattattaatgtctcctctcccacctagcaaataacgaggggtccattgcaagatgtatgaactcagaatatggtaggccagagggatagaacaatgtgaaacacacacacacacacacacacacacacac

SEQ ID NO: 627512 - DNA, 155 bp, Homo sapiens
cattgcttgagctccattgaatgcaaagtctgttcaataagacttggattgagaatgaacaaacattgagagcagatcagatgttaccttcagaatcaaaacaaaagaggttgaagaaattcttggattcttagagtctacgttagactttttca

SEQ ID NO: 627513 - DNA, 507 bp, Homo sapiens
cccatgtacagttgaacagagtgatgatgatatgggggatcaccagcctttggcaaatgcacacgatgtgctagcccgctcccgcagtcgagccaacgtgctgaacaaggtagaatatgcacagcagcgctggaagcttcaagtccaagagcagcgaaagtctgtcttggaccggcatgtggtcctcagctaatggggaatggaatccaaggtgactagaaagaaacaggcagacaatgggaaagagcggacggggttgggcggggtttcatttaaatacctggtggattccaccaagggtggcgggaagattcaaaacgggaagcaaaaactggcttgatttttttttctggtaaccgtaataatagagacatttttaaaagcacacagctcaaagtcagccaataagtcttttcctataggtgacttttactattaaaattaattcggcctgtaaataatctggaagtcctttaccgggaacaagcactctcttttacaccacat

SEQ ID NO: 627514 - DNA, 1414 bp, Homo sapiens
  misc_feature (532)..(532): n is a, c, g, or t
  misc_feature (1102)..(1102): n is a, c, g, or t
  misc_feature (1107)..(1107): n is a, c, g, or t
aggtggataccccccctcgctcctctagatgtgttttcgcctcccgttggtggtggaacctcctgcccatttcctgccacacacgcgcgccgtgtggtttgttgttggacccccgcgtcccccgccggttatgagggtgacggacagccccctcctcccgggggggcggcgcgccccggagatgttgctcctcccttgggcctgcctctccttctcggcagaccttttcttttataggcccccctttatgggggccgcccccccccggcggggggcccctcggggtaggtgaccaacacagaaggtgtgtttccacacccaccagcacggggggggaaactccaccgcgcctaattgtgggagccccccccctttttattggcggcccccttaataatttataatgggggtggacacccccccgtatttagtgggagaacacccaaacggtgttggtggagacacccaacaaaatatgcaccaccggggccttggtgttataccccgggggtttccccgcggagattttttnccccccgggcgggagatattatctcgtctttcgaagaccccacaacacagggcgggtttctccgccccccatcacgcgcgctttccccgctttaaaaagtggagggcgcacacatttgatcacctcgtgggagattgtgttgaaaaaatggagattggacacttctctcagagaacggcgagggttgtcactcacacactcatagggggtgggactcttgtgggtggccctctgctctttggataaatttctctaaaggtgtgacacacccgcacccctctcgttgggattttgagagataaatatgcccccactaaccacttttatatttggccccgctgtgtgtgaggcgctttctctggagatctcccacgcgtacactttatctccccctcgaggagaccttctaaaaataagagataggggttgtctctaaatatgcacacactctaacttgagaagatagttctccgccacacaccacataaaggcccacatatctcagagactttgttccctctctctccacagtgtggccctgcgggtatatatatgagggtgtggagatanaaatngagaagcacatgcaccacagctacacacggcgttttctatacttaaactcttctgggttttgctatattaccacaatcctcatatttatacttttcaatagaccctctgttccctctagtgcctcttcataatatttcttctcgcctctctatattctttctataactgcagatatttttctcaccctctattgtgaccacacagaaatttgcgatagtataatattttcacagtaatattgattttggaaattcttgtccaccttatgtagtgagtttttcccaaaaataaattttttttccaata

SEQ ID NO: 627515 - DNA, 800 bp, Homo sapiens
  misc_feature (244)..(244): n is a, c, g, or t
  misc_feature (622)..(622): n is a, c, g, or t
  misc_feature (707)..(707): n is a, c, g, or t
  misc_feature (739)..(739): n is a, c, g, or t
  misc_feature (789)..(789): n is a, c, g, or t
aggctggtatcctataacaagtccagggacccctaaaagccgctttagcacgcttgcagacgactatcaaaaagcacaccctcttagagttgggatagataacgctatgtcatgcctttctgctgtcacacaagcacactaagagacaccaagatcagtgcacgttgaccaaacaatggcgatcgagcagagggagcaaccacaacgccgtttaggaggtggggtgcaacgattgtagccctangtctgtccttcatatagctcatccctacaaagttaactttcttaccgtaaaccactcacaggtcacgacaacaagagggattcaatacctcaagataccgcaagacgcacatgcggggttaacttctaagtaagcagactctctcacggtgagtaatgcctggtagagagagacttaaccaaccgaactgtacatatacggaaagagctcaaccccaaaaaataagctgagcgactggtaacaaacaataaactgggaattggggggcgcccggccggctctaccagtcaattatcgctttttcgaatttttgacgttttaaccatttggcctatttgccaaaaaagccttatagaaattaagtcaataaagttgacngtccttaaggcttaattccggtaaaacaaagggtacctataaaaagacacttactttgattccatttggggaaaaaaagagagtnttaaaaccttgctcccttcttttaaggagggntcttttgtgggatagaaaaatttaccattatttctcccacatttcccccnaatttttaaaa

SEQ ID NO: 627516 - DNA, 1359 bp, Homo sapiens
  misc_feature (848)..(848): n is a, c, g, or t
agcggggggcacgggggtgccaggggaggaggaggcggtgggcacgcttgggcgtgaaactattcctctccccccataagagcggagcgagcacggtgagcgtccttgaccagcctggaacagtaggttcaatcctagcaagagacgctgacgatgaagtagtagatcggctaagacaaacctctcgatgatcgcgcgaaaccatggcgactcaatccatcttcgttgacgcctatcttcgtgcggccatagcgcggcaaccggcacgcgcctgatcagtgcctgcgtgcgcgcgactcgctcaatggctgctagaggcggcagctgccttgtcagagcgcagcccgaagatccctgacccaacagagtacgacagctaccgagcgccggagcgatgatcccagctaggcgcgcggcccgcaggggcctggggacgagctctggcagacaagccctagacggtcgcccgcgagcccgggggaccgaaggcgggccccgacccccctggagcactgctattccttgcccgacagctcgtgcacagggccctcatccaacacgatgagatcgttacattttgcatgctccagtatggggcggctcccagggggtagcctccctgggagccattccgggttaggctgaccaccccataggtgccacgctcgcccttcgggcgctcggctcctcccttgaacatccggacgacaacatgaaactgtgtggaccgcgtcacgcaggaatggggccatcggttccccttccggccagtccttatgttagtcacgcagaaagaattctcctgggtacccaactcagaatgatcatcggagctgcacatacctgcncagacgcaacgtccatggcagaggagttttcagaaatcccccttgggcagcctccattgtctcttggctaacccgagagagacttcaataacagcaattgggcgagctctgcccaggtgccataactcctgtggaccacaccaaaagccttagaaacccttggggtcacacaagttccaactcccaggggcgccaaggaaaaggcaccacccgtgctggaccaaactcaggagaacagccactgcgctagcggggcgatagagacgtgcttgcccacggccaacctgcctcgaggggtgccctttacaccagcccgtaatcttgacgatgacccccctcgccgagaagagcttttagcgggaaccaatgcccaacgggaactgccgcccagccaccgacgaggcgcctgcaagatacgcgcacccgtcccacaagaggcacacaggcgcaaccccaggaccacgtggactccacccaacaaacgcagacacatcccaccaaacagacaacc

SEQ ID NO: 627517 - DNA, 1234 bp, Homo sapiens
caagacctcgctaacctcgccttaccccccactattaatcctactgggagaactctctgtgctagttaacaactacgttctccgtgatcaacaatatcactctcctacttacaggactcaacatacgtagctctacagccacatatacttccactctactatattctagctactaacactaactggggctcgactcaacccacccacaattcacatccataaaacgcctcattcactacgaagaaaactaccctcaatagtacattacacctaattcgcctcatattctcctcgctaatcccgtcaatgcacgacatgcgaattacctggggttggttctcgtctcgaatatacaatctatgccaccatgaccacaatcataaaaagcatgacttcggtgcagggacaggactgccgcagacaacacaatctttatccacgacgcatcccggagagtgggccacgcaggtggcaaaatactggagtgccacttgcactcttgtggttgccaatagcggtgggcacgcgtactggaagtggacccccgagtgggtacaaagacacaatgcactgggaaaaggcaagcaattctcaccctctcacaatcaataatagccacccctgcgggaagaagaatgaccagaaaaggaaattttcactcgataactcgcaggcgcgacacagattcggcacagcgcaagaactcacgaggcaccccaccacagcacgtcgggggcaccacacgataccctagggccacgagggaagcgtggccacacaagagccggacgaactcggatcggttcacacaaacggcaagaaatttacaatcggcacaccacatcaggggtgacgtgaactcacaaagcaacccccaacattcgggcccaagcgaaacggaaccacaaacaggccccaagcaacacagccaggggacatctagaacacggggacacactggcaaaggccattcaccgctgcgcacacaatccagcgagacccgagcaggcggacgaaccactactacaaacaccaccagggcgacagcaaagccaacagatccaacaaaagtgcgcagcgaacgacacgacaaacaagacgaggtgacaacaccgaatcagcacaacggagcacaaagacggcagcggaacacaggccccagcggagcgcacaaaaacaatgcaacacaaacagcaacgtacggaaagaaacaacatgtgcggccaaaccaaag

SEQ ID NO: 627518 - DNA, 216 bp, Homo sapiens
ttgggctgggtgggaagaggggtggccgcctccggttccgctggccatgctcctggtctctccgtcgtgaggtcacaggcaggggctgccctggacggggccccccaaaaaacgcctggaagggggcacagaggtggagggtggggcaggctgcacattcagcttagaagtggacctggctttggtggcaggagaagaataaacacttgcccagaa

SEQ ID NO: 627519 - DNA, 128 bp, Homo sapiens
tgcgatgagtattcttctgatctgtcggatgcaggtaatgtgtgcgcagaagactgtgtgggtaaggtcttgggatgtcagtacacttatgatgagtgaggtagttcgtgatgcaagatcatgctaga

SEQ ID NO: 627520 - DNA, 145 bp, Homo sapiens
caactccgagtctaccaattttcactctattatatgtcaaagcttggttagaatgtgaactcctatatagaagtcattcgctcaccaaacgaatatatagacttatataacctaattcctaaataaccaataacagataactgaa

SEQ ID NO: 627521 - DNA, 242 bp, Homo sapiens
ggtgactctaccggatcttcccacgaccatcaggacagacttggccgatagcgcgggcgctgggaactccactcggggtaactcctttccaagctgacctcagttttctcacaagaacccagcagctgatgttatattgtaattgtcttaattgctaagaacaagtaataagtaaatttttaaacagccatttaggtaacagccatttaggcaacagccatttaggtaacagccatatagga

SEQ ID NO: 627522 - DNA, 707 bp, Homo sapiens
  misc_feature (399)..(399): n is a, c, g, or t
  misc_feature (401)..(401): n is a, c, g, or t
  misc_feature (407)..(407): n is a, c, g, or t
  misc_feature (506)..(506): n is a, c, g, or t
tttttttttgggtaatttttttatttgggatagtgcttttttggttttggtttttggttctgctttaaggcctttttggctttgatttgaaataagttctttgacagagcatatggctgggttaatttaagttaaccttaaagttattgcatttaggattgtggtgaaatgtgtcttcgtgtgagttattgccaattcctgtgagggtgtggaaccaaattagcctttgtgattgaaaagggcaggtggatttcgtggaggctcatacttctcagggtgcgtgcatataatgtgcccttcaattcttcaatctcgaggacacttacacttgtggtgttgaggaaacactgtgcgagtgtggcgaacagacacattgtggccttctctgtgctctcgagngnctttanagagagggggtctcccactgtgaactctgtgcctcccttttagaaaacatttcaggagagttaacacctttgaggcaaaaacccttcaaagcttaaaanaccccattttttaagtgtgcgcatgtgagatgtttggtgcatgtgaactctttgtggatctaaagaattctcctctccagtggtacctttggtgcccctacggttttctcaaggggtattggggcgggtccatattagattgcccggtgcttgtgtccccagcttagcctcgtggttccccagcctttggggggggtctta

SEQ ID NO: 627523 - DNA, 257 bp, Homo sapiens
gtgctggggttggcattgcccgtcaacgaccggactttgtcatgctcagttcctggtatgactacgagatttggctacagcgtgtgggtggtggtgctcctggtccacttggcctcctaggagtcagagccctggagcaccagcccgagcaagagcagaagaggaagagcagagacccgtcactgctggggagtccctgtcagactcagtcccccatgagtctgaatttctcctcctcacagtttgcatgtctagcc

SEQ ID NO: 627524 - DNA, 246 bp, Homo sapiens
gtacatgtgtccacggaccactagaactctaccaagcacaccatgatctcgaaataggtcggtcaatcaatcggtctatcaactgaaacttcgcctcctatcaccttttctatcaagtggctttatcgaatcttcgttcacgaggtgatcgccttactaggtcaactatcaattattatcacttcaccctgaagttgtttgatcaggtacttactaccaactcgtcttattccttactattattaa

SEQ ID NO: 627525 - DNA, 367 bp, Homo sapiens
cggtctcggaactaggaatgaccccgccgtgccatgccatggaatgcaactggaatggaatagaatggaacagaatggaatcgaatccattcgagtggaatggaatggaggggaatggaatggaatcgaccgccgtgtactagaaaggaatggaatggaatggaatggaatggaatgcaatggaatggcatggcgttgaatcaaactgagtggaatgtaatgtaatcgaatgtaatggagtgcaatggaatggattagaatggaattgaatcaatcccagtgacatggagaggaatggaatgaattcgaatggaatggaatggaatggaatggaatggaaacaacacgaatggaatggaacggaatg

SEQ ID NO: 627526 - DNA, 239 bp, Homo sapiens
tatatttctctttatcttttgcctgtatatgaccttgccaaaatattatttcacaccccaggagttatatagtttttgctttaaagacaacagaagctgcaaatagaagaatgggaggagagtattcattttgcaaaagaatttcctcggatttgttttttaatgttgcttcattgctttgggaaatctgtgtcacttttcgtaaaaagtttttttctgcatagaaaacttaaaaaaaa

SEQ ID NO: 627527 - DNA, 334 bp, Homo sapiens
  misc_feature (126)..(126): n is a, c, g, or t
tgacagcctgagccatcaagctgtttgagttgcttcaaactgatagcacatataaactgggcagcgcataacacttgagattaaatcgcattcctagtattcataggcacagactagatccagttnaagcagctctctgtatggatttgtagcttcccgacagaaatatggttaaatatactttgtagttattgcaggttgtgagctgcacactgaagaaagatacagctgaaaaaggacggctcctctaaccatgtaaacaactatcaaccctgtgatcatccacgacagccttattacaatatcgtgccctcttgtgtaataccacaaaatt

SEQ ID NO: 627528 - DNA, 531 bp, Homo sapiens
tgacgactatacacagtgagccttataaactaccacctcgttgtagaattagtactcaaagtgactgtgcaatctagcatttagcctgataattcagtttggtgaaaactatagagtgaacttcaattctgaattttatcttgtcagtcgaaggtactatttgcgtagcctgcacagattaaatggccataacatcgtgcttttagccatggtgccttttcatcttttcatttccattctgcaattggatgtgcaaggggttttacagcatgtgttggcacaactggcagagtgttgtaaactcaattcgaagctgacaactaacacagtcactgcacttcaacgattttgatatttgcagaaaggcacagcacctttttgtagtcactgtttggaatgtaagggtcatctcctgcactttacaacactctttgtcagctttgggaagcatctctggtaggcatggttctggctaggccttttcaacagcactaaagctggacataggtggttctccggccggagaaatct

SEQ ID NO: 627529 - DNA, 342 bp, Homo sapiens
ggggaaaaaaaaaaaaaaggggttccctgcccagcccaagtttgcagatcatttttgaggagccctgttttggggcccccggtctttttgaaaaccccaacaaaaatgaaaccccccgggatttcttgttttttcccatttgagtttcccttccaaaaaacttgtttttcagcaaaaatggggccctagtaaggacatttttagcctttttttagccctccttttttgggggccaaaaaaaatcgttccaaagcttaggtttaagcgggatatgaaaaatttatgcgcctccccaactttaaaggaggggcccctttgttcccaaattaaatgggtttgata

SEQ ID NO: 627530 - DNA, 257 bp, Homo sapiens
agccggacgtattaggtgagctaaaagtgtcattgtaaaaatagtcttttttcagagacaggtcttgctcctgttgcccaggctagaagttcaatagcacaatcacagctcactgtggcgctcaacctcccaggttcaagggatcctcctgcctctacctccagagtagctaggactataggcacacgccaccatgcctggctaatttaaaattttttgtacaaacagggtctcaccacgttgcccaggctggtctc

SEQ ID NO: 627531 - DNA, 1001 bp, Homo sapiens
gtctctccttttgtttctttcgtttgttggtatattctgttgttgtgccctttgttggttctggacattcgggccgcttttttggttttctcggcttctcgtacgtgtgtattccgttctatttcgttcctgttgggggttttcgtgatcctcctttggttgtcaggccttcctattaggttggttgtcacgctcggggcctcgggttttcccggctagggtctatgctgacttcctgcaagttggcagtctacatggtcccctttcccacgtctccattttctttatgcctggctttgcccgtctcgccatgccgtggaagtccagcagtatcgagcgtctcacagtgccggaactcactccagcaggtcttcgatgcctagtacatgatggctgcctgtgaccccctgccatcggccgattcctcaccgtggctgctgtcttccgtggtcggatgtccatgaaggtaggtcgatgagcagatgcttaacgtgcagtactagtactagcagtctacggttgtgagaaatggatccccgacaatgtcaagtcagccgtctgtgacatcccacctcgtggcctcaagatggcagtcaccttcattggcaatagcacagccatccaggagctcttcaaagcgcatctcggagcagttcactgccatgttccgccggaaggccttcctccactggtacacaggcgagggcatggacgagatggagttcaccgaggctgagtagctaacatgaacgacctcgtctctgagtatctagcagtaccaggtatgccaccgcagatagaggaggaggatttcggtgaggaggccgaagaggaaggcactaaaggacagagccacccatcaaccatcaggcttactcagttcccttagaccgtcattaactacaaacatgcgcaccactgacgctcgtccactcaagaagaagtagtaagacgacctaatatgacttgtttgtagccgttaacttcaggggggggggtcc

SEQ ID NO: 627532 - DNA, 161 bp, Homo sapiens
gggacaggtatagccttacggttagcgctcgtgctaggcttctatggcttgttgggtgatcaggaaaaacttgaagatcgagctgagtggaatgtgtgctaaaagaagcgcttttagaaattcataagttgcacgtggctcacgtcgcgtaagccctgaat

SEQ ID NO: 627533 - DNA, 423 bp, Homo sapiens
taagaggggagtaaagtcggagtccgagataactgataaggtctacgtaaacactcacaaggtcgcacagagtggacaaggacacaaagaggagcatccgtgggatcgactacacatgacccttccattaatcactctgctgtatacaggacctgggcgtgctgacaccctcagcagtcagcgatgagctcatcaagctctatctgtaacctgtgagccctcccctgccaaggtgcagcttacgtagttgaggcagggtgagtagctgcttgacaccccagtgagtcaggccaaaactgagatgtgtcaaatgaagatttatggagtaaggacttaaaatcatacatcttggaagaacctttcttactccatttcagtcccatctaaaaatgtgtcagctattctaaatcccaacttaaattg

SEQ ID NO: 627534 - DNA, 255 bp, Homo sapiens
cttttggggtctttgctcttttttggcctccccatgttgtccaggctggcctgaaacccctgggctcaagtgagactcttgccttggcctctcaagtgctggggatacaggcatgagccattgtgcctggccccttttctctttttttttttttgagagccaagggctcactagtgggcccagaatgtttttgactttgggggctaaagcatttttcctgcctcagcctccaaaacggtggggattacagacatg

SEQ ID NO: 627535 - DNA, 335 bp, Homo sapiens
aggctgctgaggtggataagaggctggcagtccgagagctagcatccgccactctcactcatgtgcaaggctgcagcgctgaggacggtatgggtctgcaacatggccttgagcgcctctatgagatgatcctcaagaggaagaaggcagctcggggaggcatgaaaagactgtgaccggagcccccactacctttcctcccacctagataagggtatgcacacttggacagccgggtgggaccagtctgtgacctctcagtcagactggggtgcaggacctgttcacctcaatgaaggagaaaggagcatggagtgtccagttttggagacaca

SEQ ID NO: 627536 - DNA, 349 bp, Homo sapiens
ttcaaaacaaatgaataataaagacatgagaaaaggtttccttttaaaaagtcgtggttctcgccaggcgcagtggctcatgcctgtaatcccagcaccttaggaggccaaggcaggcggatcatgaggtcaagagatagagaccatcctggccaacatggtgaaaccctgtctctactaaaaatgcaagaattagctgggcatggtggcgcatgcctgtagttccagctactcgggaggctgaggcaggatttaaatactgtatgaacccaggagtcgagtgtgcatgagccgagattgcaccactgtactgcagcctgacaacagagtgagactctgtcaaaaaaaa

SEQ ID NO: 627537 - DNA, 408 bp, Homo sapiens
ggacgcgtgggttacagaccagcctgccctgcctaacccctgctcgcctgtaaacatgccagccaggtgggggtgtttacagaccagcctgccctgcctaacccctgctcgccatgcctcagtggccaccagcccccagactggacccaccccactgccctgggggagaccccgaaccgttaatccctggatgctgttccccccagagacactccccctagaggctcgcaggcggttagtccccctcccaccgtcagcgaatcacccacaggaccgagacggcctcgtgcaagcccaaggccaagccagtcgcaacattgtgctaccaggtcaccctagatgtgcagacgacgaagacggttgctagtgcaatacgcgactctagcgcccagtagagacgcaaaactg

SEQ ID NO: 627538 - DNA, 292 bp, Homo sapiens
aaggacccaaagagcaagaaggagaagaagaaatccggagaagagaaaagaaagacaaagaagaaaaagaaaggaaggagaaagcaaaaaaggcctcgagaccaaagatgctgagtcaccggcccagaagaaacagaagaaaaagaagacgacagcagagcagacggtatgacgagcaccagcaccaggcacagggatttcgtagccgagcagtgggcatccccatgcctttgacctccaccgagctctggccaccaggggtaggaactaaactgttaccttccctcgctcc

SEQ ID NO: 627539 - DNA, 151 bp, Homo sapiens
tccagtacccgagcatgcttgcctgcctgccggacgacgtgtattcaccactgccctgcatgcctccctgagcaagattcttacgctcgtgagagcagagctgacctccaaatatcggtaagctggaacctggtagacgcgtatacaccac

SEQ ID NO: 627540 - DNA, 393 bp, Homo sapiens
ggtagatggcaaatggaaacctactctggaagcaacattcattctaattcttttcctgaaaaaaaaaaaaaaaaaccaccaaaaaaatgttggcctttgaaagtttttaacacttaattcttctcccagaaagttggacgtttgaaattccattagtgttggggtttccccaccaaacaccacagggagttgagaagggcctaggaaagggaagaaactcccagccaagcaggggcacaagggaagagcatttgggccaggcgagtgactttccctcattggttggccgtgatatatagaagaacactctatctggggaggagaacctccgggaggtttaaacattaccaacaaaaataaaaaaaaacaaacaaacaacaaaaaccaaccttt

SEQ ID NO: 627541 - DNA, 877 bp, Homo sapiens
catgttataaatcgtcccttacagatttcagatatggtgttggaagattgccgggaagttgatcgcattttggaacgatggcatagattttgatgaatcttggttgcagcctatattatgataataggtttcaaatattgatatcatcgatttcagtactcaaagtccaaagtggagtgatagtacatatttggttctcaatgaggatgtcggacacggatctggaaaatatacatgattattatatctggcgtgactgtacccatgaaatatggaaatgaacattcgacgcaataaactggttaagtgtgtgtggaaaatgcatttggaagcattatgacgaaagtagcagagaatccaatgttatttgacatcagttttatgaaagagcgaacacggatttagatttccgtgatcgtgatgttcacagaatgaaattgtaagaaattttaccgggtctgggtcacaaagggtgtggagtggtatttagtttggatgagtgttaaatggctggctataagcagagcttgtgatagatgagatccgggtaattgagacccaaatacgcgtaacggtgacctcaattctcggaggctgtaccatgattcatcaccaggcaggtgtgcagattgcacgaacatttgtccggcagctttccggccgaccatggacccaatacaagaacggagccccggagatacaggttcatggtggactgaaatctattcttagagttttgccggacgtggagtactaagggttgccttattccaaaagtgattccttaaaataccttcagtgtaaactgttgtggacacactttagagttccctggggaaatccaagaatggatgttttgcacaaacgtcgcaattag

SEQ ID NO: 627542 - DNA, 550 bp, Homo sapiens
ggaaggcctggccatgacggtctggaacctaggcgagaccacaatcgtgctatacgctgacgccaacgatccgtacagtagagctggctagctctacagtaccgtggacatactccaacaggtacgacagcaccttcacactctgctcattctgtaccaagcccttgccgaccaagtttctcctgctgacttcctcgacagacttttttttgtagacagcctgtaagacttaactagcccagtgaaagcagccttggatatgcttaagactaatgacgacagtactgttgcatacatgtactagagaccaagcaggacaatcctgatatagccgaagtgctactagatgacctagcgaatgaactccatatgatgttgagacagtagctaacattgaccaatggcctcatactattatgagtcaggcacggctgtacagtccaatttgttatgaccaacagagcgagtgttaacaaacgtactcccaggctatcggtgaataccccccagttagcttatttacaacatttgtttgggatgttcccgggtt

SEQ ID NO: 627543 - DNA, 126 bp, Homo sapiens
atggccctggcgctgtatggccagcctcaacgctgtcccgcagcagacgcgcttcggcgtgttccgcgatgtaaccctgtgccatgacctgagcctgttgccatgttcaccaaagtcctgatcggt

SEQ ID NO: 627544 - DNA, 176 bp, Homo sapiens
gaatctcgacgaggttggtgcactacacacccagctaagtgttttgatttcgtggtggagatgaggtctcagtaggttcccaggctagtgtggaactcctgagctcaagaaatcctccggcctgagtctctgaaggtgctgggattacaggcgtgagccaccacacgtggcctatg

SEQ ID NO: 627545 - DNA, 248 bp, Homo sapiens
  misc_feature (25)..(25): n is a, c, g, or t
acggggctacagagctgtcccccgncccccagctgggcgactacgcggacagtggtgtggcctctctctctcctgatatgctaggttgtcgctcctgagggtgccacggggctgacaggctgtcccccgcccccagctgggcgactacgcggacagtgatgtggcctctctctcctgatatgctaggttgttgctcctgagggtgccacaggggctgccaggctgtcccccagcccccaggctgggcg

SEQ ID NO: 627546 - DNA, 362 bp, Homo sapiens
  misc_feature (13)..(13): n is a, c, g, or t
  misc_feature (24)..(24): n is a, c, g, or t
  misc_feature (28)..(28): n is a, c, g, or t
  misc_feature (48)..(50): n is a, c, g, or t
  misc_feature (70)..(70): n is a, c, g, or t
  misc_feature (79)..(79): n is a, c, g, or t
  misc_feature (83)..(83): n is a, c, g, or t
  misc_feature (85)..(85): n is a, c, g, or t
  misc_feature (90)..(90): n is a, c, g, or t
  misc_feature (96)..(96): n is a, c, g, or t
  misc_feature (101)..(102): n is a, c, g, or t
  misc_feature (135)..(135): n is a, c, g, or t
  misc_feature (145)..(145): n is a, c, g, or t
  misc_feature (161)..(161): n is a, c, g, or t
  misc_feature (178)..(178): n is a, c, g, or t
  misc_feature (180)..(181): n is a, c, g, or t
  misc_feature (235)..(236): n is a, c, g, or t
  misc_feature (259)..(259): n is a, c, g, or t
ttgtgggaatggnaaaggaagganacanccaaactctgacaaaggctnnnccttatagaataacccaaancctaggtgngggntnatatntaatgncccannaaaaaatatatgtggtttgggggaaaggacaanaaaaaactanaattccacatataagnaggtagttgcccatttncnntttccagttatgtgtgtaaaacagaaaaattaagtaccaaacctattaggaaanntttttaaaaagtggatttaactnaaattactgtgtacttgaggttggctttggatatggattttctaaaaagtgatgttttattgtttatcatctaatggctgtaaactgtagtactagaattaaa

SEQ ID NO: 627547 - DNA, 236 bp, Homo sapiens
aaaaaacgtaaatagaatgttagctgtggattctattaaagacaactttttcttcagtgtcttgtcttctctaattatttggtgacttttactcatgtaagtttttgcagatgggggaaaagagtgaagatgtgaaataaaacactgtccaaaaaatcttagtattcagaaagaccagaaagtacagggactcctttcccctgtatttcttggttgtttcttcccccaagctgtca

SEQ ID NO: 627548 - DNA, 323 bp, Homo sapiens
  misc_feature (23)..(23): n is a, c, g, or t
  misc_feature (136)..(136): n is a, c, g, or t
ggcacgagcgccccagtggatgnagccccactggcacacgccctgggaagcagagcccagcaggatttcagcctctcagccagacccccttgtgcagtgcacgacctgcccaaccctacatggtagccctcaatgnatgaaggaatctgcagtgctgcatgcatgtgccacttctggaagggatgtgtctctgtgtgggggaaaaaggcatccatgctgtacaggtcacagtgctcagagacctgagttcaaagcccagccccactctttgggcaccttgggtctcaggcaaatgatgtgacctctcggaaccccagcgtcct

SEQ ID NO: 627549 - DNA, 310 bp, Homo sapiens
agttcgcacatacatcgtgttatatcatagcagtagatataagcaagaaatcccactcatcgaccccgggtaaaacgtaatggtaagcatgcacagatagcagtctacagttggttgctgtagcacaaaataggtgtacctttataagtacattcaattttctgatctacatttatcatgtaatttatacaaaaaatccatctatctcggatatgttgatccaacgtctgctttcgctattattattgcttaaatactcctatcatttactgaattacttggtatttagaactcctagcaccacacgacg

SEQ ID NO: 627550 - DNA, 257 bp, Homo sapiens
  misc_feature (13)..(13): n is a, c, g, or t
tactctagagcanccccaaaaataaaacccgcgcctcgaaaggcgcgggcaggtcgagcttagcctgggttgcgtatttcgccagacgggcatcgcttttcagtacagcaatggtgttgttgtgcacgtcgtcagcggtcacgtcagccttgctgaagatctgctggaagtgctcgtgggtcacggccgcgaagtgatcgcgatcttccggcgcaacacccagtaccaccgcgtaggtggtcagcgcttcgccgttg

SEQ ID NO: 627551 - DNA, 119 bp, Homo sapiens
gagcccgtccctgagatgtctggtaactgattgctgacaacagattctctggctcatatttcttttctttctcatcttgatgatgatcgtcatcatcaagaatttaatgattagaatag

SEQ ID NO: 627552 - DNA, 140 bp, Homo sapiens
caaccatcacttctcgaagtggagccgagttacatcatcaagaatgtcaaggctaagttccaagataacgaaggtatcctcctgatcagcagaggttgatctttgctgggatatagctggaagattgacgcactcttatg

SEQ ID NO: 627553 - DNA, 845 bp, Homo sapiens
gccaaaggtaagttgctattttcatcagagttgcctatgcccagggaataagatgtattctttataattgaattggtttttcccacgtctaactggaaacaaaacagaaggggcgtcataaatttgaataagcagaacatactgttctcaacatactgtaatcaaaaggaggaatttcagtgggtctctgtgtgtttatgagagagagagtgtgtgttagtagtgtcatcaaggtcagaacaggtttcattagttatcagtatcatactagttctctgttaatatactttatgaaatggagtcttgctctatgtcagcccaggctggagtgcacgtggcggcaatctcagctcactgcaacctccgctcccaggttcaagcagtatctcctgcctcagcctcctgagtagctggcgatgacaggcacccgcacaccaaacccagctaatttttcgtacttattagacagacgaccgaggtttcgccatgttggccagagactggtctcgaaactcctgacctcaggtgatcaacccgcactcggcttccaaagctgctggcaataacagcgcgtagagccaccgagctggccagaataaggtataagctttacacacttgattcaagtagaataatggcaaccaagtttgaacagataaatacttggacagactaatcgccaatgaatgctcagagagtctggccaatatccaaccactgtgtactaagacgcaattaaacaagatcactctaccggaaagaaacatacatcgacttaaaaccacactcacaaacaccagcacaacaacgtgccaaaacaaccaagcaacgaacgaaatgaacac

SEQ ID NO: 627554 - DNA, 107 bp, Homo sapiens
aatgatctacctaccttggcctccaaaatgctggaatacaagcgtaggaccgcgctctgccctgaattcaatgtttaatacctcactttagttattagattgcaagg

SEQ ID NO: 627555 - DNA, 929 bp, Homo sapiens
tttttcccttcacagtggcgaacacacttcatatctaaatcaccttcctgaggttgtagatgccgtgatttgatcttgtctttggaaatggccaacaagaaggagatgctaaaaattaagcacagaacagctctatcgaagaatattgcttgcacaccctagaggacactcatacccctggaggctcgaattatcagccttgtcctgtcgagcatccgcagtcctcgaagaacacttcgtacaaccatcgctaaggacaaagacccacccaccgctctctgcttattgaccgtctgcctcatagtgaataacttgcttaacatctcttccctatctatctgcttactgctggtcctgcccccacgcattcgatcgccggctctccaacccgagccactccccctctaccccctgatttatcctaaatcagctcccccgtctttccaaccctcccaccagatgccttcgtccacgttcgcgaccacacagcaacacgtctaatagccccatacaatcgcctctattacgccctaccgtctctctctcctaccttctactctttcactcctcacggcctcgctctttcccctccttgtgatcctcccccccacctctccctctaacaccactcatctcaccctcgatccctcctcctccgcaccacccaaacgtcgtaccattccagcccacgtccacacgtcccctcccaccaagcacgtgctagcacccaacacaagtccctgagcagttacttaacaccgcgcccttccgaacgtctacgatctgcacatgccacactcacgcacgcgttcgttgcttcgctctgtctaacgccgagccgtaaccaccccagccgctcacaccctccgcttccgtttcgcacagctcctttccgtgtcgacccctcccgactatctacccacacgtcc

SEQ ID NO: 627556 - DNA, 961 bp, Homo sapiens
ttcaggcgcggcgccaagtgggtcgccgtgatggtgcgctgaacaaacgcgggacaaccaaactgtggtgtcctaacacagcggggggtaaataccggctctaccgaagaagggggcgcaacataacacagggggaaaaaaactgtgttaattggcccaatcagggaaatcttgggaacctccgccccagatgtcgcgcccccaaaaggggggaaaccccccccttgggaaggcgcgctccgcgctccccgttgtggccaccgacaaatccgggaaaccaatttcgtgaccgcgtccgcctcttcttttcaattatttggactcgctgtcttgtccttcttgatcacaacaatggctgtcccccgcgtggtgtttcccccctggatccgtgccccaaggtgtcgcacaccccatgggggtggttcccaccgagccatctggagtcggagccgtcgtcccccaattgtctcccccggatattgcccctttggcgcgccgcatgcaatttcctcctccgcctgttgaggggggttctccaccctcatcttggccacgaagggccccgcggttctcctccctccggggcgcatgcccccgcacaagcagcctttctgcgaacacagtggccccagatgagccgcggtcgcatcatcacactccgttactcctccacaacttttcattctcccccacgaagcttatttgacaaattattcttctggtcattcctcactacttccttagagtaattgtgtacatcacaatttccataatctcacccccagtgggctcttactgacttgtcatattcccacacccccccattatttctctgctttatcatcacctctccccctttaacgaagaaaagatccccccccccaatattagcatgaaccggcgcgacgagaaccacccaaaaattcgccaaaatttaaaaacacccacgcaaacaataaca

SEQ ID NO: 627557 - DNA, 297 bp, Homo sapiens
  misc_feature (54)..(54): n is a, c, g, or t
  misc_feature (130)..(130): n is a, c, g, or t
  misc_feature (188)..(188): n is a, c, g, or t
  misc_feature (191)..(191): n is a, c, g, or t
  misc_feature (228)..(228): n is a, c, g, or t
  misc_feature (263)..(263): n is a, c, g, or t
  misc_feature (265)..(265): n is a, c, g, or t
  misc_feature (276)..(276): n is a, c, g, or t
gactaataagaagacgaccttctttggtgggaattctatctctatgattgattncctcatctggccctggtttgaacggctgcaagcaatgaagttaaatgagtgtgtagaccacactccaaaactgaanctgtggatggcagccatgaagggagatcccccagtctcagccctgcttactagtgagnaanactggcaaggtttcctagagctctacttacagaacancctgaggcctgtgactatgggctctgaaaggggcngnagtcagcaatnaagctatgtctgatattttcc

SEQ ID NO: 627558 - DNA, 601 bp, Homo sapiens
  misc_feature (3)..(3): n is a, c, g, or t
  misc_feature (67)..(67): n is a, c, g, or t
  misc_feature (81)..(81): n is a, c, g, or t
  misc_feature (86)..(86): n is a, c, g, or t
  misc_feature (93)..(94): n is a, c, g, or t
  misc_feature (103)..(103): n is a, c, g, or t
  misc_feature (108)..(109): n is a, c, g, or t
  misc_feature (119)..(119): n is a, c, g, or t
  misc_feature (125)..(126): n is a, c, g, or t
  misc_feature (132)..(132): n is a, c, g, or t
  misc_feature (134)..(134): n is a, c, g, or t
  misc_feature (137)..(137): n is a, c, g, or t
  misc_feature (139)..(139): n is a, c, g, or t
  misc_feature (148)..(148): n is a, c, g, or t
  misc_feature (165)..(166): n is a, c, g, or t
  misc_feature (171)..(171): n is a, c, g, or t
  misc_feature (174)..(174): n is a, c, g, or t
  misc_feature (198)..(199): n is a, c, g, or t
  misc_feature (228)..(228): n is a, c, g, or t
  misc_feature (287)..(287): n is a, c, g, or t
  misc_feature (302)..(302): n is a, c, g, or t
  misc_feature (376)..(377): n is a, c, g, or t
  misc_feature (430)..(430): n is a, c, g, or t
  misc_feature (466)..(467): n is a, c, g, or t
  misc_feature (487)..(488): n is a, c, g, or t
  misc_feature (493)..(493): n is a, c, g, or t
  misc_feature (497)..(497): n is a, c, g, or t
  misc_feature (596)..(596): n is a, c, g, or t
tancggggtgctgtccttcctggtctcggccttcttcttggtggtcgacgcgtatttcccccagaanagcaaacgccaatnaccgnataatanntggtcattngtaanntgcacaacanaaaacnnagaaantnacnantggtttgtnggtttctgcttcctcannaatcnaangggcagtcaccaacccgaaggatnntgctggtgggggccgactctgtgagggcngccatcaccttcagcttcttttccatcttctcctggggtgtgctggcctccctggcctnccagcgctacaaggntggcgtggacgacttcatccagaattacgttgaccccactccggaccccaacactgcctacgcctcctacccanntgcatctgtggacaactaccaacagccacccttcacccagaacgcggagaccnccgagggctaccagccgccccctgtgtactgagcgnnggttagcgtggggaaggggnncaganaggnccctcccctctgctctgggactttcccatgagtctcctggaactgccagcccctctctttcacctgttccatcctgtgcagctgacacacagctaaggngcctc

SEQ ID NO: 627559 - DNA, 170 bp, Homo sapiens
  misc_feature (157)..(157): n is a, c, g, or t
  misc_feature (169)..(169): n is a, c, g, or t
gtaatgatctggtaaaattctcttcatctaggcttggaattaactcatttattcgttaactggaatagctaagcccagtaacagtgcatacactgataggtatcccagagactcacattccccaacatctaacaaactaaaaagagaaaaggcgaangttaagaggtant

SEQ ID NO: 627560 - DNA, 720 bp, Homo sapiens
tatttcaatggtagaaaggccttcaaggtgggtattatattttaaacttttacattattggtattaatggtagtaatatattggtatgttttctaaattatttttctttaagctggacgtgggtttttttctggtgggtccccagaggggtctacgggacttgggtggacatatgttgggaggtactccgggtcgctcagctgggtggtctggttcaatcagcaagataagtctctccaaagcaaattcacatggattatgagtcgctttggagcttctggacatggtcacttggcccggagggttaaaacttttcaaccccttgaagaccttacatggttttatgggattggtgaggaagggaatggtctccagggtctcagggctattgggaaattccaactcctattacttaccaggagccatgggagagaccagatctggatgttaaacgtctctggtctggcagagatgggacaaatcaggtatacttggtgatatagtcatgggggttcagtggcactattttctccttaaaggtccaggcaacgggaccatgatagagaggaggagggaagaacgaggccttctctatgaaccttgtggcttctggtctaacaagtttcttttacagattctcacttctggtagcctaagcaggggttactccagaatcttaataatggcctattcttatctttgttcccaggactcattttt

SEQ ID NO: 627561 - DNA, 1185 bp, Homo sapiens
gacgacacatactgtctgactaccaacgacgttacctttgactacgacgtaacactacactacggacgcttacaaccccccttactttctacggacctactgacgaactcgaaccccactccctgacgaactccaaacacttctccgatgccatctattcacaaccccaatcctaccacgtactggtcacgctacaactacagctactcgggcccactaccccgacaaatgatcggtatatacccctatcccgatacctaacttaactcccctgagcccaagcccgtcatctacatcataaccactctttgcacaggcaacactcatcacagacgctaagctcgcactgatatatcatacctgagtcaggcctagcaaatcaaccatgctacgcttcaactaccagtatctaaccaacaaaaataaaccctcgattccacagcacagctgccatcaagctaattcctcaccgcaagaaaaccgcatccataatccttctacatagactatcactcttcaaacaaatatactctccgtgaccaatgaaccatacaacaatcataacaatcaatactcatcattaataatcataatggctcatagcaactaaaactaggcctagcccctttcactatctgagtccagaggttacccaaggcaccctctgacatcccggactgcatgcatcgttacattgaacaaacaataagacgcaatctaacatccatatcccaaatctctccactcactacacgtaaggcttactcctcaaacacatccaacttatcacaactacaacgccgcgccgggtacaccacaccagtaacgacacttagaaataaccataagaaacccccactcgacagctattaccgccagctacccctagaaccccatagataacgatgtgtaataaaaaactatattatcccaacataacacgactctgcatacaccaaaacgcagccaggacagacaaatcgccgtacaccgactggcacacaaaacaacagcaaacaagaggccaggggtataacgacacacaaaaaaaagcaacacacaaccacaagagacacatccaaacacaggcggcgcacgcttccgaacgagcagcagcacactacccacgaccaagacacacacacacaaccaaccaagacccacgcaagccacgcaccgacacca

SEQ ID NO: 627562 - DNA, 278 bp, Homo sapiens
gtggttctctattatcgaccatttgcaggcaacttgggatttgctatgtaaaagcaccttatctaccctgcctcattaattctcatggcatcccttaaagagacagatcagaaaaccaagggtgagagcctcatccgaggtctcgcatctgggaggggacgggaccagaagataagactgtccagtggactccaaaccctagatcttcacattcatcagcccccagctccccctgacagagaaaggatatgcgtattagctttccaaactcctattgt

SEQ ID NO: 627563 - DNA, 117 bp, Homo sapiens
tccaggctggcgggtctgtggaagcggcgacaagctgacaccgacgccgaagcgctggcgcgcggttgggaaacccacctgaccatcgtcagcgaagcgctgtcgccgccgagcctg

SEQ ID NO: 627564 - DNA, 1234 bp, Homo sapiens
ggaatcttatgatatataccatttaaccatgtcacttctaagaattggagtgtatcactcaaaagtcatatcttccctaatatgcctagaagcgcaatacctcactatcgctgtgcattgactagtgtactctgcataactcctgaacaccggactccctcttagccaatattgtgccttattgccatactagtcttagccgcctgcgagcgcacgcggagtgggccgtagccctactagtctcaatctccaacaggatagtggacctagacgtgacgtacagtaacctaaatctactagtctcaatctccaacacatatggtctagactacgtacataacctatacctactaccaatgctaagaactaatcgtcccaacaattatatccactaccactgacatgactttccacaaaaaccgcataatcttgaatcaacacaagcacccacaggctaatctcattagcatcatccctctactattcttttaaccaaatcaacaacaacctatttagctgttcgcccaaccttttcctccgaccgcctaacaaccccctcctaatactaactactgactcctaccctcacaatcatggcaagccaacgtccacttatccagtgaaacaagtatcaactaacaaacaactctagctcctctatactaatctcgctacaaatctccttattataaccattcaccacgtcacagaactaactccatattccatcactcttctccgaaaccacacttatccccaccttggctatccatcaccccgactgaaggcaacccacgccaagaaacagccctggaacgcagggcacatactttcctaattaatacacccctaatcaaggctcgcttacccactaaatcatcgaaccatgattatacacttacagaacacccataggttcaactaaacaaattcctacatacctacaacttcatccgcctgcccccaaaggacattattacaaaccttcttgtactacaacgcacctactattaattgaattaagcttaacaccaaatcagttataaaatacgtaccagactacccccttaacggcacaccacactatagtaaaactcccctaaaaccccttgtataaacccccaactgatgaggctaaacgatacatgccccacaaaacttataaccaacgcggccgctatcgtcaaatatcacacacaacacatattttacaacccataaaaaaccaaacttc

SEQ ID NO: 627565 - DNA, 202 bp, Homo sapiens
gtcgttggttacttcagtgcccagacctggtcagctcgcgcacggcttgatgacggaaacccttgtaggcgccggcttcagccaggacaacggtgaactcggtctgctcttcagcagcggcggcagcgccaccagcggagggagcagcgacagcgacagcggcggaagcaagccgaaacgccgaacttctcttccatttccg

SEQ ID NO: 627566 - DNA, 295 bp, Homo sapiens
cgaggatctgtgggcaggagttcgagaccagcctgacacagtgagactacatctctacaaaaaaaaaaaaaacaagttaaaaaaaaaaaaaagggggaaaaaaattgtttggcccccctacggcaaacttaaattgcacacggccaacattttccctgtagaaaagggattaagagaaagggcttggccaagtttccagctttgggagcagaactcccccttgtgcttcaatttttgtgtccccaggaaggcttaacggatttctccaaagcggaaccccttaacagaacaactt

SEQ ID NO: 627567 - DNA, 1414 bp, Homo sapiens
ggcaccgctgcagcgagacagactggcggtctccacagcgaatcaacagttcctcgctaattctccgcttttgttgcgaagaactctgaacgaaggcacaacaacatgcgcagtacggcgacggctacagtttagcgtggcggccttgcaacgactgactgaacgatactgacactttacaaggtggcacaggcactgactcactcgggccaccaaggcacaaatctatgacacacagcaactatactagccctgacaactagaatgctggcacctacaatacccagaagctcctccgtccagctcagcattcgtaacaaaacattcactatgcacacggaactaccataattccacgctggcgcactggctgcgactgccccggagcattaaccacggtgttacgcacacacactggccacacactctcactactacgccactctacacacgttgtactttcacagcagctacagaccgctctacatggcatgtccaacgacgcacacactactgacacgccttccagcagcccaccaagaagggacaaatcattacaaccaactttaaactctccacgtggattctcaacactttgctctttcacacgtcaaggcaaccctttctactcaactgtcacaactggctcttgtgaactttcacacttatttcacccaagtggccaacacacttaccaccacttcacaagcctcaaaacggaaatcttcccagcgcttgggtaaaccaccattgcacccctgggcaccctttggggtacacgccacctacttactttctaacatcacttagtgtgttacaaccacccactcattgcttccacaggggtaacccaggggacgcgtgaaaacacactgtccaccccacaaagttcatgattgtctgtatacttccttggcaacagggggtcaccttggttctaatttaagacatcattgaaacaccctggcgcacgctcaccctcgcaacacatcacaatctccacagggctcttaacccccgcaagtgactaaaccgcggtatttgtgtcaccaaccagctgtcttcatatgccgcactggtcaagccacgtagggtgcgttcacaccaccaacgcaccaagcaccctcaaccgaacaccgagaccaggttggagggcgcccaaccccaccctctctaatccaggagacaaccacgaccgcccaccgacaactgtcgaccaccgccgacgcgcccacctgacaattggccgccacacgccgtcctacacgcgacacgaggacggaggccgtaacaactacccgccaccacacaacccgcccgaccgacccccgccactaccaaacaacggggcggcgcgcgcaacaccaagcacctgtgatcacacgccgagcacacgcgaccacagcacctcacc

SEQ ID NO: 627568 - DNA, 366 bp, Homo sapiens
aaagtacagcagaaagtcttcattcgtgtagggtcaaccgcgatggaagtcagtgttcgcctccgtgctggtgaccgctccacccatgtgaatgtgagtggccccttcccgggagctctcactgaaccgcagcaggcatggtccccgtgctgctggtcctatcaagcagggcacgctactccctcccttgcttgatgaagcccgcttatgcacccggtcattccaggagagggagcagcgtcttttttaactgagttctcaggatgctttcaactcctcaagccacgaagggaacaatttttatccatttatatactttccttacaataacctcgtccacggtcatgagaccctcggggctggcgc

SEQ ID NO: 627569 - DNA, 458 bp, Homo sapiens
  misc_feature (301)..(301): n is a, c, g, or t
gcacgaggccaaatgttaacttttttctttttgaaaatataaataattactattttgtactgtgtggtatctctggtcttttgtttcattcacttggcttgtctcttgggtctgagatgcttgcctgtgagatcttgaagccctggtttgatctccatcgtgcagggattatgttcagaatgtctaagaagcggtaggatttatttactctccatagtctcacgcagctgccagcctgttgtcctccttgaggagctgccagccatgtcctggcgagtatctgggaccaggtcctactttnccaaggcaagcaattgtagtgggcttcttctgcaccctgtgtgtgttaatacccaatcccaaatctcctttctcctaacaaaatcaaaatatatatatatttaggggacatgaatatggagattaaataaagggaaattgttgtgtcaaaaaaaaaa

SEQ ID NO: 627570 - DNA, 540 bp, Homo sapiens
  misc_feature (300)..(300): n is a, c, g, or t
  misc_feature (317)..(317): n is a, c, g, or t
  misc_feature (391)..(391): n is a, c, g, or t
  misc_feature (417)..(417): n is a, c, g, or t
  misc_feature (446)..(446): n is a, c, g, or t
  misc_feature (529)..(529): n is a, c, g, or t
ggggaagctgtcatggctgctcctgtacgtatcacggtcttgtgctctaaggaaaacgacagcacgtgttctttttcactagtagaagtgacgttggtttcatgttgacaactttgaagccatttggaagtgtttcagtggagagcaaaatgaataacaaagcgggctcctttttctggaaccttagacaattcagtacattagtttcaacaagcagaactatgaggctatgttgtttgggactttgcaaaccaaaaatattcattcaaactggaacatttaaataacttcataacagangcaatcaactgatatcntagatatctcttcaggagcatcattttaaatcagatgttggcttcaaacaaaggcataagcactctaacagccntagattgaaagactacttagctaaangacgtttttgactcaagcagctctgtccngttgataaatctgagatgaatggagaagtaaccttaatcagaagtctccatgaagagttctaccaaggaaccccccgtacgcngtagcgtctgg

SEQ ID NO: 627571 - DNA, 576 bp, Homo sapiens
  misc_feature (16)..(16): n is a, c, g, or t
  misc_feature (136)..(136): n is a, c, g, or t
  misc_feature (419)..(419): n is a, c, g, or t
gttgctttgtcagccntggacatggagcagcgggatatgactccagaacagccttcccatgtcgcagcagcagagggtcatgttgaaagttgtcaagtttttgctggaagcttgcaaaggtaaaccctttccccanggacaggtggaataatacccccatggatgaagcactacactttggacaccatgatgtttttaaaatccttcaggaataccaagttcagtacacacctcaaggggattctgatgatggaaagggaaaccagactgtccacaagaatctcgacgggttgctataatggtctgcaccccaagacttccattactctccatagtctcacgcagctgccagcctgttgtcctccttgaggagctgccagccatgtcctggcgagtatctgggaccaggtcctactttnccaaggcaagcaattgtagtgggcttcttctgcaccctgtgtgtgttaatacccaatcccaaatctcctttctcctaacaaaatcaaaatatatatatatttaggggacatgaatatggagattaaataaagggaaattgttgtgtcaaaaaaaaaa

SEQ ID NO: 627572 - DNA, 194 bp, Homo sapiens
tgcttgccctggcctatcccatgaggcccagtgactccacaaactccccgaggaggggatgggggggtcaaatttcagagaggctcttttttgagctttttgacccccctttttacggacccaaatttgccgtttttcccctcttttttggagactgaataaaccacctctggcccattttggccccagttcca

SEQ ID NO: 627573 - DNA, 673 bp, Homo sapiens
  misc_feature (19)..(19): n is a, c, g, or t
  misc_feature (89)..(89): n is a, c, g, or t
  misc_feature (92)..(92): n is a, c, g, or t
  misc_feature (104)..(105): n is a, c, g, or t
  misc_feature (109)..(109): n is a, c, g, or t
  misc_feature (118)..(118): n is a, c, g, or t
  misc_feature (120)..(120): n is a, c, g, or t
  misc_feature (130)..(130): n is a, c, g, or t
  misc_feature (133)..(133): n is a, c, g, or t
  misc_feature (255)..(255): n is a, c, g, or t
  misc_feature (272)..(272): n is a, c, g, or t
  misc_feature (277)..(277): n is a, c, g, or t
  misc_feature (280)..(280): n is a, c, g, or t
  misc_feature (283)..(284): n is a, c, g, or t
  misc_feature (292)..(293): n is a, c, g, or t
  misc_feature (302)..(302): n is a, c, g, or t
  misc_feature (314)..(314): n is a, c, g, or t
  misc_feature (322)..(322): n is a, c, g, or t
  misc_feature (329)..(329): n is a, c, g, or t
  misc_feature (331)..(331): n is a, c, g, or t
  misc_feature (345)..(345): n is a, c, g, or t
  misc_feature (347)..(347): n is a, c, g, or t
  misc_feature (352)..(352): n is a, c, g, or t
  misc_feature (367)..(367): n is a, c, g, or t
  misc_feature (371)..(371): n is a, c, g, or t
  misc_feature (379)..(379): n is a, c, g, or t
  misc_feature (439)..(439): n is a, c, g, or t
  misc_feature (575)..(575): n is a, c, g, or t
  misc_feature (593)..(593): n is a, c, g, or t
  misc_feature (655)..(655): n is a, c, g, or t
ggcggggaatgaagcaggngacccgggaccgggcggatgaggaaactccggaaatacatcatcagccaggactcagcgaggccgcaggnggntttacgcacgannagcngcagaaggngnggaaaggacngtnttattgcatgtggatgcaggacaagccactcctccaggaagaattaggaagagactatttcccaacacgtatcatgctatttcagacaacggaggcgcacaccatgttccttcaagccttcnggcagaccatgaaacgngagtnganggnnattgacannctgagccangaaaaattctanatgcacanacggatngncctgaacgagtccntnaaggnactgaagatgcaagnctgngaaaaaanacagatcgaggagctgctaaagcagcagatgactgagatcctgcaccccagcagccaagnccccaacggtgtgaagagccacttcatcgagatcttcctggaggagctgaccaaagtgggcgccgaggagcttacggcagaccagaacctgaagttcatcgaccccttctgcagaatcgctgcccggaccaaggantccttggttttgaacaanatcactcgaggcatctttgagacgattgtggagcaggccccgcttgccattgaagacctccngaatgaactggacacaca

SEQ ID NO: 627574 - DNA, 177 bp, Homo sapiens
aggggataggtgccatggatccgctgtcgccgccgctctgcacgctgccgccgggccccgagccgccccgcttcgtgtgctactgcgaaggggaggaaagcggggagggggaccgcggcggcttcaacctctagtgagtgggggtccgcggggaggtaggcgtgcagggagctccgc

SEQ ID NO: 627575 - DNA, 94 bp, Homo sapiens
agttgcatatatggaccccgccttgggaggacaggtcctgaatgtcctttttccagtgtaacatgttttactcccaaataaaattctttcagca

SEQ ID NO: 627576 - DNA, 208 bp, Homo sapiens
aggggataggtgccatggatccgctgtcgccgccgctctgcacgctgccgccgggccccgagccgccccgcttcgtgtgctactgcgaaggggaggaaagcggggagggggaccgcggcggcttcaacctctagtgacccacgccgcggacttttggagcaccgtcttaacgccggacagcttgcgcccttaaagccgttttggcctg

SEQ ID NO: 627577 - DNA, 114 bp, Homo sapiens
aatcagctcgtacctgtgcatggcatccctgtcgatacaaacatcttcagcagtcagctggcttcccacttcttgcttcctgtttctgccctgggtcatgttcttggtgagggt

SEQ ID NO: 627578 - DNA, 571 bp, Homo sapiens
ctactcgggaggctggggcaggagaatcgcttgaacccaggaggcagaggttgcagtgagctaggatcacgccactgcactccagcctgagcgacagagtgagactctgtctcaaaaaaaaaaaaggcttctccaaagttgttcattgtttcagcaccaaaagggaattaggcacagggttgaccccagaagtttcattttgtgacactttaaattctccagattattttattcccacgttgggttcttgattgcgggcctcagcacttaaatttaacttgttattgttggcaaagttttcaattgtgcagagcctttcgtgttattcggatgaaggctttccggccactttgttccattgcttatagccccctttgccttctttccttgtgggagcattgctttctcttatttccttattgttgaaaccagccttgacattaagttgaaaggattttgggcttcaagcaaacattgaaattgtgggtttcattatctttggcaccacttccttgattagcttgtgttgactcattggcaaaccttcgtttttcattcgtcttgctcaggt

SEQ ID NO: 627579 - DNA, 633 bp, Homo sapiens
ggttgggaaagcgagggatttttaggcctgtctcctgcttactggatctcctcccttttactttgccggtagaacacagttatgaggtcgcaagaagaagaagcagctgatgccgtggctgctggtatcctttgtcggtttgaagtcgaggtcgcgttggggtgccggttgttggggcctgggactaggaggcctggatttggcttacggcgtggagcgtttgtatttaggcgtctgcgtgggtggcctggtggctgggattggacttgggaaggcttctaggaaaatggggttccgaggtcgacaggcttttgcagttgtgggtcgtgtgactctgtgactcaggaggatcttgttcggtgcgaattttggactccgggaggcggcctggacccctccgccagggacagtgtcccctagggactattcagccaccttccgttgtattggtgacgattcaacaagggacttttcttcgagtgcgataggcttattactttcatggagggttggggacagcttcacagtctgtcacccactttttctgtttttatttactttatgtgtgtctagtgtatattttttcgaattggcggtttagtacagaaccaagcaacccctggggatcctcta

SEQ ID NO: 627580 - DNA, 362 bp, Homo sapiens
  misc_feature (12)..(12): n is a, c, g, or t
  misc_feature (27)..(27): n is a, c, g, or t
  misc_feature (49)..(49): n is a, c, g, or t
  misc_feature (169)..(169): n is a, c, g, or t
ccagcccacagnccacacacatggagncctccataccttaggaagcgtncctgccctttaaatgaaggtggtcggggccagtgcagcggctcacacccataatcccaacactttggaaagcccaaggtgggaggatctcttgaacccaggagtttgagaccagcttggncaacatagggagaccctgtctctacagaaactttaaaaattaggcaggcatgatggtgcacacctgtggtcccagctactcaagaggctgaaggaggatcacttgagtccagaaggttcgaggctgcagtgagctgtgatcatgccactgcactccagcctaagtgacagtgcggtaccctgtctcaaaaaaa

SEQ ID NO: 627581 - DNA, 230 bp, Homo sapiens
tgacgtagactttgatttctcagcctcggtataagatgtagtctgagaagataatggaatagaagtactcacagagtggctcaggcaagaataagtccaagtccagtcaataaagagtgttacatctaccaagatgttcctgcgcggggactcagtcatcgtggtcctgcggaacccgctcatcgccggcaagtatgggccgcctgtctgttgacagaactcactcctct

SEQ ID NO: 627582 - DNA, 158 bp, Homo sapiens
  misc_feature (152)..(152): n is a, c, g, or t
gttgttggatcggcatctcactttttcttgaaccttttccaatcaggtctcattcctaacactccatgggaaaccaaccttgtcaattctagatcatggctccatcagacttccatgtgtgccacaatctacatggccatgtttctctattnccttgg

SEQ ID NO: 627583 - DNA, 248 bp, Homo sapiens
accgatgagcaacagacgagctaaacaccctgtgggggacctagctcaacctcttcttacctaggtcaaaggcactatcatatgatgtataagggatgggtactgattggaagaaattaatcagcacccaatgggagcccacggaactaagtagggtcccaagaaaaaaaacgggagcctaaacacagagctgagctaatgccaaatttcattcctcaaacctttagtagagggttaattagaggccg

SEQ ID NO: 627584 - DNA, 315 bp, Homo sapiens
cgtcgacatggggcggtagtgcacgatgagctccggcgcgccttgcggctcctccgtcaccggccttcgcaccttcacgcgtcgcttgttcttggtgggagtgccggccgtgcccccctcgttctccacgtccgggaggaggccgaggaacgccacgcccaggcgctgctcgatgtcctccggggtcttgatcgtgcggtccgcctgatcgcgcaggaacatgagcacgaggcccgcgacgaggccgatgagcgagcccatgcccgcgatcgtcagcaccttcgggcgaatcggcgacttcggctccgtcgccca

SEQ ID NO: 627585 - DNA, 120 bp, Homo sapiens
  misc_feature (1)..(1): n is a, c, g, or t
ntcctttttttttccttgggcctccaaaagatttaaacacgtgctgtgcctcacctaagctgggaacatttcctcagtaaaccacacccccacggcccggtttcgctaactccttcctga

SEQ ID NO: 627586 - DNA, 148 bp, Homo sapiens
tagaggaccccgggcagtacggattggacagcatgactgctgtggagtaggagggcagcggtggcagtgtcctcgaggcacaaagtaggagggaccagtgtgtgggggatgggacttggggagacagagtgctgggtttggggtgtgt

SEQ ID NO: 627587 - DNA, 100 bp, Homo sapiens
accaaactcaccatccctccagtcctccccaacagggtactaggactgcagccacctgtagctcctctctgcttacccctctaattggacagctgcactt

SEQ ID NO: 627588 - DNA, 335 bp, Homo sapiens
atctataaatgcatttccccccttgattcttcacataaagtgtaaaaaggaagttaagcagtgccaatatatggaaaatatctaagttaaatgttctagcaaaaatgaatcagtaatgagattgtggctaaagagggctctaaatgagaataatatatctttacagatatccaaaccttccaagcagaaatacgttgcatataaaaaagctctaggtgcacagtaagcatatagggttcattttgttccatgtgtatttctacacaatgaaagtgtcaaaaaatagggtcatctgtgttagcatagactacgttattgtatatgctgcattgaat

SEQ ID NO: 627589 - DNA, 117 bp, Homo sapiens
gcataggccaagctcggggcattagtgtatgcaaccatgcagggtgtatacatcggtgtgcaatgcagggtactcatgtatgcatatgtgtgtgggtgcagtgcagcccccattgtg

SEQ ID NO: 627590 - DNA, 382 bp, Homo sapiens
tttgggggggggtgggggggggggagggggcgtcggggaaaagggggggggggggtggggggatcggggggggggggtgggtatgtggggggggggggggggggggggaaggggggggtggaaagggggggggtgtaggggagggggggcggggggcgggggcggggggagcagcggggggggggggggggggggcggggggggaggtgggcgtgggagctaggcctggtgggggcgacgtcaatgacacgctgggcggggggggcggcgtaaaaagggggggacagttgggacagacagagcccaccccattcctccccgcgctcgtggcccttaccacggtactcctacctatctccccttttatagtaataatcttata

SEQ ID NO: 627591 - DNA, 103 bp, Homo sapiens
  misc_feature (1)..(1): n is a, c, g, or t
nattcgcggccgcgtcgacacggctgcgaaagacgacagaagggtaggaggatcgcttgagcccaggagttggagaccagcctgggcaacacagccagacccc

SEQ ID NO: 627592 - DNA, 110 bp, Homo sapiens
attttaagagcatatttaactatcagagtgcacaaaaactaggtgtgtcattgaaataatagtgcataaaaattaaactgttacataatgaacactactctgtgaaagtg

SEQ ID NO: 627593 - DNA, 85 bp, Homo sapiens
tgaggattaagagcaagaagttgggggggatgtgaaaataattttatgaggttgtctaaaataaagagtagtttcttaaaaaaaa

SEQ ID NO: 627594 - DNA, 1089 bp, Homo sapiens
tgtggcgcctggtgcgagtcgcggtcatgtactcgcaaggatgcctgaagttacacacccgagactcactaacgaccaaccgatggcaaccagactgcaaggaggtagacaagtgcgcctcgtcaggcaagaacttgtccatatgatgtcattgatcatcaatactttcaagtcgaaacaaagacgtatccttagctgagattagcctcatttcatacagttgcatcgagtagtggcgaatggcagcaacacatccgggtgaagcaataagctgtgaccatgatcgccagttagaagttgaaagcactggaattgatgagcttgacgttagttaagccgttataccagaacaaaaaccacatgatcgagactctcgacgtatggtgccatagtgggaatttgcgaactggcccataggctgcaattgatcaaatgaaccgttggtactaatcgccaaagtctggtgccccaacagccgtttcaatgtggagctttcgtctgggctgggtgcaccaatattcctctctgataggtcagccctgtgaggttcccccttcaagcttatgtgtcatgatgatcatgtgttactgttatcaccaaacatactccgatccactgatcggtatcgcctagggtagtcctcagccaggggactcgtacaccagggatgacagacggcccgttaaacctatggttcgtatcacacaaaagtttttcctacactctggtaagagaccaacagactattaggcatgccctgacggcacagggggcttcgtgaccaaaacgtacccggttgtggcacactcccatagcttaagaggcaagaagtgcatgacaatggcaataataggtgcacgcattcagcaacatacacgaaggggcgggctgagacaccgaggccgtctgcgtgcctgatcgaaacggcccatagcggtataagaaaggcggggaacgcatgggacaccacgtgttggcgagacaccgggtaatgcgcccagaaagtaaggtatcacacctgacacggcgagattaaacacaatacatgcaatgtaccttactcccacacgttcccctaccgccgaacaa

SEQ ID NO: 627595 - DNA, 498 bp, Homo sapiens
gataacaaaacatgccttggtagtggctctctcatgcaaatacaagaaagcttaagaaattcttgttgtaggtggcattaggcaaggctgccattcagctggtcatcaagctcacaagtaaaaaatcaaaaccgctcaagcaaaacggacacaattttggcacatgcattacacagatgtctttatcaaagtttttttcaagcacttcattcctaaatcacacagaatcacaccatggtgtcagctcacttgtaagacaccaaccaagattttcctatatactgtctccaacaatttaaagatcaatttcccgcagagggtgtgcaatgcatccataaactggccctaaatttagaggatgggcagagggaagggttgggcaggatggaatattaaattgtaacatgataaatatgcaagactgttatccaatctagatactttatatacattttgatgacttaggaaaaaaaggaatcattttgtgaaagcgtaaaa

SEQ ID NO: 627596 - DNA, 504 bp, Homo sapiens
ccacgcgtcggactagttctagatcgcgagcggcgccctttttcaaaaaaaaaaaaaaaaaaaaaaaaaaaaaaaaaaaaaaaaaaaaaaaaaaaagggggggcagaacaaaaaaataccacactgggggggcccaaagatacatacgccactccacccgagtatactgaggaaacacagggggcccaatatagcggccgccacatagagatgacgccacacaccgcgggcgcgacggcagtataaaacacgcgccggcagcgcgaaaacacgtccacaccgggggaacctatgagcaaacgacaccactctctactgccgtcgggcggggcccccaccgctgcggacacaacacccccaacaggaacaattcaaaccccctaagcgcggccaacatacaaagactcaacggagcggtataaacgggtgtgtgaacacacacactccgcgcgctaatctagccgagagcccgcgcatacagaccaccacttgccagcacacaac

SEQ ID NO: 627597 - DNA, 101 bp, Homo sapiens
atggcactcccaaagtgtggtacaggagccttttccaggacatgaagaggggattccctgatgtgagacaaggaggaggcgacgatgagagccacaggctt

SEQ ID NO: 627598 - DNA, 405 bp, Homo sapiens
  misc_feature (405)..(405): n is a, c, g, or t
gagaaacactagctgtcgtgagcagaagccagtcgtgaatgaccagagcgaccttatctccagcaatgtgcaactgccacatgcatgagccggcgccctcgttagccgggagagcaagatgcagacgcggagccctgaacacaggctgttgcatgctggtgactgtggttgtcgatgaccaggtcaccatcgtctactacctgtaccaacagcagagacggatggacctactgacagtcaactgagataacctgcatatggagaacctgcgcatgaagcttcccaagccttgcaagcctgtgagcaagaagcacatgggcctcacgcgtgatgaagcaggcgctgtcaatgcgagctctgccgcagatgcacatgcagaatgcgaccaagtatgagcatgacacn

SEQ ID NO: 627599 - DNA, 483 bp, Homo sapiens
  misc_feature (4)..(4): n is a, c, g, or t
  misc_feature (65)..(65): n is a, c, g, or t
  misc_feature (71)..(71): n is a, c, g, or t
  misc_feature (296)..(296): n is a, c, g, or t
  misc_feature (424)..(424): n is a, c, g, or t
  misc_feature (459)..(459): n is a, c, g, or t
  misc_feature (469)..(469): n is a, c, g, or t
attnactttattgttttaaaaccagccccttctgtctgccaccacccgccaccccttcccgaagnaagtanaaaaatcataatagatgtctctccagcgtgcacctctgttctcctctctctaatggcagcttgggaccctgaggcagtgacgcttagtaatgtatcctaatagtcattgtttgtctgacaaatacctagtgaccacaagcctaatcagggccgccatgaattaatggtcagtgtagtgatgggtgctgaatgatcataaaaatagcttgggaccctgaggcagtnacgcttagtaatgtatcctgaatgagtcagtgtttgtgctgacaaatgacctagtggaccacaagccgaatcagggccgccatggatttaatggtcagtgtgagtgatgggtgctgaatgatcataanatagcgaatactgggccgggcttggtggctgatanctgtaacttnggaaacggaggcag

SEQ ID NO: 627600 - DNA, 1382 bp, Homo sapiens
  misc_feature (1179)..(1179): n is a, c, g, or t
agtggtggctcatgcctgtagtcagagcacttcaggaggatgagaagggcggatcacctgaggtcaggagttcgagacagcctggccaatatggtgaaaccgtctctacaaaattacattagccgggcatgtggctcacgcctgtaatcccagctactcggtaggctgaggctagatgccagggccatcacacccagctaattttgttgatctcttgctagagcagtacgtattctgcctatgttgcccagtctcgtcttgcactcctgctctcacgagatcgtcgtatcatgcttgactcatatcactcagattttcgctggcctcaatacgatctcatcttgccattatcctttataaggtcgtcctcttgtctatgaatacgtcctctacattcagtcctcctttcatactcgcttagcgtcataggtaactcgtcctctaccgctcttgctctgtcgcttcctttccttgttccttaggccctccgtacactctttctcctgtcttccgctcccacatcgttgtctgcacctcctttcctcttccacgcctccttacatactcctgccctttaacgctttctctcccttttcactgtctcattggtgcctttttcttccctccgtttcatcatttcctctccatcacctcctatcatcttccttcctgattgcattcctaccttatcttcttctttcctaaccactctactcgcgcctctacctgtccttctctcctccgcctacatacgtcgccctactctctattctctcttctttctttctcttctatctcccctctatcacttaatatcacttcatccttctcaccttcttcttgtcttcctcttcatcgactcctcctgtttatcatctctctcatctctactctcaccctcatctttctttactctcttctctacttctctcctccgctgctctcatactctccgatctcatccctacattctctctctccttcatcatatcactttctcctctcgtttatcctgctcgtctctcatctctctcatatacctcgtccatatcttctcactagcatcttctctctcttatccgttactctctctcgtactcgcgtccgcttctctcgtacatctctgtcgtcatctccactccctctgcattatctgtcactcgtacgtctctactagtntgctcactgctattatctcctcttgatatacattttctctctctatctctctctctaccataatcgtcgctcgtctacactagtacgtctacttatatgcatcatctacatgtcgtcgctcgtatcatcgtattaacggcgctgatatctctcattctctctccttctcgtgtacctactctgatactcatacccctaccgct

SEQ ID NO: 627601 - DNA, 578 bp, Homo sapiens
cctagtccaaaggatgattgtatcaaacaggtacaaaactgacagagtttctttttgtttagggcatgttactaccctgaaatgttgtattttttgtctttaatttccaagaattaaagccggcctggtaaaattgacataaatggtaaacttcaacattttcataatacagtattaatgtttgataaaggtatatcccagttaactacattgctctttaattgcaatcatgggcattttaatgtattttaaaataaatttcaaaattctgctaaattcttaatttagcatattgacaaagtaatctggatttataccttttaaaaaccattttgaccagttttcttcggttttaatgctttcttaaataaaacactgcatgatttccaagttgcatatttgcatactattttaatttgcaaaatgttttttaaatcaaatatcctgatatttagttgtttttttttcctccagcgtgtttaattaaatatgttactgtattagcaaaacattttcatttttaaaatctgctaattttaaacttggactgtgttaagtaaacgttaatcatacactgc

SEQ ID NO: 627602 - DNA, 333 bp, Homo sapiens
gtgatatataaactcagagccaaacattcatcagttctacatatatctagtcctcttcctaattaccctactaatcttagttaacgctaacaagcctataccaactagtacatcggctgagagggcgtaagcgttatatcctacttgctcatcagttgatgatacgccctagcagatggcaacacagcagccatatcaagcaatcctatactaccgtctcggcgatatcggttacatcctcgaccgggagcatgattatatccgtacactccacactcatagagacccacaacaaatagcccttctaaacgctatatccaagggggatcctct

SEQ ID NO: 627603 - DNA, 261 bp, Homo sapiens
ctgtatggacttggtgcttgggtatgtctaccagacttgaagctggatgatggcaggactaggtctgtcgtgttcacctttgtattccagggtccaggacagtgtacagtatggtaggcattcaataagtatttattacatgaatagatgtatgttgaattaagtttattttctctggagggtggtgttttatacattcatccttaattcagataagcaaataataagcttttactgagcacctatggtgtgtgtggatga

SEQ ID NO: 627604 - DNA, 233 bp, Homo sapiens
agggtagggaacccctggcccccccggaggggaaaattgctctaaccccaaacaacggcatgagggcccctgccccttacccacatgttttttttgcaaataatcggcccaagactgtttttttactcctttttaagtatgctttgttttttgtaaggaatgctttttgttaatttgttccctataaaaacaatgtttttccctggcttgctgtccataaacatttgggtcca

SEQ ID NO: 627605 - DNA, 954 bp, Homo sapiens
  misc_feature (248)..(248): n is a, c, g, or t
  misc_feature (266)..(266): n is a, c, g, or t
  misc_feature (294)..(294): n is a, c, g, or t
  misc_feature (296)..(296): n is a, c, g, or t
  misc_feature (298)..(298): n is a, c, g, or t
  misc_feature (310)..(310): n is a, c, g, or t
  misc_feature (313)..(313): n is a, c, g, or t
  misc_feature (317)..(317): n is a, c, g, or t
  misc_feature (378)..(378): n is a, c, g, or t
  misc_feature (392)..(392): n is a, c, g, or t
  misc_feature (404)..(404): n is a, c, g, or t
  misc_feature (416)..(416): n is a, c, g, or t
  misc_feature (426)..(426): n is a, c, g, or t
  misc_feature (431)..(431): n is a, c, g, or t
  misc_feature (495)..(495): n is a, c, g, or t
  misc_feature (907)..(908): n is a, c, g, or t
  misc_feature (921)..(922): n is a, c, g, or t
  misc_feature (936)..(936): n is a, c, g, or t
cttcccggtaaatgggccgcgcggcccgagcctgaactgggcgggcccaactgataggatcctggctgcaattagaacagggactaaagggccagacaaggggatagacccctgcagaacctgtggccgagcctcgggcctgagagtcagtcaggaaggagacatggtggagaggccaacacggtatgggctccacctgcagctagacctgaaaaggggaaggagagtctcattagagaagaggctgntggcagaggaggaagagnacgaagaggaggtggaagaggatggccncngnagctgctcggangangatnacagtgagctgctgcaggagatcacagacaacctgacgaagaaggagattcagatagagangatccatttggacncgtcctccttcntggaggagctgnctggagaganggacnttgcccacgtggtagagatctatgactttgaaccagcgctcaagacggaggacctgctggcaangttttctgagttccaagagaaggggttcaggattcagtgggtggatgatactcacgcactcggcatctttccctgccgggcctcagctgcggaagccctgacccgggagttctcggtgctcaagatccggcccctcacgcagggaaccaagcagtcaaagctcaaagccttgcagaggccaaaactcctgcgtctggtgaaggagaggccacagacaaatgcgactgtggcccggcggctggtggcccgggccctgggactccaacacaaaaagaaagagcggcctgctgtccggggtccgctgccgccctgaggcctggagacccaactggcctggatctgcgtcccgacgtagctggcgcccccaacaccataagccttcacagacgccagagcagccccgcaccacccnngagcttcaccatnnggtgtggtggtttntttatccccgaatgggaa

SEQ ID NO: 627606 - DNA, 522 bp, Homo sapiens
gcaggaggatcacttgagccaaggagttcaagaccaccctgggcaacatagcgagaccctatctctaaaaatatatatatataaggccaagtgcagtggctcacgcctgtcatcccagcactttgggaggctgaggcaggcagatcacctgaggtcaggagttcaagaccagcctggccaagatggtgagaccccatctgtactaaaaagtacaaaaattagctgggcatggcggcgggtgcctgtaatcccagccacttgggaggctgaggcaggagaatcacctgaacccgggaggcggaggttgcagtgagatgagatcgcgccactgcattccagcctgggcaacagagtgagacttggtctcagaaacagaataaaaaaataaaaaattatagccagtcagggtggcatgcacatgtggtcccagctatctggaaggatggcttggacccaggaggttgaggctgcggtgagccgagatcgcaccactgcactccagcctgggtgatggagcaagat

SEQ ID NO: 627607 - DNA, 157 bp, Homo sapiens
accctgtagttgttacgacacctacaacccctatatcttacatctcaattcccatcctaaaaagcactcatacttatatgcatccccgcagctacagacacacaacacacagcacacgcatgcacacacagcacacacacgcaaacacagcacgaga

SEQ ID NO: 627608 - DNA, 428 bp, Homo sapiens
aaacaggcccgaaaagtgggtcccaggttggcagtgttccccagtgccccaaaaccctggggttagtttttgccccccccaggaaagccaccttttggggacattgggtggagggcagggcctaaaggccccaagggaaggcccccttccggggctttttccccaggaggaagggaaggggctttgtgtgcccccccagaggaaaagggccttagttttggggtcaaacccccctttttgtgttttcccccccaaatggaaggttcccaaggttccctttctgttccctttccttccccctgggcgggcccttccgcccccccccccagaggcccccccccccccttggggtgtttttaggagtttcgggcagggtgggcattttttcccaaggggggagaatttcccattaagggcttagcccttta

SEQ ID NO: 627609 - DNA, 103 bp, Homo sapiens
agtcagctactcaggacgctaaggtggaaggatcacttgagtcaggcatgttgaggctgcagtgaacccagatcactccagcctgggtgacagaccttgtttc

SEQ ID NO: 627610 - DNA, 109 bp, Homo sapiens
tgcgttgtctctgcctctggccttcctgtttactttcagttccaccacatgggacagtccctcttgccacaagggctttgtccgtgatgctctgagattgcggtgtttg

SEQ ID NO: 627611 - DNA, 86 bp, Homo sapiens
tagtagacataattcttatggtgactacgatcgtccttttgactactggggccagggcacccttgtcaccgtctcctcagcctcca

SEQ ID NO: 627612 - DNA, 220 bp, Homo sapiens
  misc_feature (18)..(18): n is a, c, g, or t
  misc_feature (108)..(108): n is a, c, g, or t
  misc_feature (144)..(144): n is a, c, g, or t
gatcacagactctgaagncagactggcaagattcaaatcccgactgccatttttaactgaaagaccttaggtaagttacctaacctctctgtacctgtgtaaaatggngataacagtagtatccacttcacagagttatgaggntgaaatacattcatatttataaaacgtttggacccagtacttggcacatagtaaggccatgtaagtgtttgtaaaa

SEQ ID NO: 627613 - DNA, 517 bp, Homo sapiens
ccagtgttccaggcgggtctcgaagtctgggcctcaagcaaaccggccgccttggccatccagggtccggggattatggggcatagagccaccacaccgggccgggttatacttttaaatgatgtattcttccctcctcctaccagagtatgaggagatgtttctccagtctcaccctgagagccggggggggctcagggaggtaaaactcagactgggtatggggacctccccagtgactattccccgggagttttggtctcctacggttccatgctcagtctcggccattggtcagttcccctttcctctcggggggtgctgggctctagggtttctggccccgcaatgagctgtgattcttagcatggcatatctgtctctccatcttgggggtaatggttttttcatgtgacctcaattatctgatgggatctgagaacagtcatggatttcaagttggccagcttactggtggtgaggatgggagtgatgacttctgagcctttacaagctg

SEQ ID NO: 627614 - DNA, 438 bp, Homo sapiens
gtggagccaggcctacaccccagcaaccatgtcaaggtgacctgcattaagtgattcgtcatggcaccacctactcttgtgtgggtgttttccagcacgtgaaaagtcgagataagtcgccaatgatcagggaaatctggataccagtccaagctatgtcgccctttacggacactgaacggctgatccggtgactgccagcacaaggaatcaattttgcagatgaacccgcatgcgaaagcaacgacaggcacttatcatggacttacgcccaagaaacccgattcctacgcaacgtctgcgggaccccgacgagggaagtacgacgaactcgaactgggcattggttagggtcaccagaggctcctcgacgtcaagtgacacaaaaccgactatggggcacccatttaaactagcgatgaggtcgaaagtgaaatg

SEQ ID NO: 627615 - DNA, 855 bp, Homo sapiens
gctgctggagcatgctctgtgctgtgccgtgtgaagaccctgaaccccaatggcctgagtgtggccctgatgcgcagtgcgtgctgctgtgcgtgtcaacatcatgctgcacgcgctgtgtggtctgcatgtgactgtgctaagtgaccaacctggtgtgcccacagggcaccatgaagatgctcgtttctggcgctgtgatgacatcaaacttactaaatgacgtgcaatgtgcttgcttcacgaacatgcaacattcaagcacccaagcagccttccttaatatgcaaaggtagcaacagcccaggatgatataactggtgatgtgtactgacttctaatggtcctaatcatttggagagcttgccttgaaaccaggcggatctcttacatttcttgcaagtgcctttcatcctcaggaataattcacctgcacatgcggatttgacatgctgcacagtgaccacaggcccttcagttttctggggacagaaggtcaacacgtaacgcatgacgacgactcggaccaacggcgacaacactttaactacgacttgtcgcgccaggaaccactctctttccgtactaacaccgtttcatgcttgaaacgtctgcacgcattgtcctttatcccggacgcgcttgttcgctggtaccttcccattttgtcgggccccatctacaaacaagtgcaacgaattgacacccttaatttgaacactcctttccagtgcttggcagagtcgcctgggcagctcagtcacgcgtcattcaacttctggcgcacttcgctaccagacgcctcgcactccagcagtgcattgatttctggtactccacgggcaccaactggaa

SEQ ID NO: 627616 - DNA, 954 bp, Homo sapiens
agatgagtagactctgcgagaagtggagagaagcaggtctgtgcctccccatgggcagatcctggggtactaccgccagatacctagcaggctgagtacgagcagcagggtggacgaaggaagtgagagcggtgaggtcatgcgatgggatttggagatgaaagagtagaagaatcttgaagtcttggatgggctgtggtagaacctgataggtcgtaatcaaagtgggagggtgcgaaccaaagaaggcttgatgtggtcaagataattgacctttggacaaagtgaggtttccggggatgaatgtttgccaattctcggggtccgaacaatgtgcgtggaccatcgggagggaggaaggaagaagggggtttccaccaagtccaacgtatggtttcttccggatccaagtccgacgagtgaaagaccaaagacgggaggattccaaagttacctttcagttctaaccggacggtaaccggcccaggtttcccagattgcttttgccgtgaggaccaataggccttgtaagggaggcggctttccgggggcccaaggaaacgaaggcaaaaggaaagcccaaggtggccctcgtgtggggccctttggttacgccgtttggccccaaagaacttcccgcagagcgaaaaaggtcttaccgtgggcgcgtgtgaaccaccagggggggaatccgcagaagcaatgcggggagtacccttgccccttcagaaggcctaacttttgaaagagggcctggtcacagcttgcaggatatagaggtgctggatggatgaagagacggtcgggatctttcttttacccagtgcgcgctataaactcagaaacatgtttgccccagcgacatccgcggggtcacacaccgagacgctgaaaattcaccaagcgtgtcccccatgggggcccagtggtgagccgcgatggagcctgaaaaac

SEQ ID NO: 627617 - DNA, 471 bp, Homo sapiens
gaaaacagtttgtagagcttcctcaataagaacacatatgatccagcaatcccactactgggtatatatccaaagggaatgaaatcagtatgttgaagagatacttccacgttcgctgaagcattgttcgcaatcgccaagacatcaacctaagtgtccatcagcagaagatagatagggctgagcgcggtggcccacgcctgtaatcccagcactttgggaggccaaggcaggtggatcatttgaggtcagaagttcttgaccagcctggccaacatgatgaaaccccgtctctacaaaagatacaaaaattagccaggcatcttggagggcgcctgtaatcccacctactcgggctgaagtgagaatggcttgaacccaggaagtggagatttcagtgagctgagattccgccactgcagtccagcctgagcgacaagagtgagaagagtgaggcttcatctcaaaaaa

SEQ ID NO: 627618 - DNA, 508 bp, Homo sapiens
  misc_feature (3)..(3): n is a, c, g, or t
  misc_feature (26)..(27): n is a, c, g, or t
  misc_feature (359)..(359): n is a, c, g, or t
  misc_feature (369)..(369): n is a, c, g, or t
  misc_feature (424)..(424): n is a, c, g, or t
  misc_feature (445)..(445): n is a, c, g, or t
  misc_feature (472)..(472): n is a, c, g, or t
  misc_feature (488)..(488): n is a, c, g, or t
ttngttaagcaggtagtcacccgtgnnagtgggatagtgttatctgaaagtggacttgaattggttgtaaatgtatattgaggaattaggtgtgttctttgttaagcaggtagtcttatttgtgggatagtgggatagtgttatttgaaagtggacttgaattggttgtaaatgttactgaggaattaggtgttttgtttgttaagcaggtagtcttatttgtgggatagttggatagtgttatttgaaagtggacttgaattggttgtaaatgtatattgcaaattctgtggcaactagttaaaaaaaagttttaaaaagagaagtatgtactaagaaagacagggaaaatggagtcntctaaaatcntccaatgaaaactgcaaaaggcagaaaaagagtggtagaccaaagaatgaagacngaggagaatgaatagaaaacngtaaccaatatagtagatattaatccnatgatatccataatcnctttgaatgttaatggtatg

SEQ ID NO: 627619 - DNA, 146 bp, Homo sapiens
ccctttccctttttccccttttatttggagggaatgggaggaagtgggaacagggaggggggagggggattttttttatttttttagcccatttccaggggggggaatttttttttaaaatgtgccatgaaaaaagttgtttttga

SEQ ID NO: 627620 - DNA, 175 bp, Homo sapiens
ctgtcattcaggacacaccacatactaccatgggacgttcactacacaagcaactgagtctgggtgattgccacgtgcactcacccagcccggccccctacccatgtccagacccctacagactgtgtctaagctcaggaggaaagggaccctcccatcattcatggggggctgc

SEQ ID NO: 627621 - DNA, 533 bp, Homo sapiens
  misc_feature (4)..(4): n is a, c, g, or t
accncccaaaaaggtttttgtgggtggattgagcccggatacttctgaagaacaaattaaagaatattttggagcctttggagagattgaaaatattgaacttcccatggatacaaaaacaaatgaaagaagaggattttgttttatcacatatactgatgaagagccagtaaaaaaattgttagaaagcagataccatcaaattggttctgggaagtgtgaaatcaaagtgcacaacccaaagaggtatataggcagcaacagcaacaacaaaaaggtggaagaggtgctgcagctggtggacgaggtggtacgaggggtcgtggccgaggtcagggccaaaactggaaccaaggatttaataactattatgatcaaggatatggaaattacaatagtgcctatggtggtgatcaaaactatagtggctatggcggatatgattatactgggtataactatgggaactatggatatggacagggatatgcagactacagtggccaacagagcacttatggcaaggcatctcg

SEQ ID NO: 627622 - DNA, 403 bp, Homo sapiens
tcagcacagagatagaggagagtccaggagcaggaggtcactggaccacaggggccctctcccacacgcacgcagacactcgcgcggccacgtgtactgggcgcccgtggagagccggtgggccaagctcgacttgctgtgtagtgctgtggttttcccctcccatgggtacagaaatgctgccatgacgtgtgtgtctctccatctgttgggtgggggtagggctgatccagagcacagatctgtctcgtgcattggaagatcgccacccaagcttggctagccgagctcgtgtatcctggggctcccttcatctccagggagtcccctccccggacctagcagcgctcgctgggctgagcccctaccccgagaacaggccggtcctcccggggcctccctt

SEQ ID NO: 627623 - DNA, 1042 bp, Homo sapiens
  misc_feature (542)..(542): n is a, c, g, or t
tcgaagccctccattaagtctccgagcccgttctccggagtgttctcctgcgtgtgcgttgtatcgcctcagccaccaagacggaatcaggacatcttccttcgtgcgtaaagttactagctgggagtcatcgcgcgccgtaaactccataggatggccgtgggtctgagtcgaccagggatcaggcgtgttgactgatggctccatgtctcgctcaactagcgtgattctgactgtccgacaatggtagttacaacatggggctctacggtggaatctgtcataggtacgccgtgattcccacaaatgggagacgacgcgtgtgtgcgtgctcctatcgtggaagtgtagcgacatgcatttgtccaaactgttgagttcagctatatattgccacagttccaagcgccgtacaaacgtattgcccttgtcagagggataatgtgcgaatgacgagcaatcttctctggtgtggagctgtgggatcaatgccagcactgtaggataacgtgcacgcgctatcttccgcaggcgtctacatncatgcgtgctcactggctgtgttgctcgtgtcctggtgggcgaacacgtcgctcatctgtttttacgatgatactgcagccatgtgatattcgctcacgaaaaaactggtccctgaggcaagtgggagcgctgtgggactactgtcggtgcaaaaggaagcctgggagtttacggtaggccctggtgaggatttggtcgtggtgagagaatcacacagaggtcgtagggtgttgttcgctgggcctgtttcgcaggggcgtttcacgtggttctccgtggcacgtgccattcgattcattctgacgcggggtcggcgtactttgcgtggtgtacgactctggtctccgggcggttgctgccgcggaccccagggaacgcacgcaaatacggggttgaggcgggccgatcgcgggcgaacgtggcggcgggggcgggcgtggttgtcctaacccttcgagaggtgggggggggcttgatggttgcgcccgggggcaagggt

SEQ ID NO: 627624 - DNA, 368 bp, Homo sapiens
tcacagacaccagctgctctagacggtgatggatctatgaagcccttgttctccttgccaggtaaccgagactccaatccagctctgctgtatccaacctgtgaccttgggcaaagtgtggatcctctccatgcctctgctttctcacccgtaaagagggtcaccttggatctgtcttcactcgtgtcttccaatcctttggtgtccctagtctctggagaagcttcccagactcttttggaagattccagaggacagtcatctatgggcctcttctgcctatggattgtaatgtcctggggtttccctagcagccagccaaagaagataatggagcaatatgtcatgaacggagggatgggtggatg

SEQ ID NO: 627625 - DNA, 573 bp, Homo sapiens
ctctgcaatccctgactcaagagtattaagacttacaagtctatattataaaagaaatacattatgtaaggcgatcgctgccatagagtagatacctctgatggatctaggacgagagtaaatagaacaccttctagaaaggcttcaccattactagatgccataaagaacattatgtgattcctgggaggaggtcaaaataacattaccaggagtatggaaggagtagattccaacatagtagaaactctgtttctactaaaaatacaaaacttaagtcgggcatggtggcagatgcctgtaaatacctagctacctgggaggctgaggcaggaaaactgattgaacccaggaagcagaggctcactgtcgtgagccgagatcgtgccactgcactccagcctggacgacagagtgaaactccatttcaaaaaaaaagaaaagagaaaatctgtagtactgagtcgccaacatcatcaacgatctataggagaccagtatctcattacctagtacctaaatgtattatatagaaaggtggagggggaaaatcaagaaagttacctgaataat

SEQ ID NO: 627626 - DNA, 150 bp, Homo sapiens
gctactgatcctgtctttaggtgtaaattctaatattttgctcaccatgcccgtttgcactaaggcttatcttcatacaacagcgggctgctttgacaggtaacacttgaactgctctccaggccagctgccactctgggactacctacc

SEQ ID NO: 627627 - DNA, 903 bp, Homo sapiens
ggtcctatactaccaaatcctgtattaaaaatttcggttggagcgacctcggtaaatagaacccattctcctccgagccaggacatgctatgagttcaccagtcaaagcataatcttactatatctcaattgatcctacataatttgagcaacggaacgaagttcaccctagggcataacagcgcacatcctattctagagtccattagtcagcacatagggtgttacgacctcgatgtggcgtactcaggacttcccgcaatggtgcagtcgcctcaattaacaggtccgtatgttcaaggattaaagtcctacgtgatctgagttcagaccggagttaatccaggtcgggtgctatctagttcagattcctccctgtacgagaggacaccgagaatctaaggcctacttaacaaagtgccttccgcccgttaattgatatcatcgcacccttaggtattgatagccaaacatactaagaacagggtttgttggcaaccatcaaattcccagatgaactcaaaagtttttgggggctctgcaggtcatagaacacaagggtccaaacgactagcgggggctaggagccaactggaattcaaagtatgcaagaactatgggcaaagaacaactcgtacgctgaggtcagcaggaaaacctgcaataaaatggcccggggaccccgacgtgtggaccagtctagagaggcgctgaggacacaagaggcccctagcagacggcgacaggagctattgatgcccgaccagggaggagaaaaatatggggacgaaaaaaaacaaacacaacgggggccgacaccaaaaacacagggcgcggcgcaagtaagaagaagacagaacagaagggacaaaaacagcaggcaacaaggagacaagcacatac

SEQ ID NO: 627628 - DNA, 1032 bp, Homo sapiens
ggccctgagagggggattgagcctgagagaggagacggagtttcttcttcttcgaaaacccccatccatgatcctaccccctcaaccatccaaggtcgcaataaccatcaacatccaacctcctcctctttggacgtgagaggaggagagaaagaaaccaataagcctattagcaaccacagaacatttgactgactgctagttgcatgcatgcatgatgctgttgatgaatgatgatgaatactgatgctgatgcatacttggttgatgatatggcacatggattggaaagacatattaactaaaccccaggaggaggacaacttacacgagattcatcaatacctcatacattaagacataactccgtacctacatatcagcaccacactattatgacccattgggtgtcatcctcacaaagcgtccacagggaacgcgcacctacacacaagttggaggggagcagagacacaagaaaagtaatccaagctataccaggatagacctactgcactagtggaagcgatagactgccatagatcaatcaaggagagaacacacccaatgaagatcagccagaacatgccctattatccaaactttatagtaacatttgcaaaaagtttgtagatgaattgtgtgacatgtattgtgcaaaaagaggattggtagtagagagatgcaataaacagattatgaagatcatattgatgtctgcaggaactgtggtaggaattgtgaaaaaaagatgttccatgcgaattaatgtaagagactaatgagtgtatacacaagggattgacgaatataggtagagactactaataattgtgatgagtacggatcagttggtggaaagcatgttgagagagattgggatgtataagtcagaagacaacaagtggtgatgacagaaataaacatgagggccagatgaatgtatgatagagaggagggatacaaagggagagtatagtggatggtaaccgataaggcagggaatgcagaaaaaaagaataagtaaaagag

SEQ ID NO: 627629 - DNA, 1084 bp, Homo sapiens
gcacaggaccccgagcggggtccccgagccgcagggccagttcctgatcccagcagcatggcgtcttgggctgagccctctgagcctgctgccctgcgacttcctggggccccactgctggagggctttgaggtgctcgatggggttgatgatgcagaggaggaagatgacctaagtgggctgccaccactagaggacatgggacagcctacagtggaggaggctgagcagcctggagccctggctcgggagttcctggcagccacagagcctgagccagccccagccccagccccggaagagtggctggacattctggggaacggattgctgcggatgaagacactggtcccaggcccgaaaggctctagccgcccactcaagggccaggtggtgaccgttcacctgcagatgtccctggagaatggcacccgtgtacaggaagagcctgaactggccttcacgctgggagactgcgatgttatccaggccctggacctcagtgtcccgctcatggatgtgggcgagacagccatggttaccgctgactccaagtactgctacgggccccagggcagcaggagcccatacatcccccccagcaggcctgtgcctggaagtcaccctgaagacggcagaggatggacccgacctgggagatgctgaagtgggccaggaagcgccgttggcctgggcagacggaagccgggagtggtggcaatgcccaataccagggtgccgacctttgtgctggccgccaatttctttttgacctggggcatcaggggtattcactccaaaagccaagggggggcctcgacctggtggagcgcgcggaagcgacgaggaacggggtaacgagtggaagaggcgctcccaggttgttcgagcaacacgcctggtgggggccccaccgagctgtacgaactgctgagccccattaacccgcgcacgagtccgtgctgcccctcgtggtcgaacccgcgtgtgctggtgagaacacaaagccgagcagacaacacggagggacgataacgccgagcagagagggtgagtgcccacaccggcgcaaaagttgagcagc

SEQ ID NO: 627630 - DNA, 333 bp, Homo sapiens
  misc_feature (208)..(209): n is a, c, g, or t
  misc_feature (248)..(248): n is a, c, g, or t
tactacccatttattctgttctggatctcagacatgctttctttactattgctttgcacccttcatcccagcctctctttgccttcacttagactgaccctgacacccattaggctcaacaaattacctgggctgcactgccacaaggcttcacagacagcccccattacgttcagtgaagcccaaatttcatcctcatctgttagtnntactcccgttcaccgttctcaactactcatacatgcccntgctcttctttacactgccggtttacactgtttctccaagacatcacagctgatatctcctggtgctaatccccaaactggcaac

SEQ ID NO: 627631 - DNA, 474 bp, Homo sapiens
  misc_feature (3)..(3): n is a, c, g, or t
gcngtatagtgcgtcttcctgcatcatgcggcggatgctgattttgccgactttgtgtcttgacgattttcttttccgtcgcctgcgcggtgtagcccgacaggtcgggcagcgccggcttggccatttccaacggcgcggtgggcgggctggagatggtgtaggttttggcctgttgcagttccttggcgatgatcggcgccttggccgccgtatcggcaaacgctgtggcgctggccatcagcattgccgcgacgaagtaggctttgagcattcatggcgcaggctcccatcagaatttccagaccacgtcgacaaacgcgcggtgcaatgtaggagtcgacctggctgccataggcatcgccgggcttgaacaccaccggcacggcaaacgcaccaaggctgaaggctcgtcgatcgaactggctcagcgcggctggcagcaagcctttcttgaagtacttggtggaccac

SEQ ID NO: 627632 - DNA, 471 bp, Homo sapiens
  misc_feature (332)..(332): n is a, c, g, or t
aaaaaaaaaaaacggaaggaaacatcagcctgggggccccagactcaacatgtgtgtgtggtggggttccagcccaacatagagtaacattatttgtacctcccaggctagctcagtccatgggaggctctcctgtccctgaaagctgacacccacctttcaccactttgcccatggtacagttcagtttccttgtctgtaaaatggggatgataatgggacctaccctgcagtgttgttataagtattaaaggagacagtgcaaaaaaaggccttggttggtgaagagcccaacctcggaggggagctgctgggatcctccttattttgantgggatgtccctgtctccccctccccctgctccttgaacatggccaaggaaagtgaaaaacaaaaattattccctttgctagcccccttccccttgatgcctgggaataggttttgcccataaacggatttgtgttgga

SEQ ID NO: 627633 - DNA, 514 bp, Homo sapiens
ggggactggtctctctgtgtcactcagagtagactgcaatggtacaagccatagctcactgcaacctcaaattcctgggctcaagcgatccttccacctcagcctccgagtagctgggactacaggtccatgccattatgcccagcaaatttttatttttttgtagtgttttcgttttattttattttattttatttttgagacagagtccagctctgttgcccaggctggagtgcagtggtgcaatcttggctcactgcaacctccacctcctgggttcaagtgattctcatgcctcagcctcctgagtagctgggattacaggcatgcaccaccacacctagctaatttttgtattttcagtagagacagggttttgccacgttggccaagctggtctcaaactcctgtcctcaagtggtctgcccgcctcggcctcccaaagtgctgggattacaggcatagccaccgcgcctggccttgttttcacttttaacatagcttcattgatcct

SEQ ID NO: 627634 - DNA, 108 bp, Homo sapiens
gccggaccgaaaccttattgtggatgacctcaatatgagtttcgattgttacgtgtttttgttgggaagtaattctgttgaaaatgttctcacatacaggaattaggg

SEQ ID NO: 627635 - DNA, 145 bp, Homo sapiens
agaatagtcttgagactggagcacagtgatgaatatcaggaggcagctcaccacccccaacagccgttccagagactcaggagacagtcccatccagacagcaccaaccttactcctccctacccccatgtcatctccctaagga

SEQ ID NO: 627636 - DNA, 131 bp, Homo sapiens
tgtccggtgctccacgtactctgtcaccgttggtggctccattcaagggaacacagacagcaatagggtgcatttctcaggtggcgaaactggcacaagcagcaacctatggaatgcaggaaaagggggcc

SEQ ID NO: 627637 - DNA, 1034 bp, Homo sapiens
tattctggtattttattactggaaatatgtggtccttactcattcccaccccacaataaaaattctgacccaggccccccatttctttccctcatccccttcttccaccacaccatcccggaacaaggtgctccaggattcccgtgcccacgtggccatttgggagtgtggtgtctccatggggttagcaagtggtggaaaccaccagggccttggtggagaaaatggagggggttgagggagtcccaggaggggcttattggagggccttggccactgtgctcataggcgagcctcgatctcctcatcatcgggacaggtgtggaagcgaattcttcccgggcgttaggcatttgctcaagttaccgattgcacttccccggaaggcctcggggaatgggtgaatccccggtacttcttacacaccaccggtactagtgtgtaacttgggcaacaggttgcagtcagccagggctgagctcgtggccatccaaaaactcctctgagagacaccttaatcttcacgcacgggttccatccacttcttctgggaggggggatgtcaacgctcaccggtctaaacccctccagggcttcaggagctcccttctccacatggtcttgactgctgggtcgactcctcgatggccggcgcaaacttggccaaacattgtccagcccagtcggattgggacacagggtcaaagcctgccaccaaacaccacccaccactcacccaaaatcataccacaacaaacacaccccccccaaccacaccaacacacaccaccacaccacaacaaaccgacacacaaacagcagggcgcctacacataccacaccacgccccaaccaccccccaccccgaacacgcgccacaaacagggatcaacagcgcgacgcacgcgcacccagcccagccaagccacgtgcgccccgacgcaaacatggagtagtacagcagcccaccaacgcagacacatccaccgtacagcacaccgtgacttgatccaaagtcgcaggccacgccgccc

SEQ ID NO: 627638 - DNA, 239 bp, Homo sapiens
  misc_feature (103)..(103): n is a, c, g, or t
  misc_feature (124)..(124): n is a, c, g, or t
  misc_feature (148)..(148): n is a, c, g, or t
  misc_feature (191)..(191): n is a, c, g, or t
  misc_feature (229)..(229): n is a, c, g, or t
atgtagcatgatttcgttgggatgcaaatcttaaaacagtcctttaatatgaaccaacaatctggagcacaccagaaggacaatctagaattgtggcttgaanggactgcacgtaaaacccacntaaaaagatgctggtaacctgatngatgggcaaaccaggttaaaccggagcacccgtgccttgtctngggctcattcacctactccctaatcccatgactaactnttactggtga

SEQ ID NO: 627639 - DNA, 213 bp, Homo sapiens
tatcaacaggtcctgcggaagtcttcatgacctggcactacttcttgtatctttgttcgagagtccactctgccgagatatagcgacgggtcttaacttgtggcaaagtaatggcgactatcaacgcacgacatcggagagaagccaagctcaggaatatccaatacgaacacacctggaagcgtacgtgggtacgagctcgaatcgaatcat

SEQ ID NO: 627640 - DNA, 313 bp, Homo sapiens
  misc_feature (13)..(13): n is a, c, g, or t
  misc_feature (31)..(31): n is a, c, g, or t
  misc_feature (36)..(36): n is a, c, g, or t
  misc_feature (80)..(80): n is a, c, g, or t
  misc_feature (118)..(118): n is a, c, g, or t
  misc_feature (129)..(129): n is a, c, g, or t
  misc_feature (164)..(164): n is a, c, g, or t
  misc_feature (275)..(275): n is a, c, g, or t
ttggcgtccgctnggtggccgcgtgctgccnccgtncaggccccgcggcctgggctaggggtaccgccccgaggagggtnacagctcggaggtgaagacggaggatgagttgcgcgtncggcacctggnggaggagaaccgaggcattatggtgctcgggattnacagagcttatgggaaaaatgcactcagtaaaaatcctcctcaagatgttatcaaaagccggtggatgcattaaagtcagataagaaagttcggaccattatcataagaangtgaagtccctgggatattctgtgcttggtgttgacct

SEQ ID NO: 627641 - DNA, 264 bp, Homo sapiens
tgacctgggcacagaaatgtcattatttcctataggggtcggaaatgtagtctatcggtaattttgcgtgatgcttaaatttacttataaatagaaatatgtgaataacgtatttttcctctttattatgtaggtttaattgaagtagtatattattttcattacacattaacatgtagtatagtactatctcaaatataactgctgggtgatgaaaaatagccttcacaaactcatgttccaaaatttctgtgcccatttcaa

SEQ ID NO: 627642 - DNA, 328 bp, Homo sapiens
aagaagcgcacgcagatgttaatacccactctaaattctgtgtctagatcaccatgctgactgcacagacgttgatgagagctgatagaggtgtacgaatatggagcgccatgaatactgaaattgcgatcagatgttgcagtaccgattccatcagagcatccggatctaatcaccggccatgcatgtggcgcccccgctgagacatacatacgctctggtacttatagccgaacactactcttaccctatactcctggctcagatgtctctgccgtgatagacgctgttgaagatcgcatctgctttcactacaggggaccgagtc

SEQ ID NO: 627643 - DNA, 877 bp, Homo sapiens
  misc_feature (21)..(21): n is a, c, g, or t
ggcgaaaagagcgggaagggnagtggaaggcaggggctgaagacacaggccaggcggaatgaagatgatggtggtcttgctcatgctgtcctcgctcagccggctcctgggcctcatgaggcactcatctctcaggcaatacctggactctgtgcccttgccaccctgccaggagcaacagccaaagctagtgccgagctagaccacaaggcctgctacctgtgccacagcttgctgatgctggccggggtagttgttagctgccaggacatcactccagaccagtggggcgagctgcagctgctgtgcatgcagttggaccgccacatcagcacgcagatccgggagagcccccaggccatgcaccgcaccaatgctcaaggacctggctacccagacctacatccgttggcaggagctgctgacccacttgccagccccaggcccagtatttcagcccctggaaagacatctaaagggacagggtcagggcaacccagggctcctggcttcagcaggaagtgaacaggctcagggaactggaggaagcgaagcatcaaggccagaggaggccacatgctgaccagcctgatgaggcaagagcctgcccctgccaccgccccgacccctctcctctctgcaagagcctgcctctgccaccgccccgaccccctctcctctcagcaagggatgggcctctctgcctcgcccacccctcagccgctcctcccagccatctcctcttccctaaggcctctgtctccatagctctggtttccctgggcctcagtcctccccaccctccttcctctgtctccctgtcactaatgtgaggtttctttgtgcacattaaagtcttctttcagcatcaaaaaaa

SEQ ID NO: 627644 - DNA, 1471 bp, Homo sapiens
  misc_feature (314)..(314): n is a, c, g, or t
  misc_feature (409)..(409): n is a, c, g, or t
  misc_feature (542)..(542): n is a, c, g, or t
  misc_feature (600)..(600): n is a, c, g, or t
  misc_feature (823)..(823): n is a, c, g, or t
  misc_feature (935)..(935): n is a, c, g, or t
  misc_feature (1225)..(1225): n is a, c, g, or t
  misc_feature (1471)..(1471): n is a, c, g, or t
gctggtcccggttccccggttaccggggcgcgaatgtatgaccacaatggcggacgccatcctggtgcgcgcgacggcccatatcagcggtctcgccgccggccgggagcttccatggctggtcggggtactgtagacgggttgattgaaagcgcccggtactgcctctcttgttgctcgcggctcttgggacgattggagagccatgatacgatgttgacagtagctggcagacaatggcactacatagtgaattgttggcgtatccactacgaggccatggttgcgagccgagggtaacgacccaaccgctnggactgcgtgaccagtccaactgaacgactctcttaagactgaggcgagagggtgcgcgcgctctataaggttgcataccgataaggtacttgangagaccacttggagcacaatcgtgcgccagtcaatcgacgcgaaggcgtcagcggggtaatcgaaccagttcaaatttgggcggggtcccaatgatgcgaaaggtaattagtgacctgcacgggctcggcccntatctaaccgctcctgacacacaaagcacgtgccgcagtgtgtcatctgcggggattntcatgattaataggaatccactgtatcaagccatgagtgagcatagtaacccccgtcggtagtggtgtgcaattccctggttgtgctaagcggaatcgaaaatgcacaggtcccccaattgggcgcgtcggttgattcccgctggttgaacggcgtcgttcttattgaacctaagggcacagcgaacgaaagaactccgcgtaagtgctaggtgcagggccanttcggttgggttgggggcttgggagtgagttaagaaagcctatagggtgccattagagcgtgaccttggtgacacaacaccgtgagacgttctatagacattagctatagangtgccgtgggagattgagcgctaggagcaccacactctagtgttgggcactcccaccggagcgaaggggccttgaatcctaggcaaaggcaagctttgttgggaccttaggttcatcgttgcccggaggaagtatggaacactccccccattcttggattggcgttttacgtgcggacagggccaacgtggcattttggtggcccccactgtggtgcccacgtgggtttccaagttggggagggacatccttgcaaagatctgaaacggggcgcttagaaacgatccctntgtttgacccaagcaggcctcatacaaatgtgggataggtgggcgcgtaggaatgttcaaaacatccaaattagcccccctcatgcgatatggtttgtcacacggggcccctgaaagaccccgctttgagattgagagactttgcgttgtctgccattgggcctaggaacggtgggcccgccaaggggcactggcgaagggaaattcctgcggggcgcctctagggaccgggtgagaacagaaccn

SEQ ID NO: 627645 - DNA, 147 bp, Homo sapiens
tagaggatcccagatgcaaccaaagtcagttcttctacgctactgatcggaaagagactacgggttagggagacctttaacctcagaccaaatgagttcaaagtatatgtctgtcaacgctgaattggagcaaagcggacttggagc

SEQ ID NO: 627646 - DNA, 972 bp, Homo sapiens
ctggggctggatctgggcacagcaatttgcaggcactgctgggcaggagtccctgatggccaagctgctgggctctgtatctcccacaagctgcagcggaggccccatggagcaggagcagaagcacacgttggagaactgaacttgaaggacaggacttacagcattgaggtcacacagctgtcctcgctcagccggctcctgggcctcatgaggcactcatctctcaggcaatacctggactctgtgcccttgccaccctgccaggagcaacagccaaagctagtgccgagctagaccacaaggcctgctacctgtgccacagcttgctgatgctggccggggtagttgttagctgccaggacatcactccagaccagtggggcgagctgcagctgctgtgcatgcagttggaccgccacatcagcacgcagatccgggagagcccccaggccatgcaccgcaccaatgctcaaggacctggctacccagacctacatccgttggcaggagctgctgacccacttgccagccccaggcccagtatttcagcccctggaaagacatctaaagggacagggtcagggcaacccagggctcctggcttcagcaggaagtgaacaggctcagggaactggaggaagcgaagcatcaaggccagaggaggccacatgctgaccagcctgatgaggcaagagcctgcccctgccaccgccccgacccctctcctctctgcaagagcctgcctctgccaccgccccgaccccctctcctctcagcaagggatgggcctctctgcctcgcccacccctcagccgctcctcccagccatctcctcttccctaaggcctctgtctccatagctctggtttccctgggcctcagtcctccccaccctccttcctctgtctccctgtcactaatgtgaggtttctttgtgcacattaaagtcttctttcagcatcaaaaaaa

SEQ ID NO: 627647 - DNA, 166 bp, Homo sapiens
tattaaaaaggtcctttaaaggcttcttgattggcataaagttcctaaggttataaattttccccccttttggctgtaaagcaaagtgttttaatccccggttgtgccttattgttccattaaaattgtattttcgatccatcaataaatacttgtggttgaaaca

SEQ ID NO: 627648 - DNA, 330 bp, Homo sapiens
  misc_feature (29)..(29): n is a, c, g, or t
  misc_feature (44)..(44): n is a, c, g, or t
  misc_feature (81)..(81): n is a, c, g, or t
  misc_feature (139)..(139): n is a, c, g, or t
  misc_feature (151)..(151): n is a, c, g, or t
  misc_feature (175)..(175): n is a, c, g, or t
  misc_feature (184)..(184): n is a, c, g, or t
  misc_feature (245)..(245): n is a, c, g, or t
  misc_feature (250)..(250): n is a, c, g, or t
  misc_feature (253)..(253): n is a, c, g, or t
gccctcccgaaaatctcctttgaaagccnagacatctttctccnagcttaaagacttgtagataataactcgttcatcttnatttactttccactttgccccctgtcctctctgtgttccccaaatcagagaatagccngccatccccccnggtcacctgtctggattcctcccnattcacccnaccttgccaggtgcaggtgaggatggtgcaccagacagggtagctgtcccccaaaattggncctgntgngcagtgccccgtctccacgtttgtttccccagtgtctggcggggagccaggtgacatcataaatacttgctgaatga

SEQ ID NO: 627649 - DNA, 575 bp, Homo sapiens
  misc_feature (147)..(147): n is a, c, g, or t
  misc_feature (207)..(207): n is a, c, g, or t
gttttcccagagggggggccggtgggcattgtattgacgaactcatccttagacgtggggcttcccggcgggattacgttggtggctcacctcccctaggtcctaccaataggagcgtggattggccatcataggagggttcattcnttgatttcccctattgtcagggaccaccctaggccaaacctacgccaaaatccctttcantattatatttatggggggaaatttaacttttttcccccaaccctttttgggcctatccggaatgccccgaggtttattggattaccccggtgcataccccccatgaaacatcctttttttgggagggtcattcatttttttaacagcgggaatattaataattttcatgatttgagaagccttcggtttgaagggaaaagtcctaatagtagaagacccctccataaacctgggggggttatatggatgcccccccccctcccccccatttgaagaacccggatacataaaatttagacaaaaaaggaagggattgaaccccccaaagggggtttcaagcccaccccatggcctccatgactttttta

SEQ ID NO: 627650 - DNA, 175 bp, Homo sapiens
ttggtttaagtaacaaggtaaaggcctattgtggcatttttcatcacaagtagctgaactaaggaaacttgtggtggagatgttagtgtgtaaaccaaattgaggccggcttagcaacccagcccttggcagcactgttaaaagagttatcttctgaagccggatctaagagggg

SEQ ID NO: 627651 - DNA, 285 bp, Homo sapiens
gcatcagtgtaggtcaggggagtcaggctggagaatctagggctgtactaccggtttgcactccaatctctatcagctttaaaagtactgcttcctacactggagtacacagtggtgtctgtgtcatacggagtgatatcaggactggtagccgcttgtctggtgggagccttcagatgccacagactccctgcttttgctgggcaccattccaccaaaagatggagataatttggttctgtcttccaaagttttcagctcttctgaggcacgaaccataccacg

SEQ ID NO: 627652 - DNA, 136 bp, Homo sapiens
acacaggctgatgagtggaaaagtaacagtgtggggacatgtaattacagttgtatgggctgaccctgtgaaagaaccagatccagaagtcatggctcaggtaaaagttatcgtatgtgagacacttggctactac

SEQ ID NO: 627653 - DNA, 327 bp, Homo sapiens
  misc_feature (30)..(30): n is a, c, g, or t
  misc_feature (99)..(99): n is a, c, g, or t
  misc_feature (315)..(315): n is a, c, g, or t
tcaaagtgttttgaagaggagacgacgagnaagggaaagctggaaatcccaggtgtgaattgatggtcttctggctttcccagggcagccctcccctcntcccgcatcataaatctcagcatttaaaaataactgcaagctgggtgtggtggcttgtgcctgtagtcccagctacctgggaggctgagatgggagaatcccttgagcccaggagtttgaggctgcagtgaactatgattgtgtcattgcactctagctggggcaacagagcaagaccctgtctcaaaaaagcaaaaaacaaaaaagtcaaataanagtaaaaaaaaa

SEQ ID NO: 627654 - DNA, 579 bp, Homo sapiens
  misc_feature (4)..(4): n is a, c, g, or t
  misc_feature (104)..(104): n is a, c, g, or t
  misc_feature (138)..(138): n is a, c, g, or t
  misc_feature (147)..(147): n is a, c, g, or t
  misc_feature (149)..(149): n is a, c, g, or t
  misc_feature (180)..(180): n is a, c, g, or t
  misc_feature (195)..(195): n is a, c, g, or t
  misc_feature (257)..(257): n is a, c, g, or t
  misc_feature (319)..(319): n is a, c, g, or t
  misc_feature (321)..(321): n is a, c, g, or t
  misc_feature (325)..(325): n is a, c, g, or t
  misc_feature (413)..(413): n is a, c, g, or t
  misc_feature (428)..(428): n is a, c, g, or t
  misc_feature (476)..(476): n is a, c, g, or t
  misc_feature (479)..(479): n is a, c, g, or t
  misc_feature (490)..(490): n is a, c, g, or t
  misc_feature (497)..(497): n is a, c, g, or t
  misc_feature (569)..(569): n is a, c, g, or t
cagncgccttcctgccaggatgatgcttcaggaactttctgggcacaaagtgcttctaggtggacaatttttaaaaacacacagagccacgtgggtaacctatngtcaccaagagaaaaaagaacctcaaaatcagtnacgcgacangnagaattcggacctgtcctttctgaggaagtncttatttttcctgtnactgtatgacggcatcacaccttcctcctgaacgtgggggccatagtcactgactccgccancctcccaccagtctcccggtgtaggaggagctgcagacgtcctcaagcagaagtcactcctncntccncagtggtaactcctgtccctgcccaagtcctcccccctcccccgcagctgtattttcccttcgaaaagcaggatgcttccccgccatngccgactccaggctntccacaccacggcacaacggggatcagcagcctcttgccaccagtccnctnggccagcggcngggactncaggctcacgccgtagtctccccgccaatgaccacagcggcgggcgcctctgtgcagtgcgagtggtaactntgaacctcaa

SEQ ID NO: 627655 - DNA, 392 bp, Homo sapiens
  misc_feature (1)..(1): n is a, c, g, or t
  misc_feature (11)..(11): n is a, c, g, or t
  misc_feature (153)..(153): n is a, c, g, or t
  misc_feature (186)..(186): n is a, c, g, or t
  misc_feature (274)..(274): n is a, c, g, or t
  misc_feature (322)..(322): n is a, c, g, or t
  misc_feature (335)..(335): n is a, c, g, or t
  misc_feature (357)..(357): n is a, c, g, or t
  misc_feature (382)..(382): n is a, c, g, or t
nggctgctgantgagattttcacgtcgccgctcaacctgctgctgcttggcctctgcatcttcctgctctacaagatcgtgcgcggggaccagccggcggcagcggaacaaggaacgacgacgagccgccccctctgccccgcctcaaggcgngaacttcacccccgccgagctgcgcctttcgangcgtccagggacccgcgcatactcatgggccatcaacggcaaggtgttcgatgtgaccaaaggccgcaaatttttacgggcccgaggngtaattaaggggtcttttgctgggaagagatgcatccagggggccttnccacatttttgcnggggataaagggaaggcacttnaagggattgagttacggattgaacnttttttgaac

SEQ ID NO: 627656 - DNA, 639 bp, Homo sapiens
acccgtatggtgtactcggaacggtgggtgtgctcgtggcacaatcattggtgctctctcttggcaacttggacgctgcaggatgtatgcggctatgatggatgcccagaggcacaaggaccgtattgacatcatcgttacggggacctgtgaatacagcctgagcagtcacgagcgcagccgttgagggtgctgaatgaggcgctcacctctgccactctgagcgaacccgaaagcaggcatgaatgagatacgcactgcagatgagccattgaacgaggctgaacacagatggatggcactgggactacgtgaatgcccataccgaatgcgtgaactgctgacctacgaacctgtgaccactatgaagacatcacggtcaggccatgtgcgtgcgaactaagcgttaagcgacggatcagctcccggtatgatggccagccaagtgaaccacgctgcttgaggctacgtgctggatgcttcgaccactcgactcattgctaggcattgtgactgactctgcagaattctacataactggcgcaatcggactagtacgagtcgactacaagtgactggccggtctattacaacggtggtagtggccaatagctcgaggtaccgaacttaggaggttta

SEQ ID NO: 627657 - DNA, 473 bp, Homo sapiens
  misc_feature (10)..(10): n is a, c, g, or t
  misc_feature (36)..(36): n is a, c, g, or t
  misc_feature (62)..(63): n is a, c, g, or t
  misc_feature (84)..(84): n is a, c, g, or t
  misc_feature (99)..(99): n is a, c, g, or t
caaaaacggnaatagccaaaaaccccaataatccanttttagggttaacccccaagaatatnnattggttaaaagattaagaancatacatttttgccncctttatatattcagattatgtataagaggaatttaggggaatatcatatagtggcctaagtgcacaggctttggaaacagatttcctgaattcagattcaaatgtcacaatttgctagctgcatgattttgagcactttagcttcactgtaggggataatgggacccacattcccagggttgtcatgttgtttaaatgatataaaaagtttagggccagtgtagtggctcatttctgtaatcccagctacttgggaagctgaggcaggaagatcatttgagcccaggagtttaaggctgctgtgagctatgattgagctactttgctccagctctgggcaatagagtgaaaccccatctcttaaaaaaaaaaa

SEQ ID NO: 627658 - DNA, 349 bp, Homo sapiens
  misc_feature (204)..(204): n is a, c, g, or t
cgtttgaaaactatggcaaaggataggagtggggttcacacagctaagtctgaagggaaacgggaagcagcaaccacctctgcacctcacgctttgtctaagagtgggttcatgtgacttgtggccaccaaaactcatagggccgtgtccctcaggtgcaatttgcagtctgctcctagtgctatgccaagcctttgccagagnagcagctgttgagggttgtgagcaaatgacatgtgaacatgcagatgtgccagttggatgggactgttgtgggaacatgggccaatgggcagctctatggggcttgacttctcaagggctcttgaatcacggtgttgtgtgttgt

SEQ ID NO: 627659 - DNA, 957 bp, Homo sapiens
  misc_feature (413)..(413): n is a, c, g, or t
gggctctctgatgcaggcggggagagagaccagagaatgggagcgacgtttgggttgtggagtgtgtcgggactgagtgagggaagggctaagttaagggtgtcaaggtacggtctgagtgaaggtaggggatgtgcggaaagggaacggagccatgagagaactagggggagaggagtacgcgtgagatgtgagaggcaagtttatttccctagatgcactgccttggtcgcgcaggtaaaaccgctgaaggaaagggtgcgatcttccacgtaggggaacctcacgaacggtgaaaacacttgcgactggccatgtgagccaatctggcccaggatcagaaacttggccctgggggacacgtgtcggtgtgatgacgacctgtcggacccagggaattagccaggacgtgnagcaatattgtccgccgcaagaattcgttgtagttgagccatcttagtggtgacgggaaagggtgccgtgtcattcaaattccagggggaatccagggatacacgggcaggaacacccctgaaatccgtgtgggcgtaaacctgcatggagtttgcccgatggtccctaattgtggacacgaagcgagaggagggtattgacctccaccagggattcaggaattgtattggtcactcgtgtccacttaggatgggtcgacgacattaaggtggatttaaacccccgcgcaatggaaatccgaatgcggtgagttaaaaccttggggagaaagacttgccacgcatggctagttttctttttcccacgggttggggacttatacgaggaagattacggacattctgggcactgggctatggtatcgttggaattggaaatcgagtaggtggtgatgtgacatttataattagcgcgcgaagaattcaaggcaaggggcatattggaatcaaaggatattgctaagggggaatgggacttggagaa

SEQ ID NO: 627660 - DNA, 375 bp, Homo sapiens
aagggaagttatgtacatacatggggaaggatgtacatgagatgcgtagaagtaagggcacgatccatgaatagtgaactgaagggcggagatcgccgactaacaaagcaaaaccccttgctacatgggcaccacaagaactgaggaaactgaagaaccaagcttgatctgttaccattgggatgataacctgaggacccccactggaactctcccatcttttgaccaacctggaactgaggagtgtgcaccggctgctgaatgtctgggactgagcggatgagtgagtgacggcttgaacacacaccacattgccactcctgccacagcagcagccgccgccgccaacagcagcgctgtacgtgagctacgtac

SEQ ID NO: 627661 - DNA, 229 bp, Homo sapiens
cgatggccatggagtattatacactatcaaagtttctagagctaataacagctcagttctgcccaactcctacaagtagtgggtggaattacgtgaaaggttaattgccaacactcaacagagagcagccggatcagctgacacagccacaaatatcttggaaagaagaaacttcagtggctggtaagggtatagtttcatactatctggctatccactcaaccatcca

SEQ ID NO: 627662 - DNA, 801 bp, Homo sapiens
ctaagacagtcctatgtgaaccgtcacgagggtgcactagtttgaaagtaataagcaacatgaaccccagcctgtaaactcagattctgagactatgtacctcaggaaatatacagctcatgggagtcatacagatgtggatagtaatgatagataattacttacaggtagggaaatgtaaacagatcttatcggcaaaatgataatgacaggccaaattgttaaaggtaggttaaaagtagacagcatggtgggaaggttaatcagagtcaaaatgtttcagtgttcttacatttattgggagtagccacgttacatatcaacttagtcttttaaagtatgcatgataacaattccgcaggttaattgctcaaacagtatatcataatcctctaaacatgcaataagtgcatgcagcagcatggctggcgcatacatagggacagcacacccaacatatctaacatctctgcaggaaaatcaagccataagcaaacaggtgcgcctcaacaacaaccagatgggcaaaacaagtccaaatagatcagctaattacaactaaatgctctacacgtatactaaactaggccccaaggaacaacattgcaattcttaacaaagcaaaaccccccaaattcataatggctggtataacaggaaaacacaaacttccacctcaaagggaccatataacgttgttcctgccagctggtgatgtaccaatactacggtgacttgtactaataactgttgcattacacaaaggctgatgtccaaagaaatgtcctttatgatactcca

SEQ ID NO: 627663 - DNA, 1108 bp, Homo sapiens
gggctggggggagctgcttggcggtcgggcggggggagcgcggcgtgcccaagctcgctcggcacgcgccccgcccctcagaggcctggctcccgcacgcaccgtgcagcctgctgtgccctgtgggtcccgagtgctccgccgccctgcccctgagccggtgcccagccgcctccacggccctgcgctcgtactggagcgaagagctggcctcctgaaggaggggaacgggacgtggtgggcgggcacggcaggattaaacctccatttcagctaaatcatgggagagattaaaagtctctcctgattataactgcgtttacgagggtaccaagttccccttaaaaaggattattgtggatgatgatgacaggaaggatatggtcgactctatgacgcgggcacacccggaaagtattcagggtgttcctcatcataattccctggccccctggtagactggcaactgcacagcaagtgacctccaacccgcgcaaggactttatcacggcagcttcctatgaactggcattgccgaggttaaacaggaggaaaacacggcgatatagcgacggcaatcccaagcccaagtacagggagcaccaatacatcgacagttcatgctggactgcaatatcagaacaaaagtataagaacccatttaccagcagccatacagggtttcaatacgttataaaggagcagcacatacataaacggaagacctaacaagcaccccaagaaacagatctgctcgacataccaattcaccaaactagtaccttagaagctcccatatacactaaatcccatcttaacattaccattcacaatcgacaactcatacactcccacaaccaaacacttgtgagctggcaacacagcaatatggaccagtagcttggattataaggacccacggcacaacataggtccattggagcaaacacacacagagggcgcgccgtcgacccaaataagttaagcacaaaggcgttcgatagacatgggaatacaccggcaaaaagccgacgggcgcagaactgcccacgcatatcagacaatacctgtgaatcggcacccagtccatggtgaacacaacatcaca

SEQ ID NO: 627664 - DNA, 622 bp, Homo sapiens
cggacttgtcagtaggcttctgtctctttagagccgagaaaatagtaattaagtggcctagatataggaagggcaggaataagcacttactccccctgaccttccaatgatgaacaggagaagcagtgccaaatcctcaataattgcaagtcctgatgagaagtgatcttgtgagaatgcagcagaacacgataggtggatctggatagacgtcttgactctattcaaccggtacgtctcgtgatctggacgagtgccagattaaggtaacccacgattgttagacaaccgtcttcctgctgagccaaagtttgctcattacccctccactggggaagcagctgaggcccagggccttgctccctgggaaattctcttactctccgatctttcggtgctattggaccatgttactgtgccaaagtgtcttaatgcttgtcccatctatactcagcttggccttggaacccacataggagttggtgggggagggatgggtagatgggtattattcattgtatgttgatccaggtgtgtgtattatatatagagacccctcgccttattgtggtgtttgtccatccctcttccttaacaggattgaaatatatatgcttctgtt

SEQ ID NO: 627665 - DNA, 176 bp, Homo sapiens
ctcggtcctgggctccaaagtgctgggattacagattgagccactgcacccggcctaaatacatcttgatgaaggtttcatggaggatgagagatatgagctgggccttggatggagcagtctccacacgcttacgacgtgagtgacgggccagggatggagtttctctatcttgg

SEQ ID NO: 627666 - DNA, 539 bp, Homo sapiens
  misc_feature (1)..(1): n is a, c, g, or t
  misc_feature (68)..(68): n is a, c, g, or t
  misc_feature (78)..(78): n is a, c, g, or t
  misc_feature (138)..(138): n is a, c, g, or t
  misc_feature (164)..(164): n is a, c, g, or t
  misc_feature (168)..(168): n is a, c, g, or t
  misc_feature (175)..(175): n is a, c, g, or t
  misc_feature (178)..(178): n is a, c, g, or t
  misc_feature (184)..(184): n is a, c, g, or t
  misc_feature (193)..(193): n is a, c, g, or t
  misc_feature (206)..(206): n is a, c, g, or t
  misc_feature (209)..(210): n is a, c, g, or t
  misc_feature (216)..(216): n is a, c, g, or t
  misc_feature (219)..(219): n is a, c, g, or t
  misc_feature (221)..(222): n is a, c, g, or t
  misc_feature (231)..(231): n is a, c, g, or t
  misc_feature (257)..(257): n is a, c, g, or t
  misc_feature (263)..(263): n is a, c, g, or t
  misc_feature (283)..(283): n is a, c, g, or t
  misc_feature (287)..(288): n is a, c, g, or t
  misc_feature (300)..(300): n is a, c, g, or t
  misc_feature (306)..(307): n is a, c, g, or t
  misc_feature (311)..(311): n is a, c, g, or t
  misc_feature (333)..(333): n is a, c, g, or t
  misc_feature (356)..(356): n is a, c, g, or t
  misc_feature (426)..(426): n is a, c, g, or t
  misc_feature (430)..(430): n is a, c, g, or t
  misc_feature (531)..(531): n is a, c, g, or t
nattgtcgctatggagcgagccggagatgcagctcaaggggaagaaagtggtccatgctgtggacggnaccgccgagnaacgggatccaccccctgagctcctccgaggtggacgaactcatccacaaagcggacgangtcacgctgagcgaggcagggtccangggncgggggnggnagaganccggggggntgtggaggggggnagnncgggancangnnctcccgggngggaggatcaccggtggtggcgaggnagaggnaggggagggggagggtgcgngggnnggggggggatgncgaggnngggnagggaggcgcgcgcgcgggtgnagaatggatgttgcatggggttnagccagaagaatgggaggatggaggggcggaggaggaagaaggtggtgggggcgtgtggcaagatgaggnatgnagggggcggagctgggtgggtggcatggcgaagagcggcggggtggaggcgcgcaagggagggtgggcaggcaggcgcaagcggggagtgggtgggcgcgnagggtggg

SEQ ID NO: 627667 - DNA, 302 bp, Homo sapiens
tccataccccagagaaaggaagacagtatgctgaatgatccgtttagaagtttacaatgaagtatgcttctaatactgctcctggcaggccactgcttctggagctcttcccctgaacagctctacaagcctggaaaaaaataatgtgctattcggtgaaagatacttagaaaaattttatggccttgagataaacaaacttccagtgacaaaaatgaaatatagtggaaacttaatgaaggaaaaaatccaagaaatgcagcacttcttgggtctgaaagtgaccgggcaactggacacat

SEQ ID NO: 627668 - DNA, 684 bp, Homo sapiens
taccatacaatttttcacactgctcatgtgaggtgacagctaaccctagaaaaaaaggactcagcccagggcactgaggacgcacctgataacagcagcctggagctcctagcagataccagcgggcaagcagaaaacaagaggctcaagaggggcagcccccgcatagaggagatgcgagctctgcgctctgccagggccccgagcccgtcagaggccgccccgcgccgcccggaagccaccgcggcccccctcactcctagaggaagggagcaccgcgaggctcacggcagggccctggcgccgggcagggcgagcctcggaagccgcctggaggacgtgctgtggctgcaggaggtctccaacctgtcagagtggctgagtcccagccctgggccctgagccgggtccccttccgcaagcgcccaccgatccggaggctgcgggcagccgttatcccgtggtttaataaagctgccgcgcgctcaccaagtcctcttccgcgtctgcttccgcgtcgggcccgggcggggcggggcggggcgtggagccgcgccgcggcctgacgtcacccacacctccctgggactgcgtcactggtgcgcgccgcgggtcagggcgcaatggcggcgctgggcggggatgggctgcgactgctgtcggtgtcgcggccggagcggccgc

SEQ ID NO: 627669 - DNA, 918 bp, Homo sapiens
ggctgccttttctctttttttttaagaaactgatgttattttccatcaaccattttccatgctgccttaagagcctatgcaaaaaccgttaagaccagtcaggggttgctcctacccattacagtggcctgagcacgtgggagctgcagaccagtcttccgggggcaggctgagcgctccagtcttcatctagggaatggctgaataggcacagagggcaccggtacaccttcagaaccagtctgcaacctcaggatgagatagacagtgaactcaggagcgggagcagcaccattacaccctgaaatccctcctgtggtcacgggcttctcagagagacagcgtggtcttcttttcaatctcttacaggatctctgtagaagtacagatcaggcatgacctcccagggggtgtctcacgggacacgtggtgccacgcatgcgcagaactttccagagccagcatccaccacatcacacccactgaagtgagctccctatgtagtcgcatgggatggcaatgtacacatagcgcagaggagaaatctgtgtcaccaggcaaggaacgtaggaaacataacaatgcccctgaagggctggggtccaccctggggtcagccacccacaagacagccgtgattcccggaggttgccgggaccgggatagtcaaggctccagcagtggacaccgccaccatggagtgctcccggggcagagaacactcacacagccctcggcagcttctcggcggtctaccctgacaccgccaggtctcatgcaaaagggagacgtggcaaaaagcaccgacccagatacaacagatcccactccaaaactcggccgccgacaatggcccacagcccgagaaaagaacaactaggaaagcggagacacaaaggacaactaccaagaaaacca

SEQ ID NO: 627670 - DNA, 491 bp, Homo sapiens
taccatacaatttttcacactgctcatgtgaggtgacagctaaccctagaaaaaaaggactcagcccagggcactgaggacgcacctgataacagcagcctggagctcctagcagataccagcgggcaagcagaaaacaagaggctcaagaggggcagcccccgcatagaggagatgcgagctctgcgctctgccagggccccgagcccgtcagaggccgccccgcgccgcccggaagccaccgcggcccccctcactcctagaggaagggagcaccgcgaggctcacggcagggccctggcgccgggcagggcgagcctcggaagccgcctggaggacgtgctgtggctgcaggaggtctccaacctgtcagagtggctgagtcccagccctgggccctgagccgggtccccttccgcaagcgcccaccgatccggaggctgcgggcagccgttatcccgtggtttaataaagctgccgcgcgctcacca

SEQ ID NO: 627671 - DNA, 109 bp, Homo sapiens
atctgtcactttgcagacccctgccatctcagatactcggttcaagtctcactgatttgtagaggtccaaaaatgtaggatctgtcactttgcagacccctgccatctc

SEQ ID NO: 627672 - DNA, 795 bp, Homo sapiens
  misc_feature (38)..(38): n is a, c, g, or t
  misc_feature (65)..(65): n is a, c, g, or t
  misc_feature (83)..(83): n is a, c, g, or t
  misc_feature (94)..(94): n is a, c, g, or t
  misc_feature (121)..(121): n is a, c, g, or t
  misc_feature (130)..(131): n is a, c, g, or t
  misc_feature (139)..(139): n is a, c, g, or t
  misc_feature (149)..(149): n is a, c, g, or t
  misc_feature (164)..(164): n is a, c, g, or t
  misc_feature (170)..(170): n is a, c, g, or t
  misc_feature (181)..(181): n is a, c, g, or t
  misc_feature (190)..(190): n is a, c, g, or t
  misc_feature (194)..(195): n is a, c, g, or t
  misc_feature (198)..(198): n is a, c, g, or t
  misc_feature (205)..(205): n is a, c, g, or t
  misc_feature (216)..(216): n is a, c, g, or t
  misc_feature (232)..(232): n is a, c, g, or t
  misc_feature (242)..(242): n is a, c, g, or t
  misc_feature (250)..(250): n is a, c, g, or t
  misc_feature (252)..(252): n is a, c, g, or t
  misc_feature (254)..(254): n is a, c, g, or t
  misc_feature (259)..(259): n is a, c, g, or t
  misc_feature (262)..(262): n is a, c, g, or t
  misc_feature (265)..(265): n is a, c, g, or t
  misc_feature (267)..(267): n is a, c, g, or t
  misc_feature (272)..(272): n is a, c, g, or t
  misc_feature (274)..(274): n is a, c, g, or t
  misc_feature (277)..(277): n is a, c, g, or t
  misc_feature (281)..(281): n is a, c, g, or t
  misc_feature (295)..(295): n is a, c, g, or t
  misc_feature (298)..(299): n is a, c, g, or t
  misc_feature (302)..(302): n is a, c, g, or t
  misc_feature (304)..(305): n is a, c, g, or t
  misc_feature (311)..(311): n is a, c, g, or t
  misc_feature (314)..(314): n is a, c, g, or t
  misc_feature (316)..(317): n is a, c, g, or t
  misc_feature (319)..(322): n is a, c, g, or t
  misc_feature (324)..(324): n is a, c, g, or t
  misc_feature (331)..(332): n is a, c, g, or t
  misc_feature (338)..(338): n is a, c, g, or t
  misc_feature (341)..(341): n is a, c, g, or t
  misc_feature (343)..(344): n is a, c, g, or t
  misc_feature (348)..(349): n is a, c, g, or t
  misc_feature (361)..(361): n is a, c, g, or t
  misc_feature (364)..(364): n is a, c, g, or t
  misc_feature (366)..(366): n is a, c, g, or t
  misc_feature (370)..(371): n is a, c, g, or t
  misc_feature (374)..(374): n is a, c, g, or t
  misc_feature (376)..(376): n is a, c, g, or t
  misc_feature (378)..(378): n is a, c, g, or t
  misc_feature (380)..(380): n is a, c, g, or t
  misc_feature (385)..(387): n is a, c, g, or t
  misc_feature (389)..(390): n is a, c, g, or t
  misc_feature (397)..(397): n is a, c, g, or t
  misc_feature (399)..(400): n is a, c, g, or t
  misc_feature (403)..(404): n is a, c, g, or t
  misc_feature (409)..(410): n is a, c, g, or t
  misc_feature (413)..(414): n is a, c, g, or t
  misc_feature (421)..(421): n is a, c, g, or t
  misc_feature (423)..(424): n is a, c, g, or t
  misc_feature (426)..(427): n is a, c, g, or t
  misc_feature (429)..(429): n is a, c, g, or t
  misc_feature (431)..(431): n is a, c, g, or t
  misc_feature (435)..(435): n is a, c, g, or t
  misc_feature (437)..(437): n is a, c, g, or t
  misc_feature (442)..(442): n is a, c, g, or t
  misc_feature (448)..(449): n is a, c, g, or t
  misc_feature (451)..(451): n is a, c, g, or t
  misc_feature (454)..(454): n is a, c, g, or t
  misc_feature (460)..(460): n is a, c, g, or t
  misc_feature (463)..(467): n is a, c, g, or t
  misc_feature (469)..(469): n is a, c, g, or t
  misc_feature (478)..(478): n is a, c, g, or t
  misc_feature (501)..(501): n is a, c, g, or t
  misc_feature (504)..(508): n is a, c, g, or t
  misc_feature (511)..(514): n is a, c, g, or t
  misc_feature (516)..(516): n is a, c, g, or t
  misc_feature (518)..(518): n is a, c, g, or t
  misc_feature (520)..(523): n is a, c, g, or t
  misc_feature (525)..(539): n is a, c, g, or t
  misc_feature (542)..(544): n is a, c, g, or t
  misc_feature (546)..(547): n is a, c, g, or t
  misc_feature (549)..(549): n is a, c, g, or t
  misc_feature (552)..(557): n is a, c, g, or t
  misc_feature (559)..(559): n is a, c, g, or t
  misc_feature (561)..(561): n is a, c, g, or t
  misc_feature (563)..(563): n is a, c, g, or t
  misc_feature (567)..(567): n is a, c, g, or t
  misc_feature (569)..(570): n is a, c, g, or t
  misc_feature (573)..(575): n is a, c, g, or t
  misc_feature (578)..(578): n is a, c, g, or t
  misc_feature (583)..(584): n is a, c, g, or t
tccctgtttttctgtctcgtttgtgcgacgtgctgtgncttggctggtttttctctggcgctttnctttgccttttggctggncttgcgttttncgcctttgttttctgccgctgcggacntgttggccnngtgcggcncccgtcgctnggtgcgtgtgctttngttttncgtggctgctncttcttgtncgtnnccngcgtctncggcggttggnccctctttttgtggcncgggttgccngcgctccncncncctcnttnctncnccccntnccncccntctttctttctctncgnnccncnncctttnttncnncnnnntncttttcnnttcccnccncnntccnnctctcccccccnccntnccgnnctngncntnctccnnncnnttctccncnnctnntttcnntgnnctccccncnncnntngncccncnccccncccctnntnccncggggncgnnnnngnctcgctgcnctgggcggtgtggggtgtgggcnggnnnnncgnnnntncncnnnngnnnnnnnnnnnnnnnccnnncnngnggnnnnnntncntngtcncnnccnnncgncgggnncggctcacggcagggccctggcgccgggcagggcgagcctcggaagccgcctggaggacgtgctgtggctgcaggaggtctccaacctgtcagagtggctgagtcccagccctgggccctgagccgggtccccttccgcaagcgcccaccgatccggaggctgcgggcagccgttatcccgtggtttaataaagctgccgcgcgctcacca

SEQ ID NO: 627673 - DNA, 885 bp, Homo sapiens
ggctccacggtgcagagctctaagcgcgcgggctggacggctgcggcgcgtcaaggtcagcctggagctggagtggcggactgcctgggggcgggggaccctactggaggcccagggctgggtggcctcccagcgcctcgtgccatatttgaatagcttcgactggaccgctctttgtactgctgaagtcctgtcccaagttccagcctgctgtccctgagtggcctggggcaaggaagacagtcggctggcaagacccgagagaccgccacacaacgttgtggaccgggggcacaacacagtgataccccacgacttgagatgtgggagcacataagaagaccgatgaggactgcacactcgccccgcgcggcatcagcggtaggcataccttggaaaattggacttacccccaagtaccttggttgggggagccggactatggtacaaagacgtggtacctgtgtttgccaggcgaagaagcatttggcagggacgatattgggcatcgggtaccgcgtgagacatagcgggagcgttgacgaccgtcataccgggttcacgccgactctgcagtgggaaagagtccgctcacacaataccaggtagcccccatcaccgtcacaagtaaccttacagggggctacacaaggtcacagtctagcagagatagcgacgaggactcaagtttggcacccaccgatcaacaccacgagggagtagttccatacacccttcgtggcacgaactcctattaagagatgaacattcagtcaggaaggatcaagagggcgcaaacaggttgtgcaagagaggcattggggttaccacacttgggagaggcatatccattggaccggtaataccgcacgaactatggacctt

SEQ ID NO: 627674 - DNA, 197 bp, Homo sapiens
agcgacacggtatgtggatgtggcttatcaaatgagagcatcactgccggcaaaatccaggcttgctgggggaggaagctgacagggcaaaccaccgcggaaggacacggttttcttggcggggggcagacagagttgacatggggcagttctggcttataacatgttcagtgctgacgtgtaacaccaccagtacg

SEQ ID NO: 627675 - DNA, 106 bp, Homo sapiens
actggacagcacagaggaggtggagagacagcccacccttgtgtccactgtgacccctgttcccatgctgacctgtgtttcctcctctgtggcctcctctgtgctg

SEQ ID NO: 627676 - DNA, 80 bp, Homo sapiens
  misc_feature (77)..(77): n is a, c, g, or t
taacagttcagacagctttatttttatcaccagagttttaaataaatacacagttccatcagaccagcccccgagtnccc

SEQ ID NO: 627677 - DNA, 150 bp, Homo sapiens
taaaattgttgttttgaatttgttctcttaatttaggggggagtggtcataaggggcaacaaacaggcaatgataaggagagcaattaaaaccatattgataagcattcttcttcctagcaccagttcactccatatagctagaggggca

SEQ ID NO: 627678 - DNA, 360 bp, Homo sapiens
  misc_feature (255)..(255): n is a, c, g, or t
tcagtgtaggagaaaaaaatccatatttttatattagcatgcgcactataaccaaaaattattcatacttaaaacattcatacaaaacaatatgtgagcagaaatagtgctataatactttgcctaatttctaagttgaagaataacacttgggcacaggttttttaataagagaaatatccggatattccaaattaaaggaattttcttccaaccattgaaattttaaaaccagagttccttttaaataataanccagattttttcttctattaaatattattattaagaattgtttttgtattacatattcatgttaagaaccccgtcttcccttaaaatacattaaaattatgacaa

SEQ ID NO: 627679 - DNA, 275 bp, Homo sapiens
tccgtcgtctaacccaggatacagctttactcggataccagttccactcggcggtctgtttagatcgccagaatcccgcgtttcctcctcgggtctctgtcaccacagtgctgcctctgctccgcatgtgctctgctacgccggcgcgctcctcttccagctgtgccactcggccctggagctccccatattcgcgggcgctctgctgctgtagctcctgcactttctgcagctcctgggcccgtgcctgcagcatctcatcctgccgcgtcacc

SEQ ID NO: 627680 - DNA, 228 bp, Homo sapiens
  misc_feature (2)..(2): n is a, c, g, or t
anatggattggatggatggactgggactggactggatggatggacacggatggatgggtggatggatgctggaaaagtgagatgggaagatgcctcctccagaaagagccgccaacaatccctcgcaagccatctccatgtgactgggcgccacactagagcaggcggactgtctccatggtatcggacatctacagtgacgattcctcactcccaggtgactgtacc

SEQ ID NO: 627681 - DNA, 773 bp, Homo sapiens
ctctcctttgccgatccgccgcccgtccacacccgaccgtccagctcaccatggatgatgaatatcgcgcggcgctcgtcgtcgagcgaacggctccgggcatgtgcaaggccggtcttcgcgggcgacgatgccccccggggccgctcttcccctccatcgctggggcgccccaggcaccagggcgctgatggtgggcatgggtcagaaggattcctatgtgggcgacgaggcccagagcaagagaggcatccatcaccctgaagtagccccatcgagcacggccatcgtcaccaactgggacgacatggcagcaaagatctggcaccagaccttctacaatgagctgcgtgtggttcccgaggagcaccccgtgctgctgaccggaggcccctccgtgaagccctgaggcctaaccggcgagaagatgagctcatgatcagtgtgtgagatcttcatacaccgccaggcatgtacggtgtggtatgcaggctgtgcgatccctgtgcgcctctggccgtggcagtggcctcgtgatggactccggtgacggggtctgccagactgtgcccatctgcggaggggtatgcccgccgcctagtgtcatcctgctgtcgtggatctggctgggcgggacctgtgctgctactcatgaggatcctcacgaggcggttacagcttgcgccacggacgagcggaaacgggcgtgcttggggactggtcgtgcctgggtgggcgaatgccgtggtcgcccgggaaggagtgggcggttc

SEQ ID NO: 627682 - DNA, 515 bp, Homo sapiens
acgctcaatggtgctgttgcccggtccagggggagtttgattgctccgttcgggtctgacgatattatgttgcccgagcgcatagcaatccaggtcgcccatatggacggtaaacccgaggtagggatctgtgctggcaatatggaactgatcgatagcgatggcaatcctttccccgagaagcgcccgtgccgggatgtgccattccgtcgcttggatttcgatgacatgtttcttgatcgcaagccctatccgcctgcgcctaccttgctgattcgacgtgaggctctggagaaggtgggtggcttcgacccgacgatccgtctggaggacctgctgatcgagttgaagatcacgcacgccggttactttatcgatgcgctcggggtgtcgatggccctctatcgtaaacacgccagcaattcatccaagaatcatcggtttatgatcgaggctattctcaagacctatgccctgttcagtgatcacgctgcgtcgacgcggccgcgaattta

SEQ ID NO: 627683 - DNA, 205 bp, Homo sapiens
  misc_feature (8)..(8): n is a, c, g, or t
  misc_feature (10)..(10): n is a, c, g, or t
  misc_feature (13)..(13): n is a, c, g, or t
  misc_feature (52)..(52): n is a, c, g, or t
  misc_feature (54)..(54): n is a, c, g, or t
  misc_feature (82)..(82): n is a, c, g, or t
  misc_feature (90)..(91): n is a, c, g, or t
  misc_feature (94)..(94): n is a, c, g, or t
  misc_feature (97)..(97): n is a, c, g, or t
  misc_feature (103)..(103): n is a, c, g, or t
  misc_feature (112)..(112): n is a, c, g, or t
  misc_feature (152)..(152): n is a, c, g, or t
aacaaccntnttntgttctgtgtccctttaaaaggcagattaaaagctcaancntgtttctagagaacagttgagagagaanctcaagannctnctnggtggnttgcttgcnctacgttacaggtggggcatgtcctcatcctttcctgccntaaaagctatgacactagaatctgaatattaataaaactttatgtactgctgt

SEQ ID NO: 627684 - DNA, 337 bp, Homo sapiens
gacattgggcctgaagaatctcattaaggttaatatcctgccgcttattaccgagaaattaaaactatttggggccgggcgcagtagctcatgcctgtaatcccagcgctttgggaggccaaggtgggcaaaccacctgaggtcaggagttcaagaccagtctggccaacatggtgaaaccccgtctctactaaaaatacaaaaattatccaggcatggtggtgggcacctataatcccagctactcaggtggctgaggcaggagattcgcttaaacctgggagacggaagctacagtgagcagcgatcgcaccactgcactccagcctgggtgaca

SEQ ID NO: 627685 - DNA, 246 bp, Homo sapiens
tggggggtaaaagcctgggggggaataggggggccccagcccaggttttgcccagcccaggacccccgtcccccccgacgggggacccccgggccagcccagacctgcaggccccgctgggaccccactcggggggggtggggcaggccgggcggaggaagggccgggggccctgagggggccgccccccccccgcagccccgggggttttgggggcttagggattttaagggaataaactggccg

SEQ ID NO: 627686 - DNA, 787 bp, Homo sapiens
  misc_feature (787)..(787): n is a, c, g, or t
gcgcccttttttttttgttttatgtgtgggtcgtgcaggtagaggcttactagaaagtgtgaaaacgtaggctgggattaaggcgacagcgattcctaggatagtcagtaaaattagaatggtgaagatgataagtgtagagggaaggttaagggtggatatggctaggggtggcgcttccaattaggtgcatgagtagggtggccgtgcagtaagttgttagcggttaggcgtacggccagggctatgggttgaacccacgcgtccggcaatcccctcaaaaaaaaaaaaaaaaaaaaaaaaaaaaaaaaaaaaaaaaacaaaaaaaaaaaaaaaaaaaaaaaaaaagggggggggggcaaaaaaaccccccgaggggggcccacaaattacagcacgccacccccatcctcgttgggtctgacaacgagcggcggcccccaagaagagagcaggcgctataatcaatacaagccgcagcgcgggcgacggggagccggaacaaaaacaccagcgcgcgcggcacggggagagcaaacccagcgctgcccgcaggcgagacatctcgtgagggaagagccaacccccacccatcgggggggggggagcaacacgtgcggggggaccacccaccacccacaagaaaattgaacccgccccggggcgaataacaacccgcagcgcgcatctgaggcgtcgaaccccacacgaccacatgccggccgcagaaaactcgccgccccacgatatacgcgaaccacatacccgtggcggccatgaaatatan

SEQ ID NO: 627687 - DNA, 391 bp, Homo sapiens
  misc_feature (39)..(39): n is a, c, g, or t
caacccggcagccccactccccaggcccctagtaactcntgccaaaggctctctgactgactccttcccagatcttcctcagttagcagctgaagactgatgctgcctgatcgccttggaagccccctggaccattacggatgctgcgctttggataactcttacagtagaggttccacctggcctaatcgccattcaccagcaaagattcccaactatatgaagacaccctagctggacgatcagttcttattaagaacctgacccctcaaactctacaacctcgatggactggaccctacttagtcatctatagtaccccaactgccgtccgcctgcaggatcctgcccactgggttcaccgttccagaataaagctgtgcccatcgga

SEQ ID NO: 627688 - DNA, 367 bp, Homo sapiens
ttcttccacctccgtctttcaggttcaagcggttctcttgcctcagcctcccgagtagctgggattacaggtgtgtgccaccaccgctagctaatttttgtatttttcatagaaacgaggtttcacggtgttgcccaggatggtcttgaactcctgacctcaggtgatccgcctgcctcggcctcccaaagtgctgggattataggtgtgagccaatgtacctggcccagctaatttctgtgttttttgtagagatggggttttaccatgttgcccatgtgggtctcaaactcctgggctcaagcgatctgcccgcctcagcctcccaaagaggcataaaacacagtgcttggccgtgttttaaact

SEQ ID NO: 627689 - DNA, 244 bp, Homo sapiens
  misc_feature (147)..(147): n is a, c, g, or t
  misc_feature (150)..(150): n is a, c, g, or t
  misc_feature (163)..(163): n is a, c, g, or t
  misc_feature (172)..(172): n is a, c, g, or t
  misc_feature (198)..(198): n is a, c, g, or t
  misc_feature (206)..(206): n is a, c, g, or t
  misc_feature (220)..(220): n is a, c, g, or t
gcctgctgtcaaaaccctggtgggggaggatgtggccccccttaaacccggaggaaacgggggtttgcctgggttttcggaaaaccgcttatgggtgtggtccgtccaaaccccttgtttcaagggggatgggggtgagcgggcaancanagcatcccccccnctgagcaanaacttttttttgtttttaaaccatcncgtcctcntttcccattggaanaaagtgagtttttgaaacctgcga

SEQ ID NO: 627690 - DNA, 755 bp, Homo sapiens
  misc_feature (145)..(145): n is a, c, g, or t
  misc_feature (695)..(695): n is a, c, g, or t
  misc_feature (714)..(714): n is a, c, g, or t
cctatcccttaggtttccagacctgagggatccccagtaaggctgcaaactgcaaagaggacagctgccccttcctctgggagctctgcccagaggggtacagccctggttggggcccaaccacccagggtgtaggtggtgctgnagacactggttggagggtctcacccagtataaagcagctgtgctgtgtgggtgtaccacttctgcccctagttagcttgggctctccaaagtctgtaagctacggaagttgctgagacagaaaaaatggcagccccctcctccctctaggagctctgtcccaggaagttttcaaacctcttagccacagaacatccatgggagtgactggaggacacagttgggaagtcccgccctgcaaggaggaatagatcggggactgcttaaggaagcaggatggccatggtttcatagagcagctgtgccgtgctggggtactgcttctgccctggtgggcgtgggctctccaaagcccacaggacagaatgctgagttgcccaaacagcaacgatggcgcccgcccacctccccctgggaactcagtcccagggtgaaatcaaaacattgtgaaccagagaatacaagtgagggtggctggagggtccagtcgggaggtcctgctcagagatgaagaacggatcagggttctgcttaaagaagtagtcggccantgttgtattagagcagctngtgttgtgttgggggatcccttctgccctgctcggtttgga

SEQ ID NO: 627691 - DNA, 122 bp, Homo sapiens
aggtatgaccccacgagaactcaccttattcttcataccgcctggtgaatcctccagtctttctctacaccctgaaggggagggaggcaaatggataaatgagagagggagggaacagtagc

SEQ ID NO: 627692 - DNA, 155 bp, Homo sapiens
gtgaactggaatgagtgaccttgagctctgtccttttgggaattttggcttatctccagtaaaactagaaggctatgctcttgttgtaccggacttctccaaaaatttgtgatgcgttttgttgatttttgcctaagtcgcccttgttgctgttg

SEQ ID NO: 627693 - DNA, 454 bp, Homo sapiens
acaaaagggctcctgctggctcttgtcataagacgaggttctctgaaagttgtcactcagtattttcacgtacaccccattggcaaaaatatagtctcatgaccacagatagctgcacagcaaccaggaaatgaagtctttattctgggtattcctaggcccacttaaaaaacaggagtctggctgggcgcagtggctcatgcctgtgatcccagcactctgggaggccaaggtgggtggatcaggagtttgagaccagcctggccaacatggtgaaaccccgtctctgctaaaaatacaaaaattagccaggcatggtggcacatgcctgtaatcccagctacttgggaggctgaggcgggagaatcacttgaacctaggagacagaggctgcagtgaactgagatcatgccacttcactccagcctgggcaacagagcaagactccttctcc

SEQ ID NO: 627694 - DNA, 118 bp, Homo sapiens
actctgcatttggtttcaaggtggctcccttcggttgatctgaacgtcaacagtaatgaaggcaagcagaaaaagcgaggaggtggtggcggatttggctaccagaaaaccaagaaag

SEQ ID NO: 627695 - DNA, 143 bp, Homo sapiens
ccagaacacaatgaacgaaaatctgttcgcttcatgcatgcccacataatcctacggctagccgccgcagtactgatcattctatttccccctctattgatccccacctccaaatatctcatcaacaaccgattagtcattgt

SEQ ID NO: 627696 - DNA, 381 bp, Homo sapiens
agcttgtagtcccaacactttgggaggccaaggcagggtgatcacttgaacccaggagtttgagaccagcctgggaaacatggtgaaaccccacctttacaaaaaatagaaaaattagctggccgtggtggcatgtgcctgttgtcccagctactcaggtgagcttcccaggaagtcaagctgcagtgagccgtgatcatgccactgcactccagccaggagacagagtgagaccctgttttaaaaaaaaaaaaaaaaaagactgttgtataagtcagtgcagtttaaaaagtataatttgtccagaagcagaggttgcagtgagcggagatagcaccactgcactccaccctgggagaaagagcgagaccctatctcaaa

SEQ ID NO: 627697 - DNA, 553 bp, Homo sapiens
  misc_feature (6)..(6): n is a, c, g, or t
  misc_feature (151)..(151): n is a, c, g, or t
  misc_feature (172)..(172): n is a, c, g, or t
  misc_feature (180)..(180): n is a, c, g, or t
  misc_feature (238)..(238): n is a, c, g, or t
  misc_feature (299)..(299): n is a, c, g, or t
  misc_feature (330)..(330): n is a, c, g, or t
  misc_feature (412)..(412): n is a, c, g, or t
  misc_feature (435)..(435): n is a, c, g, or t
  misc_feature (467)..(467): n is a, c, g, or t
ggcacngaggattgaaacaagcttgaatttctggaataagcccaatgtgatatttattcaacaaatattcattgagtatacctagtatgtaacatgctttaagaatacaccagtgaaccaaacaaatatctgacattacagaacttaacantccagtatttggagacagacnataaaaangtgaacatgtatatttacagtttgtcaaggaatgataaatgaagactcttaaagtagntggggaattgggagtgaagtctgtaatttaaatagggtgggcaggaaagcttcacagagantgggacatttaagaatagacttgaaggacangcaagagcaatctctatgtttatatgggagaaaaggttccaggcagatgcagtaacaatggcaaatatcctgaagtaggatnatgctggagtttttgtggagcancaaggaggctagtgtgactgccacagaatcanccaagggaagatgagaagatcagaccagaccagcacttgggcatctaatgggaaaagtttctcaagccatcataaaaatttcactt

SEQ ID NO: 627698 - DNA, 202 bp, Homo sapiens
  misc_feature (4)..(4): n is a, c, g, or t
  misc_feature (81)..(81): n is a, c, g, or t
aggngtaataaatactgcatcctttccacaacatagcaggaatcttatagggaaatccatatagtttctgaacatgtattnatatactaagtctatattgtttctttacgaagtgtaaataagtgctgcaccatactgtaaacaaaactcgaatattgactaaataaaatcaaaagttcatcttgtagtcatgtctttctcc

SEQ ID NO: 627699 - DNA, 113 bp, Homo sapiens
gggaagcagcacttggtggtgcctccaggccaaaggcctggacccgcttttccctccttgggcctcctttttttaattgtaacaggggttttttgacccttcccatggttttt

SEQ ID NO: 627700 - DNA, 136 bp, Homo sapiens
  misc_feature (78)..(78): n is a, c, g, or t
  misc_feature (112)..(112): n is a, c, g, or t
  misc_feature (123)..(123): n is a, c, g, or t
ctcatcatcctaccatctagaagtaaatactggttttagttcagagtatgtgtacagatacgtgtgtgtgtgtttgtntgtgtgtttgcaggctgcttggttggtttgagtngggaatagttnagcctgatctggg

SEQ ID NO: 627701 - DNA, 467 bp, Homo sapiens
tcaaaacagaacgacctcacaggcctcagattaaaattgatacaaaaaaaagaaaaagaaaaaaatcattcatgtatttgccagatataatgggaggcccattaccctttgccctgcagagatgtgtggaaagtgtctcctcatacttagatagacagccctgtttgtttaatactgctacccagttttgagtaaactagttatagtcagcagggaattcattcagaagatagattatggaataaaaccaaatttgacatgatgaatatattatttaaactttaaacctaagagatactggtttactgcaaaaaatagcaactaaaaagtattatatagagaaaataatacaatgaaaaactaaaaagtattttatggagaaaataatacaatgaaaaactaaaaatgaaagtaaataaaaaatattaacctcatagcaaggaggaagaatagaatggaaggttttt

SEQ ID NO: 627702 - DNA, 927 bp, Homo sapiens
  misc_feature (637)..(637): n is a, c, g, or t
taaaatgtctaatttcaatttcaagatcaatagacaaactgaaacgtaaaaacaaaatactatgtaggcctgtttgttactaagacttgtctgatatttactaagttagctttatgacgccatgatgatggcctaacagtgtctatagcatctttaactgttagaaagtcttatcatcacatattctttagatattgcagaaaaacgttaagagtttagtcgtgattgtgctctaatcgtgtaaccagagtggctctagaccggaataactgtacaagcagttgttagaagctacttaacagggataatagtacctgaaaactgcggtacaacgttcagggaaaaagcaaagacactgctcgtgcttctaagctcatgaccattagtagccttgattgtgtaccccgacacagccgggaacacattcaatatgcaaggcacgatgttgttcaaccccgtgaaccaaacagtcataatctcatgcagagggatcgacacaggtttgccgaggacaagaggcagacaaaagtgacaattacaacccaagagaacagcgcatagtccctaggtggagatatggggtcttctttaacaaacattgacagatggttacccaaggacgattactaaaggcctnttaacacaggattggaaccacaacatatccagcacatttatggggcgttcaacattggatagtaaacatccaatttgaaggagaaagaagttaaaagatggtttcttagaaaagatataaagaggtttaaaaatggggtgatagaagaaacgaagagaagatgacaagaggatagaaataaaaaagtggccacataggatatagaaggaagttaaagtcaaaatagaaggggatcataagttggataaaagatggtaagaaattatcaaaaaatggatgagaaggcaata

SEQ ID NO: 627703 - DNA, 323 bp, Homo sapiens
cggaggtgcgtgtaatagggaccggctggtcaacacccggtagccaggttctcatgagccgcgcaaaagaagctgtgaagtccggtgcacccagtccaccaagccagtgaccctgacagtggagccgcgccgactcgtgtccgagcggatcacagaagactactactgtccacctcattgctgacaccctgcctgtggccacccggctggcgctctactccacccgagacagcgatgacaagaagaaggaaaaagatgtgcagtttgaacacggctaccggatcggcttcaccgcatgtcaacaagatctacctgcacaccca

SEQ ID NO: 627704 - DNA, 787 bp, Homo sapiens
  misc_feature (1)..(1): n is a, c, g, or t
  misc_feature (180)..(180): n is a, c, g, or t
  misc_feature (192)..(192): n is a, c, g, or t
  misc_feature (368)..(369): n is a, c, g, or t
  misc_feature (403)..(403): n is a, c, g, or t
  misc_feature (405)..(405): n is a, c, g, or t
  misc_feature (410)..(410): n is a, c, g, or t
  misc_feature (436)..(436): n is a, c, g, or t
  misc_feature (453)..(453): n is a, c, g, or t
  misc_feature (462)..(462): n is a, c, g, or t
  misc_feature (464)..(464): n is a, c, g, or t
  misc_feature (478)..(479): n is a, c, g, or t
  misc_feature (481)..(481): n is a, c, g, or t
  misc_feature (483)..(483): n is a, c, g, or t
  misc_feature (486)..(486): n is a, c, g, or t
  misc_feature (488)..(489): n is a, c, g, or t
  misc_feature (492)..(492): n is a, c, g, or t
  misc_feature (494)..(494): n is a, c, g, or t
  misc_feature (496)..(497): n is a, c, g, or t
  misc_feature (506)..(506): n is a, c, g, or t
  misc_feature (508)..(508): n is a, c, g, or t
  misc_feature (512)..(513): n is a, c, g, or t
  misc_feature (519)..(519): n is a, c, g, or t
  misc_feature (533)..(533): n is a, c, g, or t
  misc_feature (539)..(539): n is a, c, g, or t
  misc_feature (546)..(546): n is a, c, g, or t
  misc_feature (553)..(553): n is a, c, g, or t
  misc_feature (612)..(612): n is a, c, g, or t
  misc_feature (756)..(756): n is a, c, g, or t
ntgtctcaagcataaatacaaatcagaaaacagtacaattaggacaatagaatgtggaggacaacaggttagagtaatatataaaacatttttagctggttgaaaacaaagctgtaagaactgctttcacaaagaagtactcctttcaagagtgagaaaaaaaatcaacttaggtttaanatcatatatacngtcctctcagcagttctagttaatgcagtggtgtgtaaaacaacataggcaatacttttgcacataacaatatttgttgatggaaaatctgttagacaagtctggattcatttgttattaaccatgacttaataaaataattgtatcatgatctttttagctaacctatggttttnngctaccacagcccaatgcttgatttctgactaananctganagccttttggtattcacccatctgangatattcttgtattgcnagcctattncngcctggcctgattnncntnctntnnctngngnnctgggggangnctgnnaatagntagatacacatgtnatatgngttaatnttttgtnttggacgatgtctagctgcctgggcctcgcgaaatgagttgatgtcaaaatggcaagtngccactttctgttttaaactaatttatttgtgaaaggacataaaatgaagtttaaagcttagctttcaaagaatattatgggttatgaattctattatcccatctaatttacatacagaggaaatgtactgtaacctgttagangtatctttaacctgaagactgcttgcaaaga

SEQ ID NO: 627705 - DNA, 346 bp, Homo sapiens
ttctttgtgagcttttgtatacttgagcaaatcttaaaagataacttctattatatggagacagtaggtctacaatcatttcttgagctttaatttaaatacaattattatgcctgaatagcaatgaatttgtcataggtagagattgttgcagagccaactatacccatataaaattgatctgctttgctttttaccccgtaaggcattagatagacaataaatacatgtaaggtaaaatgccaaaaatgctaataaacatcagaaagacatttgtacatataattttgtcattaaatgtacttggtaattttttttgctttaataaaaatatttattaactaac

SEQ ID NO: 627706 - DNA, 490 bp, Homo sapiens
  misc_feature (490)..(490): n is a, c, g, or t
ggctgagacttttattagctccactagcgtttttcaatgctttggcctgcagtgtgacgatggtctcggatcacctacgcactaagaaaggtcctaggcgcaccccaaatctcaccacggactcactaactagggcttgtattcatatcaatggtatgggtaagaaggaaaggctgctgcttcactgatacaggacgatccaccttgtccagatgacatgacatagcggagacatgctgcaaaaccaggacggctagaacttgctagtgaagattactataagtgcacttgctcacacgaatgaaggagagcagtgtggactccagccagcctacattcactacacgtgtagacataacagtatctgaaggacatataatctcggactgggcatgacgaacagatcacaaaggccataacggctagcaatgacacaggatgtctactccttaccactcaagctaacgatattgcgaatctgtgccaacan

SEQ ID NO: 627707 - DNA, 122 bp, Homo sapiens
gatctgtcatgctggattgcgaagtcatgtaggaatgtggaccgtggggatcgtcgcttcccctttcccagatgggaactcttggttgccttgcttgaattgcagcttgctcagcgggggat

SEQ ID NO: 627708 - DNA, 198 bp, Homo sapiens
gaggggggttcttcctgtatcggctttgaatttctaattgatacataataatttacatatttatggggtacatatttatcttgttacatgcatagaatgtgtaatgatcaagtcaaggtatttgaggtatccatcactttgaatatttatcattttctatgtgttgggacaattctatttattccattagctactctg

SEQ ID NO: 627709 - DNA, 290 bp, Homo sapiens
cttcaataggttggcaatcctttccatagagtagtgagccttaaaggtctttataatgcccttatttagaggctgagttagagatgttgtgtttgggttcaagtagacccttcaatgcataggtgttgaactcatgaggttctgggtggccaagggcattgtccaataccaaacaaatttaaaaaggcagtctcttactggcaaggtactttctaacttcagcgacaaagtatcagtggaagcaatccaggaagcactctcatttccagccctacttgtggtcaacccaa

SEQ ID NO: 627710 - DNA, 384 bp, Homo sapiens
ctcctgtcagatctgtcagcaggtagaagaggattccctcgtcttctggatgagtcacacagcgtataaggaggcagaaccgggaccagactcagcctgagtttgggactagatagagcatgtcgagggtcttttcacaaaggtgatgggacagaggtcacggagtttcacctgggctcctgccccccacttcttcaccatggcctcatttgcaggattctctgctcctctttgctttgttgccctgtgggtttccagctgctcctatgctcctccctgcgggctacaaccctgacttcaggtgcctggagacttgatgacgggagtgttcaaatctactctgtccctgagagctggcgtgaccttgggcaagttatttaacct

SEQ ID NO: 627711 - DNA, 360 bp, Homo sapiens
tgcttctgctaggccaacttctccatttagaagtgtaaatcaagtttagcctaggcaagtttatgcctccttacatcttttaagtttggcctaaagatttatctgtacatcatgaactataacctaaatggtggtagaaatagactgtaacctactcttgtgccaatcactgagttttggccactcaaagggggccaactgttccagctgagccataaccaatccagctgtttctgtacctcacttccattttttgttcatcactttcctttttctgtccataaatcttctaccacgtctgcactggagtctctgagcctactgtggctcagaaggctccccaattgcagatgaggtggt

SEQ ID NO: 627712 - DNA, 432 bp, Homo sapiens
cagataagtcttttttgttttgtttcgctcgtttgtttgtttgtttgtcttgtttgtttttgagatggagtcttgctctgtcgcccaggctggagtgcagtggtgcgatcttggctcactgcaagctccgtctcccgggttcacgccattctcctgccacagcctcccgagtagctgggactgcaggcacccgccaccacgcccggctaatttttttgtatttttagtagagacggggtttcaccgtgttagtcaggatggtctcgatctcctgtcctcgtgattcgcccgcctcggcctcccacagtgctgggatcacaggggtgagcccccacgcctggccaatgtatcgcgtaagcaaatgcagacttcttatatttagtgtccaagttgaaaggccaatggccaactaggaggccatatttgcgaaaa

SEQ ID NO: 627713 - DNA, 350 bp, Homo sapiens
  misc_feature (108)..(108): n is a, c, g, or t
tactactagtccactgaattctcagtgaggcttcatagtttaactgttcatttgtaggtctttaatttggatcctatctttgtttcaagtgtgacaagaaacctatcnctctccatagaagcaagccacttttcttaatcccatcacgtgacaacccaaccttggctggtttatgtcaagttatccaatatatacgggtctgtttctgagctctctgtcataatccattggtccataaatctgctcttttgtcacatcatattcactttcctcctgtgaccttgtgatgtgtccaaaaatcggatagtgctagttgccccgctctcgtcacctccaccgagaatcagtgg

SEQ ID NO: 627714 - DNA, 472 bp, Homo sapiens
actggggactctgggaggtgatgtggaatacatatcaaagttgttccatccagggggtgaacatatagaagcaattatagcctggctcccatccgtcactggctgacgaatggaaccagggcatcaactctctggcttttttttttctatttctttttctttttagacacagtcttgctctgtcacccaggctggattgcaatggcatgatttatcagaaaggaaaaacaatatgcgtatttcctatgcaaaggctactgctatgaattgaaattcttaaattccaaagataaattaaaatgcttctcaagacacataaactgttagaatctgcttataatgaggctgaagttgattaagaagagaactggcatttaggacactactttacttctgtcgagtactgccaagtttaagttctgcctggaagtagatgcccctcaagggagggttgcatgtacaggtgtgtgtg

SEQ ID NO: 627715 - DNA, 333 bp, Homo sapiens
ggtgagtcaattttcatctatcttggtacagtccgctgttgatctcttccagtggagactcgaaggtcgtgattgaaagacccttctggttctttcgggcgggctcttgggcagagcgggagcggccaaagttcacgttggtgaagccacccatgcccatagggaagccagagaatgggtcatcaatgtccatgccttcctccccgttccgctgcccaaaaaaggtgtcacagggatttctgccaccgaaggactcagaaaacatggcatgagggtctccatggaactgtgtaagctcgaaagaggtaccacttgagccctttcctcccacgt

SEQ ID NO: 627716 - DNA, 741 bp, Homo sapiens
gtcgtgtgagcacaccatatagttgacagtaggaatagacgtagacgcacgagcatatggtcacctccgctaccataatcatcggtatccccaccggtcgtcgtaatgtatttagcatgatcgcgacacctccacggcaaagcaatagtgaacagtgagtcctgctgcaggtggctctgagccctaggattcatctttcttttcaccgtaggttgagcctgattgtgcttgtattagcaaatcatcatagacatcgtactacacgaacgtactacgtgtagctcacttccactatgtcctatcaataggagctgtatttgccatcataggaggcttcattcactgatttcccctattctcaggctacaaccctaagaccaaacctacgccaaaatccatttcatatcatattcatcgggtaaatctaactttcttcccacaacatttctcggcctatccggaatgccccgaagttactcggactaccccgatgcatacaccaatgaaaaatcctatcatctgtaggctcattcatttctctaacagcagtaatattaataattttcatgatgggagaagcttcgttcgaagcgaaaagtcctaatagtagtaggaaccctcataaactggagtgactatatggatgccccacctacaaattcgaagaccgtatactaaaatctagacaaaagggagggatcgacccaagtggttcagccacccatgctcatgatttcaagg

SEQ ID NO: 627717 - DNA, 692 bp, Homo sapiens
ctttgtgtttagggtctcgatttgtaggacatgtcagttgcttcagcagcccattagcaactgagagcccagggatgtcctacaggatagtttcatagtgacacggtggcaacttggctatatagaaatatggctgatatgtgtgccgtgaatcactttgtgtgaccttgacactgggttgtctaattatactcggaccctttttgtgaaatccgtgtatattagacttgtttcggtcacctgggcccggtccagactcgaggccagtggtgaaccctgcacagtgctatgtggcttctctttgaggatttttgggttttggaactaaattcttgctgccctcatactttttatgtattagaatcatattcgtgattgcccttttaaaaccttgggatcctcccaaggcctgccccactgtatttaaccacgtataataccacggaagccactggcacggcacccactgccaagcccaggatggatggtccacgtccctgtgtcacatgggcggtggtttcctgctggcctggaatcactcatcaccctgattgattggctctgtggtcctgggcaggtgcctcataggtgtgtggatatgatgacgttttttttaaatgtaatgtatttaaccaatacttaattgtattaaggtcatgtaccaaggatttgataaagttttaataatttta

SEQ ID NO: 627718 - DNA, 456 bp, Homo sapiens
tctcgggcagcacgtgaggtagaacgagtgtgagcgtctccacgcagtggctggccccgtggccggggcgtctcttgcatgctgttggtggtccttccccagttcctatctcccacccgcctggttccagccccatcccctctcccaatgagttacaggttttagatttccaaaaaggccaaaagcaagttcaagaaagtcccttgggggttcacttaaaaaaaagtcccaaaaagcccaaaggttctcagaaagttctgaaggtcacagctgggctcattctataaccacagttgtcttttaaaggccaccctctccagccccttgtcccccttgtgttgtgagcccaagtcctttgtgaccattaagtgtccggtccccacccctccacccgcaggtttttggctacaaactgtcccagtatacattggtaataaaatatttccccaaaaaaaa

SEQ ID NO: 627719 - DNA, 136 bp, Homo sapiens
tgaggaggcttcgtgagaagggggatctgaattaaggctgtaaggaaatcggggattgaggctcaaaggtattccagaggggacagccaaatgagtcctgagggggtaaagtgggcttggtccaaaagagggggca

SEQ ID NO: 627720 - DNA, 571 bp, Homo sapiens
  misc_feature (184)..(184): n is a, c, g, or t
aacacatagggacttatagaggtaggaggttataaaattcaccattcaaaagcaaaactaaaaaccccacttcatcttacattccaaaagagaagcttctattaatcctttctctcagtcatagaagaaaagcatctacaacataccaaaattcctaaattagaacttacaaaatcctttccanacaaaacacgaactaaaaccacaattaaaaatatccaactacataaacgacatataaccaaactcaccacgaagagaaagattcaccctcaacctcacaatcaaacaaatccaaccaactatcatcacaatctaaaaaccactctttttccataagctctcaatcccattcccacatctcaaaccaattttcatccaagaatcgagaaaacaattccaaatcccattcccaaaaacaccaccatccaaattacaaacactactctcaatcatactcacaagaccaatcacaatcccacgaccaccattaccaagaccaatcccctaacaaatcgcactctcaaagaacatcctacttacgtaaagccttcctcgatctctcaagaat

SEQ ID NO: 627721 - DNA, 97 bp, Homo sapiens
gggccgcctactactactactgctcgaattcaagcttctaacgatgtacggggacatgctcataaggaaaagaatcgaaaaaaaaaagttgtactgc

SEQ ID NO: 627722 - DNA, 158 bp, Homo sapiens
cagcacggacttcggtctggtggcgagtggcgaacgggtgagtaatatatcggaacatacccagtagtgggggataactatccgaaaggatagctaataccgcatacgatctgtggatgaaagcaggggatcttcggaccttgtcctattagaactgg

SEQ ID NO: 627723 - DNA, 645 bp, Homo sapiens
gaaggccggagggagcgcgtgcgtgctgggtgcgtcatttcagcctggtgtggggcttgtagaacatataacataaaaatgtgttccaaaagagctctgtgtcactcactggttaagaggagcagagtgaccaagtggagacggtcatccctgtagatgtcatgaggcgagctgggattaaaggtcaccgtatgcatgggcctggtctgggaaaaagacccagataacaggtgtagcccggtgatgtggaccatatgtccttgatgccaagcctttgaaagatgcaacaaagacgagggaccatatgattgtggtggtacataaccaggagggaaaatcctgggcgcaacaagaatgaatctggagttctgctgctgtgaagtgagatactgaaaggagcaggaacaaccggaaggggcctgataggccggcatctggttgacagtgtcctaagttagagcatgtatgagggttcaattgaacactaaggtatcgggaacggtaaaagggttaaaaaagaacaacgcttattggctaaagaggacagaaatgatggaatgggaggtaagtaaagcagcgatatttctgagaaattagtggtggaaagaagacggggctgagattcttacaaggcggtgaggctag

SEQ ID NO: 627724 - DNA, 359 bp, Homo sapiens
  misc_feature (53)..(53): n is a, c, g, or t
  misc_feature (87)..(87): n is a, c, g, or t
  misc_feature (103)..(103): n is a, c, g, or t
  misc_feature (108)..(108): n is a, c, g, or t
  misc_feature (119)..(119): n is a, c, g, or t
  misc_feature (151)..(151): n is a, c, g, or t
  misc_feature (154)..(154): n is a, c, g, or t
  misc_feature (167)..(167): n is a, c, g, or t
  misc_feature (176)..(176): n is a, c, g, or t
  misc_feature (179)..(179): n is a, c, g, or t
  misc_feature (181)..(181): n is a, c, g, or t
  misc_feature (193)..(193): n is a, c, g, or t
  misc_feature (196)..(196): n is a, c, g, or t
  misc_feature (198)..(198): n is a, c, g, or t
  misc_feature (225)..(225): n is a, c, g, or t
  misc_feature (228)..(228): n is a, c, g, or t
  misc_feature (245)..(245): n is a, c, g, or t
  misc_feature (251)..(251): n is a, c, g, or t
  misc_feature (253)..(253): n is a, c, g, or t
  misc_feature (267)..(267): n is a, c, g, or t
tgtctttttattatgaaaaactatgttaagggggaaaatgtggattatggtanccagaggaatccctagccctgttttccttaaaanacttgtttagtgtttnatcanacgtctgttgnagttgtagacaggaaagcttgttagaaaaacnccncatggagcctgtnaatgttttngcncnacctgtaaagcnttntnggaagtggccagtaaaaaggggttttnccntttaaaaaaaaaagganctgggncnttgtttacatctgnaactttttcctcccctgttttccttacccccttttggggaaaaagtaggcaaagtagcttcccgttttagaataaataaccctttgggttta

SEQ ID NO: 627725 - DNA, 188 bp, Homo sapiens
aaaaaccccggggggaagggggggggcctttaaagcggcccccaggttaattttttttttaaaacattaatttgggatttttaaattgggggaaaaaaaggtttttaattttttttaacgggaaacccccccccgggggaattaaacattttggcccccatttgttttaaaaaaacattggggcccca

SEQ ID NO: 627726 - DNA, 774 bp, Homo sapiens
gaagagcacagagccctgaggggctgggctgggctgggcctgagcccctggctcttctctacagcttcacagagtgtctttcagctcactttaatcccatggtaaagaggcatcaaagctatgaatgtgaatactaacttgttgtcggaccaatagctagagaataacgacagaagcgccagtggctgaggaaagtgcgttctcccagcactgtcctccatgcttttctccctctcatgtccctccagggaagaatgactttattgcttaatttctgcctttcgccccctctacacatgcactttgtgggccttttgtttagtagctggaaaaatacagagaatactcacactctatcaaaacctgtattggtaatacaaagaaacgagaacatgaccatcgtgtaaatttgcgctcgtgatccagatatcatttgcatcctgtgatgtatgtgtctgtgtgtgagtgtgtgaagccgccagttcatctatttatatggggttgttgtctcatttggtctgtttaggtcccctccctcgtgggcttgtgctcgggatctagcctttctggcctgtctatgattctgaacattggacttgaccccacaagtgacgtctttctcctggtgactcatgtatagtctaattgtgcagctgcggacaggatgctagcccgggccctgttggggcgcgcaccggggtaccattgccttggcctgtgttctgcccactctggccgggggtccccggcccttggggcgtatgtagcgtacgc

SEQ ID NO: 627727 - DNA, 103 bp, Homo sapiens
  misc_feature (25)..(26): n is a, c, g, or t
tgttcagttttgtcattgttctagnntttagttaatgtgtaaaagggttactctcatgctccttatgtacagtaatatattgaaatataaaggttaaataatg

SEQ ID NO: 627728 - DNA, 224 bp, Homo sapiens
ccaacagtgactcgacgtagaagatactcgggtgcttacacctaagacgttcagctagcttagctgctgtggagccttgttataggcgtagcgggatctgtatcgcctccgtagcggagccgaatagcatacctataggaatagaggataaacctcttcctagctacgtaagcgactttacagatgtcttcgagaataacgctcttaagatgcagtcgcgagta

SEQ ID NO: 627729 - DNA, 188 bp, Homo sapiens
tcccaagaatgagaaattgctacgagctacctcgctcacatcctagtatgacacgccctaatccatctgtcatgggagcatactatactgggcggagataaaagttcttttcctcctggtggttagctacatcctagttcctcagtccttggggaggggctaccgagctcgctattcgtcaatcgatg

SEQ ID NO: 627730 - DNA, 274 bp, Homo sapiens
gtgggagctaaaaacagagtctattgatttctttattacggctggcagaatttaacaatattaccacaggtctttgagaaaatttggcttctaagagggattactatttatttcaatcagactgggaggaaagtccctttgaagaggaacctgtatttatttcattttctacaagtccaagagtttgagaccagcctgggcaaagtagcaagaccctgtctctctctctctctctctctctatatatatatatataaacatatatgtataaata

SEQ ID NO: 627731 - DNA, 732 bp, Homo sapiens
  misc_feature (139)..(139): n is a, c, g, or t
ctcatgcctgtaatcccaaagtgctgagattacagccgtaagccaccacacctggccctgttttgttttaatttaaggatatctaatcattccacatcagcatatgtggaatgctatagcacatcagctatagtttccntattctttctaatgatttcatagcatttcattgggcagataaatggtgcaagaatgatttaattagttccctaacttttagatggttttcaatctttttctattgcaaacagagctataagggattgcagctttgtgcttgagtctgtcagtagaatatatatctgaaagtgatcatccacgtctcaggattcctaccctatcaccaactatttgtccttgagaagtttatttgtaagatctgagcaggtgggacaacctcatatccaactggtatccccaggagtctacgcagtgccatgcccttggcaggcactcagagagagtggtttaagggctaacactgcaagcattcacactgtaatcagatggcctcttctaggaaacctttgctgatatccttggccccctttccccatggacccttcattcattccacaaatgtttgtggaaagttgattatggggaccctgtatcaaatcagcctcttaggtatatatagcccggtaagtgaagtaaaaacaaattctggaaagcactctaaggctgtgcttgttgatgggatacattaacttcataccgcttccttaaatt

SEQ ID NO: 627732 - DNA, 282 bp, Homo sapiens
  misc_feature (14)..(14): n is a, c, g, or t
  misc_feature (43)..(43): n is a, c, g, or t
  misc_feature (177)..(177): n is a, c, g, or t
  misc_feature (207)..(207): n is a, c, g, or t
ctgaatttgaagtncaagagcataggtttaggttctgactcanttagttattagttatgtgaataagggcagatcagttcattttactgagactcagttttagagagacagagtagtttaatacgatagtttccaattctagcaacatatcagatttatccaagatttaaaaaaaantttatagatacccaggagattcagattctntaggtccagagtgggacctgggaataatttgaggcaattggacccatctttgaaggccccctacaattttccaat

SEQ ID NO: 627733 - DNA, 199 bp, Homo sapiens
tgagaatcccgatcagcatttcagacacagcagtaataagcctcctatatggcaatacagctcctattgataggacatatgtggaagttagctacaacgtaatacgtatcgtgtagtacgatgtctagtgatgagttagctaatacaatgccagtcaggccacctacggtgcaaaagaaagatgaatcctagcggtctc

SEQ ID NO: 627734 - DNA, 150 bp, Homo sapiens
cttggacgatggctcattttcacttttagcatatagtgctatggaaatgatgaatctataaatgaactatcgtccaaccaatagcccaaagtgaaaacagaaagatcagttagaaacttgcaatagtttcgataaaagatgttatggcgg

SEQ ID NO: 627735 - DNA, 343 bp, Homo sapiens
  misc_feature (31)..(31): n is a, c, g, or t
tgcctccgacggattccgttcggcagtatgntggtctggcatattctttgcttcttggcaaataggtgcagcagcactaatagcaaccaggcactctggacgcatactgaaaagtcggtcacaagaagaatggaatcagccaacccatttataagaaattgctccataaaccagcattaaactgattataaacttaagaccagagacggtaaaaagaacacaggcattatcagccattctctcagacgaatagtatttaccgatgacttcatactgaatgttgacagctggccatggagttgggctaagtcacttccacagatcaacatattatccgaaggaa

SEQ ID NO: 627736 - DNA, 173 bp, Homo sapiens
acactgttaaaacatgcaacatctaattaggaccttacttcaaaataccagaacctccagttaagtggcacaggcctgtcgcagggtgtatcgcaggatgtatacagcacaacccatttaggtcagttcctcattttatacaagccccaggagaggccctgcaaatttctcac

SEQ ID NO: 627737 - DNA, 585 bp, Homo sapiens
ccccgggctgcaggattcggcacgagcgccactgcactccagcctggtaacagaacaagaggacgtctcaaaaaaaaaaaaaaaaaaaaaaaaaggactggtccagggagagtttgctttgtaaccccgacaatcctggagggaatttggtgtttggttaaggaaaagagagaagttaaaagtcatgagttacatccagcagtgtaaaaacgaaatacccgccgggcgcggtgtctcacgcctgtaatcccaacactttgggaggcccaggcaggcggatcacaaggtcaggagttcctggccaacatggtgaaaccgcatctctactaaaaatacaaaaaatagctgggtttggtggtgtgtgcttatagtccaaatactttggaggcttaagcaagagaatcggttgaaccccggaggcggaagttgagggagaatggtccaatgcactcaagcctggcggaaaagggaggatgtctaaaaacaaaaaacaaaaaaaccaataacaagtgaatgcacaaaggattaaaatttggtaaccatgccaattaaaggtgcttataaaggatatttccctctcatgtg

SEQ ID NO: 627738 - DNA, 152 bp, Homo sapiens
tactctcttgctccattgcattctttacgttctgcacttcttgatattgaagtcttccatgcgtcttaattcttcctgtcgtctcatcagatcttggtgcaaaagattgcctgatgttcatgataggcatcttccatttcactttccaattt

SEQ ID NO: 627739 - DNA, 800 bp, Homo sapiens
aaaccccatctctacttaaaatacaaaatcatcctggcatggtggcgcatgcctgtaatcccagctacttgggaggttgaggtaggagaatcacttgaatccggcaggcgaaggttgtggtgagccgagatggtgccattgcactccagcctgggcaacaagagcgaaactctgtctttaaaaaaaaaaaaaaaaaaagggtcagaaagggacggagtgcagggcgcttccagaaggggtaacctagaacatgttcatgtattgagagggtgggcacaccttttctccaaggggaatggaagctccttcaccatggtacatctggcctctgtaactcttcattggacgggtttatttatatcctttaaaataccattggtaagagcctagtaaccaggtttccattaattctggtggagcttctccagcaaattattaaacctggaaggaaggggtggcagaaccctggatttttagccagtgggtcagaagcacaggtaaaaacaacctgggactggggatggacttcaaatgtggggagcagctgggggattgaaccctcatcaaccctgtggggttctgacagtatctccaggtgggagaccgagaaccccccaggtggtatattctggagggatggatggtgaccttgttttttttggggaaagggggtttgccttgtcccccggttggttgcccggtgtggaccttcgtcccgtgggacttggcccgtggttcaaccggttctcgggcaagccctctgggttgcggtttggggggccccggcccggattggtttg

SEQ ID NO: 627740 - DNA, 426 bp, Homo sapiens
aactaatgcaggcccactatggagtaacagtaaacttatgatgtgaatttgaaagaaaaccgtatattcttaaaaacacagctaaaaacttaagactgctaagaaataataagggaaaatagtatcagtagtgcaaagtgtgaattcattatttagaaatgactaaatcactggacaaactatagggtaacagaagtcatatactctatcataacaaataagtccaaacatcacacagttaatctagtcagcatgaaatgtgtatactactactgatagataccaataatcttacgctactagctgtaatgctaatatagtggtttcttaatgagatgtgtgatttacctgcagtataaccaatagtacagagtctaacaaatgagactcagataagctgagtgtggtcatagggacaatggcaac

SEQ ID NO: 627741 - DNA, 183 bp, Homo sapiens
cacgaggggtccgtccgcaggcgctgctgtactataaaggacaggccgtcgatgccgcggagcatgttggtggcaccggtcgccacccagatgtgcgtgcccgatggtaacaacatcgtgctgtgacgcgttcgaacagctgtgccagtgtgtcggcatcgggccggtcttcattgctgcagt

SEQ ID NO: 627742 - DNA, 297 bp, Homo sapiens
gcacgagctccggttcacttcaacaccactgatttcgaaaaggatctgctaattcctgctgtgaatggtaccaagtccattctagaagcaatcaaaaattatgccgcagacacagtcgaaaaagtcgttattacttcttctgttgctgcccttgcatctcccggagatatgaaggacactagtttcgttgtcaatgaggaaagttggaacaaagatacttgggaaagttgtcaagctaacgtggtttccgcatactgtggttccaagaaatttgctgaaaaaactgcttgggatttt

SEQ ID NO: 627743 - DNA, 126 bp, Homo sapiens
gagctgagcgcaggcggatcggttggctcaggagtcaagacagctggcacgtgcaaacccgtcactacaaaaaatacagaaatagcggtgtgtgcacatgctgtagtccagctactgaggtgaggc

SEQ ID NO: 627744 - DNA, 410 bp, Homo sapiens
ggccttaaggcccgggaaccgccgaagccggaagggacgttgccgtttccttgaggaaaagtgagggttccaactttccggctaatctggaaggtgttggccccggccagtcaaaatgccagagaaaaaccagccggtggactaaggccggttagaggaagacgaccagtttgaaaagttccctgccgaaaactggcctgctttaaatgaagatgaagatgcccatgtttggaaggataatgggaatgatgccattgtaaaggatgacttctttaataagttccgacctgacctagggaaccttggttataagagggagacttcttagcatccaaaagaagtgttgaagtaccctaaactggaccggcttaatccattctaggccagagaccccagaatgggacactaaa

SEQ ID NO: 627745 - DNA, 1270 bp, Homo sapiens
  misc_feature (391)..(391): n is a, c, g, or t
  misc_feature (426)..(426): n is a, c, g, or t
  misc_feature (467)..(467): n is a, c, g, or t
  misc_feature (472)..(472): n is a, c, g, or t
  misc_feature (489)..(489): n is a, c, g, or t
gaaaagaccggttgccgacatgatagaacagcacaagcgtaggggtcccagaggttggcgctggtctcgcagtctacgcggcagcatgttgagtagctgtcggtgaacggggctctggcccaggagaccgggcagtcgagcatggcgacgccgggagaccttgctgcgagcgggtacctccacacatgtcgtccgcttcgaagaccccagtcatggctgtgtctcgtggagctgttataggggaagtctagctgtctgctattatccatcccaaaggatccaccttagcatctgcaggatttgaccgactgatattactgtggaatgtctatggtgactgtgataactatgccacactgaagggacacagtggagcagtgatggaattgcnttacaacgacagatggcagtatgcttttctcagcnatccacagataaaaccgtggctgtgtgggatagtgaaacangtganagggttaaaaggctaangggacatacttcctttgtgaattcctgttatccagccaggagaggacctcgagcctttgtctggtacttggcaagtagtacggatgcgcactaggttaaaccttctgggacatctcgggaacgacatgccatcccatccgagcacatttcagaaccactgtaccaggtgtctcagcatgtgactccttcaaatgacaccaacgtgatccacgattcatttctggtggaatagataatgatatcaaagtctgggacctgcgccagaacaagctaatctacaccatgataggccatgcgatgattcaggtgactggtgctgatgtttaagttcgtcgagacggctcttatcttttgtccaatgcaactggacatatacagttcgtgtctgggatgtcctggccagtttgcccccgaaacgagagatgtgtgaagatatttcaacggtaatgtgccacctttgaaaagaaccttctgagatgttcttggtcacctgatgggaagcaatatagcagctggctcagccgacaggttcgtctatgtgtgggatacccacgccgggcatatggttttaccttggccgccatgctgctcctcaaggactgggttcccccttgtgagccctattattcgttcggtgccccgctgtttggggagatcgcgccaatgtggagacccgcgtgtttgacccaccgctgtgcctgtggttctccccctaatcgttcacacggggctctgcccctctcggtggccgtccccagggttctctacgccggttcatata

SEQ ID NO: 627746 - DNA, 226 bp, Homo sapiens
cgtctccctggggccgggactggcagcggggacctcaggcaggcaggcaggcaggcggaaggcttccagggaagatcagtggtttggctgagacagtcaggtgcacaaaagtgaccagtcaggagcacccagcgaaatttcatccatgctctggacggccgggcacagcagccggccccttgggtatatccacttctttgccatattctctttgctggttccgctg

SEQ ID NO: 627747 - DNA, 1071 bp, Homo sapiens
gtcacccaggctgaagtgcagtggcactagtcttgggtgacagagtgagactctgtcttacaaaacaaaaaaaaaaatcttggaaaatggcgcagaacgaggatatatagagaagaaggtattgttggatgagcggaattagtgacgttatgatgccaaggagcgcggtgtaagaggtggtggagctagtgactatacagcagcacgagtgaaatgagctgaaatgttgacgaacgttggagtgagaagatgtagcgagataaagagagaagagtgaagggaagctgagcaaggagaacaacagcccatgaggcacagaaaaagcgcgcaacacaacaaaaaaacgcgaccaaatagcgagaggattagacgcaacaagggaagaccagaacgaaacagaatggccacaaacaacaaaataccaagacaagaaaagagggagcacaccaacacgcagagaagacaaggaaacacaatcggagaagaaccaaggagagagaaaaaggttcacacaacgacgatgagaagcagcaacacacgagacaaaacagcaacacaacacagaaaagaaaccgacagaacaaggagcacgcaacaaaaagaagacacgtatacagagacagagcagccaactgggacgcacaccacaagagaggcagagaagcgcccaaaaagagagagaaaacaccacacacagcacaaaggaaaaccacaagacagcagaggaacacaagcgaagtgaagcgcaaaacacgaaggacaaaccaccacgaaccagggaacgaggaggcaccgaggggaccacaccagaggcagaaacacccaccaagcaaagaagagcacctaggagcgacactaaaagaggaggacaagccaagacagggaaaagaaacagaacacgaagcaagcagaacgccaaagcagacaacaacacgaaagagaggaactgagaaggaggcaacaccgaaaatgatgacaagagcatatagcggagaaaaccagcacgacaacaacagagaggcggagaaagagcgagacgaacaacacacaacaacgggagacaaacagcac

SEQ ID NO: 627748 - DNA, 388 bp, Homo sapiens
  misc_feature (17)..(18): n is a, c, g, or t
  misc_feature (355)..(355): n is a, c, g, or t
  misc_feature (361)..(361): n is a, c, g, or t
  misc_feature (382)..(382): n is a, c, g, or t
aaaaaggttggaaaatnnttttatgaagccttaagaagcactgcatataattatacttcaggtttagatacaatctaatcatagttcaattctaaaataaaggttataggtgaaaccatgaaatttcctaacacttgattttcatacattgcactaattttctaaactgaggatacagtatttacaggtgggtgtacttgtgaaaaactgtcagctgttacgcatgtgtgtatatctaaaactcaagattatatgaactggagataaagattttatgcccgaacagcagaactagaggacaggaagctgagacctggaactgtctataaatatttttcaaagcatgggatctggnaaaggnagagatgtcatgtttcgaaancctgaa

SEQ ID NO: 627749 - DNA, 168 bp, Homo sapiens
aatcatagcatctcacgttacattatttttaattttagcaattctgatgattgtatagtgatatttcaacacagttttaatgtgcatttccctggttgctaataacactgagcatctttttttttttaaattaaggtcttgctatggaaacttctaaaacgggggatc

SEQ ID NO: 627750 - DNA, 350 bp, Homo sapiens
ccatttgccccgcccagccctgccctgcccagccaaaccctgttttgccccatttgggggtgccctgctcagggatgggctggcagggctgtacccaccctccctggtaaacaaaaactcaaaaaacctttggggtcctgttttttggtcgtgtgatcccaggggggcccatgggccccttgggtgttttaacaaaagggcatgggagggagggctgcccccctccagttttactttgttggtgtaacgggcagctgccccctcccccccccccctgccccgcggggtcctgagtcggcaaattaagcattttataaattgtattttaaaaacatgttttaaacttgtca

SEQ ID NO: 627751 - DNA, 409 bp, Homo sapiens
  misc_feature (63)..(63): n is a, c, g, or t
  misc_feature (79)..(79): n is a, c, g, or t
  misc_feature (243)..(243): n is a, c, g, or t
  misc_feature (249)..(249): n is a, c, g, or t
  misc_feature (392)..(392): n is a, c, g, or t
  misc_feature (403)..(403): n is a, c, g, or t
aaagggtttcattgtggttaaccccaggatggtctcgatctccctgaccctcgtgatcccacnccgcctcggcctcccnaaagtgttgggatgacaggcgtgagcccaccgtgcccggcctctgtctgcacttccttaaaagggactagaatgggtcaatccaaaatatgccaagttggggctgagcctataatctcagcactttgggaggccgaggagggtgggtcacctgtggtcaggagntcaagnccagcctgactgacatggtgaaaccccatgtctgctaagaaaaattacaaaaattagctagacgtggtgcgtctgcctgtaatcccagctccttgggaggctgaggcacgagagtcacttgaacctgggaggtggaggttgcngtgagctgagntcgcgc

SEQ ID NO: 627752 - DNA, 469 bp, Homo sapiens
attggaataaaatttgttttatggctaaagatctatgacccctgccttgcgagggcgaatgtgataggggtgtgagggtaatctgacactggttgttgcagctcttaagaaaacaaaacaagggggcatggacacattgaccgtgcggactgcagcacgggtatcataattttcagctgctagggagctgctgacaggctggtcccctgtggccagaggtcacagactgttcggcccacaggcacgcagaggccctggatacctattgcacagtctgtgcagcatgctgcacacgggctactccactctcatgctgctcaaagaagggggtgaggaccagcacctacttgtgcgtcacgtcatcgaaccacgactgacaggcactcgattctcaagacggactatgtatgaggcagtcgaatagacaacactgatcactctgctcaggtacacggctatgcgacacagg

SEQ ID NO: 627753 - DNA, 132 bp, Homo sapiens
  misc_feature (132)..(132): n is a, c, g, or t
ccgaaattctaagtacgccacaatcatactggatttgagaccatcgtcatctaatatgacctgttagtgacagttagttttatgtatcaacttggccaggctatggtacccagctttgaatcgaacaccagn

SEQ ID NO: 627754 - DNA, 646 bp, Homo sapiens
  misc_feature (153)..(153): n is a, c, g, or t
  misc_feature (175)..(175): n is a, c, g, or t
  misc_feature (186)..(186): n is a, c, g, or t
  misc_feature (279)..(279): n is a, c, g, or t
  misc_feature (282)..(282): n is a, c, g, or t
aaaggaccccaacgccaacagccccaggagacccagggccccccgggcagggcccatcatatccaaccccattgaagctggcccagaacctccaggggaccctcaccgggcctgtgaaggtcccgggggtaagggcgcctggcccagcccagnggggccccaacccgaatagganaaggggagggnggcatgggggccctcctgtggacccacccagcagaccccttcctgcaggccgtgcggttgccgccatcctgggcctgggcctggtgctggggntgntgggccccctggccatcctgttggccctgtacctgctccggagggaccagaggttgccccccgatgcccacaagcccccttgggaggcagttttccgggcccccatccaaaaggagcaggccgacgcccattccaccctggccaagatttgacctgggcccaccaaggtggacgttgggccccgccaggttggagcccgaagggtttgttgggcgagcagggcaggtgcaggccgcctgcccccccacgttcttgggccaattttgccccgttttaggtgccgatggctgcctccggctttttgcttacgtatgccatgcatacctcctgccccgcgggaccccaataaaacccttggcagcca

SEQ ID NO: 627755 - DNA, 145 bp, Homo sapiens
cttatacggtctgggccagtttcagtactgctcgaagtccgctttgctccaattcagcgatacagacatatatttgaactcctttggtctgaggttaacggtctccactaacccgctgaggtctctttccgatcagtagcgtaga

SEQ ID NO: 627756 - DNA, 711 bp, Homo sapiens
actttttatgaactccacaggaagtagtaaagctttttgtttttttaattaaaagaatttttttggagacaaagtctcgctctgtcacccaagcaggatggcaggggcataactggtggctcacggtagcctcaacctccggggctctagagttcctcccacctcagcctcatgagtagctgggaccgcaggcgcatgctaccatgccgtggcaaactttttggattttttatagagacaggagggtctccctgtgttgcccaggctggtctgtaaggcctaggctcaagggatcctctgcctgggcttcttaacctgctgggattacaagcatgagacaccattccgggcctaaaagcctatttttaaagaaactacaatctcccagggggacggtttccctgcctctttggtgcagtcccatggaactggcctacagcaagaggcctaagatggaatcttttgggggaaaagtcattctaggatgaaaatcctatgttaaggccgggcgcaggggctcacgccggtaatcccagtacttggggaagccgaggcagggggatcacctgaggtgaggagttggagaccagccgggccaacatggtgaaaccccgtcttactaaagctacaaaaattagcgtgggcgtggtgccaggcgctgggggtcccagctactcaggaggctgaggcaggagaatggttgagcctggg

SEQ ID NO: 627757 - DNA, 603 bp, Homo sapiens
ttacacgttagcccatttatacaggtagaccgcgagggtatcagacaccgtctaatgacctttatcttcccagaccaagtgtctgcaacagagtgagtgctcagttttgaattacagaattaataaaagcacagaggaatgagaagaaagtttaatttacagatgttcacaagactccgtcctcattagaataaatgttttagatatattcagacctcatttagaaacaacgccatcaaatgtgattctttctaaatcagtacaaattttaccttatattcactctggcataatcttcaaactctattaaggttttcgaatgcacaggttctgaaaattaataccaaatgactatctcagcagtgttttcccattatacaaataccttccctcatctctgatgtcagtttcctgtggtcattttcataatggcagtaagttagagatataaccattttgtattactacatatgaccaattttaatatttttttgccataggaaaaacatcatagttattggaaatttgttttataactggaaacagaacgcttacttatatagtagattcagcttcaggtgcaggagtgtctggtctcttttc

SEQ ID NO: 627758 - DNA, 643 bp, Homo sapiens
tggcgcttgcttgtcagtccgccggtgttggggccgccctgctggcctaagccgctcgctgcgctgggctgtgagagctctgttatgccttccccgctaggcttccgtgcgggtaggtggttgattgtcgcctcgggcccccccccgttgggttgcccccggcggccactattttcccccggaggggatatcgcgtccgccctctcgcttttttgctaggggccgactttttcccacccctcagggggttggctccctcacgggccatggtcgagtgttccctcgagcactctccgccctttggtgccccgccgccctatttatatacaggttctctggtgtgtgcgccacacgagttctagatatgctctctctctcggagttgtctgcagtgtgcacacagtctcgcggcgtttgagttcccgctgtcgccggtgtgtccttatggtccctccattttctctctccctcttcggcattcttactccctcagacaaaacagctcatacatttcatcacacatcggcccttctctccccccgtcgataatgacagtactctctctccctcttctcctattattaccaccactcacccccccctacagattaccagcggcgttataatcaataaacaaaaaact

SEQ ID NO: 627759 - DNA, 881 bp, Homo sapiens
aagcaggctggtacgtccgggggtaaggagcgctgctttgtctcttcgtccagagccttatgtaagagctttgtctcgggaaacaggaaggtcctgcttgccaaattatcagcgacaggagtagtgcaggccttattccaacacacccggcccagccttaagccccagaactcagccaggtttctgtgcttccgtgcccctggatactccgtcacccaatcgagcccacgcacactcctgtaccacagccgttcaggtcagcgccactaatgaacctgacgcaccagccagactcctcataggcgtgtgcattgcaagccccgcaggggtccatgacacagtcactacgaccccgggaccaccatgagaccaacgtgacccgcaagaaataaggacgcaggccagactcacgtgacatccctggggccacacaaaatgacctcgtacataagacacaagcacaaaaaccatatacaccatcgcacacgcgagaacacacaagagaggggcacaagcccacaccaatagagcatggcaccatagcaagacagcatgggcccattgaaagtaccaatcccaatggagaagcaagaatccaacactaggagacaaagaggagcccagtgcaacacaacaaatacagcagaaaaacgaggaaaaacaagggcaacacacaccctcgaaactacaccctacccacatggcaagcaggacgatgacaaaaggccacagcgccgaatgaaaacacagacgacgaatcaccaccaatacaagggtccagcacacaccgcacacagaggcaacccacgcaaaacacaatacccgcgcagccagactgtcgcacaacaccgcgaagctcacacaagaacgacgagccagaa

SEQ ID NO: 627760 - DNA, 196 bp, Homo sapiens
ggcgacgtgtaatctaaagacagaggttaacgcctcttttgccagtccgtggtgaatgtcatgttgaatgcaaattcaaagaagcagcttcaattctgccgggacttctcccgccttttttttcctgcggcgggcagaagtagatgtgaagccatgttgattacgggtgtttacgctgttaacctaacaagtttcg

SEQ ID NO: 627761 - DNA, 612 bp, Homo sapiens
caagtacctggtaccacaggcgcacaccaacatgtcccagttaatttatttgtattttcttgtacagacagggtttcaccatgttagcccaggctggtctcgaactcctgacctcaggtgatccacctacctcagcctcccaaagttctgggattactggcatgagccactgtgtccaggcaagttaagtgctaacaaataaacccacctatatctcacttgcaaagcaattttctaagataccttgtccttaggtcgggaagaggtatgagaattctgtgtggatgtaacgtctacaatgtatccagcaatccttgacataatgaaccaaatgctcgcttgagtgccttgttccaaggctcctcaagccagggatctcgacacacacatatccttagctcctcctccctggggtggacaccttgccaggtgagggctcatgctcatgattcctgcgcacgactgatccccgcccacgttgctctcatcttacggagcggagagacagccttgggagtcatctctgccagcagtctcttccttctttgcctgatgttcctggcggcttcagatgacggcgaaggtaatgcagcctgggtgcccttgggctct

SEQ ID NO: 627762 - DNA, 578 bp, Homo sapiens
  misc_feature (478)..(478): n is a, c, g, or t
  misc_feature (561)..(561): n is a, c, g, or t
cagtttgaatcgcgcagcgactaatgagtaagtggtgcgatctcaccgagggtccgattagcctttcctttgccttgcttgcttgagcttcagcggaattcgaaatggctgccggtacggctggaaaggactccggaaaggccaagacaaaggcggcttcccgctcgcagagagccgccttgcagttaccagtgggccgtatacattgacacctaaaatctatgacgaccagtcatggacgagaggccgcgactgccgctgtgtacagcgcagccatcctggagtaccttaccgcagaggtacttgaactggcaagaaatgcatcaaacgacttaacgagcaagcgtattacccgtacgcacttggaactatgtatgcgtggagatgaagaaaaggattctctcatatggctacaaatgactgcggtggtgacattacacacatccaccagatttttccttggaaagaaagaccacangacactgtctaagggatgcgtggttccttgttgtaccaggactctaaatactataacaggtgctccatggtggagaggtcaanggactgttattactgcg

SEQ ID NO: 627763 - DNA, 257 bp, Homo sapiens
cggaacaataaataaagtacaacacgtctcttaaagacacagagtggctccaggcccacaggccccgacagtgggagtcagagagcgtacacatcatcaacccaagggatcaaacggaagccgagttggtgagtaacagacagacaacgggacggtggctgagaggaaccgacagccagcacttggacagccagagccagggcgcagtccaagtagcagcagacagtacaccctggagtggtccgacgcggacgggg

SEQ ID NO: 627764 - DNA, 112 bp, Homo sapiens
gccgcgcttatagtgagcgcgccggtcaaatgaattgtgggtcgagtgtttgggacgggttgagcggatgcgggagcgcggcacgtgtggcccacgctaccatctatcttcc

SEQ ID NO: 627765 - DNA, 557 bp, Homo sapiens
catgggtgtgttctcaagggaagttctgtagcctcagtgtatgatgggaagctgctcataggcccttataccccagagccttgtattgtgaactctaaattgtacttttggcatgaaagtgcgataacttaacaattaattttctatgaattgctaattctgagggaatttaccagcaccattgccccagaaatgtatggcatgggtagttaattttattccagtaaggaccggcccttttagtttttagagcccttttaccaaaaaaggaaaatgaccgggttctttaaaatgccaagcaagggccagaaaagaaagctgctttcgaataaagtgaatcccttttgcccaaagtaagcctcccctttgccttccaactgccagaacatggattcccctgaaatagagtgaattatatttccttaaaatgtgagggccctccctttgggccctgtgactactatggctgtttagaactcctgataacgtattttgatgttttgtccttccatctttgtttccccttaaaaagttggggtttttttaaagcctaccta

SEQ ID NO: 627766 - DNA, 390 bp, Homo sapiens
tttagtttcttttagtagggatgtcctttagaagctaaaattggccctagggattccccctgaaactggatatcattgctttgaggcctttcagcaggcagaactaggaaaatttatgccaataagtggggggatatatatgtggggcccatggatatatgaatacatatttatcatactttttaatcatgagttcatactgaaacttttaatcccaccccatggggggttttttgccttccccccttttggattgtcttttttaccccagcagtaataaccctgggtccccttattttcaatatatttccctcctttggtcaggggtcccataaaaacaagtttcagaatccctacagctctatccacaataaaccttttaaagttcca

SEQ ID NO: 627767 - DNA, 418 bp, Homo sapiens
gtaagattccagacaggctatccgagaatctgagagctgcgcccggctattcctcccgctacccttgtgacctctgtccagttcacacatttccccatgtttctctttgtcatctacccttgtctggctggttttgagggcttgagaatgggtcagggactccaggccacagtccaacagagaccccaaacctcaccacacaccagcagtccacaagctcaccaccaacaatgaggacttttgtggggccacaagtaagaggtcatttctggaatggactcagtagctttacacaggagagttgagcacttccagtcagtttttaagcaaggcatggggaacagggaatagaacctttcaaagaggtagcccagagaaaagctgggcctcttgcattcggcttccttggagcagcctc

SEQ ID NO: 627768 - DNA, 1235 bp, Homo sapiens
acctgcttttactcattttcaatgatggttatttgtacgaaggcaaggacaccaattatgcttgtattcactacagctattactctaacatgttctcgcttctcttgtaacttcctggctacagacccttttaacacatggttcagttgctagtacaaggaatccatttatctggctaacattccttgcgtgcgcctgcgcctagactagctctccctaccacgacaccactaactctctgcgctactactacgcaacgcgcctactcccctctcagcactctatgttcatcacatgcgcaacacgagcctcctctcgttatccttacgccgcttaccctctgcacactcctctgccccttaccttacactacacacgctacgcacgctacaccacgacactttgcacacacgcctttcctggatcaacacgtgctccctgcaacaactatatcacacttcctctgcacaactggctcctctctggctacttcaacacaccctggcaacctctgtctccctgtattctacagggcccttaacgccaaacatcgtcactccacttacaacttgtcttgccccatttgccactctaaggcccccgctatgcttaaaaacataccctttggccacacctcgcacaaattggcttacatcacttgcgcccgcacttttcggacacgtcccccaccacttggttgcacacttccggccacttcaacttccatccaaccagaccacatgactggcgcgccactcaagccatggcaccccttctaacaccatggcacccttccaatctggtcccaccttgtcaactatctccccatttccaaaattcccccctgatgtacacacacttcgcacatagatattcataccacgttcactatcaggctctccaacaattctactttcacccctactaaacagttcatacataaagcttacaccaagctctattacgccgcgcatcaaaccaccctttctccggagccaaccatcacgtatgtcttgacttaagctttgtacacccttacaggtcgacataagcattgcgcaaacctcaaaacgagcatggcattacaaactcttccgcgcacatcatacacattcaaccaaggggcgcgaactcataccgttgctatcgcttcccagacagatctatcacctatcggtgccacaagctctggctgcacatatctactggcgaaacacacctttcctcatccgact

SEQ ID NO: 627769 - DNA, 116 bp, Homo sapiens
  misc_feature (101)..(101): n is a, c, g, or t
actgcccctgcaaccttccagctggcattcggcaccaggtgaaccggcagtcttccggcaggcccaccgccccaaacccggtggctgccttccctccacanagcagcagcgctttg

SEQ ID NO: 627770 - DNA, 916 bp, Homo sapiens
agcgtgggggctggccgcgtggaatttgagccgagtgggccgcgatcggacgaggatttgggggtaccctttgacccaggtcggggcagctgatccggctagcgagtttggggtcccctggtgcgccgaagccctgagttgccagatgttgcaggtaacagtacagttcttctaaagtttgaagtttcagacaagacaggtttcagggtatcgtctcatgtaatgttgagaaggtgagggcgggcctgggcggattcttctccgtatccagaatccctttctcttttcaaaccgcattactagcccgagttaaattctttaactctactcctctctgcttaccctcataaggtttacggccgtatcaggctacggccgcagtctacgggttgtttgattccccttgttggccacaagaaagtggttattcgaactacttggctttcctttatcaagaaaatggcaatgcggtatacatacatgcacacacagataagaagacaaagctacgtttttcaggtggtgttctagatcgtgtagtggctgtgtacttcagggatattttcccgtcaccttgaggatttccctcatctacctttcttgggagatacgatgaaatccaacaaaagccaagttcggtaacctaagagggttaagacaagttgcttctctgttacaggtcatccacgttcctcatctgtaagaccgatcgcccaatggtttgtccagcagctcctctgaatgtaatcttccctgtagtgggtgcctgggagaattacaaggaaccaaggcgatcaggaactacattactatttcgtgagggttaattgccaaagaataatcttataactttgaactaaggcatggtctggtagtgttagcacacgtgataaacttgcaaatattattgaactac

SEQ ID NO: 627771 - DNA, 680 bp, Homo sapiens
  misc_feature (34)..(34): n is a, c, g, or t
  misc_feature (101)..(101): n is a, c, g, or t
  misc_feature (168)..(168): n is a, c, g, or t
cgccacacttccccgtcaaagcgcgaagtggaanatcaagcggacaacaaagtctcgcagatccagaggatgcccatggtgcaggcaatcgcatgtctaancccgcactagagaggacgaaagctgaagatccgccacggtgcggtccactgtagacatagagaaatnccagctcgtcagctattgcgcacgagactttccttgcttatgctagtcaatagtcggagacaagaattggaatgtacgcgtgcacaagaaggtgtcggcccattcagtgttacttctagtgcaccacatagacctttctacacatgtgggatctcattcctgataaggacagcatcgccctgtatagctcaggtgcaactggacaagaatccacattccacaagtgctaaggtcagtccgggtcaagccgcacgaataggagcacgtagccaaggcattgggctggccccagctgtagtcagcatgtctagtgtgagattcactgtgcggaatcctttggattccctgggatcaaggattttcagcatggaccaatgatgtccaggattccgttctttcaatgtgtctttctaaaccaggacatagcccatcgtgtcgcttttgtcttaaataggggcctgcactcgtgagcacgaaaactatattgacgcataataatcctcatcaaggaa

SEQ ID NO: 627772 - DNA, 208 bp, Homo sapiens
tcagagcatgtgactctggcgttcattgctctagcacggaataaatccatggagttagtgaatcgtcatgagtgacgcggttatgactcgtagcgtcgcgtggaatgggctatgcagcgtttgggcgtgcgctgccgtggagagaaagcgtttcatagttgcctctcacgcattagagcaagacgtgtatagaatgtcttcgaccatt

SEQ ID NO: 627773 - DNA, 1201 bp, Homo sapiens
gctctccactctgtttgtccgccggtccgccgtcgcgtttctctgaaccggatcgtcaaatggacctgaacgagatcgccgcgctggtcattgacatctggctccggcttgtgcaaagctagtcttttgactgagggacggacgcctcacccgagcgcggtgatttcctctccgagtcggatcagggcaagcctcgcagactaagcagggcagttcaatggttgtggctatggagtcgcaagacaggcagtccgtacgtgtgagctacgcacggcccagagcaagctggtgtcttcgcatgaaccgcgtgacagtaccacctacttgtagccactgcgcagtcgttatccgaactggagtacctgaccggtggcaggaaagatcttggctaccaccgagctcttccatatcggatcggatggcgtgacagccgatgtggccccgagaggggaggcactcacaagtagcatagcgtgacgcggaggttgcgctgcgcacttgaaggcgcctgaggatgctagcagcagcacgaacgcagtgaccgtcaacacttagtggtatgtgacgcagccttcaatcaacccccggtgcccaatgctagctgcttgcgggcagtccaaggggccgttggctggttaccccgtctagccgggccctcttgtgagctggcaaacacaacgtggggccaattggttccattgtggaacattctttgagaaaagaacctgggggggttcaacccaccaacaaacatgtgttggccccaagttcttagcagatgtggtggctttacatgcactctttccacccaccaaagaggcacaatttccttagtcagtacttgtgaacccctttagggccttggggccctgtagagaacgcctggaacccggaaccttaacgcttcattaggacaggaactcgcgttccagctaggaccggcccgcaagggggcctttaccgaaaggattgtccagagcacaaagccgccaacaggtgacccagatggccaggggtggacacgaattccggattgaccggccggaacacattccacaaaggggacgacacgggcctgcgttggcataaccggttcaggaccccccttggggaaacctttccgaaaggcaagtggaatgactttgatgccccaaccaggcccgacagtcccatcccttcctttactccttgggaagaacag

SEQ ID NO: 627774 - DNA, 417 bp, Homo sapiens
cacttattaatctttcaaatagtgccttttgttgaaacttggattttgaatggccctcaccatactgatgacttgtgactgagctcctcactactccacatatgagaggcaggaatagaatacccctaatagatagacaggaatatcatcacccttattcagcctgagaaagttacagaagatggatcttcatccttctgcaactcttaggattaagggttctcttataaaagagaacagggaaatgtcagaagcatttgagccagggcaactccatcttgaggaggggcttggtaaaataaggctgagacctactgagctgcattcccagacagttaaggcattctaagtcacatgatgaaacaggaggttggcacaagatacaggtcataaagaccttgctgattaaacaggtta

SEQ ID NO: 627775 - DNA, 159 bp, Homo sapiens
acatacgttaagtgtgcatctgctagagtctacctgaatcagcatgactgtcttttaactacatctgtagtactataatggtgaatatagagtatatcatctgtcatagtgtgtgtgtgtgtcgctactactaacttgaagcttttttttctctaaaag

SEQ ID NO: 627776 - DNA, 299 bp, Homo sapiens
attttttagaggcagagtctcatgttgcccagtctgtagtgcaatagctatttacaggcatggtcatggcgtactgcagcccaggatttcaagaccagcctcagcaacatggcgaaatcccatctctataaaaaatataaaaaattatccgggtgtgttgatgtgcacctgtagtcccaggtgcttgggaggctgagatgggaggatcacttgagcccaccatgagagatcgaggctgcagtgagccatgattgtgccattgcactccagcctggacaacacagtgaggccctgtctca

SEQ ID NO: 627777 - DNA, 101 bp, Homo sapiens
cgtctttctttaggcaggaggtctcattcccattgtaggtcaggaggccaccctggtaatggggcaccattggcggtccctgcccaagtgcccgtcttcaa

SEQ ID NO: 627778 - DNA, 1461 bp, Homo sapiens
  misc_feature (214)..(214): n is a, c, g, or t
agctaactgcttacgaacccggcggaggaaggagaggcgattctataccaacgcctatactgactggttcagggcagccgtgacagatagagattctgatccatagccaggtcgttcggaaatagatctgcgccatattagtgaacgtatacgtaagtccggggaagaaagaggaacccattgggaagtacatgaggctagtggctcgtgcagncttatgaaataatcaacttggcctataccgtatgcggtatatagtccgctgtgagggcagcaactcatactacttcgacacgtgacgcgaactaggagcgataggactaacaccgagacactacttgtcagaccatcacgactcagccgatgacatgcatgcggctcatgcgcgcgcatcgcgggggcgttccaagagttcatgttgagagctgggagcttcgagccacgattgttccctacgagcaaaggcaaactgatgggaagatgtagtctaacgtcgggcgagttggcctcggtgatgtctcacctaaggggaccttccagtcatttttgcttttggtatcccaacgcagttcaaagggtcggtgcccttcgaacacatggttcgactcgtggtactttaagactaaatactcttcgaattcgaactttgacggatcaaattcctggtcacctaaaacaagttggaaaaacctgttcaacgtatagccgtgtgggtcaaagacttctagcattatcctccacctttcactgagtcccgcggtgacttccgaaccttactggaaaggctctggtgaaatttctcgagcgcatttgccattcaaagcggaagaggggaggttgtccaactctgcgagcctcggactttctacccacacgcattacatgttcgtaccatggggcacttcacctatctgcggctttaagaggagcaccaagaggatccccttagcaagccccctaagggagaatgcaccctagtgtttccaaccttaattccggaatgaaattaacgagtgccaggggcgggctaaagaactttgcttatatacttttgtccctttcacccccaatcggaaagcagaacatatcgcggtccaggggggcatcaattcgccgggggcaaaagtggccccggcagagaaacaaggtgtctaggcgttcccgagggaacctttaagccaccccgggaaatcgggcaaatgtggacacaggccgaacaaagttggcaaatgaccaaaagtccgccgggaaaattcagaataccctagagggaagaggcgtcagtcgacaagtagtcccactcataggcctatccgataaacacccataggagcaatggggtatacccacaccttagcagagaggacaaagcggtgtataaacaaggtggggacaaactaatatcggagagcgaaacagagccccgatctcactcagggcaggggcagcagaagaacaacg

SEQ ID NO: 627779 - DNA, 420 bp, Homo sapiens
ttcagttgaattgtaactgcttttggtatttggagagagtgactattgaacttgaaaccccaaaaaaaaaaaaaaaaaaaaaaaaaaaaaaagtgtgtgtggcgcgcgcgcgccggggcccccggaaaaagcttttatagaaacacaattccgggtggggcgcgcgggggcgcccaagagggaaagggacagtggggccaagagggggttcccaagagggagaaccgggggccagagaaaaaggggcggggaattctcttcaccaattaaaaaaggcccggggggaaaccgagaggcggtccgcggagaaaacctccagagaggggggtccgggaggggcacaaagggggaccttattaaaaggggaggtccaaggggaacgccagaatattaaaattaagggccccggctgggggggca

SEQ ID NO: 627780 - DNA, 362 bp, Homo sapiens
  misc_feature (69)..(69): n is a, c, g, or t
tctccacaggggtccctgtgccctgagggcactgggcaggcagtttcctttgaggtgtgtgtgctgctntgcgagtgtctggggagggcggtcccaaaggctgctctctctggcccctggaggcctctggcctagtgcttgggtatcccttggactcctggagtcaggggatgtgcaaggggcccccgtggagcaccccctgtgttgggaggagcaggtgcccagggcctgtggctctgcagggctcacctcacagactgggggcctccaagacctgacaaagccactgggcccagggctgatggctgatgaggtattggagtgtcgctcagtaccacaggtcccacgcaccaaacctgtcc

SEQ ID NO: 627781 - DNA, 245 bp, Homo sapiens
tgtaggatcaacgcagcttgctggacaggcctacatggagcggtcgggaaacgcttcaagcgcggcgtcgcagcggctcagcctgcccctctggaactccttatcctacttctagcagccggctggcggccaccacgacggccgtgagtggccgctgactacctgcacgtgtctctagaccttctggagaggaagctgcggtccctgtggcgccggccattcaatgtcactgatgtgctgacgcc

SEQ ID NO: 627782 - DNA, 404 bp, Homo sapiens
  misc_feature (318)..(318): n is a, c, g, or t
  misc_feature (335)..(335): n is a, c, g, or t
  misc_feature (388)..(388): n is a, c, g, or t
ccctggattctatccaagccatgagggattttatgccctgggtttaagttatggtgcatcagggtagccttctaccctttagcacagagcttggtgttccaaaggccacaaggggctttagaccctggaccccgcacatattccaagacttttttatattatgtcagacatgcaaaccctgcctcagcttctgtcaacactcagcttttcccaacagaaaataactgcttatattgtttggatatttgtcccacccagatctcatattgaattgtgatgtccaacgatggaggtggggcctgggtgggaggtgttttnggtcatggaggcagctncctcgtggctttggtgttgtcttcatgatagtgagttctcacaagatctgggncatttaaaaatgtgtg

SEQ ID NO: 627783 - DNA, 429 bp, Homo sapiens
ggcagaactagtggatccgtgagaggtctctcagcgtaggaatgaaatagagctagaatctgcatgttacgatgtgtcctctgtagagcctaagcccctaccacttgtgttcccgagagccccagcaatcactcaggagcttataagaaaagcagagtcccaggccccagtgctgacccgtcttgaatacgaatctgcacttttcaaaagtttcatttgctaaattactatacagtaaattgctgtttgtcatgctcggggtacgaggttctacgaatgtgaggtatatttgtcaattggtattagccaccaccattaatccagatacagaactaagtctgccccagaaactatcttgcattatcctttatgatcacacctatcacccctaaccactaataaccactaatctgtcctcatgtcatacct

SEQ ID NO: 627784 - DNA, 111 bp, Homo sapiens
ggacgcgtgggtcgacccacgcgtcgcccttgcctcgccccagctcggccacttctctgaaggagggctgggttctgggcctgtatcgaataaacacaaacctggatggcg

SEQ ID NO: 627785 - DNA, 870 bp, Homo sapiens
cggtagcagtagcagggactcggcgcctgacagcggggaacaggcggcggcatccctggcggcggcggccgaggcccagggggagaacctcagcgcggtcttcagccggcaactcaaacgtcgaacgcgcaagcacactacgtgcgccgagatagtccacggcgtacgagttctgggccgtgcgttgctgcgggggccctggtcagcgccagcaaccccagagtggctggtggccgcacaattaaccacaggagccgagcagcggcgcggagaggccgggcggtagctgatggaagtccgtctcgaagaggaacatgttcatatgtgtgaagggtactagggttcagcatgttagcgatggaaacttttgagaacctaatttgtagatacatgtagagatagaaggtgtctccagaagaatcatgggagcataatagtacagaaataaggtgatgcatgacgccatggggcgtgtgctccccttggtgccaatggacaggcgcgacgagacggagagagtggctgcgattaacctgaatggacggagagacatgaggaaactccctttgacctaagtcgtgtgagttggcacgctggtcatggtgcatcacataaagaaaagagcgatgtagagttgtatggtatgcatttgcgtgcacaagtacgaagtgctagggtcaagtaaggcctaattggagggagaaaattagctggtatttatgcactggagattggtaggagtaagagggacagcttgggcataggtatgcagtagagaatgctagagtagagaaaagaaggagcacgattgtgttgtttgtcttggggcctttaaaaacaaagtcagggaaggacgaaagaagggttaaa

SEQ ID NO: 627786 - DNA, 194 bp, Homo sapiens
ttttaccttatgcactgacgagtcttatgaagtgacttacgtgggagcgggacctgtctgagtcctaggaagtgacctgcagtgggagcaggagctgtctgagtcctaggaagtgacctgcagtgggagcaggacctgtctgagtcctaggaaggtgacctgcagtgggacgcaggacgcgtcgtgaggtccta

SEQ ID NO: 627787 - DNA, 1868 bp, Homo sapiens
gataccgtgtctataaggagtcctgcttatcaacgaactgaatgtgctccgtgggcagcgctgggtgatctgttgcccagctgtcgtgcacttgcatgcaacggcactccatgcgtatttcataccttcaatgtagtggtagtgccacgggagattcaagtctagagagaattgcgatggatccgtcaagaggtaaaacaatactagcgcaatagagactcgtgacgctaggcacgaacatcgagcgacacttgtggagcagtagtgtcacatatgcattgagcgaaagatcagacaacttctcatgatggccgcccgtgggtatcgtacacgcatgttgaggataataatgacgaaaaggatcaattggacaagaggaactctgtcccatgacacaggagggactgcgaagatcataatcagtggtgcgaccactgaagggaccgcagacaagacctgttacagtccagatgacactggtattactctacgtgtgctgctagtgtaggcacagggatacccaggcaaagacctctagttcttcatctgtgctgctacatagttgccttgatgtgtgtaggccatgccttatcagcaacaagactttggagcagacacgtgacaaacagagcagtactgatgacaatacacagggatatacacatgcaaacacaaaacatacagacaagtgaccgagggaactaagcacaaaaacgattgaaacacccaagataatcaccaattgaccacgtacaatagcgaggcgcgccgcacacagacatccaacacaagagcggcggcaacgcacaggaaaggagaccatatagcatgcacacgaccctgcaggcgtaaccagaaaacgagagcgagaaaaacggtcggagtaaacacaacaacagcgcacaccccgagacgtcacgcaggagtcatggcaaagaaatagagaagacaagaaaaaagagacagaaacgaacgaaaaagcaaagaagagaaataaacaagagagaaaggagagagacagaagacaagcaaagcaacagaggagaagcagaaaaaagaaagagacaaaacgaagaaggaaaaagaaagagaaacaagaaaaccaagacacagcacaatagaaacaaggaagaaacacgcaagaagacaaagagagaggagagcaagaacgagaagagaacgcagagcacagagaaagaaaagaggggaggagaaaagagacgagaagcaaggagagcagcagagacgggggagcagcaacggagaaagaagaaaggaagcacgaaggaacagaggagcgagcggagcagaggtggcgggaggaaggaacagcgccgagagaagcgggggagagacgaggagaacaaagcgcgagagcaagaaacaaagaaaccgaaaagaggaagggagacggaagagaaggaggaaaacgaacacaaggaaacagaggaaacaagaaggagcagaggaggaaagggagggagaataaggagacaaaagacgcaaacacagaaaaaagaagaagagaaagaaagagaaaaaagagaccgagaaaagacaaaaagcgaaaagaagcagagagaaagaaaggaagagaagaaaggaggaagaaagcaagcgagaaggagagaagaaggaggagagcaacgagaaggacgagaaggggaggagtagcgggggagaggaggagaggaagaggagagggagcagaggcgggacgagaggagaaagcgagaagagagagagagcgaagagaagacagaaagaggacaggaggagaaagggcgagaagaaaggagacgagagaagaaaggggacgaaggagaagggaagaacgcggaaggagcggagagcagaaaaagaacaga

SEQ ID NO: 627788 - DNA, 90 bp, Homo sapiens
ctagaagattcagcaaagtacttttgtgctcttggggccttttcctaccttacctacttactgggggatattatccccgataaactcact

SEQ ID NO: 627789 - DNA, 761 bp, Homo sapiens
  misc_feature (29)..(29): n is a, c, g, or t
  misc_feature (31)..(31): n is a, c, g, or t
  misc_feature (57)..(57): n is a, c, g, or t
  misc_feature (65)..(65): n is a, c, g, or t
  misc_feature (77)..(77): n is a, c, g, or t
  misc_feature (90)..(90): n is a, c, g, or t
  misc_feature (95)..(95): n is a, c, g, or t
  misc_feature (98)..(98): n is a, c, g, or t
  misc_feature (100)..(100): n is a, c, g, or t
  misc_feature (103)..(103): n is a, c, g, or t
  misc_feature (105)..(105): n is a, c, g, or t
  misc_feature (202)..(202): n is a, c, g, or t
  misc_feature (204)..(204): n is a, c, g, or t
  misc_feature (242)..(242): n is a, c, g, or t
  misc_feature (248)..(248): n is a, c, g, or t
  misc_feature (289)..(289): n is a, c, g, or t
  misc_feature (377)..(377): n is a, c, g, or t
  misc_feature (381)..(381): n is a, c, g, or t
  misc_feature (411)..(411): n is a, c, g, or t
  misc_feature (421)..(421): n is a, c, g, or t
  misc_feature (426)..(427): n is a, c, g, or t
  misc_feature (430)..(430): n is a, c, g, or t
  misc_feature (442)..(442): n is a, c, g, or t
  misc_feature (445)..(445): n is a, c, g, or t
  misc_feature (454)..(454): n is a, c, g, or t
  misc_feature (456)..(456): n is a, c, g, or t
  misc_feature (458)..(458): n is a, c, g, or t
  misc_feature (518)..(518): n is a, c, g, or t
  misc_feature (699)..(700): n is a, c, g, or t
  misc_feature (732)..(732): n is a, c, g, or t
ctgccgccgcgccgccgccaccctcccananagcactggccaccgctccaccaacanttgcccanagtttgggccancgcccgccgccancaacncananaanancggcccctgtctgctgctcgcgcctggagatgtcaaaagtccccgttgctcgcgtctggctggtactgctcctgctgactgtccaggtcggcgtgananccggcgctccgtggcagtgcgcgccctgctccgccganaagctngcgctctgcccgccggtgtccgcctcgtgctcggaggtcanccggtccgccggctgcggctgttgcccgatgtgcgccctgcctctgggcgccgcgtgcgggtggcgactgcacgctgcgcccggggantcanttgccgcgcgctgccgggggagcagcaaantctgcacgcnctcanncgnggccaaagcgcntgngtgcaggantntnacgcctccgctccccatgctgcaaaggcaaggagccctgaaaacaccaaagagcacgganataactgaggaggagctcctggataatttccatctgatggccccttctgaagaggatcattccatcctttgggacgccatcagtacctatgatggctcgaaggctctccatgtcaccaacatcaaaaaatggaaggagccctgccgaatagaactctacagagtcgtagagagtttagccnnggcacaggagacatcaggagaagaaatttccnaattttacctgccaaactgcaacaaaaat

SEQ ID NO: 627790 - DNA, 293 bp, Homo sapiens
caacgatggtcctcagctatccgtaggctgagactaggagtagttgcttgatacctgggaggcggagattgcaggtgagctgagattgccccactgcactccagcgtgggcaacagactgatactctgcctcaaaaaaaaaaaaaaaaatttaaaaaatcaatttttacctccgttggaaactttgtgtaaggtgccccaaataagattttgcaccaaaggctgttgctgtcctcgacgcggcttcttgagacagcatgtgttaaagcattgctctccttttccccttggaat

SEQ ID NO: 627791 - DNA, 238 bp, Homo sapiens
ctccagcgtgctattctgtagatgcgagagattgttgactatagtgaggcgcatttatgaagatgacaagagacggtgcaacgagacctccctcacacctgatcgcctgctttgagaatgccagctaaggtgttatacagtctatgctgtccctctggcccatatacttggtcgaccctgacctgtataagtgtatcaatgtgggcaggatagtatacagcgggcatgggccagaccc

SEQ ID NO: 627792 - DNA, 242 bp, Homo sapiens
cagtccttctctaaattccagctagtgtatagtgtgacactctatcttaaaaaaaaaaaaaacaggggtcaggcaaggtggctcacacctgtaatctcaacattttggaaagctgagggggaggatcacttgaggtcaggagttcaaaaccagcttgaccaaaatggagaacccccgtttttactgaaaatacaaaattagcctgccaggtgtggatgtgtgcctgtattcataactcctca

SEQ ID NO: 627793 - DNA, 136 bp, Homo sapiens
  misc_feature (65)..(65): n is a, c, g, or t
tcgccccggcgatgcccacgaacacgaaccaccagatcgggctgaagtagtggggggcggtgggnatattcaggaagttgtacaccaggatggtgctcacgaaggcgagcgcggcgaatacgcggaggagtttgtc

SEQ ID NO: 627794 - DNA, 332 bp, Homo sapiens
  misc_feature (70)..(70): n is a, c, g, or t
  misc_feature (105)..(105): n is a, c, g, or t
  misc_feature (179)..(179): n is a, c, g, or t
  misc_feature (204)..(204): n is a, c, g, or t
cccccttttgtgtgcttatttaaacccattccttgaatgagcaggtgaaacccatcaaaaaattgggtgnccacgtgcccaacttgggcaaaatgggagcgcccnaatttggcttgggggaatatttttttgacaagccccccctgggagacagtgaaaatgaaaattaagcctcgggntaatttccccaaaaccgtggggtgncttccctggtcccaaaggaagggaaagcatgttggggtttcctttcccttttttaaaagttggaccaaaaaatccccttaagttttttgatttggcccattccttcaaaaaaaaaaatttgggcccca

SEQ ID NO: 627795 - DNA, 275 bp, Homo sapiens
  misc_feature (127)..(127): n is a, c, g, or t
atttgagcgctgggttctgagggatcatactaaagagaagacaggaaaacaccagtaatggtgaaggtcttgagaaaaggacaggacccgcaaatagcgagagatcagaggaggccctaatttctcnttcctcattggtcctttccacaatatcccagaatgtgcaatggcattcaaaccctggggaaagacagaaggcagaaagcatcaagctctctgtttatcccaattcaatgacaaccagaacttattttttttgagatggggtctcgttc

SEQ ID NO: 627796 - DNA, 162 bp, Homo sapiens
  misc_feature (20)..(20): n is a, c, g, or t
aaaatcacggaatagaacangtgtgtctgtgctgagctcaagacctgtggaaagggactgcccccactgggattacaggcgtgagcaccatgcccagccctatagtagttcttcttttgccccttaatatcctcacccccatgcccgcctggccacccgcga

SEQ ID NO: 627797 - DNA, 518 bp, Homo sapiens
ccagtgttctagttacattaatgagaacagaaacataaactatgacctaggggtttctgttggatagcttgtaattaagaacggagaaagaacaacaaagacatattttccagttttttttttctttacttaaactctgaaaacaacagaaactttgtcttcctactcttacattctaaaccgatgaaatctttaacagattacactttaaatatctactcatcattttctctctcagagtcctagcttgagttgcactgcatgtatctgtgcatcttgttctcttcatttaatgctgtactgttctgctgagctctgagggactatcttgagagatgtaatggaaggaaagcgtggtgttaatctgcgtactgcttaagacagtatttccataatcaatgatggtttcatagagaaactaagtcctatgaacctgacctcttttatggctaatacgactaagcaagaatggagtacagaattaagtggctacagtacacacttatcaaaataaatgc

SEQ ID NO: 627798 - DNA, 468 bp, Homo sapiens
  misc_feature (11)..(11): n is a, c, g, or t
  misc_feature (85)..(85): n is a, c, g, or t
gaagacgacanaggggagaaggaaagcccacggacggagacccaggatcctgaaatgcagtgcgtccccttcaaacgttctgagnataaaaaaactgcaagccccgggaggaaaagcaattcctaaaacttggcagaaacaacataaaaaaaatcttgctgttgaaaaactgacctaagaccaggcatggtggctcacacctgtaatcccagcactttgggaagccaaggcgggaggatcacttgaggccaaaagttcaagaccgcctgggcaatgtagtgagaccaccccccatctctacaaacaaatgtaaaaattagccagacatggtggtgtgcacctgtggtcccagctacttgggaggctgaggtgggaggatggcttgagcccaggaggttgaggctgcagtgagctgagattgtaccactgcattccagcctgggtgacagagcaagaccctgtctcagg

SEQ ID NO: 627799 - DNA, 330 bp, Homo sapiens
cttccttcactgggccgctccatctgcctcatagtctagccaaatgctgttttagatcaagtgacctacgatcaacaatgaggtattttataaatgtatttatgctgctagactgtgggtcaaatgtttccattttcaaattagttagaattcttatgagtttaaaatttgtaaatttctaaatccaatcatgtaaaatgaaactgttgctccattggagtagtctcccacctaaatatcaagatggctatatgctaaaaagagaaaatatggtcaagtctaaaatggctaattgtcctatgatgctattatcatagactaatgacattt

SEQ ID NO: 627800 - DNA, 416 bp, Homo sapiens
  misc_feature (8)..(8): n is a, c, g, or t
  misc_feature (365)..(365): n is a, c, g, or t
  misc_feature (410)..(414): n is a, c, g, or t
cagtaggnatgccccgggctggactgtgccctgtcaactcccctgctggagggtggctgtgaaatttcctcatgctgcccttccttggaattgtagcccagagtgcatcccacaaaacaatgctgcgggatgctgaataacagcccccagtcatacacaggtccttatccttaaaacccatgaatagcctgtaatgaggccgaggtgggtggatcacctgaggtcaggagttcaagaccagcctggcccacatggcgacaccccgtctctactaaaaatgcaaagattggccgggcatgtgtgtcacgcctgtcatcccagcactttgggaggctgaggcgggcggatcacaaggtcaggagaangagaccatcctggctaacacagtgaaaccccgtctttactaaaannnnntt

SEQ ID NO: 627801 - DNA, 500 bp, Homo sapiens
taaccccaaggatcttaagccatagaggatagacaggaatatagtgcctttgatcacttttttttttttaggaaagggagtaccggctcttgtggcccaggctgaagtgcagtggcgcaatctcggctcaccacaacctctgatccccggatccaagcaattctcctacctcatcctcccaagtagctgggataacaggcttgtgccaccacacccagctaattttttcatttttagtagagatggagtttctccatgtgggcccgtcgggtcttgaatccctgacctcgggtgatctgcccacctcggcctcccaaggtgcggggataacgggcttgagccacctatagacttttcgcagtgctcccatttcttttcaactagtcatgaatgtgtgtactttttaaacaacaaacaagcaaaaccatttgccacgattgacaaccaaaactagtattatatattcttaggggaccctgtggggctaatgggaccctggg

SEQ ID NO: 627802 - DNA, 908 bp, Homo sapiens
tcagtgataagtctgttgttgcttgttgctgtctaatacagacttccaaatagagctgggagagttaacctgtgtgacagcattgaatactgctgtaggaaaaaaagcagacagaataataagactttgcttgaaaaccattggaatggaaagatggatcacgcagatggctaagcaggtagaagtaattaggtcatgaatcctttttttcttttttttttatttttgggagacggagttccgcctctgtgtggcccaggcttggagtgcatgggcgcgaaatgggctcaccgggacctctacctcgtggggtgtcaagcgattcctccgtgcctcagcctcccgagtagctgggattaacaggcagtgtgccaccacgccggctaatttttcagagacagggtttcaccggggtgggctcaggcgggtctcgaactcccaacctcaggtgatccgcccactttggcctcccaaagtgtggggattcacaggtgtgagccagtgtgccgtggcatgagtctgttgacagttcacattttggggccatagtacaggtcatctaaacacaaagtacccgggtacggtactaagaaataggggcttataaacgaacctttatagacgttgaaatcattggactttataaaacctgtagaaagatcttgttgctctctggcaaaccgagttctttacctgaagcccccatgttggtttttcccttgaagtgtttcgcaccatttcacaccacaacttgattggcgggcaagtcccggcggggtgagcgcacataaaatgcatggtccgtccacgggaaaagtggtgtgacttggggcacggcaaggtgtatcggatccacacaaagtaatatcccccagtggacaaccagggcattgtgaaaagcgactacg

SEQ ID NO: 627803 - DNA, 225 bp, Homo sapiens
  misc_feature (4)..(4): n is a, c, g, or t
  misc_feature (180)..(181): n is a, c, g, or t
aggngcccactgcctcttcccttcttctcgcttgggaactctagtctcgcgcctcgggttgcaatggaccccaactgctcctgtgccgctggtgtctcctgcacctgcgccagctcctgcaagtgcaaagagtgcaaatgcacctcctgcaagaagagctgctgctcctgctgccctgtnngttgccaagtgtgccaggctgctaggcaaaggggcatcggagag

SEQ ID NO: 627804 - DNA, 96 bp, Homo sapiens
gatgtcagattgatttgaaaggtgtgcagcctgatttaaaaccaaaccctgaacccttgtaaagggcaatataacaaatattccacgctcaaaaaa

SEQ ID NO: 627805 - DNA, 819 bp, Homo sapiens
  misc_feature (3)..(3): n is a, c, g, or t
  misc_feature (90)..(90): n is a, c, g, or t
  misc_feature (95)..(95): n is a, c, g, or t
  misc_feature (111)..(111): n is a, c, g, or t
  misc_feature (125)..(125): n is a, c, g, or t
  misc_feature (127)..(127): n is a, c, g, or t
  misc_feature (131)..(131): n is a, c, g, or t
  misc_feature (177)..(177): n is a, c, g, or t
  misc_feature (183)..(183): n is a, c, g, or t
  misc_feature (252)..(252): n is a, c, g, or t
  misc_feature (255)..(256): n is a, c, g, or t
  misc_feature (262)..(262): n is a, c, g, or t
  misc_feature (267)..(267): n is a, c, g, or t
  misc_feature (272)..(273): n is a, c, g, or t
  misc_feature (279)..(279): n is a, c, g, or t
  misc_feature (286)..(286): n is a, c, g, or t
  misc_feature (288)..(288): n is a, c, g, or t
  misc_feature (292)..(292): n is a, c, g, or t
  misc_feature (304)..(304): n is a, c, g, or t
  misc_feature (317)..(317): n is a, c, g, or t
  misc_feature (331)..(333): n is a, c, g, or t
  misc_feature (335)..(335): n is a, c, g, or t
  misc_feature (362)..(362): n is a, c, g, or t
  misc_feature (368)..(368): n is a, c, g, or t
  misc_feature (420)..(420): n is a, c, g, or t
  misc_feature (480)..(480): n is a, c, g, or t
  misc_feature (489)..(489): n is a, c, g, or t
  misc_feature (516)..(516): n is a, c, g, or t
  misc_feature (518)..(518): n is a, c, g, or t
  misc_feature (521)..(521): n is a, c, g, or t
  misc_feature (529)..(529): n is a, c, g, or t
  misc_feature (536)..(536): n is a, c, g, or t
  misc_feature (539)..(539): n is a, c, g, or t
  misc_feature (546)..(546): n is a, c, g, or t
  misc_feature (588)..(588): n is a, c, g, or t
  misc_feature (590)..(594): n is a, c, g, or t
  misc_feature (603)..(603): n is a, c, g, or t
  misc_feature (607)..(607): n is a, c, g, or t
  misc_feature (609)..(609): n is a, c, g, or t
  misc_feature (613)..(613): n is a, c, g, or t
  misc_feature (615)..(617): n is a, c, g, or t
  misc_feature (619)..(625): n is a, c, g, or t
  misc_feature (628)..(628): n is a, c, g, or t
  misc_feature (640)..(641): n is a, c, g, or t
  misc_feature (643)..(644): n is a, c, g, or t
  misc_feature (649)..(649): n is a, c, g, or t
  misc_feature (652)..(652): n is a, c, g, or t
  misc_feature (657)..(657): n is a, c, g, or t
  misc_feature (666)..(666): n is a, c, g, or t
  misc_feature (669)..(669): n is a, c, g, or t
  misc_feature (676)..(676): n is a, c, g, or t
  misc_feature (679)..(679): n is a, c, g, or t
  misc_feature (686)..(687): n is a, c, g, or t
  misc_feature (689)..(690): n is a, c, g, or t
  misc_feature (692)..(692): n is a, c, g, or t
  misc_feature (697)..(697): n is a, c, g, or t
  misc_feature (721)..(721): n is a, c, g, or t
  misc_feature (729)..(729): n is a, c, g, or t
  misc_feature (814)..(814): n is a, c, g, or t
gcnggcattacaggcatgagccaccatgcccggctaattcttgtatttttaatagagacagcatttcaccatcttggtcaggctgggctngaacncctgacctcaaatganccacctgccttggncncccnaagtgctgggattacaggcgtgagcgaccatgcccggccatttgtnattgtnatcgcattggctctggcatctaccaactaagaggataagttctttgaagttgacacataatagttttcnatnnatggtngctangatgnngatgangatgatnangcanaatgtatgatanccatgaggatgangatgatgacgaaannnangatgatgaaaatggtgaagatgacgangacganggtgacgtgtgaggtatacgagttcaggctcttgttgtattttgtggttgtntttaaaccaagtgatctgaggctcggggacaccattagcatgacagtctaaagtggtggnactgctganggccactgtgtcatcactgaggtttcncnggnggtatggngcttccnganctctgantgtaatttctttcttctggaggatttcttcccctgtgtatantnnnnngggctcggnaggnanaggngnnntnnnnnnncanggaaacaaacannanngaaanaanaagantgaaggagngcncctaagnganggccatnntnngngtgcnaatactgtagtgcattgttctgtnataactgncgcagtaaaatccaagtacgtctctgtataagacttgtaactgtgcagacagtttcaggtctctcctccgtcggcatttttccantaaca

SEQ ID NO: 627806 - DNA, 491 bp, Homo sapiens
  misc_feature (394)..(394): n is a, c, g, or t
  misc_feature (405)..(405): n is a, c, g, or t
  misc_feature (449)..(449): n is a, c, g, or t
  misc_feature (455)..(455): n is a, c, g, or t
  misc_feature (458)..(461): n is a, c, g, or t
  misc_feature (466)..(466): n is a, c, g, or t
  misc_feature (471)..(472): n is a, c, g, or t
  misc_feature (474)..(474): n is a, c, g, or t
catctgctggccctatctcactcctgcttccaggggaacccaaccaagccaccctcctgaactgttctgtgtcaatgaatgagtgtctctcaatgagtgtaagctggagggaaacaggactctctggcccctgcacacagggcctcccatccacaggctgccccttgattgcttttgcacacctttaaagatggggtttgtttctctcccatcatgtactcctcagcagagtggagtatgctgtggtctgtctccttctgaaatgcctagaagtccagcaggtctgaaggcctctcacaggtccatgaggacaagaggcaaaagcctgggtggaggttccaatttggggtgagtcccttctcctccctggtcccttctcctccctgggtcttantgccccatttntgaatggacgaacagaccagagggtctctctctctccccctcangtcccncgnnnngaccncaganngnatctgttacttaattga

SEQ ID NO: 627807 - DNA, 329 bp, Homo sapiens
tcagccatacatctcctactgtatctaagggatgaatggactgaatagaatgcactgcaataaaaggatacgaatagaatgaaaaagaatagaatggaatagaacagaatggaatcaaatcgaatgaaatggcatggaatagaaaggacctggcatgaaacggaatggaaaggattcgaatggaatgcaatcgaatggaatggaatcgaacggaatggaataaaatggaagaaaactggcaagaaatggaatcgaaatgaatggagtgttatggaacggaatcaaaaggaatgtaatggactggattggactaggatacagtagggaga

SEQ ID NO: 627808 - DNA, 464 bp, Homo sapiens
  misc_feature (1)..(1): n is a, c, g, or t
  misc_feature (196)..(197): n is a, c, g, or t
nttaacctcccaaatagccctactgctgaccggaagcccctactgataatataccacaatcaattagccaccatattttgtagggttaatatgtattattgtacctatatccctgacaaatacagtaagctagagaaaaaaggttattaaagaaaataataaagaaaatataattacccatggctgggggtgggtnncacgcctgtaatccccagcactttgggaggctgaggtgggcagatcacgaggtcaggagattgagaccatccctggctaacatggtgaaaccccgtctctactaaaaatacaaaaaattagccgggcgtggtggcaggtgcctgtagtcccagctactggggaggctgaggcaggagaatggcgtgaacccgggaggcggagcttgcagtgagccgagatcgcgccactgcactccagcctgggtgacagagcgagactccatctca

SEQ ID NO: 627809 - DNA, 1288 bp, Homo sapiens
gggtgggcagtgggctgccccgaggtcgccgtgccaccacgttggaggcacgaagctggaacggaggaggctgggaggaaaccccagctggccgagagcccagctgggacgtgccctgcacagatgcggaggcaccgatgctggggactgtgcccagaccttcaccaccctgagaaagctagcggaagcaccaagaggcccactggtgtggggctcccgacatgctccctgtggccgggacgggaggccctccaccctgctttacctgcccccgactgctgccacatggtgtgcaatgacctgcatgtctgccctgagcctgccacgggcagaggcatgctgctgacgctgtgcccgtggggcacccccaacccctgtacatttgcctattccaatggtgcagctgctggcaccaaggcccggggatgtcacggcaggaagccccccaagatgatgcaagtctcctcatccagcggtgaggcaggtgggctgggagcactgcttgctgaggaagcttccgagaccgtctcactccaggaccctatcatttcagggggtgaggagcctcacaggtaagtaggcaatgctggtggctgcatgctatggtcttacccaaacattgtgccaggaactatccacctgggccttgaattggcggagctggcctgtgaaacatgagcggaagagcaagtgggcaaagtcctggggaagtgaatggtgccaagtggatgtgcctgtatgaaggggcgaccagggactggacggcgcatacgggcgcttgacacaggtcatcttcataacccttgaagcctaacacgactcgtatcaagtgaccccccagattcttgcatgactaccctatacatactttcagtacatacatgccagataagtccgcggatgtattttcacacctggataccctcctttgccttacagaaggtgagtagcgggtaccaccctacctcataccatcacagggtgtcattgttgccatcagactgatagagccccaagagcggacaagccactggcggctgagacgtaggctggtcgccatagcattacactacagcaaggccctatagaacagaagtgcacagtccgccgcctactagacacgcaggtagacgatagcgaggccagaacgtccgcagaaactatagcaacaacagcagacagcaaggagcggaaaagatgcaggcgaagcgatacagcagaacagatcataagacacagcgtagcggcccgatggggagaagtaagaagagcagtgagaggtctaggg

SEQ ID NO: 627810 - DNA, 1186 bp, Homo sapiens
cgagaagtggaactgaggggtcacatggcacttctgtgttgggagcaggccccccaaaatctggccataaactggccccaagaactggccataaacaaaatctctgcagcactgtgacatgttcataatggccctaagagcccaagctagaagcttgtctatttgacggggatgagggcaaggaacacttggcccaggccagggtggaaaaccacttaaaggcattcttaagccacaaacaatagcatgacgcgatgtctgccgtaaaggacacgtgctccgtgactgacaaggtcaactaggcccaagaatgatatcctttacatgtgtggaccctagtcgcctatcggatttccacagataaggggaataactacaaaacagatatcaactaaacaggacttcattattagaaaaaagaaagttggcataagatgacagtggagatagaggacgttggttacaattagagagtcagagtaggggataaataatcatagtaggttacaaggagagcattcgtacaaagccgtcgttgaaaggggacgttgataaagagaacaccaccattaggaaaaatcatcaccacaatatatatcccaagcaaaatgggatcacaaactaggtaacaaaaacatagcgtgtaatcacattgtgacgagaaacaataaaatacaaaattagaaccaaatacacatcaagaaaatcacacaatggaaataatgaggaaaggaaattaacagtaggaaaaacaataaaagaaccacaagaaaaacaagcaaacaggaaacaacgagaggacaaccacacaacaaagaaacacaaaacaagacatagaggagggaaagaaagaaaacaccacagcaggacgaaaagcaaccagacacacgaacaaaacactacagccagccggacgaccaccgccgaaacccagaagggaggtacagggcaacccgagcggaacaggaccacgaagaaacaccacgcaccaatgaaagtaaccagacacgcgggaaaaacacaacacacaggcaaacgagacacaatcagagcacaacagagagaaacaacacgacagcagaaccacaaccacaaccaacaaaaacaacaacaccagaaccaaacagaaagacgaggacacgacacagacagacgccaccgaagacgcaggaccggagcagcctca

SEQ ID NO: 627811 - DNA, 256 bp, Homo sapiens
caacatatacaagactctgaaaaattatgaactctaattaaaaccaaaaagaaagaagcattctattatttatgacctttcctaacaggactcaatgtgccacctgacatctgctagtgatgatctggtaatatacaacctgtccagtagccgaacagtttgtctatattgtgttatctaaccgtaagagatcattaaaggcaacagcctatatgacgctgtacacacaaaaaaatggtcaccgtgggccatacta

SEQ ID NO: 627812 - DNA, 388 bp, Homo sapiens
cttcatcatgctagcaggagcgggaacggcggcagcagcagtctagagcggggcgtggggtgtgccccgaggaaggatagcctcttgaagccagggctcagtggctgttgtggagaggggccgccgccgatgtccactcaatgccatgcacaacgagctcgcgctaagtccatgtgcctcccaaagcagtgggctgcagctggggcagtggagccccctgccccatgccccatgccatcccaaagagccccattcccaatagactggaccaagcgaccagcacactgctccactggccacgttggcgtccacttcagatgaccaaagcagcttccatcttcctgttccatcctctcagcagtggctctggacccgtcctcgcctgacg

SEQ ID NO: 627813 - DNA, 134 bp, Homo sapiens
ggtagccgggcagtactgggctctctgcactgccctcctgtgcaaaatctgattttgaagctactctcatcctctgcagccctcgaccgctacacagagttcttccaactgttccttatttgtcattactaccc

SEQ ID NO: 627814 - DNA, 579 bp, Homo sapiens
ccactggcgtcgcccacgcgctccggcctgcgtcgctccgggagctgccgactggacggagcgccccctgcccgcgacctgtctgagcctaccgttgccgcaatgcaccgatcgtctgaacagccgaagaggcatgacatgactgtctacccggaccgcagcgacgacggtgaccacgattcgtgacgcagcaccagaatgagaaacagagtggccacagtgtgctgagatcacacggaggcctatgtcactagcacgcagcgacggaccccaacaggaggcacagccgaccacggagatacaaccgcctgggagcggacaggtccaagtacgccacgaaacacagcgacggactagtcaaaaaaccccgggggaccaacccacgagtacgctccctgttgacaccaggaggggagcatggcggacaaggacgagcgacagaaacgacaagagcagataccgagaggagcgcaaaggagggataacacagcggaacgaacatcatatacagaaggccgagataaagtgcgggagcgacaccacgggcaaccgggcggcgcataacagacaaaccacaca

SEQ ID NO: 627815 - DNA, 383 bp, Homo sapiens
atggcccctcccatctacacagatgtcttagagtttgacgatggtaagaggcctggagtctcctacccccagggatgctttccctgtgttcctgggtccaggaggtcctgcccacttcttgtctggggcgtcttctgtgcatgtctcaggaggcttttgggctccttcagttttgcgtatgtccggaggagggtactccccctttgatgccttgtgtaggggcagtgtctgcttcacagagggggggcatgatcccaggttggacatgagcctgagaatagccctcactgcttgtcgttggccaggcaccccagctaccatgtcccagatagccaaggatgtgtgcaccttcctgcgctgggcatctgagccagagcacgacg

SEQ ID NO: 627816 - DNA, 1022 bp, Homo sapiens
ctccactatggacagagcctccactgagctgctgcctgcccgccacatacccagctgacatgggcaccgcaggagccatgcagctgtgctgggtgatcctgggcttcctcctgttccgaggccacaactcccagcccacaatgacccagacctctagctctcagggaggccttggcggtctaagtctgaccacagagccagtttcttccaacccaggatacatcccttcctcagaggctaacaggccaagccatctgtccagcactggtaccccaggcgcaggtgtccccagcagtggaagagacggaggcacaagcagagacacatttcaaactgttccccccaattcaaccaccatgagcctgagcatgagggaagatgcgaccatcctgcccagccccacgtcagagactgtgctcactgtggctgcatttggtgttatcagcttcattgtcatcctggtggttgtggtgatcatcctagttggtgtggtcagcctgaggttcaagtgtcggaagagcaaggagtctgaagatccccagaaacctgggagttcagggctgtctgaaagctgctccacagccaatggagagaaagacagcatcacccttatctccatgaagaacatcaacatgaataatggcaaacaaagtctctcagcagagaaggttctttaaaagcaactttgggtccccatgagtccaaggatgatgcagctgccctgtgactacaaggaggaagagatggaattagtagaggcaatgaaccacatgtaaattattttattgtttcatgtctgcttctagatctaaaggacactagcattgccccagatctgggagcaagctaccaacaggggagactctttcctgtatggacagctgctgtggaaatactgcctgcttctcccacctcctcagagccacaggaaagaggaggtgacagagagagagcaaggaaagtgatgaggtggattgatactttctactttgcattaaaattattttctagcctgcagtcta

SEQ ID NO: 627817 - DNA, 1644 bp, Homo sapiens
  misc_feature (640)..(640): n is a, c, g, or t
  misc_feature (1177)..(1177): n is a, c, g, or t
tgtttgtctttacttctttcacttccttccttgctctcttggttctcgcttccttttttctctctgctacgttctttgtctctccttttcccttcgtgtcgtccgtttcttgtcttgctgtctggttgttctccctctctcgctagtctttttgtcctctggtcgcctgtatgtgttctttgttacttctgtttccgcctttgctcttgacttcttgtttctttctcgtttgttttctgctcttgtctttcctgtctgtccgcttttgtgtgtttcctcctctctgtggttatattttcttcttcgttgcttctagggttgttgtttttctgttttttgtgttgcctcctctcgtttgttcttcttctccgtgtgcgtgtcgtcgcattgcttattcgttgtccgcatcgtgtggatgtgtgtgtgttgcttgtacttatggtgtctcttgtgtttgtgttttgttttttttgtttgtttcttgtttgccctttttgttttgttgtttgtgtggttttttcgtcttgtttgttgtttgtggttgtttttttgggtttttgttatctctagtctttttttgtgtggttttggttgtgtttggcgtgtgtggggggttgctgttgttggtgtgtgtgttttntgcccgccgcccgacgtgtgaagtaagaacggcgtcaacacaaggtggtaaaaacgcagttcacccctttattgggtggatccacagaaacacacccataaacgcgatttttttaagagggggcacccccctctatataggaggaactctcgccaaagagtgatcgcccaccccacgaggtgtggtgccacccccaaaaaaagcccccgcgccctttgttgtttaaacccggcccccgccccccccgtgttgacacttttttcaccacgggctctctctataagggttttcccgaagcgccccctggggtgtgcccccgaaaattcttcgcgcacacccgagaggcccttttgtgcgctccccctctgtggggaggcgcccctctctctgggggggacaccgggggacacttctctataagaagggagactctatattttctcttggagaagcgccttggtgggttccccaaagcccccactattgttgtctctgggcgaatatataaacgcgcggggtcttctccgggagacaccnaaaagggggagcccacacacccacgcgctctctgttttttataagaatgtgaagagtgtttctacgcccccgcgagagatgtgaacaccgcgaatatttctatattggggcccagaagaataggcgcctctttatgtttatatatataatacacccaagaacacccaccccgcgtccactccctcgggcggcccacacctccacacccaaacccagagtctatcttggggagaaagatatacatctcgggcccccatggagacaccacatggccaatggttctcgtgccccaattctccgaacacccatctttctcctgcgtaagcgccccttggcaccaccacgaatcccgagtgatgcctgtacccccccaggattttaactaaccggaaaatcccataaataaaagtggatttgttgctcttgtatttttaaatgggatttaaaaaccttactcccctttaaaa

SEQ ID NO: 627818 - DNA, 884 bp, Homo sapiens
ctccactatggacagagcctccactgagctgctgcctgcccgccacatacccagctgacatgggcaccgcaggagccatgcagctgtgctgggtgatcctgggcttcctcctgttccgaggccacaactcccagcccacaatgacccagacctctagctctcagggaggccttggcggtctaagtctgaccacagagccagtttcttccaacccaggatacatcccttcctcagaggctaacaggccaagccatctgtccagcactggtaccccaggcgcaggtgtccccagcagtggaagagacggaggcacaagcagagacacatttcaaactgttccccccaattcaaccaccatgagcctgagcatgagggaagatgcgaccatcctgcccagccccacgtcagagactgtgctcactgtggctgcatttggtgttatcagcttcattgtcatcctggtggttgtggtgatcatcctagttggtgtggtcagcctgaggttcaagtgtcggaagagcaaggagtctgaagatccccagaaacctgggagttcagggctgtctgaaagctgctccacagccaatggagagaaagacagcatcacccttatctccatgaagaacatcaacatgaataatggcaaacaaagtctctcagcagagaagatctaaaggacactagcattgccccagatctgggagcaagctaccaacaggggagactctttcctgtatggacagctgctgtggaaatactgcctgcttctcccacctcctcagagccacaggaaagaggaggtgacagagagagagcaaggaaagtgatgaggtggattgatactttctactttgcattaaaattattttctagcctgcagtcta

SEQ ID NO: 627819 - DNA, 497 bp, Homo sapiens
tgcgtgatacagaagatagtcgcctagagggctggtgtctgtcaggaggttggggcccagcaagaaagtacatccgtatgaaagttcaaatggactatatcctgtagcttcttgaggataggctctaattctaaggagggcaaatggtaaaagtgctgtccagtcttttttaagttggaggctgagcttggtgaggtgtgtgtttaaaagaccattagttctttctacctttcccaaagatgaaggatggtaaggagaatgaagcagctgatggagccacaggagacgctgcaggggtgggggctagggaggctttagaagggggaacaaacacgagatacgcttattgtgtccgcgcctgggcctgctctagagctcatcgcgatccactggaatataaaggatgctccaccctgtcctgactcatatcgaccaggccaagcccgcaggcagaccccatggcgacctctgaggatgccgctcagatacacgatgaa

SEQ ID NO: 627820 - DNA, 1626 bp, Homo sapiens
ctccactatggacagagcctccactgagctgctgcctgcccgccacatacccagctgacatgggcaccgcaggagccatgcagctgtgctgggtgatcctgggcttcctcctgttccgaggccacaactcccagcccacaatgacccagacctctagctctcagggaggccttggcggtctaagtctgaccacagagccagtttcttccaacccaggatacatcccttcctcagaggctaacaggccaagccatctgtccagcactggtaccccaggcgcaggtgtccccagcagtggaagagacggaggcacaagcagagacacatttcaaactgttccccccaattcaaccaccatgagcctgagcatgagggaagatgcgaccatcctgcccagccccacgtcagagactgtgctcactgtggctgcatttggtgttatcagcttcattgtcatcctggtggttgtggtgatcatcctagttggtgtggtcagcctgaggttcaagtgtcggaagagcaaggagtctgaagatccccagaaacctgggagttcagggctgtctgaaagctgctccacagccaatggagagaaagacagcatcacccttatctccatgaagaacatcaacatgaataatggcaaacaaagtctctcagcagagaaggttctttaaaagcaactttgggtccccatgagtccaaggatgatgcagctgccctgtgactacaaggaggaagagatggaattagtagaggcaatgaaccacatgtaaattattttattgtttcatgtctgcttctagatctaaaggacactagcattgccccagatctgggagcaagctaccaacaggggagactctttcctgtatggacagctgctgtggaaatactgcctgcttctcccacctcctcagagccacaggaaagaggaggtgacagagagagagcaaggaaagtgatgaggtggattgatactttctactttgcattaaaattattttctagcctgcagtctaaaaaaaaaaaaaaaaaaaaaaaaaaaaaggggggggccctcaaaattccccccggggggagccaaaagcatcgtagccaggcacccgcaggtcgttgttggaaaagggggggccccattagtaggggagggccgatatatataaagagacgcagagagcaagcggagggcgcggtcttataaaaagaggtcagggaaatagggggaaaaaaaaacgtcaatacacgggggactcttgtggtgagaggagagaacgcaccaacattccggcggggcggggagacacacctaagggtgggggagaaacaactcatccccgcagagagaggatatataagagacccctctgtgagaggggagaatatatatataagcacacttttagaaggggattatatgatggtggtggtaacaaaccaagagcgaggaaaaataatatactgtagcgggtggtagcgtagaaagaaagtgtggcccacgagggggagaatagtaattgtgtggaaaacatattatttttagccgagggagaacgtgtgtataataataggtagtatgtatagatgaggtgtgtaatagaagtggaagtagagagaagtgcagaa

SEQ ID NO: 627821 - DNA, 521 bp, Homo sapiens
cagtttcgatgggaagagtacaccttccacgggagactgctactattactggccagggtgaccacaacgattcctacgctctcctgggcgagctgtgcccctgtgggtccacagacaagcagaactaacttaagacggtggtgctgctggctgacaaggaagaagaatgtggtggtcttcaagtccgatggcagtgtactgctcaacgagctgcaggtgaacctgacccacgtgaccgcgagcttctctgtcttccgcccgtcttcctaccacatcatggtgagcatggccattggcgtccggctgcaggtgcagctggccccagtcatgcaactctttgtgacactggaccaggcctcccaggggcaggtgcagggcctctgcgggaacttcaacggcctggaaggtgacgacttcaagacggccagcgggctggtggaggccacgggggccggcttttgccaaacacctggaaggcacagtcaagctggcatgacacgctggactggttggacgatccc

SEQ ID NO: 627822 - DNA, 390 bp, Homo sapiens
agcggccgcctactactactactactactactaaattcgcggccgctcgacttttttttttttgagatggagtctcgcactgtcacccaggctggagtgcagtggcgcgatctcggctcactgcaagctccgcctcccggcttcacgccattctcctgcctcagcctcccgagtagctgggactacaggtgcccgccaccacacccggctgatttttttgtatttttagtagagacggggtttcaccatgttagccaggatagtctcgatctcctgaccttgtgatctgcccgcctcggcttcccaaagtgctgggattacaggcgtgacgactgcaccctgcctggctcccccgcccttcactctcccttcgtcctctgtctgtcgacg

SEQ ID NO: 627823 - DNA, 984 bp, Homo sapiens
cctttagtgtgggcacagtggggcgaacgggtcggtgcaatagggtggggccgagttggggatcgcgtacgaatgtgcgcgccggctgtctgaggtttagagcgctgtttgtgttgcgcgcggctaatgtgggcgcgtgttggcggcagatttgggcggttggtagcagtacgaggcgcacgcgatggtgggttgggggggtcaattcacaggctccggggagtgaacggacgaactatattgggagacagtttgtggccgctctgttcgcctcgcacttggcggcgtgtttgtgcaagcacacggttctgtgtccgggcgggcggcggggccgtgcgcgcgcgtttgatggaggggcagggcactgtgaatttagatgtggccgttgaggtcattggggcacgggtctcctgtcaagtgttgaccgatagtgagttagcgtcgtggcctcccggaggctgccttgtatggtttggttgcgtggcccgctggttagcgcaagggcgactcagggacgtgtgaggccctcgcaggatgtggacgtagcccccgcacgctcgctgtcttctcgctcttagggtgtcacgggcccgccgccgtcatagcggcgtgtcttgtgtgcccccatcgggactgctgtgggttgacgtatggaagggttctccggctaagcactcttgggctctcacttctggtgcccccgcttttttgtggcccctccttccgcccttgcttatgaactcgcaatttgttatcgatcaaggcgctgtatttgttgtaatgccccaccgtcatttagcgcaggtgtatcccccacatgttatactcaacgtgaggatagagtgaaactacgccacgtttgtgccacaaacacacaagtcccccccgcttgtatctgtcccaccgcctctgtcctgccccttcaccttcctcgggtctccagccacatttcgcccccttttataatctacgaactcccaaaac

SEQ ID NO: 627824 - DNA, 1130 bp, Homo sapiens
  misc_feature (535)..(536): n is a, c, g, or t
ctccactatggacagagcctccactgagctgctgcctgcccgccacatacccagctgacatgggcaccgcaggagccatgcagctgtgctgggtgatcctgggcttcctcctgttccgaggccacaactcccagcccacaatgacccagacctctagctctcagggaggccttggcggtctaagtctgaccacagagccagtttcttccaacccaggatacatcccttcctcagaggctaacaggccaagccatctgtccagcactggtaccccaggcgcaggtgtccccagcagtggaagagacggaggcacaagcagagacacatttcaaactgttccccccaattcaaccaccatgagcctgagcatgagggaagatgcgaccatcctgcccagccccacgtcagagactgtgctcactgtggctgcatttgggatggagtcgggtggagagcccactctggctagggggcggcaggctgagagctcacctgttcagcagagaagtggaactcactttgctcctggagcctnnctacacagtgttatcagcttcattgtcatcctggtggttgtggtgatcatcctagttggtgtggtcagcctgaggttcaagtgtcggaagagcaaggagtctgaagatccccagaaacctgggagttcagggctgtctgaaagctgctccacagccaatggagagaaagacagcatcacccttatctccatgaagaacatcaacatgaataatggcaaacaaagtctctcagcagagaaggttctttaaaagcaactttgggtccccatgagtccaaggatgatgcagctgccctgtgactacaaggaggaagagatggaattagtagaggcaatgaaccacatgtaaattattttattgtttcatgtctgcttctagatctaaaggacactagcattgccccagatctgggagcaagctaccaacaggggagactctttcctgtatggacagctgctgtggaaatactgcctgcttctcccacctcctcagagccacaggaaagaggaggtgacagagagagagcaaggaaagtgatgaggtggattgatactttctactttgcattaaaattattttctagcctgcagtcta

SEQ ID NO: 627825 - DNA, 80 bp, Homo sapiens
  misc_feature (14)..(15): n is a, c, g, or t
tttacataaaattnnatatatatattttttcttccagttaacagtcttttctcttgggtgggtagaccaaacccaagatc

SEQ ID NO: 627826 - DNA, 164 bp, Homo sapiens
gggggggtcccccccagccccccgccccgtttcctttttgtttttggtttggggccccggcccgggccctttgtcctggtcggtttttaaataattttttaccgggggaccttttagccctgggtgccttttccaaggggccccataaaaaaaggggagcccca

SEQ ID NO: 627827 - DNA, 120 bp, Homo sapiens
ctatggcacctcctggtgtctaactcccccaaagacaatgagttatgggagagaattagaacggcgtgttacagttattggcaaagaagcatgacaagagcaacagcactttgaaattta

SEQ ID NO: 627828 - DNA, 1140 bp, Homo sapiens
  misc_feature (233)..(234): n is a, c, g, or t
ctccactatggacagagcctccactgagctgctgcctgcccgccacatacccagctgacatgggcaccgcaggagccatgcagctgtgctgggtgatcctgggcttcctcctgttccgagagtcacaggtctggggctggggaacaaggctgttgtggaaactgcaggtgaagctcatgaggtggcattttcacaggccgagacttttcccagcctccctacccactgttttnnccaggccacaactcccagcccacaatgacccagacctctagctctcagggaggccttggcggtctaagtctgaccacagagccagtttcttccaacccaggatacatcccttcctcagaggctaacaggccaagccatctgtccagcactggtaccccaggcgcaggtgtccccagcagtggaagagacggaggcacaagcagagacacatttcaaactgttccccccaattcaaccaccatgagcctgagcatgagggaagatgcgaccatcctgcccagccccacgtcagagactgtgctcactgtggctgcatttggtgttatcagcttcattgtcatcctggtggttgtggtgatcatcctagttggtgtggtcagcctgaggttcaagtgtcggaagagcaaggagtctgaagatccccagaaacctgggagttcagggctgtctgaaagctgctccacagccaatggagagaaagacagcatcacccttatctccatgaagaacatcaacatgaataatggcaaacaaagtctctcagcagagaaggttctttaaaagcaactttgggtccccatgagtccaaggatgatgcagctgccctgtgactacaaggaggaagagatggaattagtagaggcaatgaaccacatgtaaattattttattgtttcatgtctgcttctagatctaaaggacactagcattgccccagatctgggagcaagctaccaacaggggagactctttcctgtatggacagctgctgtggaaatactgcctgcttctcccacctcctcagagccacaggaaagaggaggtgacagagagagagcaaggaaagtgatgaggtggattgatactttctactttgcattaaaattattttctagcctgcagtcta

SEQ ID NO: 627829 - DNA, 816 bp, Homo sapiens
  misc_feature (738)..(739): n is a, c, g, or t
ctccactatggacagagcctccactgagctgctgcctgcccgccacatacccagctgacatgggcaccgcaggagccatgcagctgtgctgggtgatcctgggcttcctcctgttccgaggccacaactcccagcccacaatgacccagacctctagctctcagggaggccttggcggtctaagtctgaccacagagccagtttcttccaacccaggatacatcccttcctcagaggctaacaggccaagccatctgtccagcactggtaccccaggcgcaggtgtccccagcagtggaagagacggaggcacaagcagagacacatttcaaactgttccccccaattcaaccaccatgagcctgagcatgagggaagatgcgaccatcctgcccagccccacgtcagagactgtgctcactgtggctgcatttggtgagagcgggaggagaaggtgggacataggagggaaccctacccctggaattgacttggactctgggtctggaaacgcaagttcaaatctcacccatttgttccaggaggttctggctgatgaggaagacccttgtgggaggggggcccctgccctccagttagctcttcttggctgtgctgggttccatgttctcatgcagggatggagtcgggtggagagcccactctggctagggggcggcaggctgagagctcacctgttcagcagagaagtggaactcactttgctcctggagcctnnctacacagtacttatctgggaagggaatgccggactcttgttggcccctttgtccccccgactggcccccttcgccg

SEQ ID NO: 627830 - DNA, 803 bp, Homo sapiens
  misc_feature (577)..(577): n is a, c, g, or t
  misc_feature (601)..(601): n is a, c, g, or t
  misc_feature (605)..(605): n is a, c, g, or t
  misc_feature (611)..(611): n is a, c, g, or t
taaactttgctagagaactagtttgcctcccttaaactgccttctgattgtgatcatgatcagtaggtgggattaccatataatattcttgatggtgacctgttgctgtgacttatctcgcaactgttgtataccttcacgtgcaggtgagatagtagacgttacagagatcttagtcacatgattgtgctgtctttgctgacatgcgacaagtatccctcaacgtggagtccttgctagcactcgtgaatacaatatcacaggccacgagaccctttgtgttactctcgtgttatataatacatagaatgaaaatcacatttttgttccatagtggcatgtagctacaaatatttaaaggaggagaaaaggtaatataatttgtgaggttataccaagatatggtgtgtattcaaataatacgttgagccagttatctaaaatgtacgataattttgaggtagcttatgaattgattttaattataatgttcacaagcttggaatattagatattatttggcatctgtaaactaaccgtgatcatcatttcttgtaatttcttgtacatgtatatnacttgttcttaatagattttgganacangacttnattgagatcagtttggtttcctgttaattacctgtttgactttataatgtgttttagttttgcagaggacactgttgtagtttagaggcttttcataatccctcatagcaaagatgaaactcccactattttttccctctgaggagacatactggaagaaatgttagcatctgagtgtagtatagctattgt

SEQ ID NO: 627831 - DNA, 143 bp, Homo sapiens
ctagaggacccgacatagccatgcatcattgttgctacgaggctcgaagtctatacaccacgtgcagtagctttcctccgtgtacaagtgccgtcgacaagtgagcaccgtgctgacctccaaatatcgttaagctggagcct

SEQ ID NO: 627832 - DNA, 592 bp, Homo sapiens
taataaaaaaaaaaccccgaaaaaaagtgaggggggagaggagagaaaaaaaaaaaaaagggggaaaaggtttacaaaacacagggacaaacagcgcgcaacacagagacagacccacatgtagcaaaacggggggggcaagcaagagaaccccaccacgccggcgggcggaaaaacaccagcacacgagaactacgcgccaccaaacacacccacgcaacccgcacccccgcacgactccctcctttcttctatcctccccactatcctcttttcaactctacctcaccacacaataccttctcccccaacactacacccatccgatctttgctatcacacaccccttctcacactacccactctcatccccaacaacactcactacacaccacatcaacatttactgctgcgtctcttcactcctctctctccttatctccttccccaccacaactcccaatacctcttttccccctccgcccacttaacacctcctttctcttcctccactcttgtactctacctgtcctcctcctaccacccaccctcccccctccccctctcccttctctctcccttcccaccactt

SEQ ID NO: 627833 - DNA, 302 bp, Homo sapiens
gggtttccccccttgggtttttccccccccccccccttttttaaaagggttgggggggggcctttttgtaaaaccaggggggtttttttgattttttttcccctttggggtttttggggggggggggggggggccggaatttccccccccccccccctttttttttttttttggtaaaaaaaaggggttttttttttggggggaaggggggggggggttttgtccccccccggtttttttttttttaaggccatccccccgggcccggggaaataaaaaatttgttccctttaaaatcccca

SEQ ID NO: 627834 - DNA, 771 bp, Homo sapiens
  misc_feature (123)..(123): n is a, c, g, or t
  misc_feature (143)..(143): n is a, c, g, or t
  misc_feature (493)..(493): n is a, c, g, or t
  misc_feature (671)..(671): n is a, c, g, or t
  misc_feature (686)..(686): n is a, c, g, or t
  misc_feature (700)..(700): n is a, c, g, or t
tgggaagccccggcacacgggccagaacggcagggcccggagcagggcgccttcgtccacgatccctccaggggcacagttcaccacacgcaccccctttcttgcacgtgggcaaagggtgtntgtcattcagcaagccgtgntcggtggagggcaggagaaggaggtggtgcacaggtgagtgaaactccacagagaaggccagaatctccctccgaggggccagcgtgcgtgaacaccaaagggaggccgagaaccctcgtggggaaagtgagtggggctcataccctaatagtcttcatcccaagaggacgtgcatccgggatagctaccgtctcttcccaattccgtgcccgaggccaagaaattccccagggctctttcccatttcagcctcgtgttcccagtgaaactttcttccggctcccattgtggccggtcctttcactcgaagccgtcgccgtggggaaatcgtgcctgtggccaggccacntgatcattccacaaggtgagtctctggcggcactgaggcgtgttcccatggggggtgttcataaccaagatgcccttcctggtggcgggctccagatccacatggtccacacctgtgccagcctgcccaccacctgggagtttctcagctgcgttgatgactcaggggcaccttgggnggcaaagcgaacaanagggcttcacaagncctgagcccgaataaacctctgggaagggctggtttcccccatggggccccattgagaattcccgcgaggg

SEQ ID NO: 627835 - DNA, 939 bp, Homo sapiens
  misc_feature (184)..(184): n is a, c, g, or t
ggtgggggctagtggcaaaagatggtggttgccgtacagtcccgggtggtccggggtcctgtcattgtcaccgtcctgccattaactgctgtagccacatctgtgtgtctacggtccacccatgctagccagctgcattctatgcccttctatgcctctatgtggtaacgggggactgataccntgcagttcagttggggaattgtggccacttgatgtatcgcgtagtcgttactagagattcgtgtgtggcgatatgttgtcaaccacctctggacgcaatggtggtcacaaggtcacatcataccctatcgagtgtgataaatatgacgtcatgcacccttggtcccaatgtgggtgaccctggtgaccagccttctgttaatctggaaggggacgcgagagaataatcgaattctattccgacgatgtatgtacagatcagcatgcgatgtgtggtcattcaatcttagtggtgacgatgactggagataacaaaaaacgtttgattttgcgctggaatgtattgcgtgaaagatgcccctaagctacatgttgctctaactgttcaacggaaagctggcaggtggctcattcattctatgttgtcatcactctgaatgctgacatattgtaacatgctctctctaggattgcgaggactctagggggtcggcgacgacagttcgtgagagatgcatgtccggaggcattcatcgtggacgcggcggacgttttggacgacggtttgattcgtaatgctttgcaagcttgcatcgggtcggtggatgccctggttctgggctggagccggtatcaccggtttctcgtgttcccggatggttgggtcagcccgaccgggggccttgtgtaggccgcggccccccggggctggggccagggtcaccccgtttagggaggtttcccggggagggggcc

SEQ ID NO: 627836 - DNA, 373 bp, Homo sapiens
ggagacagagtctcgctctgtcacccaggctggagtgcaggggcgtgatcctggctcaccgcaacctttgcctttcagggtcaagcagtttttttgcctcagcctcccagggagcagggattacaggcaagcgccaacacgcccagctaattttttgtttgtttgtttgttttagcaaagacagagtttccctatgttggccagtctggtctcaaactcctggtctaaagtgatctgtccgccttggcctcccaaagtgctgggattacaggcatgagccaccacgcctggccaatatccatcattaagggttaagttaaaatagcttataatagccataggatttagatttgctatttgcagtaaatctaaa

SEQ ID NO: 627837 - DNA, 179 bp, Homo sapiens
  misc_feature (126)..(126): n is a, c, g, or t
  misc_feature (170)..(170): n is a, c, g, or t
gagaacttgggaccaggtttcctatgggggactcagtttcagagaactgagacagaagctcttctgtcgttatattcttctttcctttttttggatttattaaattattttctagtggtgtgaagntgacttattaacatccacacgacattgacgtgacttacttacanacttccaca

SEQ ID NO: 627838 - DNA, 1288 bp, Homo sapiens
  misc_feature (916)..(916): n is a, c, g, or t
atctccacaccgcccctcgtctgtccgtcttgtgagttgttgttcgctgtttttcgtttgtcgtccctctgtggttacatatgccatcatctcctgcagcaaagatgtgccccacaaccgtggtggtttatcaacccccggtgttgtggtggccccctgtgcctgtttctcccgggggcgctgctcgatcctcgtcgtgctgtcttttttccttggggggtgctattaaccccctggttgtattaccacacacaccggtgtggggctccgttttatatccccctcgcttggcaatatactaccccccacggaggtgtaatccgaagattttttggggggacgctccctcataccgaatgggaggaaaagggcccccaactaacaggggggcggccccaccacagacaaacgggggagccttgctaaaggcccccggccctccgcggggtcttcgcccgcgccacaagagccccacaagggtggccaaaacctgtggagacatctggtctcacaaatggagaggtatttgtctctcggagaggccacctcttgtgtagaggaaaatctcctatagaccactgtgggcgctctgatctcctcgtttgttttcgccccacaagatgccccctcttcgggacacactttggtgtccacacaacacttctctccccccacgtgttccccactcacacggtcacagaattttgtagaggctggaaaaggcggccttatcgagatgtcccccgccacacgctggtgaaaacacatctgttctctatgggtgcacacaggaggccgtggggtgtctgccgcggtcaccccttgaagccctcttgtgtgtgcttcccggccacacacacgagggtttcccgcgggtctctggcccacatggtcccctcaacgccgggccacatgnggtgtggaggccccctcaccacggcaaagggggcttgtctggactttcccactgttcacgggtggtattttctaaagtgctcccttatatgtgaaatttcacaacacacgcgtattggaaattcacttcccgccactggaacttctgggatcacaaggctctttccttcttcttgtttgaggacagttggttgttttaaagcttaaatgtaagtttctacttttacaaataaactttttctggctgtggcactctttttcttgaccctggtataaccgaacaagtagtttcacgagtatttgagtttaacccttttcccagaaagtaatacatgatatggatttatttatgcacttaaaagagccaaattta

SEQ ID NO: 627839 - DNA, 283 bp, Homo sapiens
ccattgagcatgagctgggctcagtgacattccgccggctcaggtccattcgaggactacagactgcttgtcataacacctggcggcactacggggggagacagagacctcagccctcgagctctcagcagcaccacagttcccaggctccccagctccaagggtgcaccccagctctctactggccacacagactacagggtagcaagaagcacctgacctcagccacgagcactgggattggaacccaactccatcactcactggaaatgagacctgagca

SEQ ID NO: 627840 - DNA, 405 bp, Homo sapiens
gacgttgaaacttttgaaaactgttaatggcaatgtaaaatggtgcaccactttggaaaggagtttggcagtttctcagaatgttaaacatagagttaccacatgactcaccaattccactcctagatacctacccaaaggaagtgaaacatgactgtgcaacaatttacacagaaatgttcatagcagcactaatcagaatagtcaaaaagtagaaataacccaaatgtctatcagctagtgaatggataaagaatgtgacatatctataaaatgtgataatattctgcattaaacaacaacaacaacaaaatttaagtgctggctaggcacggttacagatgcctgtaatcccagcattatgggaagctgaggcagaaagattgcttcagaagtttgagatga

SEQ ID NO: 627841 - DNA, 287 bp, Homo sapiens
agaggatcccgctggcatggactacacgaggcggagtgagttttgggctgatggactgtccagtggttgctgcgggcttggggtggtcgctggtctgcacactgcagctgtgggctaggtgaagtgttgtggctcctgccatactggcagcagggtgcagcccgtcagcacagctgagtgccaggcgttgggtgacccccattacgtcactctggatgggcaccgattcgatttccaaggcacctgcgagtacctgctgagtgcaccctgccatttgggccagcggg

SEQ ID NO: 627842 - DNA, 797 bp, Homo sapiens
gagatcaggaccatcctggccaacatggtgaaatgccatctctactaaaaatacaaaacttagctgggcatggtggcacatgcctgtaatcccagctactcaggaggctgaggccagtagaatcactgcaacctccactcccgagtagctgggattacagacatgcaccaccaccctcagctaattattgtatcttcttagtagagacggggtttcgacatgttggccaggctggtcttctaactcctggcacttacgtgatccgccacacccttagacttccaaagtgctgggattacaggtgtgagccactgcacctgagcctgtacgtcgcttacaacacttttccttgacgaaacattcctgacctttacaaaactaacccttatactcagtacaagtgacttgtgacaaactgacgtaacacaatggccattcatgatgctctgacaaccaaagccctacaactcgaacacttcccgaactcagcactacactgaatttcccaccacgcgcacccttcaaggctttccaccactcctactgactcgaaacacacaactctatctcgaccacacctcctcaactttcacttcctttccctggtacggacttattggctacctcaatacagctattgcagacatgaactacaagatggcatgggtacaccttgcccagtgggtgccagaaactgaactcagacttcttgttgactgttgctcctacggataaccatcgccccacatcaattgcaaatgtaatgatcttgaatctcgaatggtttacccaataca

SEQ ID NO: 627843 - DNA, 343 bp, Homo sapiens
cagaacaggaccttgtctataaataaagaaataagtaaaaatataaataaaaataagtaaaaataaatataagtaaatataaatataaatacatataaatataaaaatgcatacatgaaaagaaacaatttttaaatttaacatcactgagggcatcctatccatttcatttcatgattccattacatcatttcacttagatgaaatgataagatgacttgagatgagatgaaatgatgagatgaaatgacgaaatgagatgagatgagatgatgagatgaaattttgagatgaaatggtgagtagaaatgagatgaaatgatgagacgaaatgacaaaattg

SEQ ID NO: 627844 - DNA, 1216 bp, Homo sapiens
agcggaggcggggtgacgtgtggttgacgagctcggacggcgggtttgctgagatctgtgtgccggctggcagctggtgcggggagtgcagctgagagctgagaggtgggtctggggaacggtgtgtgagccagtgtccactgacggaggtcaagtgccgaagctagtggtgcctcatggaaagcgagcccctgtggtggttcttcagcctgatgctcatgtaaatggattcggttgccgatggagacccagtgtagaaagacactatatgggaggtatttgcgagcactgacggaagttgtcgaatatcacttaaatgcgcatgttcactggggcttacattcggtattcgtctattccaaggtgtgctgcgcccaggtgaggagaggaacctatgccagggctccttgatgggtttcagggatcgtcacaagaacggttggacatcgactccatatgttttccggcctcataggcaagtcgttacattttgacactatactgtcttttgttgccctaaccttccatgtgtctccgattagatgcagtttggtgcttgatcgtggcaactgtgaacccgcgatgacaagcgcaatggtcacctggttccaaggtgccgagtgacagtttgattcgaaggacagtgtctttaaaagccaacatcttttgtcacactgtagaaaggtgttgtggaagttggcgattggcgtttatttggagagaagggcatttggatgacgaattggtaaggacgaaaggtatcataggaaggtgattggaagtttcggtggatggaaaaggaatagacagccagagtttcgcatagggttttgttcaggagcccaaagggaaagcagttggtgtaaaaaaggagtgttgtgatgggaacaggttctctgggaagttaacaccggacacagagaaaaacaacttttcaagcgttctagtaagcgagtctggagaggcaggaaaagtgaacatgtctcattctcgttccaagcaattctagagtgtgccgacgagacgttaagttggtcttatccgccagttggtgtcttcaaagtgcgcgcgcatgcgcacggtagggtacttgataatactctatagtagcgttgggggactttccaccgaaacagtacacgtgggagccccgcacgtgtttggatgtagtacaagggatcgtccaagttgaccatgcattcagtgcccacatgtg

SEQ ID NO: 627845 - DNA, 376 bp, Homo sapiens
gcggcggcaattacaattaagttggcggcggtcggaccccaataattctaagaacaaggggacatgggattcttgaaggtgaaaattgaggtgttattccggatggaggccccaattggtttattattacattacaaggaggtctggaattaagaattgtcccaaattaaggtttaaaacagttgcaattccggaagtttaaacaaaccatttaacggctaaaggaccgggggtaatactagggtcaatgctctgaaatctgtggagcaaacacagtttcaatgccatcgtcctagaattaattcccctaaaaatctttgaaatagggcccgtatttaccctatagcaccccctctacgccttctagaaaaaaaag

SEQ ID NO: 627846 - DNA, 109 bp, Homo sapiens
atcactccgaaagcatcggccgtgctccgcaaataagagagagtggtggatgcgaaatggcggatccgcggcgcaaccaatgatcgagacgtgctgacatcttatctgg

SEQ ID NO: 627847 - DNA, 844 bp, Homo sapiens
  misc_feature (246)..(246): n is a, c, g, or t
gtgcctccacgtcgccggctcaatctgggcagatgaacccagacttccaccgcgcagccccgccagatcttgcgagacctctagcggcgagctgctagtgtcggcgagacctgcctccgtttgcctgtgattcatgggtggctcccatgaatggccaagtgtgtcgtggtgactaggtggccttcgcaggcggtcatgtggcgctggtcggcatgggcgcttagcagactcgtgcataatgacatngcgtccacatgtttacatcactggccggcatctggacacccttcgcgttgttgctcaggaggcacaatccctcgggggccaatgtgtgcctgtggtgtgcgattcaagccaggagagtgaagtgcgaagcctgtttgagcaagtggatcgggaacagcaagggcgtctagatgtgctggtcaacaatgcttatgcaggggtccagacgatcctgaacaccaggaataaggcattctgggaaacccctgcctccatgtgggatgatatcaacaacgtcggactcagaggccactacttttgctcagtgtatggggcacggctgatggtaccagctggccagggctcatcgtggtcatctcctccccaggaagcctgcagtatactgttcaatgtcccctatggtgtgggcaaaagctgcgtgtgacaagctggctgctgactggtgcccacgagctgcggcgccatggggtcagctgtgtgtctctgtggccggggattgtgcagacagaactgctgaaggagcatatggcaaaggagggaggtcctgcaggatcctggtgttgaagcagttcaaattcagcttctcatctgcggaaac

SEQ ID NO: 627848 - DNA, 415 bp, Homo sapiens
  misc_feature (354)..(354): n is a, c, g, or t
  misc_feature (410)..(410): n is a, c, g, or t
acttcacaatggcccccaacgtgcaagagtaggtgatgctggcaattcacacatgccaaagagaagccataacgtgcttccattcagtggaaaggtggaaggtctcaacttaataaggaaagaataaaaactgtatgctgaggttgctatgatttatgttaagaatgaatcttccatctgtgaaattgtcaagtaggaaaaataaatttgtgctagttttgctgttgcgcctcagactgcaaaagttatggccgcagtgcatgatgagtgctgagttaagatggaaaaggcattacatctgtggatggaagagaaacatgttccaattagatggcaatctggttcggtactatnccaaggtcttcaggcatccactggccggccggatgggggttttctgggagaatatnccccc

SEQ ID NO: 627849 - DNA, 822 bp, Homo sapiens
ataatagtagcattaagcatctcactatctaggaatactagatatatcgcgtcacgatctgcatatcctcccgtacatatgccgtagaaggaataatactatcgctgtgcattagtggctacttctctataaccctcaacaaccagtccctctgtagccaaatattgtgccgtatgcgcgagtactagatcattagccgccttgcgagagccaggcgggtgggcctaagccatactagtctcaatctccaaaactatatggcctagattacgtacataacgctaaagctactccaaggctaaaactacctcgtagccgtaaaattcatattagtacacgacatgagcatgactttaccaaaaatacacacagtaagtgtcgaatcaagcacaatccaccacactagtcgtagattatggtagggatctatccctctactattttgtataaccaaatcagcagcaacctgttgagctgtatcccgagacctttggctgcgagcgctctaaaaactcccacgactctaagtactactcggacctgaagtcctacccgttacaatccattggaagacctacatcgccaattactcctgtaggatagcaatatcagcgaaaatatgtctagactccattatattaaatttagcttttgaaatcttccttcacttataagatggcaaggccacgagagggagtcatggtatgtctttaactacgaaaacatgttgatcccagctggtatacccaccgacgacggaaccagctaaagcgggcgggggcaattctagtaaaactataggctctcatgatagcagattaa

SEQ ID NO: 627850 - DNA, 266 bp, Homo sapiens
aaaaaaaaaaaaggcatttaaaacaatttcaaaacttgggtaatggtaaggattgggatacctctgaaagaatatggcatagctggtatatgtaaggtatgaaggcataatattaaacttctggatttcaaggggaaggaactgggccccttacacccacaggcatataaaaggggtctggtggttcccttcccttcacttccaggcacactgggtggtcctctcttgcacaggacacattttgggaattaccttgaggctcataa

SEQ ID NO: 627851 - DNA, 302 bp, Homo sapiens
ttctgttgatcgactctagagtgtatccccccggagatggggctaggatgattttggctcactgcgacctccacctcctgagttcaaacaattatcctgcctcatccttcggagtaccttggattaccggtgcgtgccaccgtgcccggctcatttttgtattcttagtagagacggcatttcaccatgttggccaggctgttctcaaactcctggcctcaactgatccactctctattggcgcttccaaggctgctgtggattataggacgtgagccaacctaataactgtgttcagttca

SEQ ID NO: 627852 - DNA, 185 bp, Homo sapiens
  misc_feature (136)..(136): n is a, c, g, or t
cccactacgcgttcctgacgaccacgcctgcattgggaactctacacgacgacggacaacctacactgtgacgtgacggacacgtgacctgtactgtggacctggtggacgacaacgtacacgtcaccgttggtgncctcttgacgagacccgtggacctggggtttacggacaccacgttgtac

SEQ ID NO: 627853 - DNA, 135 bp, Homo sapiens
tcctagcctcgacaggagtcccaccaagccctgccccctggtatctctgccttccacgccttcctctttatcctctgtggtctcactggcgaggctaggacactggcgaggctaggaccactggcgaggctagga

SEQ ID NO: 627854 - DNA, 500 bp, Homo sapiens
  misc_feature (237)..(237): n is a, c, g, or t
tctccgggcaccgttcgatgagttttacataaacttcagagccctgcgatcgtgatttcttctctcacaaggggatgagaaatcttctcttagcggctcgtgttcttccccattcctgtgtcctctgctttgaagtggcattccttcgttgaccagaaaccctatcttgtgctcctcaatgggcctgccccggtgcagctaagggtgaggacagctgaactttccattccttctttnctcttaagcgatgggggtcttgctgtgttgcccagcctggtctcaaactcctggcctcaaacgatcctcctgcctctggttcccaagtagctaggattacaggaaacagcccctgtacccagtggagctctccatttcaacaaagagttctgtgcgccaatgcattcccttcagatgaccaatgggcaaagccagtttcttgttgagatttaagccacgaactgaaatatgggatccaatgcttccaaaaggcccagaaatca

SEQ ID NO: 627855 - DNA, 130 bp, Homo sapiens
accgtgctcagaagcttctcgcctaccttggtgatcttgctgtcaacggcagtcagatcaagggtcagatcggtgagcccaagtttaagggcgacatcgctatcccaactctccacgatgagcagaagaa

SEQ ID NO: 627856 - DNA, 381 bp, Homo sapiens
agcgtagagctcccgtaagccttgattcatgcatctcggcaactattgccagagggctatcgtgttctcagtggacattcttgatagctccctcagcttagccttgactctctgcgcatcattgagagcagcctctgtatgctctaaactagtctcgatctgtgttcacatccttgactgcggtatagaattctgatatagcgagcgacctgccctgattggacatttactggagctcagtgttctatctcagtctcgtaccctgggacctaacatctgagtcaggtcatcagcagatgtactagcagcagcagcgttttcatcatgcctagaactctggaggctcagtgcacctgggttagcggcactctgtgtgcgcgc

SEQ ID NO: 627857 - DNA, 211 bp, Homo sapiens
ccttttggttgccgggtcattcacaatcgctacggatgcctcgaaagctgtcttggcgccaaaccagctgtcgtcgtcgacctcgtacggccccagcacaatatctatcggacccttgaggccgacgaatgcgacatcactggcgtagtagtcgtcgtccagcagcgctcgagcccgcaatgtcaggtatgtcctgagcgtcggctcgtgg

SEQ ID NO: 627858 - DNA, 181 bp, Homo sapiens
agaggttcccctctcagcttgtgtccagtagtttcaatcggtcagtagtaaggcatcatataacatagttacaattcagaatggttatgttagggttgtacggtagaactgctattcttcatcctatgtgggtaattgcggagtatgctaagattttgcgtaactgggtttggtttaatcc

SEQ ID NO: 627859 - DNA, 1592 bp, Homo sapiens
  misc_feature (453)..(453): n is a, c, g, or t
  misc_feature (467)..(467): n is a, c, g, or t
  misc_feature (526)..(526): n is a, c, g, or t
  misc_feature (1592)..(1592): n is a, c, g, or t
ctaccataaccctcagggaacgtaccactactatcagcttcgagtctgctgccctgagaggatacgtcatacaaagcctgagaccctgggtgaagtgcgtggagtggcggaccggaagtggtctgatgtctttagtaagtgagattcgcggcgttacggcgacaatacagtggagaggacgaattctgtgtcgcgacgagtgcgagcatcgagttcatgctccagagttgggcgtcagctgcagcactgggctcactctgagaagaactgatatcgatactttgagatgtgtggatggataagatgaactcagccatggtccgcgggcatttgatgagggcgtccatgtggacgcgaggaaggtggcttcaccctgaccaacgaacgagccacatcaagggagtaagcatgattctggtaacacacgactcatgtgggccatgcgtatccaancactgtacgcaatntgcccattggttgagaaccgtacgactatagtattcccgccacatactgcctcttcagntggcacgggagaccgttcgaatgtcgcgctcagcgagagccatggggtgaatgcgtggctgtaccgctaacccatgggacctcaggtatcgcgtctagaagacgcgttaagcccccaacccatatactcacttacgccagttcgccgtcctggtgatacctggccatgcaacctcttaccacgttcgggtacgcgcggttccgggcccgattggaccagggtcgtcccgctgtggtcgtaacgggatgggggtggattcccgttggcccctcggaaagcactctcgggacccattcccatctcgggcttcaggtcccggttgcatgtcaaactcatgcgcaattgcgagggccctcgtagggactcccctcagagctctgggatagggcagttgaatggatggagctggtgtctccagtttgcgtaaaattgcccgttgatgcccatctgcggaatatgcaccttgggcctgcgtggttctcaacacctctagagcaatggcgacgggaggagccaaatacatccccgccaacgtggtgtcctgggcggacatcgaacctatttggaaccaagagggaatgacaaaatagggacatggggaaacgacatccattccaataaccaacgaattgccctacacagcgagtcccacccaccataaaccgagaggaacacaggcgactaggcgccatgcgccaaggcgcggccgcgcttgccccagagagcccctgagcaacacgggcaacaggggcgtaccaacggtcaaaggacaaccggcccggggcacgtggccacacacagcacccgtgacacggaggaagccgagaaaaccaaacaggcagactggggtggcgggcccagaaccggacagacaccgcgcaagagaccagccacttaccgcaacaggcacggtcaccggagcagacaaatcaacaacagacagactggcaacatacgagaagagaacacaggctcaagacccacacccgcgcacacacgactaaacgacaccacccaagccagcagcaaacaacacacacgaacgcaacagacagagcacgatgtn

SEQ ID NO: 627860 - DNA, 451 bp, Homo sapiens
ctctagagtatcccccagtccacactgcaacatttcagagagcccacataatgtgacaacattatcagtacatatctttaaataataattagtgatgagaaaaaatatttaggactcactggtctattctactgaaatagcccttcaaagtttcttagtatacttgggatgccgataaacacattctgccaagcatatgatgcagaagctgagtgatatagagacgccctataacattacagaggttttgcaaagctatgatcattaataatatgaatattagcaggtaagttattgctgaattgctggtccctacttgagctgtaaagtgagtcctttgtgtaccacctcccaatgagtgacactgtttgtataggccctgattatccattcttgtttaccagacgcccatctttcaggacctcaagaataggtgggaaaagtacagtcg

SEQ ID NO: 627861 - DNA, 109 bp, Homo sapiens
gtaatcgtgtggtagtttctagcaggatccccccaccagaagggcgaaggtataaaagactagaagaaagtatgtcactataattttacaactcaatggctgctgcgat

SEQ ID NO: 627862 - DNA, 150 bp, Homo sapiens
cccctccccccccttgggggtttttggttccctggttttttggttgggccccccccccaaaacccggtttggtggtattattttatactggtggtttggttggggttttttttggttacccaataaaacataataggatttcctaatgga

SEQ ID NO: 627863 - DNA, 1230 bp, Homo sapiens
agcggggcacggctggtctcaaactcctgaccttaacgtgatccacccacctcggcctcccaaagtgctgcgcgattacagcgtgtgagccacatgcacctggccatggttacgctctgtctctatctccattatctcgaacagccagcgcgctgttgaactttcctccaaccttcctataccatattaacctgctctatcccctcacctctcaactctcctcgtcacctcacactgctctcacttactcaatttcttcgaacgactctagttcatatcgacacacggcacctactcgttacacctacacccctgctcacctactactcctctgcatacaatcgtgaaccccgtctctccactcactctactcatacacattgcccccctccctttgcccctcctgtgctacagcacacatcctacccgttcctataccaccgctccctactcttgcgtcctcgacccattctaacctttaaagcccaacttctccaagcactccactcctctcacgggctttacccttacttctccttccacctgcgacacctacatcttaccccccctgtcgctcccttccctcgaaatctcttccacaccgcctactgcctgctgaccctcttgcccccgcccaccaaacattgacgactactcctctgataaccgcccttgcgcgccttaactacaatcccggcgccaaccaacctgatttccacccccactactctctatggcgacacccacctttcctcggctctaatctacaaccacctcggacaccccaccgttctctcaccctgcctaacctatcctttaccttaccaaaccccgcctcgacttttaacccctcgccattcccatctctacctattcctagccacctttatcaacatcatctctctgcgctccaccttctctaaccacttggctgctcttccaaccccaccttaattctgctccatagcgacggcacccaccgtctcccaaggcgtcatccgccctggctcatacctgttcccccattctccctcttcttcgggcacctctacaaagcgcatcgtcaataagctcatcccaaacattcgtcacgattgcatcaatcacaccagcgatggctgagggcccgtgggtaccaacgcctggtatcccaccacagcacagcaggagaccaaattcgagtcaccagcagcggcgtacgcccagcacgtccaggacacttcagaatgt

SEQ ID NO: 627864 - DNA, 359 bp, Homo sapiens
gagccctgcacttctaaggctgacgacaatagaagccactgctgataaatgctctgattatttcttcttatttccctttaatgaaaactctgaacagaaacacttggcttacttttgacttcataaagggaacccaggcataatgggaaaagcatacactttcaaatagaagaggttttcaatgcgccgttctcataagactgctgtttgctcatctaaaagctaacagcagtgtctttactgctcttgcggactcttatcttcggtgtacttctgtttttcttattctgagtctttataggaaaggaagaggcgcagctcatgcggttaagcacacaggtgctactaaatggcgcaat

SEQ ID NO: 627865 - DNA, 362 bp, Homo sapiens
caaaaactgtcagggagtttggttgcacacttcactgattggcaggtgggcatccttttcaggtggcccattcgtcacaggtgaagagaggattgccagcaccctgcctgtacatgttcagggttgcctctgtgctgtctttcttggccgccaccccccccaacacaaccagagaacccacaagtgtagctgtcttcatgtttaattttatatgcagagttgtcttaaagttgtagctgctagttgggcacagtggctctctcctgtaatttcagcagtttgggaggcagaggagagaggatcacttgaggccaggagttcaagactagcctgggcaataaagtcacactcttgtctctaca

SEQ ID NO: 627866 - DNA, 992 bp, Homo sapiens
gcacaatctcgagagacccaggccgcaagggagatgacgagggtgcgctgggctcctttacgggaactgtgccagataatcatgcttggagcgctgttgaacatggtgatacaagatgggttagccgcaacagtgatgcgattggaggcagaggcaggagagacagcgtcttcgagaacctaatcactgtcatgcaagcatcggagaattgggcgtgttcggaccatggcgtgaactgggcgaggattgcgcgcaatagaaagcatgaatgtcacgaagttggtcggggtacctctcggaagaatccactgggccagttgccaatgaggctctaccgatgtttgcacatgggattgtcaaactaggatcgtgtacccctttgccatctgatgggcacgagcactggtgactgattaactagacacagctctgtggacggttatatggggcccctgacaggccaaaagatgaccttccatctctgtcaacaggaaggcacttaaaacccattgtgggacgatgatgctgagtaccaccagtggtggcaagtggattatcggggtgccgaaagggcttggccacccgatgctgggagaatctcattggtggcattgcctggggcgaacagtcactggggggggacggagatctgtgggagctgtgctcggttctgccggtcgcaggaagacctggatcttcaaaccggaagtacgacgcagtgaccatgcaatcacagccgcacgccgggccacttcggggagtggtaactaactccaaaccataatgaataaaaattcaacgacagatccaaaggcgggaaggtgggcccaaggtctttcaaacatgcaacgcgtggtggcggactctcctcttgaggcacaatgaatggggcaccggttggacggggcgacaggacactctgcggacagaagaaagccatggtaagcgccaccaacacacgcatcaacgtgccaaaaaaaagcggggagaac

SEQ ID NO: 627867 - DNA, 221 bp, Homo sapiens
aaaaggtatgggggctcgtcccagtcggggaggaacagtggtgagaaaaggtatgggggctcgtcccaggtcagggaacagtggtgagaaaaggtatgggggctcgtcccaggttggggaggaacagtggtgagaaaaggtatgggggctcgtcccaggtcggggaggaacagtggtaagaaaaggtatgggggctcgtcccaggtcggggaacagtggta

SEQ ID NO: 627868 - DNA, 456 bp, Homo sapiens
  misc_feature (395)..(395): n is a, c, g, or t
  misc_feature (401)..(401): n is a, c, g, or t
gtaaaacaagaggccttccatccacatgaaaagactgtattttgattgcctgggagattcaaaatgatttctaatcttgccacaactgtcttctgctgtataaatgaaatgtttcattttcaaagagactgtcaggatattctgaaaagagttccttagctgctctgcaataccttcccccccaaataaagtgctttgttttgtattttccaagagaacaatggcattacttctcatattggaagatacgattttcagcaagtcctaaaatgcttatttgctaggcagtttgtttcatcaggttcctcatagggaatatcttatttaattcacttacaaccaaaaattcccagttttgtgaggtgggtcaaacagggatagtaggccttctggcnttgggnaaaagggattggaacccataatatggcttatggcacactggttatccttttttgg

SEQ ID NO: 627869 - DNA, 105 bp, Homo sapiens
tctagaggatcaccgcccatgatggacggggcatgggatacgtgcagcccaccaacgcctaccctgggccatggaacctccggtcagcggcccgtgtccacctct

SEQ ID NO: 627870 - DNA, 695 bp, Homo sapiens
ccgaaccgggggcctgttcccgaattggccagaatgccgcttggattgttccccccgcctaagggcaggggtaaatccaggccccccaaacttgtggtccaaaaggccggggttgggccttcttttgaaaaaaacccctccaaaatgtgggaggggcaagggttcctccttcctctcccctccaaaatcggggtgttcttcccaaatttaccccccaaaacgcggagggtaggagcctggcaggaaacccccaacggtttcccacggggcaacattggggttggcaaaacaaaaccttttttttgggaggggaaattcccagggggaaccccaccaaaacccggggggggcggggccttggaggaaaccccccacggtttcccaaggggaaacattggggttggcaaaaaaaaaccttttctttgggagggggaattcccaggaggaaacggccccacttttttcttcccctccaaatttttaaaatggaacccaccgtccccccttaggggttttggccgttccccccacccaccaaaaaaaaattttcgggggcttttttttggccaaaatggggtccggggtttttttgggcccccttcccccccccaattttggggaagccccttcctttttgggcaaaccctttttggccctccccttggggaaaaaaaaaaaatccccggttttgggga

SEQ ID NO: 627871 - DNA, 453 bp, Homo sapiens
aggtgatctagagtatccccccggaagattggacctctaaaaaatactgtacagacagtgacgatagagcagatcttggccaagtcatttatcttccctgaggcctcattctattccatctgtaatatttcaataacagttgctctgtctagctgttttgagatcatgtgagatgatgtaaaaatacttggcaaactgaagcaatgctcacattaatggtattatcataggccataatatctcaagtttctgacagtgtatctgacaaataaagttatggcctgctccttttgcattcagttgagaactcccagtgttgattagattgttatggagagaatggagccgaaatttatgccaagagaaaacctctaagttttagcatccagaattgtatcaagtacagtttgtcgcgaatgggaaacactggtttgaaggggtatacagaatacc

SEQ ID NO: 627872 - DNA, 867 bp, Homo sapiens
tgctgtatccttttgccacgcgtttggatgcttctatgggcagttttccacaatgagtggtcttacccacaggcgatctagcacacagggttgtgtccgcccacttggcggccgccccaccagtgttggcgtaaacagcgtgctacaaaaggtccgccgaggcttgccccattattcatcgcggatcatttgggcctccactgtgaaccgtgcttgtgccgctggtgacagaagacgccccctccgataatgtttcacgcacggtcccaaggggggggaccccccaaaccgggcgtgaataacgccgaccctgggggaaattctctccccactgggacccacccctgaaaaacactacgacccgaggggcgacccctcatttaataaccagccggcaacacgctccgaaataccagacagggagggccccctcgcccgccggggaggaagctctgagtggccactccccctcacgtcgggaccccgtcgggggcgtcacccacgcggagaacatccccctggctctcaccctgggagggatcccatccgagctccgcgatgcaccgggccagtcatggcgaggagacccccgtcgggggcccacccgaaggagagaccggccacacgctagtgcctagaaggccttacacaccttctcagtacgcgcatgggggacccaacaacggcgccaggcatagtaccccggcgctgctaatcctcgagaccattccgaccatcgcggcatgtagagggtcgaggagggcacatggcacactccctatgaggccacggcccacaagggaggagggaagctgagtccccccgccctaataaaaataaaaatttttcaaaaaaatccacatgaca

SEQ ID NO: 627873 - DNA, 334 bp, Homo sapiens
  misc_feature (293)..(293): n is a, c, g, or t
tagaatcgagctcgtgacctgcagctctctctgatgcccaggtgtagcacagtagctgatctcggttaccgcaacctccgcctcccaggttcaagcgattctcctgcctcagcctctcaagtagctgggattacaggcacgtgccacatgcccagctaattttttgtatttttagtagagatggagtttcaccatgttggccaggctggtctcaaaacttctgacctcaagtgatccacccacctcagcctcccagagtgctgggattacaggcatgagccagcgtgcctgancccaaggttatttttaatatttagaaaaaatagtaactacc

SEQ ID NO: 627874 - DNA, 293 bp, Homo sapiens
ctacagactcgccggactgcagtacgtgggctggtacggcgtttgtgtgcgggcggttctcaggccgatgcagcagcgctctgcctcgaggttgcgcagagggacgctgtgagggtggcgctggttgtacccaggctacactggtgcgactgtggatgaggagctgccctcgcggttcagtcagagggggcgctgtgagaatgggcgctggtgtgtaaccccggctacactggcgaggactgtggggtgaggagctgccctcggggttgcagccagcggggacgctgcaagga

SEQ ID NO: 627875 - DNA, 129 bp, Homo sapiens
gtggctcgattggtagtagccaaaaattagaaacaactgagaaagcccatcacgagcaatatgggacattcttatgtacgacgatatatctgtaaaagcaacaaatgaaatccacatgtattaacagaa

SEQ ID NO: 627876 - DNA, 120 bp, Homo sapiens
gctgcccctactactactaaattcgcggccgcgtcgacgtgtacaaagggcagggacttagatctaagggcaatagccctgtatggacccgcacttactgggaattcctcgttcatgggg

SEQ ID NO: 627877 - DNA, 129 bp, Homo sapiens
gttgagctggtaaactggtacactttcttttttcccttccaatgggttgtcaacagtttgttcctaaacatttcaggagttctcaaaacttttcacatacaaaggggaagcattattcaccaagcttat

SEQ ID NO: 627878 - DNA, 242 bp, Homo sapiens
ctgaccctctctgggtgctgatgtctttgtggttgttgagtatagtcaacgatttacgaacataggtaaaatggctgagtaagcattagactgtaaatctaaagacagaggttaagccctctttttgccagttccgtggtgaatgtcatgttgagtagcaaattcagagaatcagcttcgattctgcctatatttctcgcggctttgtttgcctgtggggggccatgtaaatggaagccagt

SEQ ID NO: 627879 - DNA, 424 bp, Homo sapiens
  misc_feature (81)..(81): n is a, c, g, or t
  misc_feature (173)..(173): n is a, c, g, or t
  misc_feature (207)..(207): n is a, c, g, or t
  misc_feature (242)..(242): n is a, c, g, or t
  misc_feature (266)..(266): n is a, c, g, or t
tcacaagagctcagttgttacacctgaggaaagacagaggtactggaacacagaacagtctttgtaagctgggtcctgctncgtgtgcatgtagtgtgtgtcgcatggtgctcagtgtgcgaaaaggtcagatcctctgacagtctcaatcagtaggactaccactgtgagcnactcctctgcttctgtacctggtgccactttcantttgcatatgttgaacataccgtatttgccaatgnctgacccctctagactgtattgtntactgagagagaatcgcatcttaattaattgtacccctctgcattgtcctgtcacaaaggaagtacccatcaaggatttgttggaccaaagtcccttagctgcacactgtacatatgttgttaatgtatcttacaaccagaataccattttttagcaa

SEQ ID NO: 627880 - DNA, 607 bp, Homo sapiens
ccggttactagacacgactctaaagatcactgggacttgtgtcatgatgagctggaagatttttatagacttgggtctatagcaaccttgcgttgtcgtgtgaactggtctgttgactacagacagcagctgtcccctgtggtggtgtggcagtgcctgtgttctctcctaggcaggcctctcaactccaggtgctgtcctaagaatttttacccagggcctgtcttcccaacccctcacctttccctgaggagtgtgttgtagtccctgttgaaaaaagttacaaaaataactcttaaagttagttctttgtaacacgaacttaactgtcagacagttagtgtaggtgtgtagcgtcatctgttttcaaccagattgcatttatggacttttcacacactcattttgaggaccccaggttcaaaagtaaaggcagtggccctgcttttggggtccaagaataggagtgatgggtgaagggacctaagctggccaatagccctctgccccagacatgggatgtggatccttgaggtttctggtgaaatctgcacatctgtgtttttatatctgttccctacctgtaatcctcacacgtgcacatttc

SEQ ID NO: 627881 - DNA, 376 bp, Homo sapiens
caacgatggtcctacagctactgtaagctgaggtgaaagggtgctgagcccaggaggtcaaggctgcagtgagttatgattgtaccactacatcctgcctaggcgagaccctgtctttgaaaaaaaaaaaagggaaatgaaagaaaggcaaaacaccatttctccttctggtctttacgggatcccagtgacattttactggcaacaaaaccaaactggtatgaagttaagcccggtctccaggaggcatgaaaccacctccacttctcgtgatgcgggcttcttctcaaaacaatctcaaagacagctcccgggatatttggaaaattcagcttctgtttttctgagaaaaatagaagcggaggaccatcgttgg

SEQ ID NO: 627882 - DNA, 238 bp, Homo sapiens
cccaggaagaccgggttcagcgggtcaatgccattgcgatcgagcaactccgacggctgagcgggcagcagacgcggagtcttcccggggcggcgggtccccatggggagacggaagcaccgacagaagagacagaaccggattgatgggatggcgcggggacgggacggggcagccaccgccgcacgtacccgcacccgcctgacgcactgcttgggagagtccccagaagacccgt

SEQ ID NO: 627883 - DNA, 372 bp, Homo sapiens
  misc_feature (155)..(155): n is a, c, g, or t
  misc_feature (161)..(161): n is a, c, g, or t
gtagttcttaatatattcatagttttataaccattcccccactccagcaggcagcagagcaaggctgtcttaaaaaaaaaattcatattttctatggctgaggcaggaggatcacttgagcccaggagttttagactatccttagaaacaaaaangaaacnccattttttacccctccctccccgacacacacacatacacacacacacacacccaaaattaatagggcatggaagtacatgcttgtggccccagctactcgggaggctgaggcgggggaggatcgcttgagcctgggaagttgaagctgcagtgagccgtgattgtgccccccccctccagcctgggtgacagagcaagactccctctcca

SEQ ID NO: 627884 - DNA, 451 bp, Homo sapiens
tatgtgggccaggctggatctcgaactctggccctggtgatccacccacctcggcctctcaaagtactggggcttacaggtgctagccaccacacccggcctcttctcgatagatcttattgggctgacaacgaaagctgaggtgcgggtagcatcatcccttggcatgcaaaagataaactgaaatctaaagtagccatatccttcgggccaggtttttcaagggggttactcggttctgatcatggtcaggacgggaatagtgaaaataacaataaatcatttttcttaaacgatccatttacggtatgcggggcacggcacaaaagggtttacatggtttatctggtagcgtcccatttaggtcggctaagagtagatgctatcattctctccattttacagataagaaaatggaggcttagagaaatggagtaattttggccaatcc

SEQ ID NO: 627885 - DNA, 330 bp, Homo sapiens
  misc_feature (260)..(260): n is a, c, g, or t
  misc_feature (304)..(304): n is a, c, g, or t
attttatcagtaataggtgtcagtttttaaaaaattgcttgtaggctgagcgtggtggctcacgcctgtaatcccagcactttgggaggccaaggtgggtggaccacatgaggtcaggagtttgagatcatcctggccaacatggtgaaaccctgtctctactaaaaatacaaaaatgagctgggcatggtggggcgtccctgtagtcccatgtacttgggaggctgaggcaggaaaattcttgaccccaggagacggangttgcagtgagctgagatcacaccactgcactccagcctgggtnacagagcaagactccggctcttaaaa

SEQ ID NO: 627886 - DNA, 607 bp, Homo sapiens
cacgaggtgtaaatctagatatgtatttttttctatttaatcctaacaataactccatgggatatttttcttatccctattttatctgtgaagaaactaatgtttatagagctgaagtaatcttagtaaaaatcatgaacctggaattagcagaaccagcggtcaaaccaaggattatttagctccagaccattgctttactataaactatactgggttaatttacatttttcttcataaagctatgctagttatgatttactgtcttgctgtcaaaagattttcagtttttcatatttagaatttgttccagtgtactctacaatggtagatctcagagtttttgaaatgcagatttgtgggcccaaaccctggaccgtatactgattcagaagtggtggagatagggccctacagcaagctctccaggcaattctgatgcatggggaagtttgaggaccactgcttttgaatagcagagttaagctgaattggttcattctcttactttgggagatgatggtcctttctttcaggacatctcttcaatcttttacagaccaataaaagtgatattttgtagatttgtgattacagtgtcacaaat

SEQ ID NO: 627887 - DNA, 558 bp, Homo sapiens
  misc_feature (120)..(120): n is a, c, g, or t
  misc_feature (160)..(160): n is a, c, g, or t
  misc_feature (212)..(212): n is a, c, g, or t
  misc_feature (233)..(233): n is a, c, g, or t
  misc_feature (274)..(274): n is a, c, g, or t
tatgatgcatttgacagcttcctccataaatacgctaactagttggattattatatgtaaccagtgtggccatgatggtttcttacaaaagggagcttcatcctggtgatcatgtgaagnacaagcagacagcactaatatatctaatcgctatcaattnggtctggaattcattgttacacatcagttaactataaacttcgaatacattngaataattcaagataatattngaagtaaataatgttaaagtgtttttactattgtttattgnatcccatatattcagtgttagtctgttgttactgttcatgaacagctatcatttttaatcatgaataatttattaaattaaataaatttattcatagaaacttttctgggttttagtaaaattgctaaaccctccccaccctttaataaatgaacggggcaagtgggccggtataacgagtatccctggtaacatgatttgagaaacatgtttattttttgaatgttcttgtgttcaactaattttctgctgtggaaataaatacaaaaaatatataaaaaaaa

SEQ ID NO: 627888 - DNA, 1540 bp, Homo sapiens
  misc_feature (813)..(813): n is a, c, g, or t
  misc_feature (869)..(869): n is a, c, g, or t
gctgggtggattattaagtaggagtgaggcggatagtaatatcgcgggggtgtgcactacagctgaaggaagatgatagtatatttaagagggtccgctgagagactctgcttgctggggacaccgctgctgggggtggtctagacgccctcgtgaagctgttgcgtgttgaaaaatggagctgtttcgcacgcgaagtgcatgtgcgtcgtgtgggcagcgccgaaactcatagtgatggggcagagcgggttacaacatcctcttggacgccattgggtgctagtccgcccgtggtgtaattgcccgctactagtgggggggaacaacccttaagggtgggtcaccaactcggggggggaggagataccgcctcttctccacgggagaatttgttgtcgggggaacagtgctctacagggggtgcccacgaagatcaccttggggggcggaagagacacagcaggcttggggagttaatggggtctcggcccctggagaggagtggtctttgcacaggaagagaaaccattcggcgttgtgtttggtgttgatgattgcgacgaagaggccgtgtgtgttcctaatccgcaaggaaggggttggccagactgtagacgacttcgttggtgtgtgagaagggcgcgaacaacacggtgtaggtttaaaatggaggctaattcgcaagaccctttgtcttgtggagagaaagcccgccggtgtatcctattaggggtgttgctgccacagaaaccccacgcgtagttggtggacacaccccgctgggggaaggggtgccgcagaagagtgtcnttttgtcaacggagtgttctccgccacaccctcctctcccgcggggagatggtggnccccctcctcgggagaaaagagagcgggtttccttcgctggggtgttccacccacacagatatacgctcggaaaacaggggagagcgagccgaccctcttggggggagactcccgccactctgtttcaaacaaatattctcactgggtgaggcgagaatttttttagaagagcgcccccacacatgatgctctagaataatatggtttccttgtgggtaagagtggcgttataagaggaaaagcctgttttgtgtacaaaggacgcccagtatacccgcccgacatgctgttttggtgcggagatttgttagatcgaaacatgctttggttacagtctcaggagcgccacatttgtctcgcaaagccagggtcgcacacacaccccccaataaatggatggaagaataatagtttttataaatctaattgccagatagggacatctatttcccagaccaagccatagtcccaggacattcatgggaccccatccaatgggattgttttttgaagaactggccaatataagactgtcccaagtctcaatatcccgaataactgggtttaagggatatagacccactgataattttttcatgtttagaaatatttttttggtattattcaagaaaaagtttttaatcaaggttataaacttttttggggatga

SEQ ID NO: 627889 - DNA, 168 bp, Homo sapiens
gtgacttagaggatctctcgaggatttgcgacacctcaagctcggaggtacgccgcagatacgccggagggcaagatcatcctcgacgtggacatcaacaaggacagccgggttgagaccacgcttgcgggatcggtgatcaacaccaagcacgtaaaggacccaggt

SEQ ID NO: 627890 - DNA, 818 bp, Homo sapiens
  misc_feature (53)..(53): n is a, c, g, or t
  misc_feature (64)..(64): n is a, c, g, or t
  misc_feature (103)..(103): n is a, c, g, or t
  misc_feature (105)..(106): n is a, c, g, or t
  misc_feature (110)..(110): n is a, c, g, or t
  misc_feature (146)..(146): n is a, c, g, or t
  misc_feature (162)..(162): n is a, c, g, or t
  misc_feature (165)..(165): n is a, c, g, or t
  misc_feature (168)..(168): n is a, c, g, or t
  misc_feature (170)..(170): n is a, c, g, or t
  misc_feature (226)..(226): n is a, c, g, or t
  misc_feature (238)..(238): n is a, c, g, or t
  misc_feature (276)..(276): n is a, c, g, or t
  misc_feature (279)..(279): n is a, c, g, or t
  misc_feature (302)..(302): n is a, c, g, or t
  misc_feature (308)..(309): n is a, c, g, or t
  misc_feature (319)..(319): n is a, c, g, or t
  misc_feature (333)..(333): n is a, c, g, or t
  misc_feature (338)..(338): n is a, c, g, or t
  misc_feature (342)..(342): n is a, c, g, or t
  misc_feature (344)..(345): n is a, c, g, or t
  misc_feature (347)..(348): n is a, c, g, or t
  misc_feature (358)..(358): n is a, c, g, or t
  misc_feature (364)..(364): n is a, c, g, or t
  misc_feature (403)..(403): n is a, c, g, or t
  misc_feature (414)..(414): n is a, c, g, or t
  misc_feature (423)..(424): n is a, c, g, or t
  misc_feature (430)..(430): n is a, c, g, or t
  misc_feature (500)..(501): n is a, c, g, or t
  misc_feature (503)..(504): n is a, c, g, or t
  misc_feature (506)..(512): n is a, c, g, or t
  misc_feature (580)..(580): n is a, c, g, or t
  misc_feature (591)..(591): n is a, c, g, or t
  misc_feature (798)..(798): n is a, c, g, or t
attcaactgttctcaagtcagtgtacaggtaaacctggctgcctccacccacncccagggagancaaaagccttcatacatctcaagttgggggacaaaaaangnngaanggggggcacgaaggctcatcattcaacacataaaanaaaataaaaaaatatnaangcnancattaagaaaaatgtttgcattcactactaatttacacgaaagacgagatgctatnacctcccctgtntcggacttgggaagtaggactgggaccattctccttancanacggacgtggggtgtgtttttangttggnnagggacttcntgtaacaacgcatntcatntttngnntnnttattaaaanaacaanaatgtgcgaatcgaaaggtctctcgggcacatctggtgnactttgggggntgctcgctnnaaccgnctgctgttaccttcaccgttccagtttttaaatcctgagttaagccataaaaaaaaaaaaaacaaaaacnncnntnnnnnnncaaataaagccatgccaatctcatcttgttttctgcgcaagttaggttttgtcaagaaagggtgtaangcaactaagtnatagtccgcctagaagcatttgcggtggacgatggaggggccggactcgtcatactcctgcttgctgatccacatctgctggaaggtggacagcgaggccaggatggagccgccgatccacacggagtacttgcgctcaggaggagcaatgatcttgatcttcattgtgctgggtgccagggcagtgatctccttctgcatcctgtnggcaatgcaagggtaaatgg

SEQ ID NO: 627891 - DNA, 480 bp, Homo sapiens
ctaaggatctttcggattgtgcatctatggtgcgggtgtcgtatgattatgggcgtgattagtagtagttactggttgaacatgtttgtggtgtatatattgtaattgagatgctcgggggatcagtccatgtgaaagcaaaaagaggtcgggatgaggggtgcaaaggaatagtgaagaaagcatctttgaggttgaggacagaataatgagttgttgagggaggtattgaggataggagagtatatgggttgggcaccacggatggataggttagacaactttggttaatacaagcaaagatcctgaaccaacctgtacagatttgtctggtttctggacaggtaggataggggagttgtaagaatttgtaggctttagaacggccatgctgtaacaggagagtgatagcaggctttagtccttttaaagcctgttgtgggatggagtactggtgttgcgtggggtaagggtgattag

SEQ ID NO: 627892 - DNA, 309 bp, Homo sapiens
  misc_feature (78)..(78): n is a, c, g, or t
  misc_feature (82)..(82): n is a, c, g, or t
  misc_feature (85)..(85): n is a, c, g, or t
  misc_feature (95)..(95): n is a, c, g, or t
  misc_feature (100)..(100): n is a, c, g, or t
  misc_feature (120)..(120): n is a, c, g, or t
  misc_feature (123)..(123): n is a, c, g, or t
  misc_feature (127)..(127): n is a, c, g, or t
  misc_feature (131)..(131): n is a, c, g, or t
  misc_feature (155)..(155): n is a, c, g, or t
  misc_feature (163)..(164): n is a, c, g, or t
  misc_feature (171)..(171): n is a, c, g, or t
  misc_feature (196)..(196): n is a, c, g, or t
  misc_feature (201)..(201): n is a, c, g, or t
  misc_feature (232)..(232): n is a, c, g, or t
  misc_feature (302)..(302): n is a, c, g, or t
attttggaaaaaaaaatgaaagttttgtttgtttatcccttgcgatttggggagccccctctcgatatttcccatccngggnacnttttttaaanaaaanaagtcctttttttttggccntgntaanggcnacaaaaaaaaggggttctttgggnggtccccnnctggtgngggtgggtccccagggggccccctncggcntgggcccccctgcccccggccagcttcctgntgatgaacatgctgtttgtattgttttaggaaacccggctgttttgtgaataaaacgaaagcatgtttgngtcccga

SEQ ID NO: 627893 - DNA, 396 bp, Homo sapiens
aattatccaacagtgcttcactaaggttgtgtttgagaccagcgtgcacactaccatccccctctccctataattactcacaaacacattctacatggctgctcttttctgacttgatgtgattgttaaagccacccttcttacaggactccatagaatgctcactgttttcggtggtgggaggagtccaggccaaaatcatcaaaacttaattgaaacttcaccttaacctctccagttttggttgattttttttttctctctataattgtgttaggaatacatttgtcatacgttcagctagggctccctattcatgcctttcccgaaaaggtcatttgtaaaatactaggccaggggtggatggtgactgagggcaccaaagacaggcaggca

SEQ ID NO: 627894 - DNA, 761 bp, Homo sapiens
ggcctgtttccgggaggcgcgtggggcttgaggccgagaacggcccttgctgccaccaacatggagactttgtaccgtgtcccgttcttagtgctcgaatgtcccaacctgaagctgaagaagccgccctggttgcacatgccgtcggccatgactgtgtatgctctggtggtggtgtcttacttcctcatcaccggaggaataatttatgatgttattgttgaacctccaagtgtcggttctatgactgatgaacatgggcatcagaggccagtagctttcttggcctacagagtaaatggacaatatattatggaaggacttgcatccagcttcctatttacaatgggaggtttaggtttcataatcctggaccgatcgaatgcaccaaatatcccaaaactcaatagattccttcttctgttcattggattcgtctgtgtcctattgagttttttcatggctagagtattcatgagaatgaaactgccgggctaatctgatggggttagagtgcctttgagaagaaatcagtggatactggattggctcctgtcaatgaagtttaaaggctgtaccaatcctctaatatgaacatgtggacaagaatgaagagcagcagtaaaagaaatatctagtgaaaaaacaggaagcgtattgaagcttggactagaatttcttctgggtattaaagagacaagtttatcacagaatttttttcctggtggctatggtataccaatgatgttgagtggcatatt

SEQ ID NO: 627895 - DNA, 571 bp, Homo sapiens
ggcctgtttccgggaggcgcgtggggcttgaggccgagaacggcccttgctgccaccaacatggagactttgtaccgtgtcccgttcttagtgctcgaatgtcccaacctgaagctgaagaagccgccctggttgcacatgccgtcggccatgactgtgtatgctctggtggtggtgtcttacttcctcatcaccggaggaataatttatgatgttattgttgaacctccaagtgtcggttctatgactgatgaacatgggcatcagaggccagtagctttcttggcctacagagtaaatggacaatatctgatggggttagagtgcctttgagaagaaatcagtggatactggattggctcctgtcaatgaagtttaaaggctgtaccaatcctctaatatgaacatgtggacaagaatgaagagcagcagtaaaagaaatatctagtgaaaaaacaggaagcgtattgaagcttggactagaatttcttctgggtattaaagagacaagtttatcacagaatttttttcctggtggctatggtataccaatgatgttgagtggcatatt

SEQ ID NO: 627896 - DNA, 793 bp, Homo sapiens
ggcctgtttccgggaggcgcgtggggcttgaggccgagaacggcccttgctgccaccaacatggagactttgtaccgtgtcccgttcttagtgctcgaatgtcccaacctgaagctgaagaagccgccctggttgcacatgccgtcggccatgactgtgtatgctctggtggtggtgtcttacttcctcatcaccggaggaataatttatgatgttattggtggaactctcaaggggtgtggggtctcatagtgcatgtgtagtgacactgtgggatatagagagggacaggatagtcttttcgtgggcattacgaagaggtaaagcggggacaaaataatattatggaaggacttgcatccagcttcctatttacaatgggaggtttaggtttcataatcctggaccgatcgaatgcaccaaatatcccaaaactcaatagattccttcttctgttcattggattcgtctgtgtcctattgagttttttcatggctagagtattcatgagaatgaaactgccgggctaatctgatggggttagagtgcctttgagaagaaatcagtggatactggattggctcctgtcaatgaagtttaaaggctgtaccaatcctctaatatgaacatgtggacaagaatgaagagcagcagtaaaagaaatatctagtgaaaaaacaggaagcgtattgaagcttggactagaatttcttctgggtattaaagagacaagtttatcacagaatttttttcctggtggctatggtataccaatgatgttgagtggcatatt

SEQ ID NO: 627897 - DNA, 240 bp, Homo sapiens
ggtacgacggatcataggcaatgtaaaagcaggcagtatgcagtccctggatgcaaggctgcactttggcaatctagccggactgggtgcttaccagatgtctcaggatccaaagaacgtttgggatttcctagctacatctggtaacttggctggcattaagggagagaggttctaccactctggaaaattcatgcctgcagagataattgcaggtgccagtatgctgatggtcaccaa

SEQ ID NO: 627898 - DNA, 228 bp, Homo sapiens
tctataaggccagatgaggtagtggtagtagtcacgttcaagtcgccagatgtggtcgagagatcctgccggatgatgaatggcatgaagctgagtggtctgagagattgacgttcgaattgatagaaacgcttaagcagttgccgttcttaaacattgatacgagacctctgaatttatattttttatgcgataaccatttccctcaattttggtggccttatcgag

SEQ ID NO: 627899 - DNA, 216 bp, Homo sapiens
tcaggattacctcctatagcgcactcggttgtgtcgggggatcagctgggagctatggaggcagcgtgagctgtggttttggtggaggggctaggtagtaggcttatggaggtggctatggacggtggccttggacggtggctatggacggtggccttgtgcggtggcttatggtagggggttttagctaggtggcttatgttagaccttttggcg

SEQ ID NO: 627900 - DNA, 698 bp, Homo sapiens
  misc_feature (247)..(247): n is a, c, g, or t
  misc_feature (258)..(258): n is a, c, g, or t
  misc_feature (266)..(266): n is a, c, g, or t
  misc_feature (293)..(293): n is a, c, g, or t
  misc_feature (331)..(331): n is a, c, g, or t
  misc_feature (391)..(391): n is a, c, g, or t
  misc_feature (401)..(403): n is a, c, g, or t
atatatccaatctaccacagaaccaagatccagatctccaactagttctcataccctctgttcctctcctgtcaccctttgtggggccaccgtatctttcctagatgattacagggacctcctaactggtcgccctgattctccctggtatataggaaacacagcagacacagtcatcatcctgtgacacctgtgtccagtagcctgtgatggctgcccgcttcactaggagggaaagccaagtccncacaacagccngtctaacntggagccttctccacccttcttttctncactctctctgtccactcaccatactggccttgtaganaaccactttaggcctcaatactggctgttctctgtgcctggaatgctcttcccacttacntccccatggnnnagttctctacctctttcaagtgtttggttcgatgtcatctttcgagtaagttttaacatggtgacccgcctacctctagcacttttagtatcttttcctgttttaattattcatcgtttcttacttcctaatacgctgtgttgtttacttccttaaaatttttactgctccttgcctgtttcccccaagaagaatttaagctccctaaaggcagagtatctttgtctgtcttactcactgacaatgcctggcacaaaatttgcactccacaaatgtcagttaaatgaattaatga

SEQ ID NO: 627901 - DNA, 691 bp, Homo sapiens
caaaatactgctcccagttaaaggattcccagtgggattctgtactccacatcgcaacgtgatggagagaaaactcctggcagggccctatggtgggaaaggctggagtcttctagtcccaagggatgggagatgacaaaatgaatttttttttttcttttttgagatggagtcttgctctgtcgcccaggttggagtgcagtggcgtgatctcggcttactgcaacttccagctcctgggttcgaacgattctcctgcctcagcctcccgagcagctgggactacaggcatgcgcaccatgcccggctaattttcgtatgtagtagagatgaggtttcaccatgttggccacggctggtctccaactcctgacctcaggtgatccacctgcctcgacctcacaaagtgcctgggattacaggcatgaaccactgtgcccagctgcacaaaaatgaagtttcctcacaagcttgcacgtgacccaagcgaatgacccactactgggaatcccaaaccataaatcggggccgtcatccatacggggataactcgcattggcgtggcctcactaccatcacgaactcacgaccggtactcggtaacaacaccgcccgaaccagcggaggacaacaccagaaacgcccgaccgcaaaacaaacgagccggcgcaacacgacccaggggcccacg

SEQ ID NO: 627902 - DNA, 170 bp, Homo sapiens
acagaacgagcttcccccatcactctcatgccgacacacacatgtttattaattggaactctgatgagaagtgactgataaggatccagcctcttcagcctctgacattggattcgttgtcctcatacggagatgatgcccttacgcaccttactgtgagggtagagggg

SEQ ID NO: 627903 - DNA, 1860 bp, Homo sapiens
acgcgtcgcctggacaggagcgatcctccccagagatttccttaaggaactctgagccagggttgagtgggtgagcacaatcatggctttgcattttccagagactttcaccaggcgtctcacagcagccaggaagtggaggcagatgaaatgagagtttgaaacccctggaggccttcacttctgcctcttcaattaatggaataccatactttcagaggactggagtcttgggccattggctaaggttaacagaacctgcagtgggaagcctgcctcctcatgcagagatgacgttatcaataatggtagggtgggtaacagcgtggggattggagccctaacaaggtcccagaataatcatcaaaccagaggagacatgtgctgagtagggagagctgaagaggtgcttgctgccagctaagcagcctggcctgcagccagagcccggctccccgactggaggaagaaaaaatgggtcctgtgggctgtgcccgagcacccaactacaaaggcagcacctgatgttaaggcatcaagagatagggaatgagctttggatttgccagaagtcctctaagtaaaagaactgagtaggggacccaaaattctgataataagtttggggtgagaggaggaagccctccaaggcacagagtggaattatagtagataattgccaaatgccatgtaagagactctaaatccatttaacggtgagggctttccttttatgacagaggggtacaagttggggtcaagagggaggagggactgctcactggccccagctgtccctgctctgtccttatcccatgtgtcatcattctctcatgggttagactgtctcccaattacttgcccatccagagtttccacatgtctctcttcagccccaaagatgggacagtcagaatcttataacactgttagttaaagctttgtgcccctaagtgtcagtgccctgaaagaaatccctggacactcctttgctgcctctgttgggactcggtctgcctgggcagcacatccaccctgcaaagacacccgtggggaccagtgacagctgaaggactgccagcagcccgcgtggggtccacgcttgacacatccctaaagcaccatgttaacttccattgtgtgacaattctttgttaaatgtgtagacgattggatagatggatgaataaataatctgatatgtgaatgactcggtgaataaatgagtgaataaatttgcatgatagttatctggggtaggaaatgaaactgtgacctgtggaacatttatttctctatacaaaaccagaagagacgcaaatgagactggaaccctcagcctgagtcatatgctaactagcagagctactctgtccagcaaagacacctctcatggcagtgattaagcccgacttgctggggccattgccatggtaattatggcagcaccaccacggtacctcctgacagcaagcctcttaggaggcaggtagccagagatttttcactgacctgttctctgttttcttttcagattatcaaggaggtccctccaccccctgccgaggagagtgaggtaagtgaccacagcaggatggcagtgggtgggcagggtggcagagtagggtggagagctggctgggcagctggacacttagccccctgcagagcagagctaagtcaagctcaaaggatttaatgtacctgcctgtgaagcagaagggaggaaactgtctggcctttcctaaccagggatgaacaagaaactgaactaaactgccagaaaagacaatgagttttggaggtttttctccctgcagagataaaatgtgagatggaaataaatgtttttatcagtac

SEQ ID NO: 627904 - DNA, 945 bp, Homo sapiens
atgagaacgtgctgggcagatcgggctgaaaaacgcggagtaaccgctgatcatagaagaagtcttgtcaccggtcttctgatgaagctgtcttagtcgtgaagtggtgtctggattactagtacggtatgcactatggatactatttactggatatcttgaagtatgaagtatcagtcttaaatgttgagtgaagtagaaatggtcatgaagtatgttgtgatgaattcgatttgagattcttctatcgttgtcatcatagtttaagttatggttaggattagatgagggtataattagtggcttgtattgtgattttatcagttggtccaatggaatgagttggctggcattattatgagtgtaatcgaaataaatgagatgtgagtatattctgtcattcttgatgaaaataggtgtaactgcaattgttatttgactagaatatcaaggacgaatgtggggtaactttctgttgtaagggtcgtacatactcgagattagatagtcctcgagaatgtgagaggggacgaaatttcggtgtggggaaatgcagtgtaaaagtagggtgggaggaacatcatttggaaatggttcctcatatagaaggttataaaagcgtgtgtgcgaactacttcgggactgtcgtaagatatatacatgtttaaaggtggttaaggcagaacaggggtgaaaaatgaaggggatcgggagggatctcgaatatcaaggtggaaggtaaacctagatgtagaaggtggtcaatgcgtacttagaattgattttacgtgaggaattcttgtggaagtatggggcacgtatgttccatataggagcaccgttagagggacatctaaaaggcggcttaagagggcaggaaatagagtataagaatcattgagaagggaggctgtaaagggccgaaaaattatggtgagggtgaag

SEQ ID NO: 627905 - DNA, 160 bp, Homo sapiens
  misc_feature (95)..(95): n is a, c, g, or t
gtactgcagaagagacgagagtgatatcagtttatgggggaaggcgctttgtgaagtacggccttcatttgctcttgtccgtttcgttacagggnaggaatttgaagtatgatagaaaccgacctgagattactccggatctgaactcagtatcacgcta

SEQ ID NO: 627906 - DNA, 318 bp, Homo sapiens
  misc_feature (33)..(33): n is a, c, g, or t
  misc_feature (42)..(42): n is a, c, g, or t
  misc_feature (203)..(203): n is a, c, g, or t
acacaatgagtgcccttcagctatcaaaaaagnatgagattntggccaggcatggtggctcacactgtaatcccagcacgggaggccagaggcgggtggatcacgaggtcaagagatcgagacctcctggaaaaacatggtgaaacctgtctctactaaaaatgcaaaaaaattagttgggcatggtggcgcatgtctgtaancccagctactcgggaggctgagacaggggaactgcttggaactcaggagatggaggttgagctgggactgcaccattgtactctagcctgggcaacaagaataaaactccatctc

SEQ ID NO: 627907 - DNA, 724 bp, Homo sapiens
cgctcgtgagccatgccgtccaagggcccgctgcagtctgtgcaggtcttcggacgcaagaagacagcgacagcttgtgatcgcactgcaatacgcggcaatggtctcatcaaggtgaacgggcggcccctgggagatgattcgagccgcgcacgctacagtactatctgctgcgaacgccagttctgcttctcggccaggagcgatttgcttggtgtatgacatccgtgtccgtgttaaagggtggtggtccacgtggcccatatttatgctatccgtcagtccatctcccaaagccctggtggactattaccagaaatagtgtggatgaggcttccaagaaggagatcaacagacatcctcatccagttatgaccggacccttgttggtagcctgaccctcgtcgctgctagtccaaaaagtttggaggccctgtgtgcccgcagctcgctaccagaaatcctaccgatcagcccatcgtgtactcataatctcacttgtcataataaacagtcttggcgagggattgtcaccagtttcaacttgatgagatatcagagaggagatgccggcatcattacatgggagaggcgagatgataagagggcttctaggtgtccttgggtacaaggtttaccgaaaccgcctgttgtgtccacttgggcgaatcgccgggccaccgaagtgaccggtaatacccatgcccgtgctctgtaaacgaga

SEQ ID NO: 627908 - DNA, 109 bp, Homo sapiens
  misc_feature (61)..(61): n is a, c, g, or t
gcctttgcggacctgacctgggtctgacgctctcaattatcacccacggacccacacgtancccggctctgggcggggatggggccggggctgctcggggtccgccagg

SEQ ID NO: 627909 - DNA, 427 bp, Homo sapiens
acctcacaatcaccctatgaggtagggagtctcactaactccatttcacagatgaagaaactgaagacaggaatgtttagaaagctgcctgatatggtttagctctgtgtccccacccaaaactcatgttgaattgtaattcccagtgttgggggagggacctggtggaaggtgattggatcgtgggggtggatttccccctggctgttctcgtgatagtgagtgagttctcacaagatgtgatggtttaaaagcgtgtagcacctccccctgcacgctctctcctgatctgcaatggtcagctgtgcttgcttccccttcgccttccactatgactgtaagtttcctgaggccttcccagtcatgctacctgtagagcctgcagaaccgtgagtgaattaaacctcttttcttcataagttaaaaa

SEQ ID NO: 627910 - DNA, 463 bp, Homo sapiens
  misc_feature (15)..(15): n is a, c, g, or t
  misc_feature (89)..(89): n is a, c, g, or t
  misc_feature (111)..(111): n is a, c, g, or t
  misc_feature (163)..(163): n is a, c, g, or t
  misc_feature (208)..(208): n is a, c, g, or t
  misc_feature (296)..(296): n is a, c, g, or t
tttattttttcggtnaccttcagccttaatttaagttatcagttggtaaccacttgggtaatttaaacttaagttgcatttatttggtnacattggtaaccaacattgttnttaaaagttccttgcaacagaatgactataattgagataaaacgttaatttngaggctttaattttgtaatatggattagtggccgggcgcagtggntcatgcctgtaatcccagcactttgggaggccgaggcgggtggatcacgaggtcaggagttcgagaccagccatggtgaaaccccgtntttactaaaaatacaaaaattagtcgggcatggtggcgggcccctgtaatcccagctacttgggaggctgaggcaggagaattgcttgaacctgggaggcagaggttgcagtgagccgagatcgcgccattgcactccagcctgggcaacgagcaaaactccatctc

SEQ ID NO: 627911 - DNA, 349 bp, Homo sapiens
cagctttgtttactttcaccaaagcatttcccatctgatatggtttggccgtgtctccacccaaatctcaccttgaattgtagctcccgtaattcccacgtattgtgggagggacccggtgggaggtaattgaatcataggggtggtttcccccatactattctcgtggtagtgaataaatctcacaagatctgatggctctataaggggaaaccccttttgctttgttttcattctgtctcttgcctgctgccatgtcagacgtgccttttgccttccaacatgattgtgaggcctccccagccatgtgtaactgtgagtccattaaacctctttttctttataattt

SEQ ID NO: 627912 - DNA, 535 bp, Homo sapiens
tgcagtggtcagagtatcccctctggatgcaagagtcacgggtaaaactctaaaaggttattttctgttaaatgcagtagatatgaaagaaaggttggtattactcaggaaatgttttctgtaagcttttcctttctcttacacctgccatgcctcaccaaattgggcatttatttcatctttaaactggtcgtcctgttagtcgctaacttagtaagtgctcttcttatagaaccccttctgactgagcaatatgcctccttgtattataaaatctttctgataatgcattaggaggtttttttgtcgattagtaaaagtgctttccatgttactttattcagagctaataagtgctttccttagttttctagtaactaggtgtaaaaatcatgtgttgcagctttatagtttttaaaatattttagataattcttaaactatgaaccttcttaacatcactgtcttgccagattaccgacactgtcacttgaccaatactgaccctctttacctcgcccacgcggacacacgc

SEQ ID NO: 627913 - DNA, 701 bp, Homo sapiens
  misc_feature (9)..(9): n is a, c, g, or t
  misc_feature (74)..(74): n is a, c, g, or t
  misc_feature (79)..(79): n is a, c, g, or t
  misc_feature (92)..(92): n is a, c, g, or t
  misc_feature (279)..(279): n is a, c, g, or t
  misc_feature (524)..(525): n is a, c, g, or t
  misc_feature (527)..(527): n is a, c, g, or t
  misc_feature (547)..(548): n is a, c, g, or t
gcccattgngactgcgggctgggggaccccaggcacttgaccgtcccccgtgggacctttttggggaaaaaagnccttntccaaaaagggtngcccacatttatttcccacaaaggggtttaaacttttcccccttttaaaatccaaaaggggaactttgtggggtaaaggcccccccctcaaaaaaatttttaagggagaaacattgccggggggggtttattacccaaggggggcgggttaggggtttttttctggggggagggggagaaaaaaagnccttttttttttcttttttggggggggggcggggttttttaaaaggaggggggggccccttttttttaaccccccggcggcaaaaaaaaaaaaatttttttttgggggacccccccccccttttaagtgtatgggtgtttctcttcagggagagaggggttcttccccccccccccccccccgggggggggggttttcccccccccttcttttttttttttttttctcaaaaaaaaaaaaaaaanntncccccctctctttttttttnncccccccgcgcgcgccaaaaaaaaaaaaaaaaaataaaaaaaagggggtgtttttttttttgggccgggcgttttttttttaaaaaaaaaaaataattttctcccgcccgccgcccagtgttaaaaaaattaataggggggggggggggggag

SEQ ID NO: 627914 - DNA, 139 bp, Homo sapiens
ccaggtgcagagatgcacaggctcaagagagtaaaccaggactgcatgaccgcacagcttccctcccgggacactcacctcgtccatccctagccgtcccaaggactctctactcaacagatgagtagggacaagcccc

SEQ ID NO: 627915 - DNA, 211 bp, Homo sapiens
agcgaactactcatgaacaggctatgcagtgatccctatttcttatgaagacccacttcctacatcagacgtttttgccggttgtcaaatcccttactcaaaagcgagaatttttatcggatagaagaacctgatgacgaaggagacagaaaccagcagcagcagcagggcatataaccacactaatggaactcggtcatagtgtggtggc

SEQ ID NO: 627916 - DNA, 185 bp, Homo sapiens
cctcctttggtttttttttttaagaaacccttggcacttttttttggggtccattgggttttgtttttcaattcccccttgagaattttttattgggttccccttaaatttccggtttgccatttttttaccccccgtcctgggaaggtgggtgtgttaaaattttaaaaaaattggctttccca

SEQ ID NO: 627917 - DNA, 891 bp, Homo sapiens
gaatagaccggtgcgagtcctttgccggggtgtggggggcaacaacccattttgggtgccggggacattttttggcaccggccctttctcctggggggaagtgttctttctaaagcgggagagaggcgggtcttctccctcctaccacggcgcctggttggggaccgagcgccaaaacaagagacactgggggggggagccggcccaatcactcctcctgggggcgttggctgcaccacggcgccgggatgatggcgtgtgcctcccctggcggtttaccgacggacattgtccaccaatgcctcggggcacacagcagtcgtcctgagcgagcgccagcagaggttaagaatagggggggcgcccccccacaaagtcggcggttgataattcagggttattcctcctgacgcgccgccaactctgggcgcaggaaacggggggctgtcaacaattctcgcgccccccaataaggtgacacagtcggtctctcccgccccacttgcggtgtcccgcgcgccgtcccacactgccgctcatatcttgataggtgcgcacccccggggctttttgggaggagtccaccacgggggtatactttggcttctcccaccccagagcgaggccctctttgttaaaggatacgccaaaggtgtctttcacggggaggcaaaaactggggagcccatttcgggggaagtacaataattgcccctatctccccccgcccacatgtgctttggtttgcattcaagctccagaacccctcttcttctatgacaatgcgctgaaacacaccccttctgcccatcctcagacgcacattatccgttcgaacatcaagatcaagcgcgccccccaaacaaataaaaaaaaacaaaaaacataaca

SEQ ID NO: 627918 - DNA, 501 bp, Homo sapiens
ccagctacggatgtggagaatcgaaggttccaacaatggtgcccgtggaacctgccacatattgacagttctatggaggcgacagcgtacatcattctgtacgactaccggcatggtggccgccaggggcagataatctataactgggagggtgtccagtctacccaggatgaggtcgctgcatctgtcatcctgacgtgctcagctggatgaggagctgggaggtacccctgtccagagccgtgtggtccaaggccaggagcccgcccagctcatgagcctgtttggtgggaagcccatgatcatctacaagggcgggtactcccgcgagggcgggcagacagacccatggcagtcaccgcctcttccaggtccgcgctaatagcgctggaggcacccgggcgtgttgaggtattgcctaaggctggtgcactgaactccaacgatgcctttgttctgaaaaccccctcagccgcctacctgtgggtgggtacaggagcc

SEQ ID NO: 627919 - DNA, 245 bp, Homo sapiens
gatatgtcttcagagcagaactaaagaaatgcaaatgtgtccatctttacagcaagcctatatcacatgtttatgtactatgctccctaatgaagatgctattaaggagattgcaaaggtcgactgcaacgaagtactacacatcgtttgtgatccgtaatctgtaggggctggataacacagcatttgttctttgtacgacttaccttacccagcagactccaacatctgcaagtgtatattgt

SEQ ID NO: 627920 - DNA, 556 bp, Homo sapiens
cgttgaatctagaggagtcccctgacgtgtcctgctccattgaacataagcgccctccgccgaaatctccatgtagttggagaggtacagcagcgaggtgtagtctaaggatgccgtacgtcaccttgtccacgtgcgcatgccattactcgtcgtgcgctggaagagccttgcgctgtttatgcgggagaagaaggtgggcttggtcagatgcagcgaggatgcgctgatgccaaaagcctcagcaatggtgagctggaccttctgccgcacctcccggtataaccggaagtcctcctctgagaagatgttctgtattttatccccgaagtatctgtacaggttcacaaagtgcttcccgacagacagggcccctgagtgcaagtccagaatggatgcccctccgtcagatcctcccagggagagccccttttcagctacgctgcgaatccgctccgcttcctccctggtgatgacgacatcggtgacacctctgccgcactttcggggagtgcagccttcgaacctgcggtgactgtcgtagtcctcagagcag

SEQ ID NO: 627921 - DNA, 476 bp, Homo sapiens
gcccagcatgagtgtcttcgaccgtccgcgctttcatgtgtacttcccttaggatcttccccatccgaagtgcgccacgttccaacgtatcactccgcttagtttcgtccggcacagctattttcaaggagacccaccgcacgtcttcgaacacctcgataacacccccctcaggagtcactaggccatccgggcatggtgacgctgcccgcgctggcctgtccggcgctgttcatcgccttcgccctattcttcgttctgcctctgggcttccacggcctctgggtgccggatgaaacgcgctatgcacaggcggtccaggagatgctgaacacggacaactgggtggtgctcgcacttcatggggctgcgtgatttcgagaaacccataggaggctattggttgatcgcgatcgcccaggcgctattcggcgacaagctcttcggtacgcgcatagcctcggcgcccccggccg

SEQ ID NO: 627922 - DNA, 371 bp, Homo sapiens
atcattaacagcgtaatttttcatgcatatttaaagctgagtttaatatgatatgtattacatataggcaattgtagggcaatacccacagcaagtggagtttcttacttggccaagagaatgcttatttaagaggtagacttccattctgacaaaatctcgcccaaatctgtgagagctttctgcttgctgcatttgtcccccttactttccttgagctaaagacagtctttttccaccagcatcatcactgctatcatcattaacagcgtaattatacaagcatatttaatgctagactgcaggggattcttttggagcgggctcccaggctcgcagctcttgacttggccatagttttacactgtggg

SEQ ID NO: 627923 - DNA, 898 bp, Homo sapiens
aatgccccaactaaatactaccgtatgggccaccataattacccccatactcctgtacactattccgtcatcacccaacgtaaaaatattaaacgacaaagtaccacgcatacctcgcctcagccaaagcccaaaaaaaaaagaaataaaataataataaaaacaatggtggtgtgggggaggcttgggccactgaggagaggagtttgtagtaaacatataacgagtgggaggggagggggtcctagtttgggcgaattctgggaagaggtggggccacatatggtggtactgtgaagagaaaactcggtggcaaggtgacaataagggtggtggggggtctttccgccacctattatgaggaaaaaatccgcggggggtgatcaacagagggggggctgctgtgaaaaaactgttccgcgagaagtgggcttacacgcgagggggccacaaaaacgcgggggtgaacaatacacaagagagaggaggtccccctggaggggaagagacgatcaaaaaatgcgagaatctaaagggccgcggcaagacggggaaaaggtggtcagctaaactaggtaggcgataccacaccaaggggtactgggaagccagccctgaccaaagggccagggggagacagaaaccccgtgcaccccccaagggcacaacccagcagtactcgacaacccaagggtataatacatgcggggcaatagccggcaatgagtaggtaagcagccccaaaggacctaaccagccgtaggccagggaaggagggagcccatcgcagcaccaacacgcatggtgaagcccacacagagaacaccatggggcaccagaccggcgccggaacagccaggcgcgacaccaactcgccaacgagactgaggagccacag

SEQ ID NO: 627924 - DNA, 101 bp, Homo sapiens
atgatgtgatacaagtcaaactttgtcagcctaacttcgtatttatagatacgcactttgcaggatgaccatcagggactatgtggattgagtaatgtgga

SEQ ID NO: 627925 - DNA, 130 bp, Homo sapiens
aggatgtgtcccccccttatcaaccgggctgaggaaggaattccctttttggtcggaaccctttatttatttggcccgtctaattatttctgatcttcttgtaatatctttaaacagcatttgggaaaaa

SEQ ID NO: 627926 - DNA, 120 bp, Homo sapiens
  misc_feature (98)..(98): n is a, c, g, or t
agccatccatggctgtacattcccagattttagtgaaaagcctttccccaccaattttggaatgtaactgatccattgttaacccagcttttgtatgnaaacactttgttttcgggatcc

SEQ ID NO: 627927 - DNA, 161 bp, Homo sapiens
ccccaacggcaaggttccgtgagaagcaccaccagctccttaggagcaatggcactgctctggctcctctgacacctggggctggcactagcgggtccaaccaggtgagcctctgtaacccatctaacgggcccaaacgcctcctatcatgacctaggtgg

SEQ ID NO: 627928 - DNA, 133 bp, Homo sapiens
ggtcccaagaagcatcttaagcgggtggcagctccaaagcattggatgctggataaattgacccgtgtgtttgctcctcgtccatccaccgtgacccacaagtggagagagtgtgtcacacctaatcatttcc

SEQ ID NO: 627929 - DNA, 160 bp, Homo sapiens
aaggaaaaccccccccggggcccccccctggcttggtttgttaatggccaaatttttttttttggctacccggccaccctggggggagtgtggcaggtgccccttggcccccgctaaaagtttttggcagagctttccaaataaaaaaaaaaactggcca

SEQ ID NO: 627930 - DNA, 172 bp, Homo sapiens
ctccggggtagctgaacagtgtcacattttgggctctgagatggtccataacaatcatcagatgcagtattacatcacatttgaggtgcttgaatagtacttggaatgagctatagaaacaaagtccagcaggcccaggataaggatcacatcattgcaacacggtctctca

SEQ ID NO: 627931 - DNA, 309 bp, Homo sapiens
ctcacaaatcgaggacttcgaggctcgcatcggctggttgccactgttacaggcagaaaccgaccggagaggcaccgcagggcaaaggttgggaggtcactggccggacgcaggctgcaaggctgacctgcatccccgaggtggccagaatgcacgtgggggccatcgctgtgccgtcagctgcatcctcaggcgtggagacttagtggagacccaaggggcgagaccggaagcttcctggaggaggaggcagcactgggtttggggcaagagaaaagctaggagttcgctcgcgcgaaaggagacagg

SEQ ID NO: 627932 - DNA, 223 bp, Homo sapiens
tgcaacttctttagacattacaaatataataattataatgccaaagcattataccataccaatttaagatactgttaagatcaatttaagtgctaagaaaatatttaaaatctttaaaagtcttgatacttaactctagttaatgatatgcaccttaagtgttaaagagaaagtgaactgttgtctgtaacttactttgaaatgcatcaaaaattagatgagt

SEQ ID NO: 627933 - DNA, 365 bp, Homo sapiens
tttgggctcatgcagaggggtagtaagcctgggggactggggggccaccatggacggctttgtgcatggcccagattatttcaaaaggggtgggccaggtgtggtggctcatgcctgtaatcccagtgcttcaggaagccaaggcaggaagatcgcttgaggccaggagtttgaagccagcctgggcaacataccaagatccccatctctataaaaggttaaaaaaaaattagcccagcccaggcgtggtgactcagggctgtaatcctagcacttggggaggctgaggcaggaggatcacttgagttcaggatgtcaagaccagccggggcaacatagtgagaccttgtctctattattatttt

SEQ ID NO: 627934 - DNA, 425 bp, Homo sapiens
tttttgttataaaatccggtaaccttaaaaaaatattttgagttatcccgtttttccccccctttgaaaaacctcacaaggggggttccaattagtgccgcgccctcccaaaagttttagggaggacccagaggggtttttcgggtcttggattatttttaaaaagccgttgggtatccctttcaaagtttggccacccccccccccccctttaaaattttacctaaccccctcggggagcttctttaagtcgtttattttttttagacccctgggggacaaggggcacccccaggtttccttttccggaatttttttcaaagggtgaacggccccttttattattcaaagggagggaaaccttcgagggaaaatttcaaaaacattaaatggttaattttcccaaaaaaaaggaattttgggtt

SEQ ID NO: 627935 - DNA, 335 bp, Homo sapiens
ccaagacaaaaagcttctggcatatgtataaactagaggtgataatctcaaaaaacggtccaaaattataataactttccagtttaaaaactttattcctaaattaaaaaaaaaattctatacacaaaccatggattggcccagaccaaagaaaggaaagaaaaggaaagaaagaaagaaagaaagaaagaaagaaagaaagaaaaaagaattcaggggtaagggtaggcagggacccagaggagcggatatccacagtccttacattggacaactctttcagggatttatccataaggtacttaatttaacaaccgggctttcctaataaaaca

SEQ ID NO: 627936 - DNA, 388 bp, Homo sapiens
ccataaccttatgaatagctgggactacagaaaggcatacgccaccctgcctggcttaattttggactttcaatagaaaccgggtttcaccatgttggccaagctggtctcgaactcctgacttcaagtgatctgcccacctcaacctcccaaagtgctgagattacaggtgtgacccactgtgcccagccaatttttgtattttttgtagagacagggtttcaccaagttgcccaggcttgtctcgaactcctaggttcaagccatctgtccacctcagcctcataaagtgccatcatggccagcctcatatgttcttttttgttttgttttgttttttgagacacagtctggctctgtcggccaggcccgtgttggcacgatctca

SEQ ID NO: 627937 - DNA, 942 bp, Homo sapiens
tcaaacaggaacacacgaggacgatcgccccctcggacactacctcattactctccaaaaattgatgtgatacctaagaacatccccgtgcatgtagaggattcaatgcagtccaacgacaacgaagtggagcggaggcggatgtaccagatcattagcgaagctgaggatcgtccagactttcgaaattcattccagcactgtaacgcaactgatccagcaagaggggagcgagataagaggagggatccttgttctctaaggtccatgcagattaccatcctgtggagattggactcctagtccaacctagcgcatgctcgcggagacctgtccacacaagagcgcccgcagcggctgcaagatggacaacgagctcctgaggcagccagatctgaggagctgaaaaatgagaaccgcctcatgcttctagccccatgcatgcagcaagcaccaaccatgggagtatggtgggcggagggcaaccccgggtcagttgacgccccgccagccaccgcagcttagcctgccccgcgtcgcatgctggcctctgtatgggcccccttctcccagtcctcttacgcctaagagacggggacacttgtccctcctcctcagttgcgtattttcatacgtgcgatttttgagctcaaacattggggagtaaactcactgggctttctgcgggacttccgctgtcctaccgtggcttctccttttgcgtcaatggtttcctccctgcgccatccgattgtttctgccggtaccttctcccggtcctctcgtaagtcccggcccttcttctggtctcgcctgttggcacgtgggggtggaccatagccgcttgctcctgtagccctgggctcctggaaggcctgaacccggtgctgatggcgggcggcctttggggccacccgggcggactttcgggcgtcccccgcc

SEQ ID NO: 627938 - DNA, 141 bp, Homo sapiens
aaaggcccaaaaaaaaagggtttttttttttccctttttggctaagaaggggcgggtttttttttttgggccggtttgggggtggggggaaccatgttggccccccaaaaaccgggatttttttttgtggggttgttccca

SEQ ID NO: 627939 - DNA, 517 bp, Homo sapiens
gcgactgctgcgggcctgagcgctggtctcacgcgcctcgggagccaggttggcggcgcgatgaggcgcaacaaggctgacgtggagcggtacatcgcctcggtgcagggctccaccccgtcgcctcgacaggtgagtgggtctcgaagagaccgacggcctcgacctggccgggcggcggcctcgcgctgctcaggcgtcatggctcccgacgggcgctgctccctggcgcgctctgttgaggcgccggccggctggcgcagtcctgtgggcggcgtggcgcttgcaagcgcatgaagagtcctggggggacagcggtgggcgggagacctttggcgccggcgcttcctctttctcccggcttgttcccgacgcttgttcccgacggtgctcgctcctggggccgccctggcccgggctttttggccgatcgcgcaccccgtagtaacccgcgcggcctatttttcgggagcttgggcacacgggtgctgtattggcgggttttttccatcctcgg

SEQ ID NO: 627940 - DNA, 171 bp, Homo sapiens
gcgaaaacccgtccccacaaaaaatatttaaaaattagccaggcatgatagcgcgcgcccgcagtcccatatattattacttggggggctaaggtgggaggattgcttcagtacaggaagcggaggctgcagtgagccaagatcatgccactgcactccagcctgggcaac

SEQ ID NO: 627941 - DNA, 1361 bp, Homo sapiens
  misc_feature (1)..(1): n is a, c, g, or t
  misc_feature (815)..(815): n is a, c, g, or t
  misc_feature (850)..(850): n is a, c, g, or t
  misc_feature (1084)..(1084): n is a, c, g, or t
ngtccacaagttttgtcccccccatgtgcccacatgcacaccgtgtgataaacacaaatgtggtggggccgcctgtgttttctttttggaaacgttttaaggtgggccctttgtaaaagaaccacaacgagtgttgtcgcccaaaaagattgtcgtgtgaaccaccgtccacaagctgtgggtatatgtaggaagaaaaatggtgtccgaagtccacaggaagattggtgattggcccccccgccctgttatgatagaccctcttggcggcccgtattgatttagcgccactgggcagcgtgtttgccgcccgcccccccccggcggccacagattgggttttaatttggttgaacgtgggacgctttctttccccctgtcccacacattgtttgggtttgttttgttgcccccctcggggttgccacccaccggttgattgttcccccgtcgggtgtcttcttcccggcggaggttgtttccccaccgcccccacgtcgtattaccggctcgcccccctcgtggtagttacctcgtttgagagtatttgttccccccgccccacgccgctgcttgttttttcgtgtagcacaccttggaagcccgccttcgtgagcaccacacaagtgttatgcccctctcccccaccgcgggagaaagagcgctttttctcctataggagagaggtccttttccccacacataaaaggggcgcctggggagaaacaatatggtgcctggatgaaaattggataacggcgcggcttctcacagcatctcgttccgcagagaaaggcgcgtggagtaacacacancacgcacactcgtccggcgagaaatcacacagctntggtgagaggcttatagacacacacccacgcggggtgccctctttatgcgagcacacgagcacctcttataccccaccacacacccctctctctctctacacacacacctcggagaaagtgagtatacacccccttcccccactatatgtccccctatggcacgctcacgccacgcacacaacgcacacagttcacacagtgaattccctcggcaccgagacaccacactctgnggctgagactctaatgttttctgtggcgcactcttctggccacggagatttctgttcttctttcacgagaactcactcctccacacaaccagaacttgagcacctgtgtccttgccccacgtcctatggagaactgtggcaccaccacgagatgttcactttttaaaacggagtttcactggaacacctctttgtaacttaatgtttataaagaggagagccctgggtaacccagtgatcttccccatcacagagttagtaaacctctgtactacca

SEQ ID NO: 627942 - DNA, 410 bp, Homo sapiens
  misc_feature (248)..(248): n is a, c, g, or t
  misc_feature (406)..(406): n is a, c, g, or t
ccagggttcaagtgattctcccacctcagcctccagagtagatggaattacaggtgcctgctaccatgcccacctaattttaaaaaatttttgtagagatagggtcttgctatgttgcccaggctggtctcaaactcctggcctcaagtgatcctacctcctttgcctcccaaagcactgggattataggcttgagccccctcgcccaacctgacacctttcttgaggcttgcagaagcaccaaggtnctggcctgtgactgggccgaaaacattttaggcattttgatatggggcagggcatgcttaactgaggagtccagtttttccagtttagttcttgctttttggattgggaatgtttcctggcccattggctgttggggaatggcttcaggaaaggggcnttgc

SEQ ID NO: 627943 - DNA, 687 bp, Homo sapiens
  misc_feature (687)..(687): n is a, c, g, or t
cccccctgctggaattatgcacgagaagagaattttgtttgcccacttgatctaatgaacattgtcctttatgcccgtaacgccgaatataatcccaagcggcttgctgcgggaatcatgaggataagagagccacgaaccacggcactgattttcaggtctgggaaaaaggtgtgcacaggagccaagagtgaagaacagtccagactggcagcaagaaaatatgctagaggtgtacagaagttgggtttttcagctaaggtcttggacttcaagattcagaatatggtggggagctgtgatgtgaaggttcctataaggttagaaggccttgtgctcacccaccaacaatttagtaggtaagtctgaaatgtattgtgattgttattggcaacaggtcatttataatctaaacattgttcagaataaaacacatgcacaatattcagtatatgagaacaggtgacatgggtataggtggatgtattcttgcaatggctttctgatggtctcagacatatttattaccctcaccagcctttgttttccttataaatttgcggaaccaataacttcccttactgggaagaaattgattctacttctggatgttttaacggtcaattgcgtgaactcggaaaggcatggaatggacccctccttgtatcttttttttccacgctttgn

SEQ ID NO: 627944 - DNA, 783 bp, Homo sapiens
tttcttttgtttcggtgaggggttcaaagacaggatctcggcgtcgtggcgtccggtactggcagtgcaggtggtgtggattgagggatcattgcagagtctgcctctcaggctcaggggatcctcccaatttcagcctggcctccgaggtagctgggactacatggtgtgagtcacgccagctgtattgttgggcagagcagggatctccctgttttccctagagttggtcatcgaactcctgggcattaaatgactcattgctggctctcagacgtgcagccaagagtgtgggtgattactggtgtgagcccccacgcctagtggctcgagccaggcgggtatcatcagactcgccaatgtttgacgaagctgccctgcctcctagtggagctcacgccaggcaggccagtgggcctaaagcgcatcaacacatgacaacgacagcaggtggtccatgtgtggagtagcttcctcataggctgtgctcggagttaattcagccagctctacgagaagggactgttaattaaggtctaggggctgagagccaagtttataactagagtctcagatccctaagaaacctgatgtgtgctaaggaatcttcccaggtaagaagaaactagttcctctagtagtagtactgaaaggccataagcatgcatatcgctgctggattgagctgtgtggggtcagctgaggtggcaggcaccgtgtacgtagctcattacatctggcgacgggtcgcaggggccagtaatgaggaatcgtgggaagacg

SEQ ID NO: 627945 - DNA, 586 bp, Homo sapiens
  misc_feature (7)..(7): n is a, c, g, or t
  misc_feature (55)..(55): n is a, c, g, or t
  misc_feature (108)..(108): n is a, c, g, or t
  misc_feature (110)..(110): n is a, c, g, or t
  misc_feature (123)..(123): n is a, c, g, or t
  misc_feature (133)..(133): n is a, c, g, or t
  misc_feature (135)..(135): n is a, c, g, or t
aacaggnagaatacgcggagggcccctccatcaaggcggtgctcctggggtgccnggaccggggcagtgtcacaccctgctgctcaagtcctgagtccgagatgctangnacgcgagtaatgnaatagttgtnangtgcaggcctgaaaggctgtagtcagacctccgccctcagccagagcaagcttggggcaccatgcccagaatgatagaagccatccacagccttccctgtcaccggctcctctgtcctgcctaccctggtcctggcgggacttcactatttgacttggtttcctttcagatattcttgcctccagtttgctggctggcttttccgtctacccccagtgacctcacaaaaaggccctcctgccacccatggtcatgtggtgtcccccccgcccacttgtttgatgtccctgactgtctacatgtatttatattcttgatattttctaccctccctagaatgtaaactccatgaaggcccagacttttcttgtttttttctgtatccctaaagtaagaccaacttgaacctggcatatagtagctgcttaataaaaactcgtctgtcaatgga

SEQ ID NO: 627946 - DNA, 903 bp, Homo sapiens
agcggggaattgcccgagggcggccgcagaacggtcaatttgagccgcgtcgaggtcgggcttgggaagggtcagcgggaggcctgagggcgccgggcgctgctggcaggcgggcccggggtccagccgagacgggtccgggcgccaggcaacgcgattcgcgccgggggtgaacccggggatggtggtgccggcctccccgttctgggacctttcagctcccctgggatccttgtggcctgccgtccaacacgaccagtgctcctggggcgcctgacttcccagctgttgatgggccgttccttgggcaggcggccgtccgccttggcccgtctctggaggtgctgggcatccgtgcgtctgcggagccccatttagcgagtcatcgatcagctctggccggccctagtgtagggcggactctctccactcgcaagggggcctctagctggagctggaggagattgctggtccccaggaagatgtccgtcagctcacctggagagctggctcacggcgccgttgcttcctgcccagacctggatacctggtacctcagggactgtggctacaccggaaatcctaccagtgtccggccagccagataggggaaggggccgagcatggggatgaaggcgtcgcgatgcgcctcaaattcagtgcacaaaacgtgctgaggatccgcggcggaagatgaagcacaaaagcaccggaagctgggtgaagaacgacgcggttcctgcgggagcgaaagtccacgacggaccgccttgagacgcaaggcagatcaagttcgagaaagacctgaggcgcatctggctgaaggcggggctaagggaagccccgaaggctgggagaaccccaaagatctaacctgcggggcaaatgagtctggcgcggcgt

SEQ ID NO: 627947 - DNA, 333 bp, Homo sapiens
tggaaaagtgtagttggcaattacacagtaaaacttaacagtgttgactatcagagtctcacctctgtctgttatttgagtacatcccctatacatctgtgaataaatgataatcgtctcttagagtttgtactttatgtgaacatgccagagttaagtaaattgtcaaaggatccagtttgacaatgtgttatttgtcaatatcaataatgaataacagatcttagaaaaatgaactcttgtgcatttcactgtagagacatgagatagtacatgccagagtgattcagacattcaaaaaggtgcctcaatgaaataaaacatttgcggccg

SEQ ID NO: 627948 - DNA, 112 bp, Homo sapiens
  misc_feature (108)..(108): n is a, c, g, or t
tgcctgtgagctgcagaaagtgcaggagctacagcagcagagctgcccgcgaagttgtgggagctccagtgtcctgagtggcacagctggaagaggagtcgcccttgntcgt

SEQ ID NO: 627949 - DNA, 933 bp, Homo sapiens
tgcagcgcttgcccaaggtcatcgggaaccagagcctgtcaagagctggccttcaccgcccgaagatgatggctgacgaggccctggcgcaagttgggctgtccagcggtgtgttcccagacaaagaggtcatgctgatgctgccttagcgcttggcggcgagatttccagcaagagcccctgttggcggttgccgacagccccaatgggtcaaccttgggtgtattccccgcgaccatttcggcgtgccggagacgctctcaaaataggtggccgtcctgggaaactttgcagctttgttggaaggacccaaaaagaacctcctgtagaacgccggcccaaggggcccaggcttgggcacacacaatggggattttggaaaaacgcggtcaatcttttcctcccaaatgttttttggagaaagccttcgggttgtcccagagggccccccaaagcgaggggcgccggtgcttttgccccgggccttcaatcccaaagagaaactgggggacgcatcgggccagaacagaccggttgggtacatactgggcctttttcggggacgaccgggtttcccccagggtttcaatcaaccttttacgtgcaccgatgtcatgcttttcctttaaagggccccaaaggggcttttatttttttcacccccccacaaaaagtgtatagtgatctacaacgcttacatcaccatcatcacagcagtaaccaaatagcctgtttgttggccgcgcgcgtgcgcccctcgagagagcaggtttacaaacaaacaacttggtggtggggggcaccgacccgacgtgagtgtcaacggacaacctgtgcctatcgcgtgtttcccaagacgacatctcgtgtgcacacagctacgtggtgtggggttccaccaaaataaaacacccgcggggcaccccgatgtta

SEQ ID NO: 627950 - DNA, 328 bp, Homo sapiens
  misc_feature (23)..(23): n is a, c, g, or t
  misc_feature (319)..(319): n is a, c, g, or t
ttgagcgataccgccatgggcgnattgtgctgtccgacagcaagctggcggcgatggaggtgagcggggtatttgatctggatgagcctgaggccctgttgcggacgcttgagcagcgatatggcctgaaggttacctacctgccgtggttggccgtggtgtattgatcggcctgcagcgatctcgtcgcagtacagaaataaaaatattttccatttggcactgcaagttcgtgcaagccagaccgtcgtagtgggactgatcagcaacccattctcatttacgacttgtcaggaagctcatacgtgcctctgatgcnctgcccttg

SEQ ID NO: 627951 - DNA, 138 bp, Homo sapiens
gagcatgagccagcattcattgatgcttggaggtcgacttgtattcacctaggtgcatgtgctagtgcctctcgctgtacaagttccgtcgacacgtgagcaccgtgctgacctccaaatatcgttaagctggaacct

SEQ ID NO: 627952 - DNA, 879 bp, Homo sapiens
  misc_feature (162)..(163): n is a, c, g, or t
  misc_feature (496)..(496): n is a, c, g, or t
  misc_feature (510)..(510): n is a, c, g, or t
  misc_feature (520)..(520): n is a, c, g, or t
  misc_feature (559)..(559): n is a, c, g, or t
  misc_feature (575)..(575): n is a, c, g, or t
  misc_feature (579)..(579): n is a, c, g, or t
  misc_feature (583)..(583): n is a, c, g, or t
  misc_feature (600)..(600): n is a, c, g, or t
  misc_feature (603)..(603): n is a, c, g, or t
  misc_feature (608)..(608): n is a, c, g, or t
  misc_feature (612)..(612): n is a, c, g, or t
  misc_feature (617)..(617): n is a, c, g, or t
  misc_feature (619)..(619): n is a, c, g, or t
  misc_feature (631)..(631): n is a, c, g, or t
  misc_feature (639)..(639): n is a, c, g, or t
  misc_feature (667)..(667): n is a, c, g, or t
  misc_feature (669)..(669): n is a, c, g, or t
  misc_feature (671)..(671): n is a, c, g, or t
  misc_feature (754)..(754): n is a, c, g, or t
  misc_feature (759)..(760): n is a, c, g, or t
  misc_feature (803)..(803): n is a, c, g, or t
  misc_feature (877)..(877): n is a, c, g, or t
aagatgaaatccactgaggagggaagtccagcaccctgtgtgccagtccagaactggcccatctgtagaccccctgaaaatcatatgggcttggatttggatattctcaacagaaagggttaaaggctgatggtacctaaagcctggtacttgaattttgannaagataagctgccttaagttctcttcattacacaaatgatcctagataattgatagatcctgtggttcaactggatttctagatagaagctggattcatgtgatgccagaggagtaaaatttcaagagactgaaaccagatctgagtttcgctgttccagtctggacctctttggtgctgtaaatcctggatatactgtagatgagtactgcgtttttcttttatgacggagggtcgctcttgttgccgtggctggagtgcgatggtgcgatctcggctcactgcaacctttgcctcgtgggttcaagtgattctcctgcctcagcctcccgnagatagcctggganttgcaggcgnccaccaccaccgcccacgctaaatttttgtaattttagntggagagaggggtttnaccngtgnttggccacgcctggtcnggnaacancctnacctnanggcctcttcttnagcttctngagacctcactatcctattatgtctttntntnaagacatgctgctttgtaattatcgaaagtgtcgcatcaaactctctggctatgcatgggtcactgcctgctctcacatcttngttgnncagcagggcatggtgtagtttagtcgctcaccagctatctgtnctgcctgcaacagtaccctttcgtggaaagctagataattgtccgcacagaactcagttcatcagaggaatatnaa

SEQ ID NO: 627953 - DNA, 315 bp, Homo sapiens
  misc_feature (102)..(102): n is a, c, g, or t
  misc_feature (169)..(169): n is a, c, g, or t
  misc_feature (250)..(250): n is a, c, g, or t
  misc_feature (282)..(282): n is a, c, g, or t
caacgacaactttgtctagctcatttcctggtatgacaacgaaggtgcctacagcaaccctggtggtggacctctatgtcaccacatgtcctccaaggagtnagacccctggaccaccagccccagcaagagcactaagaggaagagagagaccctcgcttctggagantccctgccacactcagtcccccaccacactgaatctcccctcctcacagtttccatgtagaccccttgaagaggggagggncctagggagccgcaccttttcatgtaccatcnataaagtaccctgttctctacataaaaaaaaaa

SEQ ID NO: 627954 - DNA, 211 bp, Homo sapiens
  misc_feature (16)..(16): n is a, c, g, or t
  misc_feature (25)..(25): n is a, c, g, or t
aagcccataatttctnccttccccntggggggtctcctcccccccccccccccccccattttatggcttccctttggccattggtgaattataactgcggctgaaaccaaccgggtcataaagatggatttttttagaaacaaaaatttacctggtggataattgggttttttttccctggaagggaacataaaaacctcttttccgggga

SEQ ID NO: 627955 - DNA, 642 bp, Homo sapiens
  misc_feature (162)..(163): n is a, c, g, or t
  misc_feature (394)..(394): n is a, c, g, or t
  misc_feature (402)..(402): n is a, c, g, or t
  misc_feature (430)..(430): n is a, c, g, or t
  misc_feature (432)..(432): n is a, c, g, or t
  misc_feature (434)..(434): n is a, c, g, or t
  misc_feature (517)..(517): n is a, c, g, or t
  misc_feature (522)..(523): n is a, c, g, or t
  misc_feature (566)..(566): n is a, c, g, or t
  misc_feature (640)..(640): n is a, c, g, or t
aagatgaaatccactgaggagggaagtccagcaccctgtgtgccagtccagaactggcccatctgtagaccccctgaaaatcatatgggcttggatttggatattctcaacagaaagggttaaaggctgatggtacctaaagcctggtacttgaattttgannaagataagctgccttaagttctcttcattacacaaatgatcctagataattgatagatcctgtggttcaactggatttctagatagaagctggattcatgtgatgccagaggagtaaaatttcaagagactgaaaccagatctgagtttcgctgttccagtctggacctctttggtgctgtaaatcctggatatactgtagatgagtactgcgtttttcttttatgtcttnagcttctngagacctcactatcctattatgtctttntntnaagacatgctgctttgtaattatcgaaagtgtcgcatcaaactctctggctatgcatgggtcactgcctgctctcacatcttngttgnncagcagggcatggtgtagtttagtcgctcaccagctatctgtnctgcctgcaacagtaccctttcgtggaaagctagataattgtccgcacagaactcagttcatcagaggaatatnaa

SEQ ID NO: 627956 - DNA, 158 bp, Homo sapiens
cttgctgatgtcagctctatgaggatccccgaagcttaatagtgaatgatacctctttacggactcacttatttactcccgtagagagcccatgatcgaagtccccatctgctggcgtcatacgtactatgccgcatgtactcttaataactaagcgc

SEQ ID NO: 627957 - DNA, 159 bp, Homo sapiens
taaggatcccctctggatagcaagtgtctatggatagtctcaccatgaaggtaggcaaataaaatgactctcaagagggcactagctagcccatggcttcacaggtccagccagcccagcacgcagccgtgctggtgtctttaacccaggtttcttaaa

SEQ ID NO: 627958 - DNA, 104 bp, Homo sapiens
taccgagtcagatcgagacgccggcacatgctgaacccatcttacaaaacacaaattagcggagtgcggcagcactgtatccagcactgcgagttaggacggga

SEQ ID NO: 627959 - DNA, 615 bp, Homo sapiens
tcacgccctgctcgagcaccgctcgagttcggcgactctaggtctgcccacgagtaatcggtggcgatggagaagccgggcctatcatgcccaccgtggaccccgcatgtccgggacgaccttctatggaccaagtacgactcgtagggtacttcccacagctccgcgggtaccccctactactgtacgagcttcgaggtcttcgggacgcggccctcctgtccgtaccccatggtcccgacgcaccacgcgtacctcgggtaccctctgggtacaagcggcgtaccaggttccggggtacctcccccatatgatcggcgctggctatctggagagcaggtctgttgtaggtaagaaagggcgtcggacggagaaggtaggagtaccccaacaaggaggacggaggaagaggcctactacccgccgcgcgccgcccccgtacttcggagaccgatctcgcaggcgtcccgagagcgcaggctcaagaagaacttggcctgagtcgggaaagtttagtcgtctgatctgacgttttctacagtagctttcgtattttttatcctaatttgaaggcacactgatgaagcataccgtacccctccgagttataacgtc

SEQ ID NO: 627960 - DNA, 327 bp, Homo sapiens
aaaaagtttaagcttcccttgtagacagatccctggctgcccttaaagtgtgtttgcatggccccacagggttggaaaacccttaaaggcaggaattcaaggaaatgtttgatgatttttggcattgccatcaaaagcaaaacaggcatggaaaatttgggtgagtgggcgagccaacctcctccccccagcaaagttccatccatgcttggataataagggagggttttgtgtcccctccagtggggaaccataaaggacccatcaagggtgtggttggcctttggtgttttttggaggaatgaataaaaattaataaaattccta

SEQ ID NO: 627961 - DNA, 862 bp, Homo sapiens
  misc_feature (839)..(839): n is a, c, g, or t
gtggaaactgggggaaatatggggcattccctattttcgtaacacctttttggcggtaacgggaactgggtttaaagttacaacctcaggggtgtaactccaacatagtgcgcacaatggcacattttaccaagttggtttgcctttggggtcctccctctttatatggtaacggggttccgggaccttaaaaagtagttgtcggctgacaggccataatatgttatgtcataggtaaactaggtacaacccgccctccgtttgttttcctctattttgtttccgcaaaacggttaataatttgaaaaaggacttttaagttaaagaaataattccaaaggaattttggttctcaaagtcgcaaaagcccctatcgtggtcttgcaagcgctgcatctaggggaaagtatggatacgaggggatgggtaagaggtaggtaagaccagtagggaaagatcaagggccacatgctctatagctggggaaaactgctctggagccgtttactttgagcatttgaacactagaaaccatttgatgtggcagggattcacgtcactcgatcagcacaagttctacactgaacttgagtctaagagtttagtgagtttcaaaagccttggtctcaggagaagagtaaactttcatattgggcagtggttcactcttaaaacacacacatacacacacacaaacaattttttaagaaatcctaataagtgaacatacccggaaatgctctgtcttgagtcatgagaaccatcagttcttgatagtgtcctagactagcatctagagcatacgttgtaaaattcttttaggcactgtgttagatttntaactcccacgggttaaatgaaa

SEQ ID NO: 627962 - DNA, 237 bp, Homo sapiens
tatagttagtgtaaatactttaaaatagtagtatttgggggatgttttccatccttcggtatatatacccacatacttattcattgtaaatcaagttgtattcctgtgtataatttgtagaactgatttctgcttctagagaagttgcacctttaattttttaaaggtcccttccacctgtaacctctattaatgtctgtaaatcagacacttgtatttttaataaggattccctat

SEQ ID NO: 627963 - DNA, 263 bp, Homo sapiens
  misc_feature (27)..(27): n is a, c, g, or t
  misc_feature (39)..(39): n is a, c, g, or t
  misc_feature (74)..(74): n is a, c, g, or t
  misc_feature (81)..(81): n is a, c, g, or t
  misc_feature (90)..(90): n is a, c, g, or t
  misc_feature (93)..(93): n is a, c, g, or t
  misc_feature (95)..(96): n is a, c, g, or t
gcacgagaacatgaaaacgaatggatnccttatgagatnccattggatctcactgttgagccagcacatgctcntaagcanccggtatanatncnngcttcaaatatgtttcatatccgttcttaaaaaagagcttttggaaagaagctgttgacacatcagtcaacttagagagactcgacattattcaagtaatgctctatcttgaacgtcttggttcattcacgatggccgattctttctcgtgccgaattcggcacgag

SEQ ID NO: 627964 - DNA, 332 bp, Homo sapiens
ataagctgcaccagcaagagcacccgctcaggtccccttccacactgtggacgcttgttctttcgactcttcataataaatcttgctgctgctcactctttgggtctgcatcacctttaagagctgttaacactcaccgtgaaggtccgcggcttcattcttgaagtcagcaggaccacgaacccaccagaaggaagaaactctggacacatctgaaggaagaaactccggacacaccatctttaagagctgtaacagtcaccgcaaaggtccgtggcttcattcttgaagtcagcaagaccaagaacccactgcttcccagcttgctcaga

SEQ ID NO: 627965 - DNA, 144 bp, Homo sapiens
agagatagctctgttacatctagggctctgtttgctctctatcgaatcctatcctccagacctctttaaatcagaccccaggtttgatccttcccacagtcagtataaatcatttttcagaactttcatgctttccatcgaagt

SEQ ID NO: 627966 - DNA, 174 bp, Homo sapiens
cagacacagaacggtggggtggggcgtgggggcatcaatgggtgaccagagtgggacagcaggaaagggcgactgtgatggaggagcagtgctggggctgggcctcagccattcatggccagccctgtggcccatcccagatgctgtttgttgccaatatgaagtatccactga

SEQ ID NO: 627967 - DNA, 766 bp, Homo sapiens
gccctgagagattcttcctatcggtggctcacatggggacgctaagaattgctacctgtgacttctcgttgaccatgctgtcccgggtggtactttaccagcggcgcgcacagtgtgcccctctctgaagaatgcagccttcctagtgtccaggggtattgcaggcaacaaggacctttcatacagggcagcacaccttgtccctgtaaccactcttcctgaatacggaggacaagttcgctatggactgatccctgaggaattcttccagttctttatcctaaaactggtgtacacaggaccctatgtaactcggaactgggcttactcttgttacgctttatcccaagaaatatatgtgattagctgcagagaccttcactgccttatacagaactaggtgtaaaggtctatggaatcacccaaatatggtccctttgttgccgacttctgcttgctaaactccaatcgaggcaaaaaacagccccaactagaaagaggacgacgcccggtaccaatccaaacacaatcccaggaactgcaactggcaaacgcgcgaacgtccacaccccggcacccgcgttcagacagccgccattcaactctccgaagcgcaacggcacaacaatgacaatggctcacgcaaacaccacaccagcggcacgacccgttagcagcacacaccggcgccacacacaccgctcggaccccaaaaatcgggcagcactgatgcgcccacaggcacacgaaccacacacctgcctcc

SEQ ID NO: 627968 - DNA, 357 bp, Homo sapiens
  misc_feature (101)..(101): n is a, c, g, or t
  misc_feature (241)..(241): n is a, c, g, or t
actctagcaggatctttgttcgttcttcaactgcggtagcataaaaaaggctggtccttgaatagtcctgcatggtacctaaggcaggcccactgctctgntttgatcaacgggaattctgggaaaagctgccttggaggccttgaaataacatagggagcagaaatgagtgctcgagtcgtggctgacacagtctagctcacactgccatcacagaggctgagtgagcagtcacccaggnagggggctcccagctcattccattcccatggggcaagtgactagaaggtaagagcacccgagtaagccggtgccttcctgtatccacacccaggaataccttccagttgtccaagc

SEQ ID NO: 627969 - DNA, 896 bp, Homo sapiens
ggttttctgacatagaccccaggatctgtaattatcttagagaaactgcgggggcttagatggtacttgtagttcattggtttttgtgggttgtttttgcctttctctcttgggggctgaagagctggtgtgtctgtgtgtgtgttcctctagagtgccaaaaaagaaacaaaaaaggtgctgaagagtcctagggagatgaggctattttggttggaagctgatacttctagctgagccacaagtgctgttggaaaggggctaggtggtttccaggggagaactctgcagaggagaggcaaagttcaccaggacaacaaagaagcagcagaaacaagccaggaaaaggaagagcccccaggtttgtgacacaagaaccctccaccagagttctcaaatcccaaaatactctgaaaggtgcaactgtgaggggaacttttcaatgactttttattttgtgaggaccacatgatgagatcactgttgaggaaatgttttaaacacaatgtgatagacagcaaacatgggtctgtggccaaatcccctggaaaaagtggtgaagaggacgtcacaggacgacctagtggcgacgttcagtcccttgagcgtgatttgtggtcatgcctgattatcacgtgtcaggtgtgcatcgtatgttcgcttagtggttacccacaacttgaagaggtcatttgcgagatggtcagatcttaaatggcgtgttgttggggaccaggggggtatggggttttgggattgacacacttgagaggaaaagtgggggcgactgtagaaagtatctgtgaaaaaaaatattagagacggggagagttgaaaaaaaaggggcgggaagggggggggttctgtatcgcggtgtacttcttgtcgtttctaca

SEQ ID NO: 627970 - DNA, 280 bp, Homo sapiens
ccccccccccccttttgggggttccgtttttggggttgggaaccccccccgggggggaaacccccccccctttgggggagccaaaccttccttttataaacccgttacccttttggggggggggggggggggccccttaaaccccccccctttggggaaacaccccggggggggtttttttggcccctttttttttttttaaaaggggccccccgggaggctggaaggaaaccctttttttttggggtttttcccaaaaaaggggggttttttttgggga

SEQ ID NO: 627971 - DNA, 324 bp, Homo sapiens
tttgggccgggtttggaacctttccaactggcccgggccctggcctggttttcaagggtttcctaaacaaaagggcccctggggccggttttgtttttttttccaggggggaaaaaatctagggaaggttttttccccttttgatttttttgggtttgtttaaaaaaggttttgtccaaatcccaaaatttaaaaaaatgccttaaggttgttgcccgggttttttaaaaataattttttttattgtttttgtttgtttgtttttcccctgttaaccggggcccggggattgccgcaaattaaccccccctttgcccccgccca

SEQ ID NO: 627972 - DNA, 302 bp, Homo sapiens
gcacgaggtgaaactatagaacatcaaagataaagagaaaatcttgggttgggtccagtggctgatgcctgtaatcccagcactttgggagactgaggcaggtggattgcttgaggtcgggagttcgagaccagcctggccaacatggtgaagccccatctctgctgaaggatacaaagattagcgaggcatggtggtgggagcctgtaatcccagctactcaggagactgagacacgagaattgcttgaacctgggaggcagaggttgcagggagctgagttcatgccactgtactccaga

SEQ ID NO: 627973 - DNA, 430 bp, Homo sapiens
cacattataagccaatggaattctcctaatactgtactatcaagttgaacaaatgacttagtcttagaaaaaagatgcacttgaaaatacttagatgttgttccgtaatgatccctaagattacaatataaaactaaggaactccatgaaagtagggtggctaggcacagtgactcacacctgtaatcctagcactttgggaggccgaggcgggtggatcacttgaggtcaggagttcgagaccagcctggccaacatggtgaaaccctgtctctactaaaaatacggcatggtggtgcatgcctgtgatcccagctactcgggaggctgaggcaggagaatcacttgaccccgggaggcagaggttgcagtgggcaagatcgcatcattgcactccagcctgggcaacagagtgagattccacctaaag

SEQ ID NO: 627974 - DNA, 333 bp, Homo sapiens
gggtatctgccttgacagtgagatacgcggaggccccggttctctcttccaatcaagagtggcctgggattccttatctggagctcatcattaaaccttttatgttgcaggtaagtaatgcacactgattttaatgaatctctcaaacacctgtgcctattataagctgaaaggaagtttctatagacagacaactgtgagcacgccttcctggagacacggaacactggtattgatcaccacaactaaatgatgccaacgaatgtagtggggacggacggtgacatgctccccggtgaacaagctcccctcgggatacaaggggtacccgca

SEQ ID NO: 627975 - DNA, 1523 bp, Homo sapiens
  misc_feature (195)..(195): n is a, c, g, or t
ggacgcgtgggtcgacccacgcgtgccgaggcgagtccgggacagggggtctcgggcgtcggcgttactgggtttcgctgcgatgcagcgtcccgaccgtgaggagtccatgcatggactcagacgtccttggacgggtcaagtgagacgagtgatgaccgcgggtagccggggcggctgacggaatgcttccgnggaaactagattcgatcgctcaggggactcagactggcgcgctgcaatggcggtgctttgtacagcagcagaatgagggctcgttgaacagggtgtggacaactggacactgtttatattatgcactgatggagtgcataggaacaatgccagctacctgcagggcacagaaattccacggtaaagtgacctcttctttctccacgtactccgatatccacttggcatttatacaggtagcacatcggcatgggtccggcaggccatcgcgtgatgccccctgtgcgagggaccctgtacttggggcaggaaacccaattggagtattctggctgggatgtctgcgaatcgggtgaggccaaattttggatccggaggggccttagtccgggcccctgtggtgaattccataacattcttctaagccgattgggcttccaactggactgggtattcgggttgccctcggcaatccgaatggtccccatttggggacggggatgtccatcggacaacgcaagtggccaaagcgggttctggggatgcgcctgcacacaatggagacctcgaacttccagaatgaggggggccattggcataaaagagaggcaatgggcctaggaggtgatccctgggcatgaatttccgtggcaatggccccctaatgcacaaggcgccaaggggagtcccctctaaaaactgggcctggtttggcataggaaggggcgcaaccattgtgcaatgtccaggaaaggaactaccttatcacccctgggtcacggtgacggcaatggagacgcccaaaaaatcgattggtgggcttgtcgcactggacggcgaaggcccctcaaaacacgcgggccgagcgcaaacccgaagaagagccccctggatagcggatcccaaggtccgaggaacccaccagtagacccggggacaagggaaaacttctagcgacttgcccgccggggcacaaccaataccagggaattgtccccctatcggaggggagaaaaagggaaagaccaagaacgcagtcaaactgggtcccgaagagcggagacacccccctttcggggagcaagcacaccggaaaaattgcgcacagagacagaccacacgcaggtagacaaccccgagcactggggcgccacacaagcgacggacacgaaacccccatccttctggggcaacacgctagtagaacagtgggcgacggcagccacctatcagaggcactgtcaacccaggcaacgacgaagaggtcgagcccctctcagcagccacacataagtcccagcgccagagcaggctaggactactgaagg

SEQ ID NO: 627976 - DNA, 465 bp, Homo sapiens
  misc_feature (451)..(451): n is a, c, g, or t
aaaattatgataaggatgataaaagcccctactttgtgtccggcttttttgggggcccctcttcacatgcattactgcatgcacttcttacaataattctatgagataggtactattatccccatttcttttttaaatgaagaaagtgaagtaggccgggcacggtggctcgcgcctgtggtcccggcactttggggggccggggcgggtggatcgcgaggtcaggagatcggggccgtcctggctaacatggtgaaaccccgtctctgataaggatacgaaagattggctgggcgtggtggcgggcgcctgtggtcccggctactcgggaggctggggcaggagagtggcgtggacccggggggcggagcttgcagtgggctgagtttgcgccgctgcactccagcctgggtgacggagtgagactccatctcaaaaaaataaaaataanaataaaaaaaaatg

SEQ ID NO: 627977 - DNA, 584 bp, Homo sapiens
  misc_feature (43)..(43): n is a, c, g, or t
  misc_feature (70)..(70): n is a, c, g, or t
  misc_feature (72)..(72): n is a, c, g, or t
  misc_feature (74)..(74): n is a, c, g, or t
  misc_feature (91)..(91): n is a, c, g, or t
  misc_feature (102)..(102): n is a, c, g, or t
  misc_feature (107)..(107): n is a, c, g, or t
  misc_feature (112)..(112): n is a, c, g, or t
  misc_feature (119)..(119): n is a, c, g, or t
  misc_feature (122)..(122): n is a, c, g, or t
  misc_feature (129)..(129): n is a, c, g, or t
  misc_feature (131)..(131): n is a, c, g, or t
  misc_feature (138)..(141): n is a, c, g, or t
  misc_feature (145)..(147): n is a, c, g, or t
  misc_feature (152)..(152): n is a, c, g, or t
  misc_feature (159)..(159): n is a, c, g, or t
  misc_feature (195)..(196): n is a, c, g, or t
  misc_feature (205)..(206): n is a, c, g, or t
  misc_feature (211)..(215): n is a, c, g, or t
  misc_feature (217)..(217): n is a, c, g, or t
  misc_feature (219)..(219): n is a, c, g, or t
  misc_feature (225)..(225): n is a, c, g, or t
  misc_feature (230)..(230): n is a, c, g, or t
  misc_feature (243)..(244): n is a, c, g, or t
  misc_feature (251)..(251): n is a, c, g, or t
  misc_feature (263)..(263): n is a, c, g, or t
  misc_feature (283)..(284): n is a, c, g, or t
  misc_feature (286)..(286): n is a, c, g, or t
  misc_feature (318)..(318): n is a, c, g, or t
  misc_feature (320)..(320): n is a, c, g, or t
  misc_feature (342)..(342): n is a, c, g, or t
  misc_feature (348)..(348): n is a, c, g, or t
  misc_feature (367)..(367): n is a, c, g, or t
  misc_feature (405)..(405): n is a, c, g, or t
  misc_feature (438)..(438): n is a, c, g, or t
  misc_feature (484)..(484): n is a, c, g, or t
  misc_feature (503)..(503): n is a, c, g, or t
  misc_feature (505)..(505): n is a, c, g, or t
  misc_feature (512)..(512): n is a, c, g, or t
  misc_feature (518)..(518): n is a, c, g, or t
  misc_feature (522)..(522): n is a, c, g, or t
  misc_feature (532)..(532): n is a, c, g, or t
agggtacccctctcctctggggactgactcaaacactgatgtngcagtatacaccacatacacagaaaanananaaaaaacattctttttngggagtaaganaaggnggggnttaagangangtttctngnggcttannnnccannnctggnctctttnccccctcccaacccccttgatccctttctctgatcnngggaaaggnnctgcnnnnngncngttgtnttggnctgggaagggttnnaattganagagtgggacgnactcctcaagagtagagctnngngggagattgaaagtggagataatactgctgananctcccttgaagctgagatgggnaatggncatacttagaaatttagtnactttaatagcctggttttccctctccaaaacttttantatggaaaatcccatccccttccttatatagtnacttctacccactaccttctaccattttctactttgggcttaggangatggccattatctacatntnttttcancacctngttngttctaaatnggatctggagacccagcttcttggagattttttaagcaggaagtattaactg

SEQ ID NO: 627978 - DNA, 853 bp, Homo sapiens
gagtaggttccagaaggcggcgcgtgcggtgggaacgcggagcggacggaatcgatccaagggggttccggaccgcgctgtcacatttggagcatggtctacatgagctgaaggagattcggcaagcgagggtccctgagtcgttgggtgaacatcgagtgatgcctgtacagtggctagatccgaaggcttataacgctgtgatcccccacaacacaaggtgctgtaacagtaatcccggtccgtgcattggcgatagtgtccatagaacggggagaataaccagaggaaggccttattgatggatgggcttggcaatgacgtgtcggacctaagaggccctggacgtgggtgcaaattggggcttgattcaccggaaagggcgtgggcatgcttcgtagaagttgctttagaaccctggcttttagagagaaacgcccaaggcgagagcctaatggaggaggggctgaaaaacctagtgggtgtcaaaatttagtccttcgagcttgaaaagaagaggtttgacctagagaactagtggggacgggcccagtgtgcttggagcacgaatggtgaaaattattcaatgtggaaacctcctttttcaaccgattttgccccttaaagtgtgtggtagttcacgaaagtggtgtggtgcagagtgttggattcccacagagtggacctaggtggtactcactaacttcaggtgtgatatcctaaccctaagacggggagaggcatggaagtacagacgcaggctatactgaaagaagaaggctcttttcttggagcccgtgaggacatacagagaaatttaacataaattcccccgggggagctatgaccgacc

SEQ ID NO: 627979 - DNA, 263 bp, Homo sapiens
ggtgtctagaggatcccgaaaacgacatagaggcggaggtgatgagcgagatgggccacgcactccagcatgggtgacagcaagactcagtctcaaaaacaaaaaacaaaacaaaacaaaaaaccctcaagagatcttcatatgaagaccttagcatggccacgcacagtggctcacgcctgtaatcccagcacttggggaggcgaaggcaggtggatcacaaggtcaagagatagagaccatcctggccaacatggcgaaac

SEQ ID NO: 627980 - DNA, 1137 bp, Homo sapiens
tattttatatcttcttcgaaagcacacttatccccaccttggactatcatcacccgatgaggcaaccagccagaacgcctgaacgcaggcacatactatcctattctacacccatagtaggctcccttccccatactcatcgacacataaattatacactcacaacaccactagagactcactaaacattacatactactcactctcattgaccaagcaactatcaaactcctgagccaacaaactataatatgactagacttacacaatagcttttaatagtaaagatacctcttaaacggactaccacattatgactccctaaagacccatgtcagaagccccacatcgctagggtcaactagtacattgaccgaagtactcttaaaacataggcaggctataggtataatacgccatcacacatcatactcaaacccctgacaaaacacataaacctacacccataaccttgaactatacctatgagagccataaattataacaagatccatatgacctacagacaacaggacctacaaatcgctcattgcatactcttccatcagacacatagcccatcgtagataacaaacattctcatccaaaacacctgaagacttcaccggagacaatcatactcatactcgcccacggactataaatcctcattactattctgacctaacacaatcaaaaatagaacgcactcacagagacatcatcatcatctctccaggccttcaaatctaatcccactaataacaaaagacaacatactaaaagacttataaactgcgcatcgaccccaactaatgacctactgggagaacacaccggggcaataccacgaacacacgacaagtatcacagtacaaaggacacacaacaaaccagccattaagatcatataaattttacacacacaaggaagctaacacccccattaacaattatacactaagaaaaaccacatacgttaacattcccatattcaactacacacaaaatcagatctcaaaaaaaaaaatctagcaaaaaacgaacactgacaccatacatctcatagccgcagcatctactacaatacactcccatcatacatcatcaactaacacaactactaaaatacataaa

SEQ ID NO: 627981 - DNA, 449 bp, Homo sapiens
cccccgttccactacgatgaccagccttcatctatttctacttgggtcacgttgcaactcctcctcttcaagatcaggctaggttggccattgtgataggtgtctgctggcggcggctgtcgtatgtgctacgcaggcgcgcgtttctggcgactgttttgcactggagccagcatcaggatttcctctccaatggctgtgctactgcgtggactgtatactcgatttcatgtggtctgtcgacagtaaaacaataatccaaacctcttttctgtatatttgcctgggggaagaacgctgctttagtgtttatttttcaagaacgtttaagaaatatttttacggttgatatgcactaagaaatctctcccagctctcccttttctctttctttccctatacaaattaaaatgcccaccatagagactaagcggccgaaagactaggag

SEQ ID NO: 627982 - DNA, 130 bp, Homo sapiens
tagggtctcaaacacatctttatatacccatgttcataacagtattattcacagtagccaaaaggtgggaacaacccaaatgtccaccaatgggatgaacagaaaatgtgttatatacatacaataaaaa

SEQ ID NO: 627983 - DNA, 1209 bp, Homo sapiens
gcgctaaccggatctgtagtgtgctggctgtacatccaagagaacgatgcatctgatggaggactacgagaatgctggcacagtgagctcgtggagtgagattcggcgtcaccatcccctggttggagggaacggtgatgccccaaaagagtatccagtgagatgcagcagaatgcgtggaggacttccgcgactaccgggcgaggtgcactaatgccgacctaggggtgctgagatagagtgccagtgtggagagtcaagattctaacgcgtctgcagaaccgaagtctgcgcctcagactaactctgtgtcgcgcccgtttcatgaccgctcacgtacggggcaaagacttgtggtcatcgagaatcacttcagagctagagtaggactttgcggcatgttcaccctatgaggaagccaggcgactcgcacgcaaagagggccctcacagatggagtttggcttggtgtagcagagtcgaagtactcccaggaaggagactggtggaagacgggacatcgcaatccagaccttgaggaatgcacggtacagattcccgggccaggaaaggagctcattccctaatgccctagcagaaggtggcgcttgtgaacattgtaggcgggggcaaccggacaagcgcaattgaccttgtagaaggcaaccccgggggaagctaacaagaggaaaacgggggccaccaaacgtgaattccgcgtaatccactccaaaagagggctcctcctgctagtttcgggcggggaaggaccaagccgcacaggcctccggttaccgccaaggaacagccggaacgccttgggggtgtttggaagacagagccctaagctgtaagcacccggacttggtttgggcaaggcccaaggcattcagggcacaggaacaccaatttggcccgacgcccaatgagtgagggcgttggccataacgaggagctcgtggaggtactcctcaaacttgaacggcaacttttcccccttttggagaagtggtttccacaaacacaaaccgctgaggatgggtcgcgcactgcaaacagcaactaccgtggaatggaagccacaaagcgctggtgggcggttaaccccgagcccctcttcgcgggtgggtgaactccccttggggaacgaccaaattaaaggtttaccggccaaggaggtgggacaggctcgctttgtgcgaaagaacaa

SEQ ID NO: 627984 - DNA, 356 bp, Homo sapiens
  misc_feature (9)..(9): n is a, c, g, or t
  misc_feature (212)..(212): n is a, c, g, or t
tttgaactncctgacctcaaatgatccgcccacttcagcctcccaaaagtgctgggattacaggcgtgatccaccgacccagctaatttttgtatttttagtagagacagggtttcactatgttggccaggctggtttcaaactcctgacatccggtgatctgcccgcctcggcctcccaaagtgctgggatgtcagtgtgcgcccccggcncagccagctgctcttagtttacattccccactacggtgcgttaagagtttccctttttcttccattattccttcggccaggcacttgtttatttttttgttctttcttcactgtgggtttttgatttggcattttctctttatt

SEQ ID NO: 627985 - DNA, 632 bp, Homo sapiens
  misc_feature (469)..(469): n is a, c, g, or t
  misc_feature (569)..(569): n is a, c, g, or t
  misc_feature (582)..(582): n is a, c, g, or t
  misc_feature (591)..(591): n is a, c, g, or t
cgttactagcagtcacttatctccgtggctttggtttaaagaccacttgtccacataggtttagagataagagttggctggtcaacttgagcatgttactgacagagggggtattggggttattttctggtaggaatagcatgtcactaaagcaggccttttgatattaaattttttaaaaagcaaaattatagaagtttagattttaatcaaatttgtagggtttctaggtaatttttacagaattgcttgtttgcttcaactgtctcctacctctgctcttggaggaagatggggacagaggctggaagtcaaaacactctgtaattttgtattcttgaatgttctttggttaagagctgcgtgaaagaaattatttttttttcctttttataaataagggaataaaacccccaccttttattcccttcattttcatctacccattttcttggttctttgtgttggnctgtggcagagccaagctgtggtgtttcttttgcccactgacaacttcttaaattgccacatgtacagtgatgttcaaaagtcaaaataactcctccatntgtaaacaaactngtgtaactngcccaaaagcagcaccttataaatcacgcctaacactaaga

SEQ ID NO: 627986 - DNA, 253 bp, Homo sapiens
  misc_feature (5)..(5): n is a, c, g, or t
ctggngctgaaaaaagagggagcagtagcttgagatagatacaggtcaaatggaggtttattccttagtttcttctattctatcctatccttcctatcacatggaagatgaggtgcaaacacgacaacagggaatacggttaaagggtaacaagacgaggtactacatcgatagaccaaggtcccagatgaattgcctggagtaggggcaggagacgatgggctcaataggtagagtgagtcaacgagtgtaa

SEQ ID NO: 627987 - DNA, 313 bp, Homo sapiens
  misc_feature (274)..(274): n is a, c, g, or t
ttttgctctgtagcagtgcagtggcccgatctcggctcactgcaacctctacctcccgggttcaagtgattctcccacctcagcctcccgagtagctgagattacaggcacacccagctaattctttttgaatttttagtagagacagggttttaccatgttggccaggctggttttgaactcctgacctcaagtgatctgcctgcctcggcctcccaaactgctaggattacaggtgtgagccactgagtccagccataagattacttttttngtttgttttagagtaattatccctacttaaagacagatt

SEQ ID NO: 627988 - DNA, 1190 bp, Homo sapiens
gtatatatttgtgaaactttcttatttaaattcttgatttggggttttttttatgtcaaagttgctggatgtacatcttttgtcgtggatgctattagttgtatgaaaattgtgtctcttaaatgatgtgttgttctttaatgtgtgacgataatctttattattgtgggggtaagtgataatattgtacaaaacttgttgtttacattgggggtaatgtgtaagaatttaggttttttaagtcatcaattgcgctgaaaatgtttgtgggttatactttttgtgtggccgattataattgcggtgttttacctctagggttgttatttccctgtaagtgaccgatttggaagcgaaataattgtctgtataatgggttgtccaagtgtacgttatgaatacccttttggggtatccgtggcctgaacaacctcgcatcgttgtcaagtgataatgttactttagacgttgccattcaggaagttaaagaggcaacattggagacctacagggcaccatgcgagtcctcaatgtctctgtatctcaacagtgttctgctgagtatagggtctacattctcagattcacatccattgatcttcgttatcgaagcaagaggatatcatattaatatagtcgttcctgtgcctgagaatctctccacgttattcgtttcttgtatcgagttctgcatccagttcactgggtttattctactgagttccatagttattctcttttaacaagaagtcatatttataatatgaactttacgaatgtcttgaatgtgttccgtggccttgagtcacagaagtaatatgtgttcagatggctgcccaatatgtagttatcatgtaatacatatgctgtgtccttttctgggatgaggaaggcttcaacttctggcacgtgagaactttgtattacacgatcacaggtttagtttctagcctagtcatgcctttagagttttaaatagcacaaactccatgcaacccaacagaatatcagtggtgagggcatagtatgtagaatgttgaaagtagttcaaattgtgaattagaagaatgaagataggacttaatttggaaaaggagatagaaatgagaatgatcagaaactgtggggccttagttacctatgcagtaagtaatcttcttcatgatatatagacttgaggtatgtgcaga

SEQ ID NO: 627989 - DNA, 149 bp, Homo sapiens
agatactggtgatgtctaagctcctaactccagctttttcctctccttctgagctccactagcacgcacccaagtgcctcaaagatacctcaagggctgggtgcaggggctgacacctgtaatcccagcactttgggaggacaagggga

SEQ ID NO: 627990 - DNA, 688 bp, Homo sapiens
  misc_feature (453)..(453): n is a, c, g, or t
  misc_feature (500)..(500): n is a, c, g, or t
cttatgactgcacgagctcacatctagcgactgttcttatttgctgtgccaggtaccaattatagcccctacgggccagggcgagactctattcaagatttatggtatggcacagcgtcagttgagggcctggaccaatacttgacgcgtgagctataaatgtctctggatctacatggggcccactgagagcaccgtgaagaccgctgctgagaaggcaaagtactccttcacggatgccgtggccgtggataaactgagagctgcgcgagatcgacggatcaccattgatatctccttgtggaaatctgatatcagccagtactatctgactattattgatgccccaggacacagagactttatcaaaaacacgactacagggacatcacaggctgactgtgctgacctgattgctgctgccggtagcggagcaattgaagttggtatctncaagaatgggcagacccgagagcatgcccttctggcttacacactgngtgtgaaacaactaattgtcggtgttaacaaaatggatttcactgagccaccctacagccagaagagatatgaggaaattgttaaggacgtcagcacttacattgttggctacaaccccgacacaggagcatttgtgcccaattctggtttgaatggtgacaacatgctggagcccagtgctctggct

SEQ ID NO: 627991 - DNA, 908 bp, Homo sapiens
gtaccttacgtcatggtgagggaagagagagcgcttctctttggcccgcccaggctcaggatgtgcagcctactgctggccatgcctaactatagtcacgtagagacctagcaatgttgactaacgtgacctaggaagagagattctatgcacccatgcgttgtccactgctgacaatcgcagatgtgactcagattcccagtgtaaaattctatgaacggtaggaagcaccaacggggtctggaggctggagtccctggtgcctctgcgcagattccggttgagaggaatctggtacattctagtgctaccataagccaacatcttccagcaggagtcaccaagcatagcactgtacagcgttctgacggtcctaagacgagcaggtcagtcacaatagctggacccagagtttaatgagcagtgactaatttcatgtttccaatgtgcctgatttgtcatgagccttacagacacacagagacccatacagcattgatcttagaatatttcgtcagtctctgatatgcaaaggagcacactgtctctggttcaggagtatctagaatatgttccaccaatgtactcgcagacctagagatgatgctgcgtgtttagggcggccgtcttagggagggctatgcaaacaactcctggattgaaactacgatgacattagagagttcaatcgcggctcctgaaaattaccgagtgaccgtgagtacctagttcatcagcgtcagtaaggcaaccaggaactggagggactctttggctaccgactaaccattaacattggggtctgttctggacattatggacccgggagtttacccctgggccggaattcgcgcgtcgacgcccctggcgaatctttaagaccccacacgcggcgttcacgcccacta

SEQ ID NO: 627992 - DNA, 420 bp, Homo sapiens
  misc_feature (10)..(10): n is a, c, g, or t
ggtgagtacngctttataatttttgtatcacagttttatttttttaagctagctggaaggtgacagtgattgaaatgagcagttttcaaagcttggatcagaaccttaagatgacagttactgcctgataattccctatgtttcctatttagattctttttttttccccttactttcctaaagtaccgtatgcacataaacattgaacacagattatttcctttggtgaggaaaaataattgttaataattattaaaattataaaaattgttagaaacgggagagatggcttcatagttaagaccatgtcatattccaggtgtggtagcacacactctggagacagaggcaagtggatctcttagttcccagtacaaccagggttgcgtgaaggagtcgtgtcccccccctacccccagc

SEQ ID NO: 627993 - DNA, 359 bp, Homo sapiens
ctctagaggatcttatgcgcggtctgaactggggataaaggagaactgggtccagcgggctggtcggacccaaaggagagtctggcagtcgaggggagctgggccccaaaggcacccagtgtcccaacgtgcaccagcggtggttcatgggtgtccccgtggccccccgtgtccttctgggcctgcaggggcgtcccggggtgttccctggcatcactggggaagccggggagttcccggggacaggaggccagctgagcagcgcatcacggcagctagtgtgcgggcggatgcatcagccgaacaaatttgcacatgttcacgaccgggggtaccggaagctcgacattcggtaatca

SEQ ID NO: 627994 - DNA, 494 bp, Homo sapiens
  misc_feature (264)..(264): n is a, c, g, or t
  misc_feature (425)..(425): n is a, c, g, or t
tgattaatagtatacttgtgctaagaagtatagcttgttgatggagctataatgattgttattcctaaagtaaagaagtcgattagatagttactttatatgaattttgttcttcattctaatgatgtcgtggattgggctggtaggatgctgggtctccatgtcagtgggagtctgagaggttaccttatcggctctagcattagtttttattccttcactcgccgttacgaatgccgcctgctgagtatgtgcgtttcccgnctgcgagttcagcatatagccggtatagctatgggaactggttctgaatccacgcgattgcgctgaatgggttcctcatgttggcccgcaattatccgctacagatttggagtctgtttgccttgtgccacatctccgatattccgctggttgaagaccangggtctgtagcccgttagtctatgcctaagaccgaggggcacagtgggcttactgtgtccggtacaggc

SEQ ID NO: 627995 - DNA, 356 bp, Homo sapiens
  misc_feature (153)..(153): n is a, c, g, or t
ttttgtagagacagagttttgccatgttgcccaggctagtaaaatatttctataggggtgatgtggggtgcaggagattgtggagaatagagggaagtaaacattagacaagcaccacgagagggaaatgtgcttgccagctggcgccgctanaaatcccatcttagaagtaatcagggagtaatcagatgttcagaccaagagtctgctgagtgtcttgtgactatatcaatgttttctcagaatcaaagggatctgcttctcttcacaagcctccgctcccctcagaggccaagcttgagaagttttgaaagtttggcatgattccccttattctgcttttccctgtcagtaac

SEQ ID NO: 627996 - DNA, 198 bp, Homo sapiens
gggtggtttgcagcggacacccagaggtgatatcaaggcctacccgacaacagaggagactgcacggcagacagcgtggggcaactgtaaatggggacagtggccaacaccgatgcaggcagcatccccaaagtccagggttcaagcccatcctggcccagcagcaagcccagctccccactcccaccaccacaccct

SEQ ID NO: 627997 - DNA, 170 bp, Homo sapiens
  misc_feature (17)..(17): n is a, c, g, or t
gcgtacgaagggcgcanccagtaggagcggtgcattcccgccttgcaggaggcttcggggctggtctggaaagaggactttactgtcggttactcgcctgagcgcatcaatcccggggatcgtactcacacgctttgcacaatcgtcaaagtcgtgtccggcgacggtcc

SEQ ID NO: 627998 - DNA, 403 bp, Homo sapiens
cgaaaacgctaggaagtgtttctaaaggcataaaacaatcttagagcgaaagcgtataatcactgcgcacgtcttcataaggggatagccatggctaggtttggagatagtaagggtggttggtgtaaatagagtgaggcaggagtccgaggaggtaagggcacagtttggactaccaaacagtgccccaggcagttgagcttaaagttaccgcgagctggatgcctaaagaaaggtaacatatagtataagatatataataaatatccctatattttgaaaccagaaataactagcacctcaaaagtaacccattatcagtaactcaaaggaaacacttcatcaggcaagtaatttcccttacttatataggatataacttccctaataaaacacctacgaa

SEQ ID NO: 627999 - DNA, 859 bp, Homo sapiens
agcgtgggggtccgctggcgagggagcgggggcggggaggcgcctgtctggctcagtgctggggcctggcgggagcgcgaacgagcgacggcgtgaacccgtgggcctgtgtgactgcagcctcggaggtcagcagatggcagtttacgctcttgtttgcccaggctggagtgtagtagcatgatctcggctcactgcaacctctgcctcctgagttcaagtgattctcctgcctcagtctcccgagtatctgggattacaggaagtttatctcgacaatgctagttgcagtctgtgtgacccttgagcaaggttatctataatgtctgtgctgcaggttttatcagtttccaagatggaatagtatatagtgcatatcttcctcatggttgtgagggagtgcatgacaccatagcgagtgctcagttgaacagtcattttctgagtgcttgtgcacttcaccgtattcattgctgaactcgtacaacgagacacttggatggtggattaaccagaacacttagcattctgtgaaaagtttcacaattggagaatattcgcattttcagccgtagtccagcagctccgcatgctcaactttacatacaagatgcgtgaagaccccattcggaaaagacatctggacagctggtccacgagcttgatgcagggccatgctggacagtattctggacgaacattgattgaacgaatgatggaacatgcccacaaagaaaacatcgggagccagtgtggggtccgaggacaaaccttgattacccaagctccgggcgggaacattcgcagagctgcacggatgccagcatggctggaaagaaggggactgggcctgttaccc

SEQ ID NO: 628000 - DNA, 172 bp, Homo sapiens
gcgaggggtgtagtagcccgtaggggctacaagtgggggccttgcgtagttgtatatagcctagaatttttcgttcggtaagcattaggaatgccatggcgattagaatgggtacaatgaggagtaggaggttggcatgagatgttagaaggaggtatgagatgttggaagg

SEQ ID NO: 628001 - DNA, 137 bp, Homo sapiens
  misc_feature (99)..(99): n is a, c, g, or t
agcttcggacccactgcaggtgtactgatcattctatttccccctctatgatccccacctccaaatattttattaaacaaccttgccgtggagtacaanctgccggtggagtacaacctgcctggtggggggatcct

SEQ ID NO: 628002 - DNA, 403 bp, Homo sapiens
ccgctttggactgtgagctgaggctgtcccaggggaggatggtggccacgtactaagatcttggctctccagcccgtgtttcctaaggactccgcagacaaggctttcacctgcgtgttcatctgtgggtcatcgaggctggagcagttcctgctgagtcaggctctgtcctagagtgggcagtcctgatgcagggctcagcaggagcctagtgcagggtgaacacgaagctgcttgagcagcaggaggtggctggaccatcgtacccacgtaacctgcccaggacgatgcctcgctggggctgagacttttttaatccttgtgtaaagaagcgagatcgaggcagagaaacgtaatttgtccatcacatggggtttggaaataaatatattatttgtacaat

SEQ ID NO: 628003 - DNA, 202 bp, Homo sapiens
gagaaatcccactgcataataaacccagagcatctcgaaggcacgcgctggctaaggactcgacttgatatctacccaatgctttcaatgtcaaactatagaaatgcgaagaagccccactaaatgggcggagcacctattgctctgcttgagctatgcaaatgcctaggcagctaattacagacgcgcatgagttgatgaa

SEQ ID NO: 628004 - DNA, 1042 bp, Homo sapiens
agcggaggtgcgaccgcggtggttcctgtactaacacgtgggcgctgcccagggaccgactgtggcgctaggaatactgcgggacgcccagggtcatgtctgaccagaggaggtggcaaggtaatccgactaacaaccagtgtccaagattcgtgtcgaggtcaaatccatgtgcggctgtccttcgtgggtagtagatgcctcagttatttctatttatttacagcagaaagtgaatgtgactagtatggcagtataagagctgaaacgtaggcttctagctgcgatggcatgttaaagtacctccagaagtggcgtggaagcgtgtgtattaagtggatgtcaagacaggaacaagtaataagatggttaacttggaggtcaggcccaatatgaatagagacaagtgttatgagcagatggccttcctttacgtggatcgtgagtggatttgggaagacagtcgcgtcttattacacacgaatggaaatattgagaagattccaaaagggagaagttaaatggacttatagtgctctgcgagaagttaacttctctttggaggatggtaagatcagggcgtgcaataatccacagatacagaagtggagaggaaagaatacaaaaaatggatctagattaatgctgaaaggcagtaagataatcgcaaaaaacttgtggaaagcgaagatgacctatgatctgaatgtttgcatgctggaagttaaacttgatgggaaatcggtgatcgaggatagccggggaactggaatcatacaggccgtatgcaaaattactttacaagatgatctaacctcccagggttacgcgaaagttgggaacttaatcgggaacattataatcccatccggcgtagagccgagctcattcaatagaaacacccgcagaaagaacaacaagtgtaacgcagagatgacggaggaatgaacggcaggagagaactacggcgagacaagcgaactagaagaacagagtgagagaacgagaagcagaggacgcgcaacaaacaaaacacgaacca

SEQ ID NO: 628005 - DNA, 377 bp, Homo sapiens
gaaccagctgcgacacattcgacgttgggtccagcatttgccatggaacaggcatgcccggacccgtatgctctataggatgaagttctcatcttcaaatttcaccccatagatggacttgcaaacagtgccattatggcgtgtgaagtcacccccctgcacacataaaccctggcaatattctgtgcaagcaggacacccttataaccaaatcctttctctcccgtgctcagcacacgaaaattttctgctgtcatttgggaccattgtctgcaaacagcgtcaaaggagacgcggcccaagggctcgccgtcgcacggcactgtcgaagcacacggtggcgttcgctctgacagaactaaccccatcgccctgta

SEQ ID NO: 628006 - DNA, 254 bp, Homo sapiens
  misc_feature (83)..(83): n is a, c, g, or t
ccaaaaaagggggtttatccccgggtttttttttttgggcccccccaaaattcccccccccctttccggtttttttttggggngggggttggggccccgggggctctaaaaggggcccccaaaatcccccccccccggttttttttttttgggggttgggcccctttttggaaaaaaattttttcccggggggcccggccttttctttgttttttggtttaatttttttaattttttttcccccggggggggga

SEQ ID NO: 628007 - DNA, 278 bp, Homo sapiens
gccctgtcaaggtgtgtgagatctttgcatacagggcagacgctgcaccacgtttgcatgtaagctgacgcttggggatataagatacagtacgttctcggaaaccctgatcgacttaaggatctatttgaatgaaagtgtagatataacatacgctaatattaagaatatgaggaaatatcaataagatactaaatacctgaaaccttgcatctatcaagccacagctcactgcacgagcatgaagagctatgtaatctaattgtaaatatttacaa

SEQ ID NO: 628008 - DNA, 365 bp, Homo sapiens
aaagcaagccctctctccagtggaagccttctcacatctcagatatggggtcagcatccctcaaccggggccaggaacacatggaagccttaattgcaacatagtcacgcaggaattatggaatggtccaatgttgaaagatgtttctcatcaacattctctccattcatcaccttggtggccacatcaatgaagtcaaccccaagatgtcttggaaccaaaggggaaggttcgagaagctctcaagttacactcattcaccaagacatcatttcctttgcacaagaaattgcacgttgaatggcaatggccccgtggctgatggtgtgtgtggacagcatcagagtggcatctccagagtgcac

SEQ ID NO: 628009 - DNA, 101 bp, Homo sapiens
tcgccgattcagacgggtgtagacgggtgctttcctaccacggtagagttcaactccaagactgaagtacacaaagaggggtgtgagtgggatgcttgggc

SEQ ID NO: 628010 - DNA, 243 bp, Homo sapiens
taaaatgaataggatactagtataagagatcaggtcgcccttagtgttgtgtatggtatcatttgttttgaggttaggtagattacgtcatatgttgtggtggtgattaggtcggttgttgatgagatatttggaggtggggatcaatcagagggggaaatagcaaactttggaactccagggtaacttgcgggccgggttagggcctagcatttgtgggggcaatgaatgaagcgaaacagt

SEQ ID NO: 628011 - DNA, 111 bp, Homo sapiens
gcctggcaaaggagtaccggtacatgggtgcccatgccggggctgcttgcagagaacacaggagaggccatgcagaatcagtgccagcactcggttcattagcaccaggaa

SEQ ID NO: 628012 - DNA, 530 bp, Homo sapiens
gaagacagggtcgagaactataccgggtgcctgacaatgagcaccttgatacaggttctacagcaccacaggctacggtggtgcatgctctgacatcacgcattttggtctgtgtaagatcctctccttatggcgtgacattgtctccgagggagaaaggtgtagcagatacgatgactaaggcagggcccctggaatctcctcccttagcctcctctgctgggaagctagcacacctgaatcagctggagatactgctggagtccagtgctttctttccgtcaccctggggatagtccttcttgggatcgtggtggcggaggagcctctggcttcccgtaaactgcagtctctctggactggtcttcactttcctcagttgatataaaactctgggtcttggccatgatgtccttggattccatcgctgaagggaccatctgctgcagttaccacagcaactgacctgagcggccccctggtctgtggagatggactcaggatccagtgacatgattctgaacttttgt

SEQ ID NO: 628013 - DNA, 123 bp, Homo sapiens
aggatgtggcagcggaaggactgtggtagcggaacagcggaaggactgtggccagtggaacagtaggcaagggagagaactgaggcaacggaggactgtgggcagcggaaggactgtggccag

SEQ ID NO: 628014 - DNA, 268 bp, Homo sapiens
gtaccctcgaagtctcgaggaggctgtgtcctgaaagggtggattcaataaactccgatagcccgaagtacttcttattttcatgatatgagtccactccattactgcaggaggcagtccagaggatctcgttgctgtgactgatgagggggtgctggctctgcagtgcatacggacagcaggtcacgtgaagcgtcacattgctggcttcctccttcacctgcctgcagtagagcaatcgacacaccaatctcaccgacggcacact

SEQ ID NO: 628015 - DNA, 882 bp, Homo sapiens
  misc_feature (369)..(369): n is a, c, g, or t
aagtgggtcttacagggttgactgctgatgtggaaattgtttgtggacttcaccgttactctgacaagcacaactgtccgtatgattacagaagcagaagctgcagcaaacatcagaaaagagaatccagttgttgtggctgaaaaagattcagagaatataaattacttctgtgtgaagagactgaaacttgtttttattttaatatatcgtaggaaaacattaaagagcagatgcatggccatttttctttgatgttctccgagagttttacattacacttgtctgtcttataattgatattttaggatgtcgggtgttgttacaaggcagaattggaatagaatagaggcctacaaatgtatatgngcactcgccctgaacaaaaattggatgagaacttctgtagcagcacgagtgaaacacacagataataggaacaaaatgtagttcccatgtggcaaacaaaataaatgagatctctgcatgtttgaagaatatctgcctttggggaatgtaatcaaggctataatctttggctagtgttaatgtgctggatttgtttaaacagtggtagcaacgagaagaggactggcagtctacttctaacatagttaaattcacctcttaatgttacaacatatgcttggaagcaggaagaaatggtccataaggaggtcagacctattttcgtgaaacagtattggggcattttaagctggtaactgggccattaaggtgaatagacttgtgaaggtacgttgcactggtactagtaacatatagcacaaaggtggaaaactggagttgatggggacaaatttagtcacggaagttacacagcagtatattaaaaaaccagtgttcacacgtcaaaccgac

SEQ ID NO: 628016 - DNA, 796 bp, Homo sapiens
catagaattgtgtaacagagtatcatgagcgattgtgctcacttagacctgaatatacaacattatgggtctatctcattaatactatatgggaccacgatcgctagagggttttatgtgagtggattctagtttgaacacctaacaagtaaaacatgaaagtactagcttgcaacattagtgcaaaatcaggtatagagtatctgcatcagcaagaatgattcggggggttcagtaggaaagtgttagtaaattatacttcggtagaaattgagatttgattgattctttttatttccaataagatcggtcttagaaggttataagtatagtaaataagtgggctctcttagggttatcaatgatgagagtacggtattaccgaagattagaagcgtaattgttacctaagacaaggcaaaattgaaaacgaaacaaacaaagatataacacatacatgaaagactgtgtgcgtgccagggacactatacggccctgtttgtacacaaggcaattatatgaaaataaactaacagaatgagtgcagcaagggggtctctgtcccgtcagacgagggccacaggggacacgccagctcatgcctccacacatccggagaagtcgcgggcgtgacgggatacgcacacccgcggaaatgcaccccacggccagtgtacctaccgggggggaacccctgcccgtgttgcgtgccaactgccgaagagatgctcgcggcgtgctacccgggcctgatacaaggtactcgcggcgactgtctctccaatagccccgccgg

SEQ ID NO: 628017 - DNA, 513 bp, Homo sapiens
tcctggtgtttccctctgctgttttgcgatgaggggaccatattcagtgacttctgcacttcagtgctgtctcaacgtttgagttaaaactgggatctgactaaagcttaagagaaaagggttggctgtttgccctccaaatggtcctttctcagaaggggcagctaacccggtgcagaaccagcacttaaggtggacagcagacaagagggcaggcctctagtgtcccaagtgcttcctacaaagacgcaaggtgtgctctgagccacagatggggcaaaaccctggtgctttccttcatctcccacgaactcaagggtttccaggtgtaagctaacagttgccacatcacacagacctcgagtttctggtaagactgctggttgacatcagacccaacccatgaaggctggaaggcagcaggcatttgctaaggcagctgatccaggcaatcgttctgctggccaagaagttaaactattttgagcattagaatggaggaaatccggtcag

SEQ ID NO: 628018 - DNA, 520 bp, Homo sapiens
gctcttaccagctgcattctctgatgcctgttgtaccaccagttgcccagctactgatggaacggagacaatatatctggggcctgctggtactttatgcacgcctatcgctgattgattgactccacgcagatgatattcatagagggaacgactggcctatctgtctgactcatgcatttctataccagcctgcacatctacccatcgagtgaagctgcacgcatggacactgtccgtaagggtcatgaagttcaacgggaaaggctattgcaacgagaagtcaagcgaaagtttgatagtgcgccactataggggagaaagatagctatcggttgaaggctgtttccatgctgaacatgatttataatcgagctcacgagctgaacatcttttatctcttatttgagtgcctttagagatctctggtttccccctgtatatactgcatgtgtagtccaatttgtaagaagacttcttgttattctactttattaactatgtagcagagagtaaaaag

SEQ ID NO: 628019 - DNA, 354 bp, Homo sapiens
agacatgccgcacacataccccagacacatacacacaacacacacaggagaacccacagatattccacactagatacacaccagacaaaccctacacacaaacatcacacacaacacacccctcagaaaaaccacacaccatacacacacaaacacaaacatgacatactccacacacattacaacaaacacacgtacacactccccaggtaagggccctctcaagcaccctaaggacagtgcgttgatccccaggccagtcagcccagcgggaagagctgagaagggaccagaggccagtgagggaggaaagacccacagtcctgcagggcgcagagaacccctaagggctgg

SEQ ID NO: 628020 - DNA, 126 bp, Homo sapiens
tgattgcatgagactgcttccattatatgacctaaaatggtatatatcgggatcgcgattaatcttatcttagtggggctgttctatgaagtatctaattgcaatcagtctaaatgcgatcagggc

SEQ ID NO: 628021 - DNA, 754 bp, Homo sapiens
gcgaggcgggaccggcgcgcgctctcgtcggccccgctgtcccggcggcgccaaccgaagcgccgccgcctgctccgtgtccgaccatgctgcgccgggctcgtgctgtgcctggccgtggcgccctggtgcgcgcctgagcccccgaggaggaggaccgaggtcctggtgctgaggaaaagcaacttctcggaggcgctgggggcccacaagtacctgctggtggagttctatgccccttggtgtgggcactgcaaggctctggcccctgagtatgccaaagccgctgggaacgctgaaggcagcaaggttccgagatcacggttgggcgaaggtggactgccacggaggagtctgagctggacccagcaggtacggcgtggcgcggttatcccaacatcaggttcttcaggaatggagactcggcttagccccaaggaataatacaggtgtggagagaggctgatgacatcgtgaactggctgaacgaagcgcaacgggcccggttgcacatcgactctgctgagcggcgcagctgcacgagtccttggtggagtccatcggatgtgggtgtcatcggcttcttcaaggacgtggagtcggactctgcaagcagtttttgcaggcagcagaggccatcgatgacataccatttgggatcacttccaacagtgacgtgttctcaaaatacagctcggacaagaatggggttggcctcttaaaagttgatgaaggccggaaccacttttcacgg

SEQ ID NO: 628022 - DNA, 860 bp, Homo sapiens
agcggataggctttggagagcactctctgtcctgatcttttcagttgagagacttcagctgttcattgctcatttggacttagttcaacgaattttatgggtgtctaccagtgtaaagcgagagccctcagcatctgaatagaaactgaacaggaacacgaagatgattacactacatctgagatggatgacctttcctctgctgctgctcagcctggtgcctggttctatgcatgatagcagtcgagaaagcagcaagtgaacgatacattaagagaacgaactttagcagacgaacgagatgcaatagtgacatggcgaaaaatgtgtgcaagaaaaagcagagcagttgaagatattaagtgaaccgcgatcctgttagttaaaaataccagactcagcatgtccaaggatgatatgtcttccaaattactgacattcagaagtttacattaataatgaccccaagggaaacagatcgggtaactgacaaacgactgttgcaattgacatgacagtactggagaaaagtttcagaagcaaaacgggatcgtgacaagtgtgcgcaatacacttcatccgcgaggatccacggaatgtgactgcgcagcggctccaccaggggccccccaagctgccaagtctgtagcagaatcctgggcataaagctggctgtgaccacgcctaagaaactgtgaacaatacagttgtgccagttcagctaacagtgcaacaacagattgcgcactagtgttgccaataagcgatagtgttgcaccttcattaagagactgatattcggacagtggctggcagggtccatagctctgcattgagcttggtcagatgggggcgtctaa

SEQ ID NO: 628023 - DNA, 333 bp, Homo sapiens
cgtgtgggccacctaccaccgggtcttcgataaagtggagctgatgctgtccgagaaattgaggccgcggtgcacccattcagcaagtgccagaacaggtttcttctgggcttcaattatgaaatgggggttggtgtgtgctggattggctgatatggccagacctggagaaaaacttatacacagctcaatctggtgttttgatggctacagggtttatttggtcaagatactcacttgtgattattccctttttcggatttggagatattacccagaacttaaagcttaagcacacaaattgaggtcctgatcacctgaactctagtgtgg

SEQ ID NO: 628024 - DNA, 284 bp, Homo sapiens
cacgaggcgatggaccaatgcacgtatcccagtctcgtttgaataaatgcgaaaactatgaaaacttcatttctgattctgcatggaaaccgtgaagcttaacagaccactaactgccaaggcgtgtggcacagatgtcacagatccaaactggattacaagggagattgagatatatacctacaggcacacataaatactttgcgaccgcacatatggatcatgcagtactacagaaacatgacatccatgtaaaatctaaccttaagctttttcactcatga

SEQ ID NO: 628025 - DNA, 362 bp, Homo sapiens
tatcatatttcctatattaggaaaatcaaacacaccttcccttgacttgtaaacaaaaataacgtccagggccaggtgtggtggctcacacctgtaatcccagcactttgggaggctgaggtgggcagatcacctgaagtcaggagtttgagaccagcctggccaatatggtgaaaccccgtctctactaaaaatacaaaaattaggctgggtgtggtggtgcacgcctgttatcccaactactgtatgggaggctgaggcttgagaatcacttgaacccaggaggtggaggttacagttagctgagattatgtcactgcactccagcctgggtggcagagcaagactcttgtctcgaggaa

SEQ ID NO: 628026 - DNA, 199 bp, Homo sapiens
tagcaggatcccccccaatagtcgggactgccatctttcttctccaaatgtcacaatgtccacaaaaaatagtcttaagaaatgtccgcgccactgtccattggtgtggggtacgaaacctatgtctacatatcactggcatggaatccatgtgcacacgaaccctgtctgtggaagtatataaatcacacggactact

SEQ ID NO: 628027 - DNA, 822 bp, Homo sapiens
ttcacgactcacgcgtgggagactgggctgtggggtaccggcccggagagcacgcagtctccacagccgccttcctcagggaaatagcgtgaccttactgccctccgtctacagggccttgtacctctccaggccgatatatccacaatttaaatcccagttcagctggtatccagctccagcaagctttagagcgttcacgtacacgccgggcgccaggcgtcggcttgtataacctgaaaatcgcgtcctgtttttcctcatctgtgcagatgggttttgcttcccaccatgtgcatcacaccagtttcggttatcttaaatttggtacctgcctagacaaacagtatactcatacctaaagagattaatatgcacgatctggcaggaggacggaaattaagctggagaccaaataacttgccaacctacagtcgcgtctctcagtcagatgcctaagcagacagacgtgacagagtggacttacctgggatgaagatgcaacccaaccaggtcaaagatccgaccggagggcatgggcatgtgacaaaccacaacaaaacaactctggacaacaacggaaaccaggactacgtgataagggacattggacaccacactattaatgaaaaactccagcaaacactgaacatcaagaagaagaagaaccatggaactaaggcaatcccagatggggagcaaaggaatactcagctacgaatacgcaaactacacacagatcatgcctttaaaaccgcaagcaacacgacatcaagggacgaacatccctgcgacagaaacatcacaagccagtgacaacca

SEQ ID NO: 628028 - DNA, 743 bp, Homo sapiens
actttctggtaaacttacagtaccgccgtctctaccgaagcatgaactcccagtatctgaagctgtatagtcacagaaataccagatcctatgatataatggagatgtagacatgtgctgcaatttcatggcgggatgagtggttggtggattccctcaagcagaagatggcaggtgcagcgccggacctggtttagtgaacgtagggggcacccgcggggagcaggatctgccggctctcgtgaaaggagttctcccacatcgcctttctcacggatcaagggcgccggccacaataggtacccagccgagaaaagcacccttcagctgtcattcatgcatgttctcccgtcttcctgagacaaagcagcacaagtacgtgatgaccacatgcaacccagattccacgtggccgtgattgcagtccgcctgcccagtcctctcccgctagggagaagtcgctcttctaagcaaagtgcccctgaaggcccgggttctgccgccaggaactgcccccttcccagagccctgtacaatcccagactggcccagggtctccatagacagctgggggaaagttagcactttattcccgaagcagttccttgaatggggtggctggcccattcctctgcttaaagaatgccttatgatgactgatccatcccaggaaccaaagagtcaggacagccaagggagtggtgacggtggactgataaatgtatggaataatgggtaagtcc

SEQ ID NO: 628029 - DNA, 130 bp, Homo sapiens
tggctatcagtttgatatcttgctgtcaagtttgttttaccattaacatttattgatgggatggataaatacagattgagaaacatacttgacagcaagatatcaaactgtatttatccatcccatcaat

SEQ ID NO: 628030 - DNA, 132 bp, Homo sapiens
agacaaggagagtccctgaggactggtgaagcaacatgagcagagagtggagagtcaatcgagtgacagcggtgagtcaggtggtgactccctgggtgcctggacactgagctcccgctgaagtgtgggctt

SEQ ID NO: 628031 - DNA, 985 bp, Homo sapiens
tcggggcttgtcgaggatccagctgagctgatcgaactccgatagctatactctaatcgcgcggtgcctctttagggtgcaggagaaatcaagactttcacagcatgtgtttgcacccatggcaccgttatctcatattctgctcagagctaggactatttttactatgtagacctatctgatgagtgctcactaactatgtgcttccgtaccatgtcccactcgggtctaagtgggcaagtttagttcacatctcaacagtcacgatacacgtacacattggactctagcatagattctctttcacacgatttcctttgaggcacgactctgtcattctagctagataaactagcaaaggcttctctcaccaatgaggtggcatatactattcgcaaatccgcgtagggcgcacgtgcgaatgcttagacaagctaactgtgtatgtgaatacatagtgaggcctgttatagcccaaatgcgtgcgcaccgatgggtgaccaatcgttggcatgagacaactctagtctctgggcccaagcttctattctggccattggcatcgcctgcttacaaaacgataaagcatagttattaacgcgaggaacgtttaggtgcctaaaaactggcattgtggtccttttcgtaggttagtgaatatgaacccttctagtcgcaaggaaacgattcttctttcttttgacaccttcatcaactgaaattgcaacgagctcatgcttactgctttaacatcatatgcctggaccacgggtttaggaacttccttaaatcctcggcgttcccactaggaaagtcgcctcgtggggctggtaacacgagcatttctaatggtacaataccaacgggtaagggaagactctcacctttaaaaactttaccagggccatctagcaattaagcacagggggtctcagcctggtacaactggttgttaccgcaccgtcttaagggttttcaatggtac

SEQ ID NO: 628032 - DNA, 1398 bp, Homo sapiens
  misc_feature (814)..(814): n is a, c, g, or t
ggcgtgtttaccccctctcccatctgtgagatttttccccagtcatgcttgtgaggtattgaacctgtcacaacacgaggctcattattgccccgttgcgacccacctttcggacaacgacgccgttattaaatgctccttcacatgggagagatggcccagttcgaacttggtatctgttcggtctcttttaccagagggaattcccgtgctggaaaacgccatgaacagggccaaccctgaaaagtgtgcatgcacaccgctacagattggtgactttctaggacaagataccttctcgggaacctgtatgcctctaacaaagcctttatctatatgccgtcggtaattaccggaaccatagactttggagctcatgcctcaaaatcctattcaatcgaagttatccaatcactcataaaatgtaagtctttgggaagggcctttcctaaacctggttaacttttgaaaaaaaattcagttaacggggtgataaaaatttaaaagggggtcttcgtgaactacttggaaaagccaaaactttttaagagaataggaaaatgaacgaatataagccaaccaattgctattggtcccaaaggatatcttaatatcctagtactctaaaggggagacgtaggagcggaaaatttaaaaagtattgctctccacgggaaggatgtgcaatcctccggacattgaaggtaaagtttgcctctcaccgctggagtctttgacatggtattgttccttcctgtcccgtccaataccagctagtatctaactttgtccaccgataatagtgcgagcatcntcacctcgtagtcgtctgctctctgagttagtcttaaatatgtgcgagggaaggaatgcttccgttttcacagataacagcttagcacagttagaaacccggctcatccactgataactgctgtaaacactagttaacaaatgccctccgctaaagtagtgaggacttattgtaatatatcctcttggagacaacatgtggtcttcaatgctcctaccttcgccctccagtacaatctctcagtgacaatcctgaatctacttcccactgcgtgcatctttctattgactaatttgaccaaatgcacaggctctgatacacaatcaggaatgcagtattcgaaccatgacataaactcctattttctaaaggagtagctgggtcatgggtctatggcatgatggaacatagtaaatggatgcacacaaattcggcattttaaaagtgataaactggtatggatttcttcattagataacatctgcataatggactgtataagctcttctgagttcttcacttgtactgcataatgggtcagcataaaaatgaaggtttgattaggattaagggccatgacattt

SEQ ID NO: 628033 - DNA, 258 bp, Homo sapiens
ctttgtgccccttgtgtggactgtggtctgtactaatcgtgtgtaactgtggtgaggggcttgtcctgtagtgttagtctgtacccaggtggggtctgtgccctgcagaccgggtccctctgtatttatcgctgcctgaatgcaacagtaatttataatccaggacaaatacagtctgggcgtcactatcctagcatctcttcctcatctatagtgtcaacaaacttaggggaggggagggcctggattggcaccccc

SEQ ID NO: 628034 - DNA, 293 bp, Homo sapiens
gtgcttagaggatccccaaagcttagcaggagaggagagccagagatagttgacaggaagctacaggttacaacagatttgtgaactcagccaagcacagtggtggcagggcctagctgctacaaagaagacatgttttagacaatatactcatgtttgtatgggcaaaccaacttcgacggactgtattttgtgactaacttgtataaccaggttattttcagtttcttgttcttgtggacaagtgtaacagcattccaacacaagggttttacatgtagcaattttttttt

SEQ ID NO: 628035 - DNA, 155 bp, Homo sapiens
acacttatatcgggaggtggaggttgcagtgagctgagatcacgccactgcactccagcctgggcacagaacgagacacggtctcaaacaaaaaaagtaaaaaaagaaaagcaattagctgctaattatgtgctactataagtttgttccccgct

SEQ ID NO: 628036 - DNA, 482 bp, Homo sapiens
tatttttgaaatggcagaaactttggctgggcgcagtgactcacacctataatcccagcactttgggaggccaaggcgggcggattgcctgagttcaggagttcgagaccagcctggggccaacaaagtgaaaccttatctctgctaaaatacaaaaaatttagctgggtgtggcggcatgcgcctgtaatcccagctacttgggaggctgaggcaggctaatcacttgaacctgggaggtacaggttgcagtgagctgagattgtgccactgcactccagcctggtgatggagcgagactttgtctcaaaaaaaaaaaaatttacaaaacctttatttaaaacggtgtgtttggcacatgcctgtaatctcagcactctggaaagccaaggcaggaggactgttggaggccaggagttcaaaactggcctggtcaacataatgaaactccggtctctacacacacaacacataaaaacaca

SEQ ID NO: 628037 - DNA, 286 bp, Homo sapiens
cgtactcatccgtccagtaaaagcaaagaacatcgcgcgcttaatacacagaatccgcgtgaacagaaggcctccatctctactctcgattgcagcacccgattaaagccttccttggcgatgcttgtgatctcagtgattggcttgctgtgcagggagcagctggatctagaccgaacccctggtgtttcagtaccagttccagccgctggctgtattcaaacatggagtgacttttcactgggtaccatatgtgactcacgggagctgcatggccaagaaaggt

SEQ ID NO: 628038 - DNA, 140 bp, Homo sapiens
ttaaggcagctaagagtagtccttatcttgttctctgattaaccagacttgaacgctccagtgcgagcagagtgctgggggtggattccactgccgaaccacggcagctttgctttactcttcatcgtggggtaggaggt

SEQ ID NO: 628039 - DNA, 134 bp, Homo sapiens
gtcactcagggatctatacacaccataccccaaagtacaggcccaaactccaccggggccaagtctatctggctcaaagtcaccatgtcccccagagaagtctaaagaatcactacgttcacagttgccctgga

SEQ ID NO: 628040 - DNA, 94 bp, Homo sapiens
tggatgacccccccttcccatgcttccttgcattaggctttttaaacccggagccccttcaaacttccaataaagggatcattttttgctttta

SEQ ID NO: 628041 - DNA, 180 bp, Homo sapiens
agcggccggcccttttttggtagaagagggtcttgctatgtggctcaggctggtctcgaactcaaccgatcctcctgccttggtctcccaaagtgctgagattacaggcatgagcatcacaccgggcaacggtatgatctttggtgtctttggagtttggttcccatcagtgtttccatt

SEQ ID NO: 628042 - DNA, 246 bp, Homo sapiens
gcctacatagtgcggtcgataggctcggtggtcggcgagcgtatcgccctaggcgaggagaaggcgctggagcttggctagccccttacgtcagcttctaccgccagcgagggtgcgcgcatacaggaaagcctgttctcgctgatgcagatggccaagacctcgagcggcgctcggcaagctgcgcgccaggggcctgccgtacatctcggtgatgacccacccgaccagttggggccaacatgg

SEQ ID NO: 628043 - DNA, 253 bp, Homo sapiens
gtaacagatgatttagtttgtttggtgtatacacacagaccaagctcaagatgtaaagaagattgagagcttccacagtcaactaatgcgacttatggtagccaaggcagcccgccatgttaccatggcaactgagtgaatggtttgacatgagactttgtcgtgtacttaggagtgcatatctttgacttagagaagtgttggacagacgtactttatgtaactcggtggctgttcagcagcttagaggtca

SEQ ID NO: 628044 - DNA, 351 bp, Homo sapiens
acggcgcactatccttcccacaaacgatggtgttaaagctagggtcaggatgtggagcgctgcctgggcctcttcctattccgatggttataggagaatagagactacttcctgtgaccacaaatctttttcttctgttactcatttatgttggttttaaaaggagctttggggccagagcttacttgttggctcctacgagagcgcctccatttatgaactcggtacttccactactttcctctttgggaggccccctcggaaaaccacacctgagagttgcgtttaaaacccgcatgtaggtatttgtacagtgactttttccctccacgttgttcgccattaatcacg

SEQ ID NO: 628045 - DNA, 941 bp, Homo sapiens
acagagcagcagagtaagagcacaaaacgagcacctagtcttatctctattactctatgaacatgtctgtcactaatattggtccactccccgctgaatgtggttgactatagacgggtgctctttgcgcctttatatcaccggtgttcgccctctgtattcggaggcccccccgccatgtatccagctttgcctgtaccgtgtccaaatgcccgtttccggggaattaatcaggcttacaaattctgcggtatggcgccccgtggtgcttgatatccacccacataagggctaaatacattttcgcatccgggtgtaccacaacatgactggtgccggcccaatacagaggtcaccctcggacttttaaaaaacgtcgtgtttccccccaatattgtggcccacccgggtaggtatcctgtcctcaaagtacaaaaatcgtttcccgcccccgcaatggatgcgtgccacccccgactgtggcgcccacgcatgggatctatcctcccccactccttaacacgcctgctgaagaccgtttctcgcagaaatactccggtgaagacacttctaccacggcggcatgtcatgacgcgcacaatggtcccaagaggttaaaatttattacttccgtcctgtaacccaacgcgagagttgctaaattatgtttatgaaacaagaggctgcgaatatctggagatcttcatctctttaaacattgtgtggcaccgtgtgtcaattacctaaatgtgcgataattcctggtggaataatttctcttgggagggagagcttcatacattcattacaaacctctgtctcaggggcttaggagcccactcatatcgccagatacaagaaaactacacgtttcttataatatgatcaggccaattagctcccttgtttaaccgaaaaaaaaacctggaaaacccacaaaa

SEQ ID NO: 628046 - DNA, 1440 bp, Homo sapiens
  misc_feature (822)..(822): n is a, c, g, or t
caatgtggggtgtaggttcccggcgatgtttatccgcggggggagtgtatgcattcccccgattattagtttcgatggccccccgccattctctgtttcggtgattggatttatagaaaatcctttcatgggggccgattttgttgtcctcccttggtcttcgtgcgtggcgtcttctttggccacgttgtgggaggccccccgccgctgttttttgtgcgcacaaaaatattgggggggaaacaatttatatggggtatagggccgccaccaaacaccgttccccggggcgccctttgggtgatataaaacccttggtgcttggtcccaccacagaagttagagaaatctcttatagggtgcccacagagctttgttgataatatggttggctccccaccgcactggaggacccgccccctgttgttgagagacgcccccctgcgtgggtagaaagatgtgtagaaacatgtgtttgaagatgtcgccacgaaaggagaggggaaacccaggccttcctcttgtgggggaaacaaatttaagggggaagaagaacaccccttctggtttaggaaggaaggaaggttttagagaaaaagttgtttggaagcgacgcccccacttatgttatgggcgtcgtttaaaaggcgacacgccccccccccactttttataagaaaaagccgtgttcaaagcgtctaacagccccctctttcccttgagaaattctcccccgacaactattgagcctggaagcgtccgtcagccacccccaacttggggggcccccaaatcgtagtcaccccctattaggaagaggancgtaaaatggttatagataataaagtatacacactggaaaccactttttcctcccgccaactaaggcctcggcgtccacgaatttaaaccacctgagaactgaccacactttacaccgccccccaatattctaccacacttccaccccacccaggtcacttatttaaccccccctgtcacaaccccaacaccacgggcaacaggctcaataagggacagggttataaaaagagtataaaggagaactcggcccaaattcttaaccccgccccggtgttagccccagaacactcaccctttagcgcatccacccagttatttagaggccaccgcctgccccagtgacacacacatagtttaacaggcccccggtgtacccttaaccgtgcctaaggtgagcgcataaatccacattgttcccttaaatatagggacacctgtatgaatggctcccacgagggttctaactgtcttctttacattttaacccagtgaaattgacactgccccctgaagaggcgggccatgaccaccagccagacgagaagaccctatggagcgctttaatttattaaagccaaccgtaccttaccaaccccccggtccttaactacccca

SEQ ID NO: 628047 - DNA, 278 bp, Homo sapiens
cctcctgggttcaagcgattctcttgcgtcagcctcccgagtagctgagactacaggcgcccgccaccacgcccggctaatttttttatttttagtagagacggggtttcatcgtgttggccagaatggtctctatctctcggtgatccgcccgcctcagcctcccaaagtgctggggattacaggcatgaaccaccgtgcccggcaattctagactttaaaagagaatgggtttaagagcatttagagaaagaaatgtaaccatagataccaacatg

SEQ ID NO: 628048 - DNA, 533 bp, Homo sapiens
ctcacccgttgagattattcagcagccagatatacgggaacgataatcatgatcctaacaaagctttgtactccgtgctgtctatgtctcccaagatacataatactgtaaaactcaaaagctacttacccatggcaaataggacgaagctcagtatcggctcctcccaccataacccccacttcctccactgcctcctggaccatagtttcctatcattgtcggacacagcaagagaacacaaacttactctgctttcccatgatcaggctaacactacagctgattctattctatatccatccagtctttaaaacaagcagatcctaatccttagcagacagtcagcagaattactcaggagataaattcactcgggttcatagaccacttactactttcgcgactgaccctattcttttaaatacagggtcctttcaccctctcatcctcatttggactgagtcagggattcacttacaagtacatcacgcccaagacacagctagtttactcctagctgaataatctca

SEQ ID NO: 628049 - DNA, 261 bp, Homo sapiens
gccagacccgccacatgctagtgagggccagaagctgttgctacactatgagggtcgcggcaatccagtcccacagcagcacctatgggagtaaggcagggcagtgtgccaccccctgcaagatggacccaggcagagtgccctgatcttccctcctcctcaacaagagttcacagtggcacctacggctgcacaggcaccagcatcatgggcagctacaagagcctactagcaccctcaatcagtaatgaccccagttcc

SEQ ID NO: 628050 - DNA, 687 bp, Homo sapiens
tatgtaaaaaacaggctgactttaatttccctggcagagcatctccctcgggaagaagcacgggagccccaagtcatcgatttaaaagcaggagaatccccttgactaggttggggtctgagcccagaggcagggcctaaggaggtgcagagactaggtgccgtggagtggtgaggcaaggtgggggcctggagggacagctatgaccgttgaccttgcgagacccgtggctccaccttcttgcgagtggaacccagcggtgcacgaaggggcacccctgtgaggcgcaaaggcacagtaacagtcgccaggggatgtgtgtcagggcagatcctttccttctcaggaggctgttgacgggggagagtgtcatgcctctaaacagtgaacgggacatgattgacttccataccccaatcttccttgctggtgagaagtggaccttggagtccagggcgctgaaactcaaaattagggtatggagctggaccccagagaataaagtctcaagtagtagaaggggcatctccttcagtccatggattcgggcctctggcatgatgcagccagggccctggatgtaaggattccgaactcgcgggaaaggaacaacagggtttggtaacaagaatgaagctctcaatttgctccgcaatctgtgggccacaaaacaacgggacatacaag

SEQ ID NO: 628051 - DNA, 919 bp, Homo sapiens
aatgtgggtatctctctgtgggcctagtatccttgcgtggtgctcactgtgactgcctggtcccgcgtttgtacccctagcgcttcgccagaacgcgccctcttgggggaggccgaatttgtgcaaccataaggttcctcccggccgctaaatgcccgtttctccccacgccgggcattgttttgacacgcaggggtttgatgacgacaccgcctgccaaacactcgtggcgcctcttccttgggggaggttccccttggatcctcctggtggggaaaggacaagcagagaacagtggtggtgtgagaccccgtggccccagcgcctttgtggcaccacccctgcgagcccccaagggtgttttggcaacccccttgggggataaccccccaaccccctgagagcccgttgttggggacccccaacacgggacggcatcggcgcaacaaagagccctcgcgtgccctctatggagcggccctgcgtccccctcggcgaagaccccccatggcggccaccttgtcgccccccggagggtgagtcgacgccccggtgcacaaacaggtgccaccggcgcgagtctccttagagagactcagagccctggcggcaacatgaggggtgcactttaggcccccccatctgggcaacaggtcgtgccccgatcctgccaggagggacttcaatacaaaaagagggggcgctgagtggtgagaacacaagcccgcgccccccccacagggtaccttcaagcgagccgcagtttcattgcaccgcccccaacatttgcaaacaacaggtcccagttggtcgcccagaaatgccccacaggagacagggggaatcattttgaaaggcccgaggcatcttgggttctccctaaataaaaaaaacttatttccccaccccaaccaaaaca

SEQ ID NO: 628052 - DNA, 125 bp, Homo sapiens
tcgtgttcctttgtctgagtccggctatcgggaggtaagtcaggagaattgcttgaatccaggagcagagatggactccagcctaggcaacagagtgagaccctgtctcaaaacaaaacaaaaaa

SEQ ID NO: 628053 - DNA, 264 bp, Homo sapiens
tatggggtccaccatacatcacggtagatccaataaagcaaacatgccagtctggctacatgtcgcaccaataaagaactggtagtttttgacattagcaaggatgtgcctgatttgtactgcagcccctgtcataaaaggttatactctttctggtctctgttcttcaagtttaccctttgattgacttcatagtaatctttgatgtacttcttgtaggctactatcgtgaaccttgttactttcagggatggttctagatag

SEQ ID NO: 628054 - DNA, 965 bp, Homo sapiens
gctacaccagagttggtggctggacctcctgcgacttccgagttgcgatgctgtacttctcttatgtgtttgggcggctcggcctctgtcgagtagatgtgggcagctggtcgggatggccattcggggctcagcacagcaacgcagacccagactcagactggggaagcaagactagtgggactggacaggccaggagagccgtgtcggacagtgatcctgagatgtgggatgttgctgcagagggagaacggacaggcatgtgtcgtggcctggagctcattgcctctagtagaaacttctgcagccgagctgctgctgggaggccctggggtcctgtctgaacaacaagtactcggagggttatcctggcaagagatactattgggggagcagatggtggtggatgaaattgatctgctgtgccagcgccggcgtcccttggaagcctttgagctcgtgaatcctcgcaccagtggggagtcatgtgtctcagtcctattccgggtcccccagcctggccgtggccgtctacacagcccttctgcaaggctcacgacggatcatggggctggagctggccgatggggggcatctcacccacggtgctgtctgacgtcaagcggatatcagccacgtccatcttcttcgagtctatgcccctagtcaggctcaacccccaggactggctcattgactacaccaggtgggactgactggtcgactttttccggccacgggtcattattagggtgggaccaggctatgtcgctcattgataagcccggtgagagagtggctgtgcgtcccagcccctggcggcgcatggccccccctggcctggcgccagggtcctcccttaacgggtctccacaccacaaatcgggcggggctcacgcaggggggccccgcggccactgcgcgtttcccgggccacactttgggcccccgtaggggcagcagcc

SEQ ID NO: 628055 - DNA, 1197 bp, Homo sapiens
gggatatcgggcacttgccaccatgcctggctaattgtcgtataattgcatctctctttcttatcttgttcttattttattatttttgagacggagtctacactctagttgcccaggctggacaccaagggcgcgatctcggctcacgtgcaacctccacctcccggattcaagcgattctccgtgcctaccagcctcctgagatagctggaatctacatgcgcgtgtccaccacgcacagctaattttatataattttagtagagatcggggtttcactgcgttggccaggatgatctcgatctcttgacctggggatccacccgcctgggcctcccaaagtgctgggacttacaggtgtgagccatccatgtcctggccctaatctcggggttcttcattagaacacacgagtttcaccatgtgggccaggtctggagaattgctgtaactcgttttccaaccgggcccctgtccttcctctctctggcctctccctcccatacgtcatcgtgccacctagcagccagaggtgatcctgatactctgcggccttatactttccgccgtccctacaggagcagtacgcctgttctcaaactcccgacgatcttacaaccaacacttttcggtcataccagcgtcatcccaatatcacgcgttccattcgcgccaacttcttacaacactccaggccacccagcactcactggaccatcacgcgaacccacgatcccacctcccatttcacacactaccacgcagcaagttgcctcgcatcatgacgctcggtgctcagcaacagcacgcgtcacgctcttccactaacacccccgcagccccgcgcgcctgccacaaccggacaccaacaccacagcctctgacacaccactaccaacacaccaacttcaagcactcacacctacgcctcgagcaacccccgcggcaccccccccaccgcgtcacttctcagcatctacatcatcccattcctcccaccaacccctgctcctcaccacgtccccccccccacccccccacacaccccccaccacctaaacctcctacctccatatatactccctcacactacaacccccacccgcaccaacccccacaaccccaccaaccaccccacaccaccagcaaacacacacccacatcacccccccgtaccaccacctcgacctccacctc

SEQ ID NO: 628056 - DNA, 266 bp, Homo sapiens
gtgtggtattaagatcgggatgatgtcgggtcggtttggccgggtactgtcatggcaggcatgcagtggcatgtggactaacatgcatggaggctcggcaggcctgaagtggctgacggagcaagagtgatggaacagctgggaacactgtgaagctggccccggcgggctccttcaaattccccttcaatgggggccttgtctccccaaggcccctttcaacccccggcaatcttccccttcaacccaaggcccttcccaaattg

SEQ ID NO: 628057 - DNA, 685 bp, Homo sapiens
gagcggggtcttcccctgaggccgcgcggagctgggcgactggggcgaggactcgcgcacaggtaattaaccagaacaggatcgacacgtgttctctacagcccgtccatggatcctttccgaccatcgttcaggggccagtctcctatccacccatcccagtgccaggctgtacggatgccaggctgttggccacaagcttctaaacctttggacccagctctgggcaggggagcacctgcaggcagaggccatgtatttggaaagccagaggaaccaagcacacagagggggccagcacaaagggagtctgtgggtttggtctccatgttccgaggcctgggcattgaaacagtttctaagacccctctgaaacgggacatgcttccatcaggtagaggcattttaggtcgaggcttgtctgctaatctggtacgcaaggacagggaggaactctctcccacttatgggatccaaaagtgttggcggctggggacagcaagatggcagagacctccgttggtaggagtaggacgcttggacagacgggagttcagatgcgtctttattaccactgggaacgagcagcaggtggtatcagcagagaagtggacaagcctccctgtaccttcagcacaccgtccaggggtcccccgcagctgtccatcacaccagctctgcccca

SEQ ID NO: 628058 - DNA, 413 bp, Homo sapiens
gtagagagagagagagagagagagcgagagcgagagtgagagttagacagagagagagagagacctagcgcgcgagatatagttccgagagagactgattccaccttctaccccctccttctattcctcctcctaccccctcttccctctgcccactgacttctctcactcttctcttttccctgtcacccgtgtcttccacccccggttccggacttgctgcctgtctccacctcttcgacccctcccctctctgtatcatcgttctcctcgttatcttcccgtgcttgcgtctcgcctcccctgcccctctatatcttcatttccttccttgactcttctctccctttctactttccccctcctccctctagctccgcttgttcctttctcctttcgtccactctgctccc

SEQ ID NO: 628059 - DNA, 405 bp, Homo sapiens
  misc_feature (208)..(208): n is a, c, g, or t
  misc_feature (337)..(337): n is a, c, g, or t
gaggagagtttccgggttagtgcattcagcggaccgatgataattttcccggctgccttcatcttcaggttcgaccctttagtcacagcatggctgccactgcaccgagtatcacgtctccatgtaactgtagccagagtaaaacagaaacattaagtctgagagtctgtggcaccagctagttgatgggagagagcagacccctttnctggtggccatggcactgggagacgaggagggtacctatgtcctgcagaggtcatccttttgtccatgctggttatccctggcctcaggtggtacgggctacaggaagatggcagagtacatgcctttnttcctcacaaaccactgtcctcttggtggacatatatacaggtgtgcagatggttcaggccgtgggga

SEQ ID NO: 628060 - DNA, 308 bp, Homo sapiens
gattacagacatgtcaccactgtcgcctatcccagagtgactttctcctaatcattgtctttgtttccattcccatttgctcttcatattctattctttattcttttactgtgtttgcatttaaagtgaccacagatggtcaacgattccatgacttgggagttttagggagtggtgaaatatttgctttgctagataagctaatatccttattgataagtctgaatttcagggtgaaaagttatgatggtggtgtttaggggattggcatttgtgtatgctgacattagtagtgatttgccgaggtg

SEQ ID NO: 628061 - DNA, 353 bp, Homo sapiens
taaattgtggcaagctttccaatgtatctcatcaggtgcacccagagagccaaggccaatttcctgggaaatctgggcaaagctgcgttctgaaaccaagggcacatgtcccaacagctcatggcagatgtcaggttcgggggtatccatgggcttggatccatgtctaatgtactgtgtacagtggaagcctcgaaaggccaggccacccaagaattcccgagaggaaacgcaggccagctacaggtcgaaggcggaaaccagtgcaagtctgcaggacttgcaagaagtggaaatatgtgagtgtactcatagcgagcatgggttttacacaagcacttcagagtcttgct

SEQ ID NO: 628062 - DNA, 1151 bp, Homo sapiens
  misc_feature (30)..(30): n is a, c, g, or t
  misc_feature (232)..(232): n is a, c, g, or t
  misc_feature (248)..(248): n is a, c, g, or t
  misc_feature (262)..(262): n is a, c, g, or t
  misc_feature (271)..(271): n is a, c, g, or t
  misc_feature (279)..(279): n is a, c, g, or t
  misc_feature (327)..(327): n is a, c, g, or t
  misc_feature (359)..(359): n is a, c, g, or t
  misc_feature (370)..(370): n is a, c, g, or t
  misc_feature (378)..(378): n is a, c, g, or t
  misc_feature (402)..(402): n is a, c, g, or t
  misc_feature (504)..(504): n is a, c, g, or t
agttgttgcgtagtggtagtggttgtgtcntgtctgtagctggttctcgttgcgctgatgtgttgtgctgttcgttggtagtacgctgtgtctgtcgtgggggtggtgtgtggtgtagttggctatgttgttgttgtgggtgcgtgtgcgggtagctgatgttgggtagtgcgctgagttgttgcctggtgtgctcgtctagggaagttgtcgcgtggttggtccggtgtcnggtggccttttctccncggcgcgggtaatnccccccccnagttcgtnggggggggaggaaacgcgccccagattgtccgccgccgcacgtacttnggcctcggggtgttttaaagcgcccgcgcctncgtcccgcgtnatggagtnttcttggtttaatatccgcgcctntctcactcttatattgggggcccgctatcttttctcccgcccacgccgggaatcgttcctgccggctcgcccgctgagagtctctctgctgccggagggtancacgtcccccgccaataccttctggttttgcgacagctcactactatctgatgttattccatttcgccggggtcccaggacacatatttcccgccgcggattttctcggccccactttctcgcgccccggggggaccaccacaatccaatgctgcgctggaggtctctccttcgaggaaaggaccttattatctctggccggagaacctcctttgtgcagccacgagatgagtctctgcggcccccataaacgctggtggtgatccaaggcaccttctcctcggggagaagtgggtctcacaactcacaggggcgccacagaaccacttgtgacacttgcctgtctacatgagggccgaagagtccactctccctccagtagtttgttaactctcctgaaaagaattgtacgaaagtaatgtctggctggaaattggtaaaagaaaatggaggtacaccgtcaatgagagagcacccacagaagccctcacctgactggatataaaaagctgctttgcgttgtaaatcttttaaacatcaatactccaatcctgcgagtgggagtctctcttcgaatgctgtaggcccttcccctccccttattcccccggggggtccccccaaaaaattcccttttttgccaaaaa

SEQ ID NO: 628063 - DNA, 136 bp, Homo sapiens
ttgcaggagagagaactgaagaatacaatgaataaaatgaaaatgcaagctgggtgcctgtggcggactccctgtaaatcccagcactttgtggaggcccgaggtaggtggattggcctgaggtcagcgagttccg

SEQ ID NO: 628064 - DNA, 550 bp, Homo sapiens
cgacggtcgcagcaaatcgagctgctgctgcggcggctgtggcggcggcagcggcggtgactgaggatagagagccacaggacgaggagctgccaggcctggacagccagtggcgccagatagaaaacggcgagagtgggcgagaacgtccactgcgggccggcgaaagctggttccttgctggaggagccacgttagcaggagctctcgaggacgatcagcctctgtgctcacatgccactcttcaatgaaaactggctcagaggactgtgaggcgagatatgtgctgtccaagtgcttggcattacctggtcagctggtatggtctagagcatggcagcacccatgaacgcaagtcatagagctgccaacatccaaaggtcgagtgtacccagtagaactgctgtgtcggacatgatgggcaatctcacacgttcagcagctacgatctatggctattgcgccgtcgggacggtctgtggagccggagacccggttgggcaaatcaaagtctggtagtgttgaccaaataggtctgagggctgaatgg

SEQ ID NO: 628065 - DNA, 229 bp, Homo sapiens
gttcctccacaatttcctacacctgctccccccatgatcagtacacattgttcctccactattcctatcacctcttgctgcatgatcgtgagttccaccacgaatgtcatttcattagctacctctggcatgatcacagctgcatctccatattatggattaatcacgatggttccttctgaaacacaagagtaacaatgaaatgtcccccaccaccccactagttatg

SEQ ID NO: 628066 - DNA, 339 bp, Homo sapiens
ctcctcctccgggtttcggcttcggccatttctttttttctcaaggtgcaatgaaagccttgcacgactttctgtgttgtccttctggtgcccgcgagtgtctctaaagccaagtttgattcttattgcttgtggaacaagttaccttgctggtgtagcaacacgtcaagctcttgaggagctgactgagttgcctgtgatggtggaactagcaagtgacttcctggacagaaacacaccagtctttcgagatgatctttgctttttccttagacaatcaggtgagacagcagatactttgatgggtcttcgctactgtaaggaggaggaggaattgct

SEQ ID NO: 628067 - DNA, 111 bp, Homo sapiens
cagtttacagcgtcagggcagtatacagcgggggtggggcgtcgccctgcattttcagggcagtttacagcctcatggcagtttacccttcttagctttaaactgggggat

SEQ ID NO: 628068 - DNA, 501 bp, Homo sapiens
cggaccttgattacgaatgtttcagtcggggcttcgtaccgccagcggcggtggcgcacaagctgctcaggcgatcactaataacgctttcatttcttcattaccttcttcagaggcgaaagggggcacggggcccttgtgaggccgcgtgtgtcacttaaaagttgggaagttcggattaacgttgccttcgtgggggctgttgcgttgttaatcagagtgcctagttggcggagttgattttaggcgcttcggttatattcatatacccgcagttttgataaacacttttggcggtttttgtaacaatccctcaatcaagattttttcagaaacctgccagccgccgcagcacgcgggccagagcggtgaaaaggcatagcagggcaatttgtagggtcttgttactaccatcgtcgaatggttctataggcccaccccggctacaacaggggccatacaacaacaactatgtcaccgaggtaagaaagatgagtgcgg

SEQ ID NO: 628069 - DNA, 242 bp, Homo sapiens
tccacgtcgttctcttcgtctcatcctctggcctgtgtggtctctcctttcctcccctctcctctcctcgtggtactgctgctctagtccatttgggccttctctcctattcggttttgatgctgcttactgcctcacggtctggatgcgtgctagcctcctctatcttgaaccatgttttctgctctttgtccccggttccccagaccagcagaaaccacatggcgatgagcacatgaaga

SEQ ID NO: 628070 - DNA, 1891 bp, Homo sapiens
  misc_feature (254)..(254): n is a, c, g, or t
  misc_feature (469)..(469): n is a, c, g, or t
  misc_feature (496)..(496): n is a, c, g, or t
gaataagcgaagtgcggctggctgaagcgcaatagatgaatgacacacgcatgaggcagaggtccatagctagaactccgctagtcgttgtctcgccaccgagtaagagcgcgagcagtgaatgcagaaagagcatgcgtacatggccacgactgctagggagatgctgtggttaccatggttgttgggactgcatgctactgctcgtagagcctctgtgctcaatgcgatctagagagcttccatcgccctcntggatcgccagatacactcttcttgagaagccctacgctttgcctccattaatagcataagagtgcacatagtatatggttccttcttgctcgctggcaccttgtgatcatttcttgggactaatcttctggtcgatttgatttggttggcctcgtaggcttggtacactatagccccacttagtaattcccatatatcgaccatgcctttgccntgactgggcttttctgagaacttgcanaagaaaactctagacacaaagcgatatcaattgcacaccaaaacaagctataatgacagagagaatagagcgaggcgtgcacccgaatatcacattggatatttatatgcgcacacgcagaaggggggctcacacaaaggccaatattacctgacagaacgcgcgccgacgtcttgtcctccgcgttgcttacaatggagagtgtgaggacccacaagtaattaagccccaagtaagcacgccgcaattttgtaatatgcaccacggctttagcgggccccttcggcggttctcggcacacgcgaggctcatcctaggaactcgaagactcgccgacacgatcggctgtggcggaaaacaccatcactggcggtgcggaaataccccccctggtagagcgaggacacacccctggtcgaacgctacggcaaaaggtcggatccccaatatacagcccccaacagaaggacgcacggcgtagggccccctcgtctaaaagtcgagggtgcacccgacaaacagcaccaacgccgcttataaccacaactacagaaccttttgtaagaagaggtccctcccataagaggcagggccaaaccttctgtgtttaaccacatctaccctccccacaaggcccctggcacacatacaccagggcgcggcagtaaaaaccacggcacgcgcacggcacacccactaaaagccggcacacacgcacacaggcggcctaacgcaccacagcacatgtcaattagccacccctaatcacagacgtagccacagccaactaggtgaacgccacacttccgtccgcacacaatgaacaatacagactccgaccaccgcgacgcacccccacccacacacaacaaccacccgccacacacatcaacgagccacacgaagcaaccacgccccacccagcacgacacagccgcggaactcccaacccccctatgcacactcccgcttcgcacaagcttcttcgactcacgcaacaattccccggtgaccgcccaccctacccaacacgccgagcaagcagccaggacactcacttcgcgacaacgacacacacgcaggcgtgaataccaacgacgatcaagacacaccaagcaccaccagtgcagtgacgcccacacgcatcgatgccgcaccagcgcagctcaaacacacgatgcgaaaccgagcacacacactactattagaccgagcgagcacagacctactcgcgacccacacactccgcccgctactaccgccgcctacgcagccagcccgcacctcagatgcgacgcaacacaaacagcaacgcacaaccacacacacacagcggagcggccacatctcacccgcgcacatgccaaacccaacacaccagcactcatgcaccac

SEQ ID NO: 628071 - DNA, 335 bp, Homo sapiens
ccccccccggggttttttttaagggggcccaattttcccccctgggggggggggggggggtgggggaaaaacccctgggggggggccggggggggcccccccaaaggggggggtttctttgcctttttttgggtttaacccccaaaaaatttttttttttataaaaaggggggccccccctggttttccccccgggtttttttcccgccccagggtttggggggggttttttccccggggtttttttttttttttccaaaaagggggggggtttttgggccccccccccccccccccccccgttttaaattaaaagggggggttcccccccccca

SEQ ID NO: 628072 - DNA, 237 bp, Homo sapiens
atcacttgtatcatgtgtgtcagaggctgcaggatcatgaagccacatcagcagtcagatttggcagaacaaaagtggtgccttcctccagttatgagccacatgatgagacatagaatgcatcgagcaacagcaagggacggaaaaacgggaaaatactggctacaaaacagtcttgcaccacactgaggtaataaacacctaactctcatttctgctggtcaaagggggtcccgg

SEQ ID NO: 628073 - DNA, 115 bp, Homo sapiens
gtcatggcggccttcaggtacttctgctcgtgcctccgcttccggcccctgagcgatggtccttttctttctgccacggcgggatcgggcacttacccattgcaagttccgagcc

SEQ ID NO: 628074 - DNA, 121 bp, Homo sapiens
tcgaagtctgtagagaggcaggcagggcaggacacacccaggggactttaatgacactagggcatgttttcatttctaccaatatgggcaatgggtacataggacgttcactagtaacgtg

SEQ ID NO: 628075 - DNA, 157 bp, Homo sapiens
  misc_feature (128)..(128): n is a, c, g, or t
ttgtggatctgtcctcagggtgtattcccaggagcaggattgctgggttaaagggcacaattatattgtgggctctcatatggatattgctaaattgctttccaaaagggttgtaccatgtttatgantgccaccatgcgtgttcgtgaaaggtacc

SEQ ID NO: 628076 - DNA, 202 bp, Homo sapiens
  misc_feature (12)..(12): n is a, c, g, or t
  misc_feature (98)..(98): n is a, c, g, or t
  misc_feature (138)..(138): n is a, c, g, or t
  misc_feature (181)..(181): n is a, c, g, or t
tgtacgacaagntcatccgcctgagggagagacaccgattacagaacccggtcagcggggcacccctcagcacatggtggggccacaccatttgccgngccaggctagagatcctgcagctctgaaagcaactgtggngggcatgacctgaagcacgacttccagcactgaaagagacatngcggtaagacctgaggctgag

SEQ ID NO: 628077 - DNA, 368 bp, Homo sapiens
aggatcccctctgcatcgctaatcctttctccatttcttctctgaccacaggggatcgtcaggtggtgtggtcagcgcccaatggcgcgctctattgtgttgtttatcacaagtcgcagcatcgtcaactgattgcagtatttcgtacttttcttctgttacagccagctagctggatggccaggttgtcggccaccttgtcctaggaaggcggttgtgggcttctccttacacagcagcaccagctccagatccaagtcgcccttgagtaggaagcccttggccaccaggcccacccgcatcactccccgcagggtgctggtcatgtgctccgtcttctgttccccagccccttctttactgtcgtc

SEQ ID NO: 628078 - DNA, 551 bp, Homo sapiens
gttctgcatagcaattgtatcttttggtttaagttgagtttcccagtctgaaatagcacaggaatttttataattattgggagaaaaggttgggatcaaagaaaaagggagggagaccctatggatttgttttcaaataatatcttctaagtagagaaatgtaagaaagaagacacaaccagtgattcaccagtgataggaacaagcagtagaaatgggaggtattttagttagaaaggattgtggaggttgggaaataagacagtattatctggaaaatagggagaactaaacaaaaagcattcatggagacattacatttaaagaggaattaaaacttctttctcggagaccaaatgaacgtatgaatgattgaatagatggtgaaacaggaaggaagctcatgtcatggcctcagatttcttttccttcactgagtaacattcccaaggctcacctgcacagtcaccttgtaaaattcctctttcatctgtcttcagctgttcttgatccaccttggagatcagactgtgtctgcagagctgataccc

SEQ ID NO: 628079 - DNA, 201 bp, Homo sapiens
atgctctggctaccattttcccatactacacttgtacacatcgctcgtcacgtccacatttccctgtctaacgatgaggccaggcacggtggctcatgcccgtaatcccagcactttgagcgcgtaaggtgggcggctcgcttgagcccaggaggtgcaggctgcagtgagccgcgattgcaccactgcactccagcctgg

SEQ ID NO: 628080 - DNA, 283 bp, Homo sapiens
cttcgtgcacatcatgtgaggagatgcttggaggagagctcatccatggtctgggacccagtgggaacgtctggctgtcttatgaaaggaaaccaagggtacaggatggtaaaccagtcatctccttttcgcactcgaacagcctgtgtttgactccttcctgtggattatcaggggagcaggagccaccccagctcatcacttccatcctccttcacaaaggggcctgctcagtgtgggctggtcacaggccgaattgccacatcccgctgtactttgtcaa

SEQ ID NO: 628081 - DNA, 1574 bp, Homo sapiens
  misc_feature (1484)..(1484): n is a, c, g, or t
ggcatagccagtaacctagggcccatgagtctcgatctccaacgcatatgggctaaagtacgtagataggctaaaacctactcgaatgcctagacactaatgcagtgccaacatatcgagtagtagctacacaactgaatcattgtacttccctgaataagaaccatcataagtggtgaattcgaggccatagaggcaacgccatgcagaacataagttactatagacgatcgatgcgccgtgctagctcattttggtaaccgcaaaatcactagacaaggcgtatatggaagctgttgccaccatatctctgacgctgccgaccgccctgaagcaaatcgctggtgtaccctcagatgagctaaacatgaggcatgacatcgcttatgcgcgcatgcaggatactcaactgtggtcagagggcccaatagcggcctatctattatcacacgctggcaagtcaccttattcatcggagacacacataaacctctttagccctccgtgcgtaagtcattcttataatgcattacgcataactcaaggtacctcgcatgatatcaaatgagaacgatctacaactaggaagccagggatgcaaaagctcaccactccaatccatttgtctatttactccttttggctctcccgatagaccacgaacgaccttctcaattgcgcccacgaacttcttctgtgccattcactacgaatcccacaaccctggagatggaccggggcagatcccgaggacaccaagaaaaacgggggctttgtaatggggctatggggccacccctggtaatctgtccacctattctgcctaaacaaactcggcttagtttgaaggtggaccttgcgcccgttgacacacctcatataatttaccagtgacggtgggactggtgatgtctccatccaaacgtcctagaccatatctaacttcacagtgaagtggtgcgtgccgagcggtggacatacaacagtttttcggttacccatgaaacatccaaatcgtggctgtgccactcttggtgcgcgccgaaatggtacgaccttgattttcgaaacagattttacgcgttgtgagaggtccgataataacgaaaaagctgtttacaaggtagattttgaacgattaaaggggttataaagctaagccaacatgaaggcctaacttccaatacaagcgtacacaaaagaataaaacgcctgcgtgtttaaccggggaaacgatccccacgttgtagtcgaacttacccccttacaaaaggcccccaaatggttccggagaagagacccccccaaatctggcttgggtggtcaaacttaagtaacctaggcccgcaggtaaccttctttaaaacagtaaggggcgggataatcggctaatatataacggcccgtcacacaatcaattacttcaaacaccaccgttgaacaatatgacaacattttagatcgaaaccccatatcccttggtnacttatatcccttaattgaagggcattcacttgatttcacaagagggttccacagatcatgaccttactgagaaaaagcgagaacctttc

SEQ ID NO: 628082 - DNA, 470 bp, Homo sapiens
agcggggaacaatcactttgaaatagtgcaggaccatagaaacgactatgaaagccgaaactgtgccaaacaaggttgatcatcatgttcttatttaatggaaaggatgtctttttctttctttctttcttttttttttttgggagagggactctcaccctatcgcccaaccgggagtgcagtggcgcaatctgggctcacggcaacctcggcctcccggggggcagcaattctccggcctcagcctcctgagtagcggggattacaggcatgcaccaccatgccgggctaatttttggtatttttagtagatcgggggtttcaccaggtgggccaggctggtctcaaactccggacctcaagggcctcagccttccaaagtgtggggtttacggttgtgagccaccgtgcccagccagggatgccttttttttttttttttttggagagacgtggagtctcactctggt

SEQ ID NO: 628083 - DNA, 212 bp, Homo sapiens
cctaacattcccagaatccatcagcaagcatgtatgaggcctgtggtgtaggggactgaattttttttttaacttctattccatttataattagtaggatatctatagtccactctacccaggtgtccctgcattatgaatgtactcatttgcatccctcattggtgtccaggccacaaaaatcaggcaacatgcagtaattttgcagtttg

SEQ ID NO: 628084 - DNA, 333 bp, Homo sapiens
caacaaaagtgtgcttacctattcacaaagatatagagccttactagcaaatattaaaataaaatgctgtacgtgactattatcctaaacgtgtaatgtgtaaatttggtctttaggagatggagccccacacttgtggccctggctggattatagtggcgtgatctcggctcactgtcgaacctctgtcacccggcgctgggctaaaagcatcgattccatagcgtgaattgggtcaaagctgattgggaagctactcttctctccccacccccatttgaaataagtacatcaaatttttatggtgaaatattttggtgggcctgagctaac

SEQ ID NO: 628085 - DNA, 310 bp, Homo sapiens
aggtaactatctcatttttctgctacaagtcgcagagttcaaacaaaaccctctgttgtgatttttcctaaactgctcttattgtacttggggaccacagaagacactgaggacttgggactccacagccattgcttccagcgtcatccacagagggttctctgcattggggacctggcagaatgatggcgtctggtagagaggcaggcgggcggctgctcattccctccactcctccacagatgtaagtcaagtgcccccatgtgccagccggggcaccaggcactggaggagacctgagcaagccagg

SEQ ID NO: 628086 - DNA, 267 bp, Homo sapiens
acaaggtctcactattcactctctctctcgcactcgtaccctaacattaaagagaacatgctgctatccgtgacttccaggcccgggtatttcgactatgggggtacaatagaaacaacaagaagccatatgtgtcactggctcagcagatggcaccacctagcccaagcaacagtacacctaaacagcagtagtaggacgcaatggcaaaagaccagctagagcaaaaccaagcctatacatctagacttgacgagcagcgcgtaa

SEQ ID NO: 628087 - DNA, 923 bp, Homo sapiens
  misc_feature (35)..(35): n is a, c, g, or t
  misc_feature (73)..(73): n is a, c, g, or t
  misc_feature (95)..(95): n is a, c, g, or t
  misc_feature (111)..(112): n is a, c, g, or t
  misc_feature (131)..(131): n is a, c, g, or t
  misc_feature (147)..(147): n is a, c, g, or t
  misc_feature (212)..(212): n is a, c, g, or t
  misc_feature (232)..(232): n is a, c, g, or t
  misc_feature (237)..(239): n is a, c, g, or t
  misc_feature (241)..(241): n is a, c, g, or t
  misc_feature (256)..(261): n is a, c, g, or t
  misc_feature (264)..(264): n is a, c, g, or t
  misc_feature (266)..(266): n is a, c, g, or t
  misc_feature (270)..(271): n is a, c, g, or t
  misc_feature (273)..(273): n is a, c, g, or t
  misc_feature (286)..(286): n is a, c, g, or t
  misc_feature (291)..(291): n is a, c, g, or t
  misc_feature (295)..(297): n is a, c, g, or t
  misc_feature (301)..(301): n is a, c, g, or t
  misc_feature (304)..(304): n is a, c, g, or t
  misc_feature (307)..(307): n is a, c, g, or t
  misc_feature (312)..(312): n is a, c, g, or t
  misc_feature (314)..(314): n is a, c, g, or t
  misc_feature (319)..(319): n is a, c, g, or t
  misc_feature (325)..(326): n is a, c, g, or t
  misc_feature (340)..(340): n is a, c, g, or t
  misc_feature (346)..(346): n is a, c, g, or t
  misc_feature (348)..(348): n is a, c, g, or t
  misc_feature (350)..(350): n is a, c, g, or t
  misc_feature (370)..(371): n is a, c, g, or t
  misc_feature (380)..(380): n is a, c, g, or t
  misc_feature (390)..(390): n is a, c, g, or t
  misc_feature (397)..(398): n is a, c, g, or t
  misc_feature (400)..(400): n is a, c, g, or t
  misc_feature (403)..(403): n is a, c, g, or t
  misc_feature (407)..(407): n is a, c, g, or t
  misc_feature (419)..(419): n is a, c, g, or t
  misc_feature (424)..(424): n is a, c, g, or t
  misc_feature (426)..(426): n is a, c, g, or t
  misc_feature (450)..(450): n is a, c, g, or t
  misc_feature (452)..(452): n is a, c, g, or t
  misc_feature (472)..(472): n is a, c, g, or t
  misc_feature (474)..(474): n is a, c, g, or t
  misc_feature (477)..(477): n is a, c, g, or t
  misc_feature (479)..(479): n is a, c, g, or t
  misc_feature (483)..(483): n is a, c, g, or t
  misc_feature (490)..(490): n is a, c, g, or t
  misc_feature (496)..(496): n is a, c, g, or t
  misc_feature (513)..(513): n is a, c, g, or t
  misc_feature (521)..(521): n is a, c, g, or t
  misc_feature (531)..(531): n is a, c, g, or t
  misc_feature (541)..(542): n is a, c, g, or t
  misc_feature (550)..(551): n is a, c, g, or t
  misc_feature (562)..(562): n is a, c, g, or t
  misc_feature (565)..(565): n is a, c, g, or t
  misc_feature (568)..(568): n is a, c, g, or t
  misc_feature (583)..(583): n is a, c, g, or t
  misc_feature (590)..(591): n is a, c, g, or t
  misc_feature (617)..(618): n is a, c, g, or t
  misc_feature (629)..(629): n is a, c, g, or t
  misc_feature (631)..(633): n is a, c, g, or t
  misc_feature (637)..(638): n is a, c, g, or t
  misc_feature (640)..(645): n is a, c, g, or t
  misc_feature (647)..(647): n is a, c, g, or t
  misc_feature (681)..(681): n is a, c, g, or t
  misc_feature (754)..(754): n is a, c, g, or t
  misc_feature (763)..(763): n is a, c, g, or t
  misc_feature (880)..(880): n is a, c, g, or t
ggggggttgggtgtagatttggaaacaagaatacnaggtcattggcagaagagtacagtcatgctttgttganatatggggatacattttgaganatgcaggcaattatgnngtgtgacatcaaagcgggnacttcttcgcccgctnaatggtgtggcctactacacacctaggctgttgcgtatagcctattgcccctcggctacaaaccntcgttcagcatgctactgtnctgannncntccggggaggggggnnnnnnggngngggnncntatggctgaacanagggngggnnnaggnacnatngaaananggtantataannggatgggatcgccngcagangngngggctgtggtggagctgaanntcattatgnggggcgtgantgggttnngnttngggngaaggggcgcgnctctncnttcgaaatccccatctctcctcgncnccgcccggatcctatccatngnggngngccnagagagngggagnacggaggggagaacagnccccgggnagtgcagtgnacactccagnnaatacagnnttggaaagggnaanagnatgttgtgtttattntgttttnntgtgaaagtgatatagggtctggatnnaaaaataaagntnnntttnntnnnnnntnattttatcacccagaaacaatcacttttaatgtnctggtagaggttagtctattttaacatttctgaaatcatatagatttacatgattgttctcacgtgacctgtnacataagcntttcccaagttgctattatctgttaataacagtggtttgattaattggattggctgtgtggatgtggaacggaagagccttgatgtcaagaagagctgaagcacagaaggtgcagtnggttatttgggacatattgtctgttgcttcaggacagggagct

SEQ ID NO: 628088 - DNA, 361 bp, Homo sapiens
aatagtccatcctcttttcgcgagaccagttccccacgcatatattgtcgtgtccattccatgcgtcagttattccctcccccaacacctcccacacatattgtgcgcactttcctaccatcccgaaatagcagcagatagttaccctgtacaacgtaaaaggagcggaatggcgcacagatacgaacatttgcatatatgtgtttacactccatatacattaaacgaggccagcaaagtacacagcactatcccatactcgatatttatatccatacgcacttcaaatacacccattgcatatgcacaatcaaattataagatccaaacctttgtaagcttgcttttcccaaataaacat

SEQ ID NO: 628089 - DNA, 243 bp, Homo sapiens
ataaaattaggtttctgaatctgcaaaactgaaaagtagacaagaaaagtcatggtgaccaaaccaagagagtggtacccaaagagagggccttattagccacctggaatccttctatctcacaatgtctctctaatgacagtatcatttacagaacatatttcaagctagaatttggttgccttaaggaataaaaatgacaacctgggccaggcacaggggctcacacccgtaatcacagca

SEQ ID NO: 628090 - DNA, 422 bp, Homo sapiens
tgaacatttctcatggtttctttgtgtcctaatataacacgagttgtacgtgtacttgggtatataaaaagtgtgtccagataacaagatgcttttgatctaacaatataaattaaatctagattagagctaaattagatttgttatctatttctgcctagttaaagtatcctatcattatagccttttgagtggtaatgctatgttatctggggcaattcagtattgatattcagtggtaagcactcttaattgttaataaagtaaaacacaatggttagcactctttatagtcaatcaaagtaaaacacctgttacgtactccatgaagtctataacctagagtcatttgtatgcttactggtctagaaaccactgatttatacttatgtacttttttctctctctgaagtcgttatctt

SEQ ID NO: 628091 - DNA, 101 bp, Homo sapiens
tccccctttgtaaatttttttcccttcccccccccaacatttttaaaaaccccccctccgaaaaatattttaccccccccccccccaaatattaaaaaccc

SEQ ID NO: 628092 - DNA, 217 bp, Homo sapiens
cttttgctgacagcatttttttcactgattgggagagcagatgtgtttctggcggggatactgtgatctggaatcaccgcttctacttcctttaacactgtgtgctcaagactaaggtcctcaaacacatcttcaatcaccatgtcggccttttcaaaaccttggtaatcaatctgcccagtcaagttgcttgaaagatggaatccctttcaaatga

SEQ ID NO: 628093 - DNA, 870 bp, Homo sapiens
gggatggaaagtcacccgtaagtatggcatgccagtgaaccacgctgctttgaggctctggagtgatctaccaccaatcgtccaagtgacagccctgggctgctctccaggatgtctacaaaatgggtgtattggtactgtccctgttgccgaagtgagactggtgtctcaaaccccggtatgtgtgtcacctttgtgcttccagtcaagtgtacaagggaagtaaaaatctgtcgaaatgcaccatgaagctttgagtgaagctcttcctggggaccaatgttggtttcaattgtcaagaattgtgtctgtcaagggatgttcggtcgtggcaacgtgtgctgtagaacagcaaaaaaagtgaccccaccaagtgaacggcaggtggttcactgcttcaggtgataatcctgaaccaatcccaggccaaataagggcgcggttatcccccttgtatggtatttgccaccacgctcacattggattgcaagtttggctggacgctgagggaacaagattgatccgcggtccgggtaaaaaagctgaagattggcctaaatcttggaagtcggtggattctggcccatgttggatattgttcctgccagccatgggtttgtgagacttctaagactatcactttggtccgcttgctgtccgggatatgagaccgacagtgcgggggtgtcatcacaccgtgggccagaaggttgtggcttggcagttccagttgccgaaggcaaaggaagattatcctaacggcacccccttatactgtgaacgctcaagtggactgccaatcgccaaacgggtacagctccacacaaagcattggacgtttcggggcacaaaccctgcagcctcgtggaa

SEQ ID NO: 628094 - DNA, 360 bp, Homo sapiens
gttatcggcctgctgagacttcacagtgttgcgcatactagtgtgtgatcgacgtgccggatggtagtgaagtatttaattagatagaggtttacaacggtgcatgtcgttgctgatctcctgctcgttgactggcgagcctcatgctggataaggagtctgcgggtgagtggtataagagaggctatccccggccggggacgcgctgtgcacggcgaggatgacgcctcgtagtctgcgttgaagcccgagaacatcatcgtggggttaggcaagccgggcgaggggccgagggcggaacaggtgggcgctgtggagcacagctgggtaggacgcacggtcactgtctttcgctgctcc

SEQ ID NO: 628095 - DNA, 1905 bp, Homo sapiens
  misc_feature (1558)..(1558): n is a, c, g, or t
  misc_feature (1676)..(1676): n is a, c, g, or t
  misc_feature (1811)..(1811): n is a, c, g, or t
tgggggggggaaggtggggaaatggtagggggtatggagagacttggtcatataaggtaagggcgaggggtggaggtgggaaggagaagtgtttttcacaataggagagggtggtatgagagtgtgggtgccgtgtacgcggagaactacggggggaatgcgctggtccgagaatctcaataaagaaccacggggaggtgtataagaagtgatagcggtgttctggggtgagacacaaacaatattgtgtgtgtgtgtgtaagagtgtacacagggggagagagagtgtggtgtgcacaatactgtgtgtgtgtgctccataggagaagagacttgtgagaagggtgagagaggtggtgtgttaactttatatacatactaagtggtagaggggggatcaatctgcgacggctgtactctagacagagacaataagggcgcgagcaacggggtggcacacgggggggcgcgaacaatccccgagagaggatgcgagagagcgcgcttgcgagaccaccataatgtctacgggagaaacttcacacactctctccgggagcaaaagcgtgctccacgacaagcggggggtagatgcatcaacgggaagagtagggagcaacaaaaacggtgagaagacaagatgtgttgatggacgaacacgaacatagaacaatcctcacactataatctataagttggtgcggcccctacaagggtggtggctccacatcgaggagctgggcgaccagaggcgaaaggataaactccacacgacgagggggcgtggtgcacccccatacgtagagagcggaagatagtggagaagacgacaaaaaccggcgagtctgaagaagagcagcaacaagtgtcccaaccagtggcgcgagaacaggccaacaacagtcgatacgcaagcaagcaaacagacgctgctgccaacatgcaaacgaaagaagactagtaacaaacaagactcggagaagaggccgaaccccagccgatgagagaagcgccactccccaccacataatcagccagaccagacatctccagtatgtaacacgtcgggcgtagaccacatacaacagagacccttcctcagcccagaagaagagacacacagaccacgaacgacaaaacacgaggcagacacgcacagacacccagtgcagacaaccgccagacaggacacgaagagccaacaccaccccccgcccacaccaaccaacaacgcagaaatacagaacaaaaaaaacacggcacacaacacgcacacacgacagcagagcctagacaccaacgaaacacaaaaaaaccacaacacaaacaagccagccccaacaacggcatgaacaagcacgacaagaccacgaccaacgccgcagtagcaaaaacacaaacaaatgaccgagaaaagagaagaaggaaccaacaacagccagacaaaacaggagaaaaccaacgagagccagaaagacaaacaagccgaaaggcgcgaacggaacgcacgagaaaaggtgcaaagagagggggcgacagaaacaacacacacacactnaaggcagcgagccgagacaactcagagaccgcaacagtagcgccagcacaacagacaaccacaacgacggacaacaaacgaccagccaagagacaagaacgcaaccaccacaagacanatacaagccgaaaccaagcaagagaccaatcagtacaactaacggcagcaagcacgccactactacacaccagacggaacgcacacatcacacaaacacagcagcagaccaacacgacgtcgcttgggtacgctnaacaaacaaaacaaacacagaaacgagacacgaacgacgacgagcgacgcgaacgagaagaaccgcacacacaacgacgcaaaacaccgacatg

SEQ ID NO: 628096 - DNA, 936 bp, Homo sapiens
attctagaggccgaggcgggcagatcacaaggtcaggagattgagaccgtcctggctaacacggtgaaaccccgtctctactgaaatacaaaaaattagccgggcgtggtggcacatgcctataatcccagctatttgggaggctgagtcaggagaatgcttgaacccgggagacggaggttgcagtgagccaagatcgtgccactgcactccggcctgggcgacagagcaagacttcgtctcaaaaaaaaaaatttagccaggtgggtgcttgtaatcccagtacttcaggcagacttgaggcggggaagaatggcttgacccgggaaacgggaggttgccggtgaggttcgagggttcaacacccttctggattcaaatccaagctgggcaaacagaaacgaagatttctatgtcaaaaaaaaaaaacaaaacggttaattgggggcccaggtggtggctggttttaaaaatataattggggaactgtgggggtaaattatataagaaacatacactttttttccccccaatttggggatttctcagttatattccaggacagatttttttggaaaagggtttttcttggccatcgagggaatggcgtgaggcacacttttttcacaacattattcgattggagccatataaggcggggggtacaggcttcaggtccttggggggggttattacaatattttaggacaacggtagaattcttggggagacaggtaatacggtcagtgggaaattgcattctaacaaattttcttgttttacctggttagggccttacaggttatattcaggggggcttaaaggggggaggtccccaactttttggcccaagagggtgaggtgaccgtgggcaatacaaagggttgtgccccagcgtaaacatggtgtgtgggataacaatcttttttcagagaa

SEQ ID NO: 628097 - DNA, 1013 bp, Homo sapiens
  misc_feature (869)..(869): n is a, c, g, or t
  misc_feature (872)..(872): n is a, c, g, or t
  misc_feature (876)..(876): n is a, c, g, or t
ggaatcttattttattttattttttctggcctggcacagtagcttacacctgtaatccaagcactttgtgaggtcgatgcgggtggatcacttgaggtcaggagtttgaggccagcctggctaacacggtgaaacccggttgtctggcaccgatgacagactcgtcagcgagagccaaaccaagcccttcagtgagtcacacaaactgtggagtttgaactgaacatctacaaggagcgtggaggctgagcttctcaagagtcctgcttgctgtgccaggagcattcctgtggtcctgtcagggtgcctgggtggggcttcactctgggctccagaagctactgctcaaatgccgcatcctctcagcaggacaaccaaaagctggctgggagccaaaagtcatgacgtgatgtgggagcaaattacagaaactcttgggcaggagctgagggcttgagtgtccaaatgagatacagcctcctcttcctgatcccattcttttcctcttcgaaaggttctttgtgcattttaaattcaaaggaagggtttggacaaaagggaggctgttccatccagaaagcgcatacttgtcagaacaagccgtctgccagggcgtctggcagggaagggctgggggccacgggctgacttacctgaagtcctcgggcagtggcaggggcccagagcacctccccactgtgaatcagaaggagggcattcctccactgttaccagcatctccatctccaccaaaacaagccaagcctttccctttcccacgttcctgggtcgagaagcaggtgtggtcctttgcagcaagctgacatcaacgaaaaacacattccttggcccttcgattcctgtaatcnccncgtntctgaggctgagttacacctgacctctgggtcagtccctgtttactcatccgcacaacccactcatttatcagataatgacccagcccttggatgtgactcctgctcggccccaggaggtgttcggttgagcggaga

SEQ ID NO: 628098 - DNA, 859 bp, Homo sapiens
gctaagaccttgcgttcatgtattcacagcccgcctctgagtgaatgtactatcatctctttaatgacaggaaattggggccccaagaaacttgatcttggtggcctcaggattgctgtgggacgcttgagagggccagctttttccttgggtgtgcacgaccccctggaccaatggtttcacacaggcgtcaacagaaagccttcgggctccaccacgtggcgtcatgaacgcttgaaagaacaaaaacaaaaatttctttggaacaggggcttctagaaagcctaccttttgtaaaaacaccatcccccaaaaaggcctctacgctaatggtggcctcttctcatcccttggacccgcctttaactcctattccattgcgttgggaaaacgcgcataccatgtagcgtacccccctttagtgggtggagcatagtgtggcgccccttttgtgcgatccctccataagtaaacacccccccccacgctgggtagtggcgcgtcacaaatatggggccgaaaccccccccgattttacctttttgtgtgagtcagccacgtttatctccccaacagaggaaaaactttggtgcaccaacacgccgaagcggagaaaaatagtgagtgccacctgtgatgataccccattgtgcgggtggacgtgcccaacgattgggaacgaatcagcacgctggtgtcgataaagctaacccccccccacttgtgtgatggcggacgtagccggaccatattaatcaacacacagtggagttgtgtggtgcggacgaaaccagcacccgacacaatgagtagctatgtgagtaattctacaccaacacccgttcttcttgtcggggtc

SEQ ID NO: 628099 - DNA, 961 bp, Homo sapiens
ggaatcttattttattttattttttctggcctggcacagtagcttacacctgtaatccaagcactttgtgaggtcgatgcgggtggatcacttgaggtcaggagtttgaggccagcctggctaacacggtgaaacccggttgtctggcaccgatgacagactcgtcagcgagagccaaaccaagcccttcagtgagtcacacaaactgtggagtttgaactgaacatctacaaggagcgtggaggctgagcttctcaagagtcctgcttgctgtgccaggagcattcctgtggtcctgtcagggtgcctgggtggggcttcactctgggctccagaagctactgctcaaatgccgcatcctctcagcaggacaaccaaaagctgaagtcctcgggcagtggcaggggcccagagcacctccccactgtgaatcagaaggagggcattcctccactgttaccagcatctccatctccaccaaaacaagccaagcctttccctttcccacgttcctgggtcgagaagcaggtgtggtcctttgcagcaagctttcagtaagagaagacatcagaagcaagcaagcgaataaataagccagataggttctgtgaataagaagggcctcggagaacatcaagactgggagaggggcttagtcctctctgaggaagggacgcaggccttagggatgaagggcaagcacatttcaagctcggtcccctgaggaggggagcccaaaaggaagccgtgatggggggttcgagctgccggtgtgaaatggaaggctcagccagacgaggcatgtcctcgctcatcagacacaggcacgctctggcccagagcaggatgcctcgggcctggcctccacccatggggcttcctcctctgaggcagagaactttgaaaagaagtcacccacgtggcttgcttctaactctcccagaaaggcagcaaatgtggc

SEQ ID NO: 628100 - DNA, 316 bp, Homo sapiens
ggaacagctcccctatctgtaatgcgggaagtagtcttaagagtggttataaatatcgttgcatactatgggctttatatactcgatgttttcataggataataatctcatgacatgctcctgtggtcctctaccaaggccttggagatacggcagcccggtacggtgagaatatgatgaggcgttatattgacccatgatatggtaggcttgcgtgggtcatgctgtgaaggcgctgctactgttcctgcagcttgtgcacgggtaccagggtagcgttgcacgtgccggagcctatcgcctgtgcagtatggct

SEQ ID NO: 628101 - DNA, 885 bp, Homo sapiens
taaaaaccctcatcaataaatggaaacttacaaaaatagtcaaaccaattctacaaaatgccagttacaaaggggggggtttcaaacccaaagtgattttgggatgtaaagtgaaatattagtgggcggaatgcaagccacaatagtgacgaaagttgaccccaatactgacgtgaagtccggtggaacgccgtggtggtctaccaaaaaatgtgtgagccgttaaatgccgtcggaaatggtgaagggcaacctcgaagtactcgtgaggcttgtaggagggtacacatagagcacccagtaaaatgtgctcataccccaggtgcttgaattacttgggttgacggtgggtgttctcttatcaaactatggtgtgagctcaggtgattggataactccttgattgcgatgtaataacgggattgttgtatcaggcagtggggcacttcctaggggcattaaaccgcggggtcgatcgcctgtggtggggcccattgccctccaaaatggggggagacgcggcctaacgctggacgttgtgacaaggatcagaaacttcttggggaacaacaacacacctttcgggaggtaaacaaaataggatatatccccgaatacaaaaggccctacatagggaccacgcgtgggtagtgtgggacgcgccttgggacagaagcctaccccgcagcatacagtcgggccccacacgggcaatcaggccacgagatagcaggcacaaaaagagccgacaatcaacagcagcggacatgccaacggaaacgcgactcacctctgtgaagaccaaaggccactcaagcaggccaagcagagcccaaggaagggaaaggagacgacacacacacactaacagcatagtgaatcacc

SEQ ID NO: 628102 - DNA, 1273 bp, Homo sapiens
ggaatcttattttattttattttttctggcctggcacagtagcttacacctgtaatccaagcactttgtgaggtcgatgcgggtggatcacttgaggtcaggagtttgaggccagcctggctaacacggtgaaacccggttgtctggcaccgatgacagactcgtcagcgagagccaaaccaagcccttcagtgagtcacacaaactgtggagtttgaactgaacatctacaaggagcgtggaggctgagcttctcaagagtcctgcttgctgtgccaggagcattcctgtggtcctgtcagggtgcctgggtggggcttcactctgggctccagaagctactgctcaaatgccgcatcctctcagcaggacaaccaaaagctggctgggagccaaaagtcatgacgtgatgtgggagcaaattacagaaactcttgggcaggagctgagggcttgagtgtccaaatgagatacagcctcctcttcctgatcccattcttttcctcttcgaaaggttctttgtgcattttaaattcaaaggaagggtttggacaaaagggaggctgttccatccagaaagcgcatacttgtcagaacaagccgtctgccagggcgtctggcagggaagggctgggggccacgggctgacttacctgaagtcctcgggcagtggcaggggcccagagcacctccccactgtgaatcagaaggagggcattcctccactgttaccagcatctccatctccaccaaaacaagccaagcctttccctttcccacgttcctgggtcgagaagcaggtgtggtcctttgcagcaagctgacatcaacgaaaaacacattccttggcccttcgattcctttcagtaagagaagacatcagaagcaagcaagcgaataaataagccagataggttctgtgaataagaagggcctcggagaacatcaagactgggagaggggcttagtcctctctgaggaagggacgcaggccttagggatgaagggcaagcacatttcaagctcggtcccctgaggaggggagcccaaaaggaagccgtgatggggggttcgagctgccggtgtgaaatggaaggctcagccagacgaggcatgtcctcgctcatcagacacaggcacgctctggcccagagcaggatgcctcgggcctggcctccacccatggggcttcctcctctgaggcagagaactttgaaaagaagtcacccacgtggcttgcttctaactctcccagaaaggcagcaaatgtggc

SEQ ID NO: 628103 - DNA, 934 bp, Homo sapiens
caaacgcaatggagatgtgagggctgctgcggctgcagccctctgccctgctgtcccctgtgccgcggtgtgatgcgcgcggaccatgccctgctgatctgcccgtgggctgccgttgtccccgcacctggacgctggcgcgtgtgtgcgcgccccagcctcgatcgctcgccgtggcgactcggcccaggcttccggcgccggtgtgtgggccctcgctctccatggggctgagggactggctgagaaccgtgtgctgctgctgccggtgcgagtgcttggaggagcgctgccctgcctgataaggagcccctcgtcagtgattaacaatccatattcctcatttggagcaactctggtgagggatgatgagaagaatttatggagtatgccccatgatgtgtcccacacagaggcagacgacgacagaaccctgtacaatttgatagtcattcgtaatcagcaggccaaagactcagaggagttggcaggaaggctcaactattgatatccattacccttgctggcagggttcgaagggcaagtaaggaaacaggattggaacttgcatcttagaagatacaggtttccaaaagggaacgctgactcttaggtggtcagtgacttaaactcaagcacccatcagtgaattctaaaaaacacaacggaaagctcgagaagatgtgtcacaaactggctgacgaaaccaatattttcccaacaaggtatgggagctctcaggagagatttctctttcaaggatgagaccgcgtcatcatttggaagcttcgatgcatagcagaaagagatccattaagggccatgctcgagtcgaaacttagccccaaaggaaagcctgggagatccaaaggactgagaagacggccagtaaagaacttggcactaccattacgttccaaatccctagaacacc

SEQ ID NO: 628104 - DNA, 737 bp, Homo sapiens
  misc_feature (7)..(7): n is a, c, g, or t
  misc_feature (10)..(10): n is a, c, g, or t
  misc_feature (42)..(42): n is a, c, g, or t
  misc_feature (62)..(62): n is a, c, g, or t
  misc_feature (68)..(68): n is a, c, g, or t
  misc_feature (90)..(90): n is a, c, g, or t
  misc_feature (119)..(119): n is a, c, g, or t
  misc_feature (125)..(125): n is a, c, g, or t
  misc_feature (131)..(131): n is a, c, g, or t
  misc_feature (163)..(163): n is a, c, g, or t
  misc_feature (170)..(170): n is a, c, g, or t
  misc_feature (191)..(191): n is a, c, g, or t
  misc_feature (199)..(199): n is a, c, g, or t
  misc_feature (204)..(204): n is a, c, g, or t
  misc_feature (208)..(208): n is a, c, g, or t
  misc_feature (216)..(216): n is a, c, g, or t
  misc_feature (280)..(280): n is a, c, g, or t
  misc_feature (289)..(289): n is a, c, g, or t
  misc_feature (366)..(366): n is a, c, g, or t
  misc_feature (374)..(374): n is a, c, g, or t
  misc_feature (382)..(382): n is a, c, g, or t
  misc_feature (403)..(403): n is a, c, g, or t
  misc_feature (414)..(414): n is a, c, g, or t
  misc_feature (420)..(420): n is a, c, g, or t
  misc_feature (439)..(439): n is a, c, g, or t
  misc_feature (463)..(463): n is a, c, g, or t
  misc_feature (470)..(470): n is a, c, g, or t
  misc_feature (487)..(487): n is a, c, g, or t
  misc_feature (521)..(521): n is a, c, g, or t
  misc_feature (528)..(528): n is a, c, g, or t
  misc_feature (544)..(544): n is a, c, g, or t
  misc_feature (552)..(552): n is a, c, g, or t
  misc_feature (559)..(559): n is a, c, g, or t
  misc_feature (575)..(575): n is a, c, g, or t
  misc_feature (578)..(578): n is a, c, g, or t
  misc_feature (598)..(598): n is a, c, g, or t
  misc_feature (602)..(602): n is a, c, g, or t
  misc_feature (610)..(610): n is a, c, g, or t
  misc_feature (613)..(613): n is a, c, g, or t
  misc_feature (616)..(616): n is a, c, g, or t
  misc_feature (633)..(633): n is a, c, g, or t
  misc_feature (653)..(653): n is a, c, g, or t
  misc_feature (664)..(664): n is a, c, g, or t
  misc_feature (720)..(720): n is a, c, g, or t
taaaaanaanatttaaatttattgtttcacattagtttgaanaaagcacaagccaagagggnttaaanatcatttgcagaggtccaagcntctttacaattacagggcaggggcatcancaaccnagtccntgacttgcagccaaaaaaggcaaaagggctgngtgaagngacagaagagcacaccccacncatgtcangagcnaggnatcaaagncgaagaacagtaacagtcttgacaacagccccgtaagaattaccccgcagtaaaccccaacccngaatggggnagaatactgaattagctgagcacattctggacacaattctgaccaatttcagtctcatgatccctgtgggggcaggnttcattcnccaattcncttttacagaacagcagaacncgagccttcanaaaagngattaacggcctttccgcntcttcatttttcccccagccaccntgttccngacaccaatagcacccnctgtgtcatcattatctccagcatcctctcgcgngcgtttnttcttttctccatgcncccttaantccattngggcaaacctttgggnttnagcgacgcgttctgtcagcntcanaaccccancanccngtgttggaaaacctggnagtttcttcccaattaagtnttctatgcgcnggaagagttccacatcatactgtgtgaaaaaagtaatagcctttccggggcgcccngctctagctgttcgacc

SEQ ID NO: 628105 - DNA, 1219 bp, Homo sapiens
ggaatcttattttattttattttttctggcctggcacagtagcttacacctgtaatccaagcactttgtgaggtcgatgcgggtggatcacttgaggtcaggagtttgaggccagcctggctaacacggtgaaacccggttgtctggcaccgatgacagactcgtcagcgagagccaaaccaagcccttcagtgagtcacacaaactgtggagtttgaactgaacatctacaaggagcgtggaggctgagcttctcaagagtcctgcttgctgtgccaggagcattcctgtggtcctgtcagggtgcctgggtggggcttcactctgggctccagaagctactgctcaaatgccgcatcctctcagcaggacaaccaaaagctggctgggagccaaaagtcatgacgtgatgtgggagcaaattacagaaactcttgggcaggagctgcctcttcgaaaggttctttgtgcattttaaattcaaaggaagggtttggacaaaagggaggctgttccatccagaaagcgcatacttgtcagaacaagccgtctgccagggcgtctggcagggaagggctgggggccacgggctgacttacctgaagtcctcgggcagtggcaggggcccagagcacctccccactgtgaatcagaaggagggcattcctccactgttaccagcatctccatctccaccaaaacaagccaagcctttccctttcccacgttcctgggtcgagaagcaggtgtggtcctttgcagcaagctgacatcaacgaaaaacacattccttggcccttcgattcctttcagtaagagaagacatcagaagcaagcaagcgaataaataagccagataggttctgtgaataagaagggcctcggagaacatcaagactgggagaggggcttagtcctctctgaggaagggacgcaggccttagggatgaagggcaagcacatttcaagctcggtcccctgaggaggggagcccaaaaggaagccgtgatggggggttcgagctgccggtgtgaaatggaaggctcagccagacgaggcatgtcctcgctcatcagacacaggcacgctctggcccagagcaggatgcctcgggcctggcctccacccatggggcttcctcctctgaggcagagaactttgaaaagaagtcacccacgtggcttgcttctaactctcccagaaaggcagcaaatgtggc

SEQ ID NO: 628106 - DNA, 527 bp, Homo sapiens
  misc_feature (527)..(527): n is a, c, g, or t
ggaaaaaaaaaaaagagacagattcttttactgttactcttttgcaagtcttcttaagcattattatgttttacaaatgtctgtatttagccagttcttgtttttctttcaatgcagctacaaggacactggctatgcaaggtcataaattatgttatgctatagattacatgacctgtcactgtatgattaactgcttttgtttggcatctgtacgacagcgtataaaaaccccactttgtcttcgttcagtcctcagctttttggatatgaatcgtctgagccagtgcgtacctaaaatataaacaaatcctcctgtactctcataaaaaaaattattaagcaatcttctgtgctaagtaaagaaggctcttgccaggcgcggtggctcacacctgtaatcccagcactttgggaggcccgaggtgggtggatcacttgaggtcaggagttccggaaccagtctggtcaacatggtgaaactccatcttactactgcttgaggaagcccgtgacataatctctcn

SEQ ID NO: 628107 - DNA, 1206 bp, Homo sapiens
ggaatcttattttattttattttttctggcctggcacagtagcttacacctgtaatccaagcactttgtgaggtcgatgcgggtggatcacttgaggtcaggagtttgaggccagcctggctaacacggtgaaacccggttgtctggcaccgatgacagactcgtcagcgagagccaaaccaagcccttcagtgagtcacacaaactgtggagtttgaactgaacatctacaaggagcgtggaggctgagcttctcaagagtcctgcttgctgtgccaggagcattcctgtggtcctgtcagggtgcctgggtggggcttcactctgggctccagaagctactgctcaaatgccgcatcctctcagcaggacaaccaaaagagggcttgagtgtccaaatgagatacagcctcctcttcctgatcccattcttttcctcttcgaaaggttctttgtgcattttaaattcaaaggaagggtttggacaaaagggaggctgttccatccagaaagcgcatacttgtcagaacaagccgtctgccagggcgtctggcagggaagggctgggggccacgggctgacttacctgaagtcctcgggcagtggcaggggcccagagcacctccccactgtgaatcagaaggagggcattcctccactgttaccagcatctccatctccaccaaaacaagccaagcctttccctttcccacgttcctgggtcgagaagcaggtgtggtcctttgcagcaagctgacatcaacgaaaaacacattccttggcccttcgattcctttcagtaagagaagacatcagaagcaagcaagcgaataaataagccagataggttctgtgaataagaagggcctcggagaacatcaagactgggagaggggcttagtcctctctgaggaagggacgcaggccttagggatgaagggcaagcacatttcaagctcggtcccctgaggaggggagcccaaaaggaagccgtgatggggggttcgagctgccggtgtgaaatggaaggctcagccagacgaggcatgtcctcgctcatcagacacaggcacgctctggcccagagcaggatgcctcgggcctggcctccacccatggggcttcctcctctgaggcagagaactttgaaaagaagtcacccacgtggcttgcttctaactctcccagaaaggcagcaaatgtggc

SEQ ID NO: 628108 - DNA, 170 bp, Homo sapiens
cttcagtattaaacacatacatacacacacacaaaagcacatcaaacattcagatagcctgcaattgtggagacagcactcccagtcattgggtggataagaacatggtcctttttctgcacggacattactccaagttcgggtgtcagcacactcttgcctcacccaca

SEQ ID NO: 628109 - DNA, 116 bp, Homo sapiens
gttctcccccaaacagaggggtctgaggaagccgcagagccccggatggacacaccagaagaccaagatttaccgccctgcccagaggacacgaatgttcaggacacgaatgttca

SEQ ID NO: 628110 - DNA, 350 bp, Homo sapiens
  misc_feature (67)..(67): n is a, c, g, or t
gaggtgttctgtgacaccactgtgcgccaccgcgatagatgtgtccacgagctcacacgctcacagngcgcctctgaaatagtcgcctctcttctgatactctgagacctcgtcacacgagtgtgtctcctctatagtgctctcacgagagccccacgagcagacacatagaggtttgtgaagagtgtagtgtcgcggcacgagtatgtgtgtatagagcgctacgtgtatatcttctccccacgagagacgcgcggcagagtatgagcggctcgtgcaacgcccgtgcgcgtccaacatttcttcgcagcagacggcgggagtcaccctacgtatgctggctaacgtcg

SEQ ID NO: 628111 - DNA, 102 bp, Homo sapiens
aacagaccttctaagcttcttcaaggacacattcggccggggatccacaatcacactcctcgtccagtgtcaatgaagccattgccacactcaggaggatga

SEQ ID NO: 628112 - DNA, 368 bp, Homo sapiens
  misc_feature (291)..(291): n is a, c, g, or t
gagatggagtctcgctgtcgaccaggctggagtgcagtggtgcgatcttgggctcactgcaagctcccgccttcccagggttcaagccattctcctgcctcagcctcccaagtagttgggactacaggcgcccgccgaccacacctcagctaattttttgtatttttaggtagagacaggggtttcaccggtgttagcctaggatggtctcggatcgtcctgaccgtccgtgatccagccatgccatcggccgtcctcaacaagtggctcgggagttatcaaggcgatgangctaggccagcgcgccggccaatacctgtgtgttggtgttaacgacacaagttaaactatatggttaaagtttttgg

SEQ ID NO: 628113 - DNA, 338 bp, Homo sapiens
tttggtctaaatatggttgacaattctgtgaagtgcctttttatgaatattcttggttaagctatggcacctgtctttcgaaatccttaccttttaaggataaaatgtgacacttgggaaatagcttgtgagaaagcccctccctttattctttaaacctttaaatgacaaatctaggtaattaacgttgtgaattgctatgtctgctttgattttaatgaacatttgtctttcagaataggattgtgtgataatgtttaaatggcaaaaaccaaacatgattttgtgcaattaacaaagctactgcaagaaaaataaaacacttcttggtaacacat

SEQ ID NO: 628114 - DNA, 192 bp, Homo sapiens
aagatacacggaagactgtgggcgtggagccagcagccgacggcaaaggtgtcagtggtggtcattaagctggagatcctggccagctggaatgcctgccacctcctatagtgcggaccaccgctcacacaagaatgctctgcgccacgctacagcagcatcacgacacatagatccagcaagaacaagtac

SEQ ID NO: 628115 - DNA, 326 bp, Homo sapiens
  misc_feature (184)..(184): n is a, c, g, or t
  misc_feature (234)..(234): n is a, c, g, or t
  misc_feature (295)..(295): n is a, c, g, or t
tgctgctggacgaaataaatgaaaaagcttctggccggggtgcaaagttgtcacgcctgtaatccccagatctttgggaggctgaggcgggcggatcacgaggtcaggagatcgagaccatcttggctaacacggtgaaaccccgtctctactaaaaatagaaaaaattagccgggcgtggtgncggcggcatgtactcccagctactcaggaggctgaggcaggagaatggcngtgtggggtgaacccgggaggtggagcttgcagtgagcagagatgatccactgcactccancctgggcgacagagcaagaccccaacttcaa

SEQ ID NO: 628116 - DNA, 338 bp, Homo sapiens
  misc_feature (28)..(28): n is a, c, g, or t
  misc_feature (55)..(55): n is a, c, g, or t
  misc_feature (108)..(108): n is a, c, g, or t
  misc_feature (116)..(116): n is a, c, g, or t
  misc_feature (145)..(145): n is a, c, g, or t
  misc_feature (183)..(183): n is a, c, g, or t
tttcggcacagggcgacctgcgcgcagnctggtggccagggcgtgactcctgganagcgcgccttctactacaacgcgcggcgctggacgaccaccagacggtgcgcnacggctgncaggacggctcggtgctgctgctcgtcangaccccaggtagtctgggttggaggaggcagagcattnaccaaggggacctgggtactggctgaaggaataggctggggtagagggcacttttggaaggcacttctcctgcctcccgggagcctagatctcactccagggtctgggttcccaggttgaccatgaaaccctggcctgaccagctgatgcacact

SEQ ID NO: 628117 - DNA, 218 bp, Homo sapiens
ccgtgtggtcttgagagcaaggctggtactcctgtagatgggcactccacaagcaggcccatgcgtgtggttcgccagtcgaggcagatgttctgctggcacagagggctgcgtaggcctgcagactggcgcactccaggctcgagcccggcatgaagcagctgtcgaacacgcaggcatcgtagtagtgctgcgggggcaccagtgcgtggcactgg

SEQ ID NO: 628118 - DNA, 404 bp, Homo sapiens
ccgtgcggcggcgcatgatgatgcactccgggcgcaaaggagctgacattatgtacacgggcaccgtccactgttgcaggaagatcttcattgatgaggggggcaaggcctttttgaatggtgcgtggtccaacgtactgcggggcatggggggcgccttcttgctggtcctgtacgacgagctcaaaaaggtgatctaagggccgaggactgctccacacacacacacacaccaggggaaccaagagaaccacgtagaatcctcaaccgtgcggaccatcaaccttcgagaaattccagttgtctttttcccagccgcatcctgcctgtagatggccggggaaggctctagaaaaggggcgcattgcgatccaaccatcggcagccgattccgtgtcttgatc

SEQ ID NO: 628119 - DNA, 303 bp, Homo sapiens
gcagccaacagccaagaaacctctccgcacccagttctccccgacaggttaagcgagccgtggttgtttctcccaaagaagagaacaaagcagcagaaccaccaccacctaaaatccccaaaattgagaccactcatccaccgttggctccagcccacccacctccagaccggaagcctcccctggctgctgcctaagggtgagcctaaccccgggccccttgggtagcgcgtggccgccccaagggccgggtggcgctgggggggggcggggccttgtgggcggggaacgtgggtggtgagg

SEQ ID NO: 628120 - DNA, 120 bp, Homo sapiens
ggcggaccatgatgtcacgctcatcgttataaccttcttcatcctcctcctcctctccactcacgtctcctcttcaccttcctcctcctcatcctcgtcctcctcgtcttccactacctg

SEQ ID NO: 628121 - DNA, 754 bp, Homo sapiens
agcggggggggcagaatagttctgcgaaggaaggacggtgtctgtgcttcaattcctgtcatgtacggggtctagaaaagaaggagggagtgccctgccgatagaacttatagctgcgctctcgaaaatgtctctacgtgtaccgtaggacacaggtgtccatcggggccctgctagtgacgtgagtcgcatggcagtgcacttagagtatatcaatgaatgactaagtggatttatttcccgtatcatgctcgggctgccccagattcgtgcccgcaccgattacgtgatagaataggttaaatccacttggagtgtcaggctagaaagttgaattggtgagtttagagtatccttgaagattataaagacacaagtgtatattgtatggaggtataaaagtgtagcatgcgttcagcatctgggtggagagcttggactatatttcttccgagttgaactggggaccatctgtgaagattgagattctacgcgatcacatgataggtgctgtgagcagtatgaacataaatgctcgctggaaattgactatccagatttttatatggagctagtcagtgtagaaaagcgacgattgtaacttataaacaagtatagttcaagaagtgggcaacagtttatattgtacgaaatgcagtgtagagctagattaaaaggcaactctttgcatagctagatctgcccgttttggaagagttaccttgaacagagaatcgttaagggtttatacgaa

SEQ ID NO: 628122 - DNA, 151 bp, Homo sapiens
tgtccgggttatacggatgtggtggaagaacagactgattgctggtttggctgtggccatcagggagtgacccacagtgtatgagatcaggccaggaagaggcacagccccccaataaccatcctactggcccgacatccgtactggcccg

SEQ ID NO: 628123 - DNA, 718 bp, Homo sapiens
  misc_feature (215)..(215): n is a, c, g, or t
  misc_feature (668)..(668): n is a, c, g, or t
  misc_feature (673)..(674): n is a, c, g, or t
  misc_feature (682)..(682): n is a, c, g, or t
  misc_feature (692)..(692): n is a, c, g, or t
  misc_feature (712)..(712): n is a, c, g, or t
ttttttatttttgtggggggggggggaaaaaccccccccttcctataaaaaaaaaaaccacatttttttgtttagaaaaaaagagaaaaaaaaaaacccctcccccccccccctcctttttttttttttaaaaaaaaaaaaaaaaaaagacacccctctcctctttgtggttgaaaaagaaaaaaaaccccccccccccctcccccaatattcanaaaaaaaaaaaacacaaaagaaggggcgcgccccaacaaaaaaaaaaaaaccggcgggcgccccctttctaaaaagaagaaaaaggggcccccccctttttttttctccccccccccctttttaaaaaaaaaaaaaaacaacccccgccccctcccccccccccccggggagaaaaacaccccccccccccccacgagggtgggggggaaaaaatatttttttttttcacccccaccccccccctgggggggaaaattttttttttttccccaaatggtggtgttttatggccccccccccccccccccccccctccttagggggggggggggcccccaaaaaaaccaccccctccccccccccccccaaatttccccaaaaaaaatgggcggggggcgcccccaaaaaaaaaaaattttccccgggcccgtgacaagcccttcattccttgntgcgnntgcaaggnccactggggntctacagccctgcatgtggncctcgt

SEQ ID NO: 628124 - DNA, 1736 bp, Homo sapiens
cgatcctgcgcggttgcttctctgcgcagtcagacgcttccttttactcgtccgctcctgccgttcctctccttaccgtaacgctgcgctgccgtccaccccgactggaacgcatctcgactgcgacactggcaccactgcagccctcctgcagtgcccccagcaacttacgtcctctctctcgcgctctgctgcacacccctacacacggctccgtaaccacacagcactttactccaccctctctacacgcgcttggcactacacctgcactgcacacacactgcacgccacccgaggctcgtactcgctctttacacgcaaaacccgcgctccacgctctccaaccgcgggcccctggcctggcgacaccacgcgcacctgcacggcgtctggcacaaccaccttcagcctccgcaacaccccccacgcaagacggccacacctgcacacttctacccgcacaaggcgcccacgcctccccaaacccttctaacacaccgcctaacaccaacccttgcggcccacaccccttctccggacaccaagcacctggctgcgcttgaataacccaaaggcccacctacaacctgtcgagcatctaatcaccacccaatatggcggagcagaagaccacttctactggcaagaccaacttaacaaacacaccacctagcgcccacggccctggcggctcttccttctctacacacggcggctactgccacaccacgcctagcctcgcggcatctccacacggggggcgccccaaagccatgcgcgaccttacactccccaacgcgctggcgcaaacccaacggcacgaaaccactccatacccacctcacgcccctaggactggcgcaacgcacgaacacgccacctggcccaccgcacaccgcccccacgcacaccgcaaccttgacacacagcaaccgcgcgacacagcgcaacggcgccacctagcctcggcaaaccaacgcgcttctccttcatacaacctatacttacacttccctagcggcaacacacaacgacctcgcgcctccccttgctcgcgcctccccatgctgcacgcgggcctagggacgctacaccgcccaacaccggggccttcccccaacccacctaccacacacacccacggctacaccacaaccccttagccacatcgccctgcacctgccacacgccacatgaacctgcaacccgacacgccaacctcgacactgccaccaccaagccggaacagacctgcacccgcaccccaccctgcacagccaccccgactgccaccccaccccacaccgccacgcacctccaccagcacacccccccgcccccaccccacacccacacccccacccagccacgcaaacagcctcccacacccgaaccgacactacccccccacgacgcgccaacaccacccgcacgccacaccgaccgccctacacacgcctcacgcaacccggggtcaccacaccgccacctctcaccaccgaccagcccaccgccttcacacaccacccacacacccacacacagaccacacggcgaccaatcacgcacacctctccctcacacgccaacaccacaccgacacaccagacactccaataccaacaaaccccacccaaccgagcaccactaacacatcagccacggaccagcgaaccccatcagccacacacacacctaccaagcacaacctaaataccacaacacacgcggct

SEQ ID NO: 628125 - DNA, 388 bp, Homo sapiens
gacttgcggcactgtatagtgctgttgttcatcatgtcacttcttctgtgagatcacatgctgtgcttcgaggctttttccttgtggaggcacgaggtggtaggtcacttgtaggcatggacaagttgtgtgccagcaatgcaagagatggagacacagtgttggtagccagtggaggaactgcagaaactgggctcatgatatgcattggttctacttcttctttcactttaatttcaggaacgggaggtgccaagacggaggaaagactgccacccacagtgaccgatggaggtggtgcagctgcaaatggtggtgatgggtggagtgatggggaccgctccaggaatggttgaaagggcaacggctggttgtgacgagtgcccag

SEQ ID NO: 628126 - DNA, 154 bp, Homo sapiens
gcagatactctgactggagatgtgctggaagatgcacgagagacacgaggaggcttggctaagaagacgattagagagagtagggttggagggttgacacatctctggatctacgaggaaaagagtaggtttggaggaaaagcaatcaaggtgc

SEQ ID NO: 628127 - DNA, 390 bp, Homo sapiens
  misc_feature (90)..(90): n is a, c, g, or t
  misc_feature (125)..(125): n is a, c, g, or t
  misc_feature (383)..(385): n is a, c, g, or t
caaaaggcttcacatgaaacaaatgcataaatgattgccctcctctgtttccatggttcacctaagccagattaaggtataactgactantccctctactctcctctcacatgtaaattgtatantcagtgaaaggctaatcagaaactcaaaaaaatgcaaccctttctctcttacctgcctatgcttgaagcccccgcccctcttcaagttgtcctgcctttcaagaccaatgtacaccttacacatactgattgatgtctcatgtctctctaaaatgtgtaaaaccaagctgtgccccaaccaccttgggcacatgtggtgaggacctcctgaggctgtgtcatgggcacaccttaaccctgggaaaataaactttctannnttgaa

SEQ ID NO: 628128 - DNA, 507 bp, Homo sapiens
tgagatcatgaattgtgcactactctggttcttatcacacaaatggagactacgggaaagaagagtgactaagatctctgaagaagggaaaagctagatgactgggccaccagagggaaaaaaagccgcgcagacagaccatgagttagcacttgtggttggcctgggccatcaatgagaagatctggtcttagagccctgctttcctggtgaagggccctgaaatcacctgtgttccagggcaactggtaacaataaataatggttgcctgattgtggggaattagctcaagtggtagagcgcttgcttagcacgccagaggtagtgggatcgatgcccacattctccaagctttattatttagacatcgtggctcccaaacactccaggtctccaaacccaagttaggtgtctggaaacaggatgctgctttggttccaggacgtagggagcaggaaaaatagaagggctggtgatggctccctcttgggattcaggatagggga

SEQ ID NO: 628129 - DNA, 172 bp, Homo sapiens
  misc_feature (76)..(76): n is a, c, g, or t
  misc_feature (162)..(162): n is a, c, g, or t
ttggggcccattggaaaatcgcagggttgcaaaagaatacaatcttacttgcagggggatattctctatactctcntttaatgcatctaaaaatcccaaacatcccctgggtggtgatcacttacagttgtggccacctttattttatgtactttgattaanaaaaaaaaaa

SEQ ID NO: 628130 - DNA, 442 bp, Homo sapiens
cctctctgctcccagattcagcgattctcctgccttagcttctgagtggctgggactgcaggcacgtgccaccatgcccagctgatttttgtatctctgcctcccagaattcccaaatagatgggactataggtgcgcacaccgtgctggctagtttttgtattttttagtagagacgaggtttcaccgtgtcagccaggatggtctcgatctcctgacctcgtgatccgcccacctctgcctcccaaagtgctgggattacaggtgtgagccaccgcgcccggccaatttttgtattttttgtggagatgggatttcgccatgttggccaggctgttcttgaactcctgggcccaagtaatctgcctgcctcggcctcccaaagtgttgggattacaggcgtgagccaccacgcccagccattccatttactttgggcttt

SEQ ID NO: 628131 - DNA, 131 bp, Homo sapiens
ttcagtgcgtaagagaagagcgaattaaagtgacagaagccctttgagagtgcggagtgcgggctgacatgcttgagcccaggagtttgagaccagcctggacaagatagcaacctcacctctacaacata

SEQ ID NO: 628132 - DNA, 229 bp, Homo sapiens
cacaactacatactccaaggaattgactcagtttttgttggttatgtcagaggtgttgaaaccacagcaacaccatcttgaataggggctgggtaaaataaggctgagacctactgggctgcattcccaggaggtttggcattgttactcacaggatgagatagcaggtcggcacaaaatataggtcacaatgacctgatgataaaacagggtgcagtaaagaagccgg

SEQ ID NO: 628133 - DNA, 556 bp, Homo sapiens
tctagaggcactccccagtgtcggcctatctgtgtcttctcatttcatcccgcaggattaccttgagcatttcttacaaggcaggtctagtggtaacaaactccatcagctttgttcgtctgtgaatgccttaatttatccctcatgtttgaaggacagtttggacagacaaacgattcttagttgacagttttttctttttgcactttgaacattttggcccactgccttctggcctccaaagtttctaataagaaaactgctggtaatcctatggattatctcttgcatgtgatgggctgcttcttccttgctgcttttaagattctctcatctctgtctttcaaaactctgactataatatgtctccttgagttcatcttaacttggagctcaccgagtttcctggttgtatatattcgtgacttccatcaaatgtggaaaattttcagtccttatttcttcagatattctctctgcccttttctctttttccttgtttcccacaatgcgtatgtaggatagaagaacctgacagaagggggtaccgagctcg

SEQ ID NO: 628134 - DNA, 448 bp, Homo sapiens
ctcagggaacagacagtttaaagtgaacaggagcccttcgctggcagccaggagccaatggccacctttcctgtgccatatgatttgcctccagaactgtatggaagtaaagatcggccatggatatggaacattccttatgtcaaagcaccggatacgcatgggaacatgtgggtgccctactgagaatcttgaggcactgtaaaatttaagtgtaagacattgatctctaaacatggaatctattctttgtactggatgtccacttaccttaaagtacttatttgcgcccttacaaaaatctatccaaacgtcaactcttatgaactggatgtatggttatacttttaaatgtacattaaacattcctaacacaagtattatatttcttaattttataaaaaattattataatgggcctgctccggcctcaacaagcagagcttct

SEQ ID NO: 628135 - DNA, 879 bp, Homo sapiens
gtatttgtgttttgttcgccgatctgagcgaatgaatacttgacccactcttttatccagatactggccgtcgttattacaagacattcccttgtacctgctgaacttctgggcttgtgagctggatatgcaaaaaatggttcccctacttcttggtgggtgcctgtaatcccaggtacttggaaggctgaggcaggagaatctcttgaacccagaaggcgaaggttgcagtgaaccgagatcatgccattgtactctagcctgggtgacaagagcaaagactccgtctcaaaaaaaaaaaaaaaaaaaaaaagagaacgcagaaagatgagggaaaacaaggagcacacacatggtgtttgcaacaaaggcagcaccattctgaaaccccccgtggagcacacaaagagactcatcacaccacacatagacccctctcaaacacataggtgacgaaacacaacaggtaatagcaaaaacaccactacacccaattttgaacccaaacacatatcacctcctccaagaaattctcctaagacaacaaacaaaaacatcttgtaaaaacaccatatataaacaaaatacaccctaaaaatgccatccaccacatactcactccacgtatatcatcaaaaataaaataaaaccacataacacaaggcttatcaaaaccaacacaataactattctacgacccacatatacataaaacttaaatattaacaaataacaacaaaaataatcatccgaacacaaaaaatacttaatagtatccacatatagcatattccccaatacttcacccaaaaataattactaaaaaaatacaccacaaaagatggtccatattaaacaaagcatatacaatatataaca

SEQ ID NO: 628136 - DNA, 96 bp, Homo sapiens
ggggggggcgggtttttgggggggggggttttaacctcttcccgcccccccccgggattcgggggccttttggaacccagggggccccttgttagc

SEQ ID NO: 628137 - DNA, 762 bp, Homo sapiens
ggagagaaagcaggaggaggtcggggagccagccatctgcgcccgtgcccctacggagccggtgcacagcctggggaaggggcacgcagcccccaccaacgtggtggagaaccccctcccggagacagactctcagccattcctccctctggtggcccctttagtgagccacagttccacaatggcgagtctgaggagagccagagcagttcctgaaggcgctgcaaacgccgtcaccaccttcgtgaacccgcataagagtaaccacatcgtgggccgcagcatcaccaatgactcggccgtgctctcactctttccagtccatcaacggatgcacccgcagtgtctggagcttgtcaaccaagcttggacgaagcgcagggctgtactatgaggggggttgccagaaccaaggctgggcacagattccggattccccggggggccgcttgaagttgccttgggcgaaagagccacccggggagaagctttccgccgggcagtgcccgaatggaaggccagatcgcggcccagggcccaagaattccatggtgggcccagaaagctgtggagaataaatgcgggggcagcaaagaacgcgccatgagtacccttggagggtgtccagacggccacctgtggacaaatccaggcgtgcctgcaactgaagcacggagagaaggacacgggccatattgcggggttgtgaacacgcagcacgcgaagggctccacattcgcggccaaatggcccggttttccc

SEQ ID NO: 628138 - DNA, 762 bp, Homo sapiens
ggtttttttttgggtgggtgggtggtttttaacaggcggggtctcactatttgggtccaggctagaagaatttctaatggtctataacacctcccgtttgggcaagtaaatccagaataatttaaggtcctttggtcatcagtagtttggcagacttaaaagtgtaaatttagaattagaagatgaagctatagtagtaagaatctcaagttggaagggcttgggggagccaaagcagcatatagagcataggcttgaattaaatctcagctcagtcacctgcaggattttaggcaccagtgattcacctttctgagcctgttcttaatccgtaaaaggatttataataattcttcacagcgtggtgaggataagtgaaatgtgttaaatgcctactacagtaggtgctcagatattatcaatttttcattatgcacattgttttcctgcttttaatggctgtctaaagtctagggaaaagggaagactgtaaaggatgagtagaaaaactgtgtaagctaatcatcaatggacttatttgccttccattttgtgttctaaaaattaggcacacaaaaggaaaccaaattttaagatgggaaagaagaagaaatgggtgtcagggctctaagtattgaacttaaggtttagggaaacgatttggtttgaatgaacatagaagtgtggctccctcactggaaggggacctgggggggaaacttggctgcaaatgttctggctttcacgtgtaacgacacgatg

SEQ ID NO: 628139 - DNA, 1214 bp, Homo sapiens
gaatattatccctaatacctgccaccccgactcttaattcagtggtggaagaatcggtctcagcaactgttgtagtctatcaccattaggccatttaagtttagtactcataagactggttaatgaatagacgaactgacatcgctacacagagcctctccaggaaggaatacggacgtaatgttctgtgtggaccactgtatgtgtccttacttttcttgcgtgtaggcaggtgtgtaagtatacttcatgcttgttgtaaccatgccatgtacttcttgtaaatgtggcagacatccgagagcatatgcacgctagacacagactttgtttcacaggaacacttgtttgacgaccccaggttaatagaacacgttcaatactgaggaacaagaataacagacaatatatatacatagagatgatgagcacctatcaaccgagatgacacaaaggaagaaatataaaacccctaagaactggatagtaaaaaagaaccagaacggtggagacacatattcacacaaaaaacccggaacacatggatccctaggattgccgtccgaggtttaacaaggacttgagatcgtgactgctggcccaaagcgagggaagccgattttcgcgaccactgaagtctgcctatgaagaaagcggggggaccttttcaccaagggaaggcgggtgtctgtcatccgaagtgttttaccgacacaagcgcttcaatttgaaaatgaaccacaggaactttttgaaagctggcgacacagcatgggtcggaggatgctttcccgatagagaggcgatcggaaagccttgtcccaatagaaggaccaatttcccgaccggtgccttcctgctggaagggaacagccaatccagcgacttgccaaccaggagaaaagacgcgcacttgagaggggagcctaattggaaaggttgaacacccaaagggtattgtacccaactgggaggaacggccataatccactgacaagtcccaccccggaagacggcgtgcggcaggactatacgcgggaacggcccccagatcaccccaggcgcgagtttccaaagaaaatccccaacaaattttccacggacgctcctatatccccgggcagcagaagactctggacagggctggcccatcttcctcgcccccaggagcctgggggtgcacctcgtggggaccccccgttggtagggggacc

SEQ ID NO: 628140 - DNA, 308 bp, Homo sapiens
cagatggcctgctttattttatacgaagagtttgctatcctccgggcactcttaaagtctggcattcacggctggagtgtatagggcccatccacttctctcccagcaggtgcgccagagcctccatccggtcagagccaaataactatgtgggtttggccatccacatgggccacggtagatgggcagcccaaaggctccatatcttgcaggctgcctcagtgctctccttgagctggttctaacacctattggtgtcgcgctcttttccagaagtccctgggcttgttctgccagacataacagcc

SEQ ID NO: 628141 - DNA, 849 bp, Homo sapiens
cgcgcgtcatgtctcccgatggtgggagcgttcttcttctaagcggcgcctccgtcctggtgtcagtagtcgagcacgatcggttggttcgtgcccctgggtggttgtcttgcctgtctcgccccgcgcgccccgctcgcgcttttggtgcacgcccactcgtttttttccgccagtcactccttcgttgatgtgtctgctccgcgcggccggccttttttttttttgtttcccgcccgaccgggggggttaccatctcccctctctgtgtttatctgttgtctgcggctcgctaaccaacgtagttgtttcggtacgcgacgtcctcctttcggcggcgcttcgataaatgccttctgctctcgacggaggtctctcctttgtggttccccccccatagttgactttgtttggaggagtttctcttcgaccatccacctgttcgaacctgcgtctcgtttcatcgccccaccccgctttgtgcactcaccgtgcgtggggtgatatatctcattttttgtgtgtgagacaccacatctgtttctctttcgtctctagttaatactcatctatctcatctctctgctccacgagagctcgccaacatcattattctcacgcacaccacaccattcatctcatcctttcatacacatttactccaccacgacacaccatggcggcgtcgactcacactcacacacacccacaacactcttcacaacaaagagttatcaccccctctttctccccgccgcatcaccccccccccttttttcaccccttcccccccttttctctcccctccccccccccccccccctctcccgctttttttttttttaaata

SEQ ID NO: 628142 - DNA, 2009 bp, Homo sapiens
  misc_feature (1812)..(1812): n is a, c, g, or t
tgggtgggattttgcccgtccggtggtgtcgaccgaaacttgctctgcgccgtctgtttgtttgtggtttgtgcgcggcgtcgcccggtgattgttctgtccctcgggtgtgtccttcatccatattgcgggtttatgtgtcttgttgcgcgcctcggtcgtcctggtttgttgtctcccaccctggtgtgtttgtcttacgtctgcgccgctgagcgtgttttgtgtgacacaccctgacgttaccttgttgtcgttcagggggtgggctgctcccttcctctgtatggtgatcgtcttccgtctggttcgttgtgttgatactgtccgtcctcttgtgtcaatgttgtgtgtgggtggggcgccctcctggcgactacggtggtgtttgtgtctgtataggttggctagtatatgggtaagtgtgtgggggccctttgtgtcatttgcttgtcgaaacccacccgccgggggggagaagtggggctgtgctctctcgctcgaatttgctgctttgctggtgtgacgccaacatgatgtttggtggctgccgtggtagttgtgtgtgccgtctttttgtgtgtccgtctgtgtgcccagcacttgcttgtggtccgtcgtttgcagtccactcagctgttggtttgggtgcccccccctcgttgggggtgtcctggccgccttcgtattataatgcgctgcttgtcgaccatgattgtgtggtgtggtggggaatgttgcacctccgcctgtcttctggcctccctcgttgttgttattcccccctgggtttcttccccccccttgcgcggtgaggtaggattatggtctcccgtctttgctggcgcacgagcatggtattggttgggttgtgtcaccgctgttcccgctgtggggggcctgccgtcgtagaacctgcctttgtgcgtctgcgcgctgcttgcgtggtgccgccggatgtttgtgtccgctcagcggttttgggtgtattatattgctttgcccatctgtgcgcacaccagcgttgggtggaatatgtgttgttttctgtccgtgtgcctctcagtgtcgttgtatgtgtgtccaagccattcgtgtggcgttgttgtccggcgcgtaggatgtgtctgttctctcctttaggagaggcgagaccacccccttcttctgtctgtggtggtttggtcggagtagtggtctccaccaccatgcgttggtgtgggggtggggttcgctaccaccaacggtggtcgtcgcgcccacacacttgttgggggtgttgaggctccttcatgagttaggggacatcatgatatccccctgcgtgttcttcttctcgtggggcgctgttgttcaccgcggccgccccaccggggggccccctgctggtttgttctgcggggggagatcccctccccccacatcgcgctccgatgtatctgcgcgccttggatgaggcgccactacttgtcctctcattagagaggtgttctcctcgtcgtcgtcttgggtgtttgtgttataagagagtacgtctgcccgcgtgttgagaaatgtgttcccacgcagagggcgcacgccacactcacaccgtcgtgtgtgtttctctgctcacgcgtcgagggctcactccacgcggtgatagacacacgggcgccacaatttctctgtgtgagaacttttgtatactctctcgttgtgttgataggcggagaagagaagtctgcccatgtgtgggccccacgcagacgtttgtataaaccacgccccttgaattactcttgggggaaacaccgggggaagggaataatngagaatggaaaaccctcgttggctgcctgcacctcgtggtgtgccctcttggcctctggcttgagatgttgataactcgtggggattcaccttttaaggccctggcccgtaggatatcccccccgtggcacctcggagacacccgtttgcatctgactgacccacggacccattcgtccggttcctggagcccaaaa

SEQ ID NO: 628143 - DNA, 529 bp, Homo sapiens
gctgccaaaatggtgtgtattatgaaatcctgacacatgctacaacatggatgacctttgagggcattatgctatatgaaataagccagtcgcaaaaggatgaatacagtgtgatcttacttgtatgaggtacctagtgtagtcacattcatagagatggaaagcagagtggtggttgccaagagctgtagggaagagggaatggggagttacattttagtgggcacagagtttcagtttgagataatgaaaatgttctagagaaggatgagagtgatggttgcacaacaatgtgaatgtacttaataccactgaactgtacacttaaaaatggtttaaatgatgaatttttgttttatctactttaccacagtgttttttaatgttaagaagaggaaaactttcctggtttttccaaagaaaaagtgttaatagtttaaaataccaccataatacattttagtgacaatcagttaaaatttcttagtagtctcaggatctaaaacaaaagtacaatatttttaaaaga

SEQ ID NO: 628144 - DNA, 498 bp, Homo sapiens
  misc_feature (77)..(77): n is a, c, g, or t
  misc_feature (84)..(84): n is a, c, g, or t
  misc_feature (107)..(107): n is a, c, g, or t
  misc_feature (109)..(109): n is a, c, g, or t
  misc_feature (143)..(143): n is a, c, g, or t
  misc_feature (150)..(150): n is a, c, g, or t
  misc_feature (379)..(379): n is a, c, g, or t
  misc_feature (484)..(484): n is a, c, g, or t
  misc_feature (493)..(494): n is a, c, g, or t
ctgctgcttttctaacactgcgggaagcttcctggcaacttggtggtagaattactagagaaccgcagctatctccnccagccnagctgtggtattccaaaccaaangnggcaagcaagtctgcgctgaccccagtgagtccngggtccnggagtacgtgtatgacctggaactgaactgagctgctcagagacaggaagtcttcagggaaggtcacctgagcctggatgcttctccatgagccgcatctcctccatactcaggactcctctccgcagttcctgtctcttctcttaatgtaatctcttttatgtgctgtattattgtattaggtgttatttccattatttatattagtttagccaaaggataagtgtcncctatggggatggtccactctcactctttctctgctgttgcaaatacatggataacaccgttaattccatgtgttttcataataaaactttaaaataaaatgagnaaggaaaanngaac

SEQ ID NO: 628145 - DNA, 753 bp, Homo sapiens
  misc_feature (433)..(433): n is a, c, g, or t
  misc_feature (447)..(447): n is a, c, g, or t
  misc_feature (738)..(738): n is a, c, g, or t
agaactattctgtctaacaagcgtgcctgacgtcgcactcacggtcgactaataaaagtatctcaaggactagacagagtaccagcactaagcgcgctttgaagcttctaggagcgtcactaccatcactaaccaggagtattaaccaactgagagatcctaatgcgctagaacaacagttcacctgatcaattgaggactctccgacgtacagagactcacagacttagaacagaccgttacgtactgtacgtatggaccacaacacattggggctcactcgcccaccacattaacaacataaaaccctcattctcgcgggacgactcggtcaagttgatacacctatccagcatgcttatgctatccgtcaaccttgacatcaattccggcaattcctcttatagtgagtcgaattacattcacttggcgncgttttacaacgtnatgaatgggaaaacgctggccgtctcgaaccaaatggctttggaccacagcacgcttttgccagcgggcgaaattccgagaaagttggcacaattcgcctttttaaaagggggtccaactgaatggcgatggattcaaacgcggaatagttaaaacaagtgcgggccaaatttaggagattggggaaattcaatcatacggcgggttggtaaaaaactgccaatccaagaatcctccccagcgaatgggagaacagtattaggacggcgcaatgacaacctatagtatagnccggcgaagcttcca

SEQ ID NO: 628146 - DNA, 181 bp, Homo sapiens
gagtagagaagttcaccatgttggccaggctggtcttgaactcctgacctcaggtaatctgcctgccttggcctcccaaagtcctgggattacaggcgtgagccactgcgcccggcctagattaatttttgatggagtgcatgttatgtacagtggaataggagacatttgtgagttagtg

SEQ ID NO: 628147 - DNA, 96 bp, Homo sapiens
acaacaacccaactatagatttatatatatatgtattatagttgttccttctaagcttaagaagtctctaataaaatccataattccttataaaaa

SEQ ID NO: 628148 - DNA, 361 bp, Homo sapiens
  misc_feature (22)..(22): n is a, c, g, or t
  misc_feature (32)..(32): n is a, c, g, or t
  misc_feature (41)..(41): n is a, c, g, or t
  misc_feature (60)..(60): n is a, c, g, or t
  misc_feature (69)..(69): n is a, c, g, or t
  misc_feature (91)..(91): n is a, c, g, or t
  misc_feature (112)..(112): n is a, c, g, or t
  misc_feature (127)..(127): n is a, c, g, or t
  misc_feature (166)..(166): n is a, c, g, or t
  misc_feature (262)..(262): n is a, c, g, or t
  misc_feature (298)..(298): n is a, c, g, or t
caagagctttagagcgagaganagaaagaaanacacacacncacacaccctcaacgcagntagagaganaaagagaatggcgagccaaggngttgcctccatgttcgctctngcattgctcctcggngccttcgcctccatcccacaaagcgtcgagtccatcggngtgtgctacggcatgagcgccaacaacctgccggcggcgagcaccgtcgtcagcatgttcaagtccaacggcatcaactccatgcggctgtacgcncccgaccaggcggcgctgcaggccgtcggcggcacnggcgtcaacgtcgtcgtcggggcgcctaacgacgtgctctccaacctcgccgccagcccagct

SEQ ID NO: 628149 - DNA, 246 bp, Homo sapiens
tgtactcatgtagggggaaatgatctatatccattgctccagtttggttgagctgttcccctccaacttccccctcctgaaattattctcaggcaaattccagagtgggatattatttcattaggcagtctaagtaagaatccttgttcttttaagagatacagactcatatcttgcatattgtatttttccatcaatacctattatcatccccttcattcgtttaatatcgttcaaggtatctag

SEQ ID NO: 628150 - DNA, 354 bp, Homo sapiens
ctcagagatcctaacactggctggaacctctgactcagagcatgtctttaaagagtccacatctggccaggcgcggtgcacatgcctgtaatcccagcactttgggaggccgaggcgggtggatcacgaggtcaggagtttgagaccagcctggcaacatagtgaaaccccatctctaataaaaatacaaaaaattagctgggcgtggtgcaggcgcctgtaatcccagctacttgggaggctgagacaggagaatcacttgaacccaggaggcggaggttgcagtgagccaagatcatgccactgcactccagcttgggtgacagtgcgagactccatctcaaaaaaaaaaaa

SEQ ID NO: 628151 - DNA, 170 bp, Homo sapiens
cacgccagtatatttacgtatggaatagacgtattacacacgagcatatttcacctccgctaccataatcatcgctatccccgacgagccacccaaagagccacactatgagccacccaaagcgccccactatgagccacccaacgcgccacgaggagccacgcaatgag

SEQ ID NO: 628152 - DNA, 173 bp, Homo sapiens
ttcgactgtcgactaattgtagagggaagaggttgtgctggtctgcggagtggaggttgtgctggattgtaggagcagaggttgtgctggtggtgggaacagggctggaagtagtaccaggaccagaggttgtgctggctgtagaggcagaggttgtgctggcttgtaggagc

SEQ ID NO: 628153 - DNA, 183 bp, Homo sapiens
tccccggatgctgcacagtcatgaaagggatcttattgaggctccaggccacggggcctgggcaggaggctgccttcaaggaaagaacaaccttatttgagccttcttctctgggacgcaggttgtatggtgtgtccacaccttcttctatgcggcaagttgacaagcacgaagggtgaaagg

SEQ ID NO: 628154 - DNA, 502 bp, Homo sapiens
tcccagtctctggtaaccatacttctactccctatcactgtgtgtaacagatatattttaatgtatagctacccacatattagtcagaaaatagcaatggtagtctatactagtgcctaggattatttaactatagcatgacctccagataccatccatgtagtagcaaatgacaggatctcattcttactcatggctaaatagtactccattgggtatatgtaccacattttcttatatcatgttcatctgagcacttaaggttacttccaaatcttgactgtagtgtgaatagtgctgcaataaacatgggagtgcagatatatctcttgggtgtactgaagttgcatcattatgttaatgaaatgaaatcagtggccaggtggaaaccacgaggtaatcatccatcacagtatggatgctctacaacttaccctgataaagacatcgtgagttgaacaatatcattaagttgacaactgcatttactacacctaatctg

SEQ ID NO: 628155 - DNA, 311 bp, Homo sapiens
  misc_feature (237)..(237): n is a, c, g, or t
ctgtcccggagatgacgagagctgagcgagagtgtgacgaggctggatgaccggctccctggggttcagccgcttctggcctcagcattcgctctccgtgtcccgctccaggggcactggtggcctgggtggtgcatgtggaggagctggctttggcagccgcagtctgtatagcctgcggggctccaagaggatctccattggagggggcagctgtgccatcagtggcggctactngcagcagagccggagcgcagctatagctttggtggcgccgggagtggatttggtttcggtggtgcagaccggct

SEQ ID NO: 628156 - DNA, 987 bp, Homo sapiens
tgggaaaaaccaccgagacattattttaaaaaaaaaaggattttccccccagggggggaaacccgggggggggggccggtccgggggggggggcgggggccccccccgccgccggggggggaaaagagccacccgcgcggggcgagggggaggagagctccgccaggggagggggggcccccaaaacgaccccccaaatagtgacttgctccccagcaaggggtgtgaaaaaagcgactatcacaggcagaggggggcgggcacaccgaccccgtggaaagaaaggagcgagccaaggggataaacgcacaggcggggccagcgagggaggagtggtcagcaggcacaccaccaggcccgagtgatgatgggggggcccccagtggggggggactaccagctgtgtgggggggggggcacccagaagaaggtgtgtgatgtcggcccgcggggtgggagagaaaagaacccccctcccttggggggggggggggggtgtttgcttctggccccatggtgaaagaacagcggagtggtgcggagcaaaacatacatgctggacacttcttttaacaccaggtggtggtcttctgcatccgtcgcacgacagctgtgcacacaaaacacgttcggcgtgagaaaaaatgatcgcagcccccacgtttgtgtactagctggtgggccgcagacgggtttggttcccccgtattagagtgtcggaaacaaaacgtgtgcccttctgggatataagacgccggcgaccacaacggtgcgtccgggtgtgggaccaacctaggtagttacatcaccccgtgttagggagacacgacaaactatagcgtgtggtccccccccaaagtgcagcttcatcaccggggccgagtcccacgagatctggtcgggcccctgaccacgtacaggaagttatcacacggcggcggcaccggaggaagagacgcggctaatgggcggagcagataagaggag

SEQ ID NO: 628157 - DNA, 524 bp, Homo sapiens
  misc_feature (473)..(473): n is a, c, g, or t
atatgtctgtgcaacttcatagatcatggagtagtccatgagcttcggggttagagactcagtggctctccaggtgtaagttccaatatacaaacatgaaacatgtttggagcaacttctttgctaaactgggtaatagtttttcaaatattagaatatttcctcaaaaaaattttttttgctagggacagtctcctgctgtcacccaggcgggggtgcagtggcatgatcacagctcatggcagctttcatttcctggactcaagcaatcctcctgcctcagcctcctgagtagctatactttagttatgcgccaccaagtctggttaattttttttgtatttttggtagagacaaaaaatataaaagaccagccttgttgcccaggctggtctccaactcctgggctcaagcaatctgaccacctcagccacccaaagtgctggaatgacaggcatgccaccatgccctgncaggaggacaaactttggggcagagccaaatttcttcagcaggtgacaaac

SEQ ID NO: 628158 - DNA, 249 bp, Homo sapiens
tgttcggcttgagtgcgcagtgttcccaggtgtcgatcacagcaacacaggctccgagtccagggctctggacacctcccacactcactgggaccagaggcgagcccgggccagctgttccggtgttctaggctcattaagcccctatactgactcccatggtgctgtatatcataaattcacgtatggacatcattaaaataccatacaagcaaaagcactggtgaactctagactacatataacaag

SEQ ID NO: 628159 - DNA, 989 bp, Homo sapiens
  misc_feature (31)..(31): n is a, c, g, or t
  misc_feature (47)..(47): n is a, c, g, or t
  misc_feature (61)..(61): n is a, c, g, or t
  misc_feature (167)..(167): n is a, c, g, or t
ctgcagggcctcaagagaagtcctttctatnaatagttctgcctgcnagccttacctattngactgagtcacttgcttctctgggcttgcagcagcatccagggaggggtgtggtgagagtgcccctgttcccagcccaacagctcctcttttttctcttatgcatnggatttttttttcaagaaacatgcttttactttaacaaaaactgaaatccactggtctacgtgatttctaagatttcctatgtgcttagtcacccacagatgaaggaagatgggacagcaatgaagttatgaaaatgaaatcgaatgcttgtgactgcagttttcccaaggtttcatagaagtggtctggaggctcttcaaggagaactacaaaccactgctgaaggaaataagagaggacacaaacaaatggaaaaacattccatgctcatggataggaagaatcaatatcgtgaaaatggccttactgcccaaagtaatttatagattcaatgctatcctcatcaagctaccactgactttcttcacagaattggaaaaaaactactttcaacttcatatggaatcaaaaacagagcccgcattagccaagacaatcctgggcaagaagaacaaagctggaggcatcacgctaactgaattgaaactttacctacaaggctccgttaaccgagaacagcatgctactggtaccagaacgagattttgaaccaatggacaggacggaggctcaaaaatataccaaatttacactcggatcttgacaacctgacacccacagcaggggaacttcccgtcactaattgtggggaaacggctggcttttcgaaattggatgggacctcttaccttcaaattacagggcacattcgtgacggctcatctaacggccactggttgggcgcatcggaaaagggcacgaggataaagtgcaatgagagtgcgaaacactctcgggcccggcccgctcacctgtccccc

SEQ ID NO: 628160 - DNA, 776 bp, Homo sapiens
  misc_feature (47)..(47): n is a, c, g, or t
  misc_feature (109)..(109): n is a, c, g, or t
  misc_feature (116)..(116): n is a, c, g, or t
  misc_feature (131)..(131): n is a, c, g, or t
  misc_feature (135)..(135): n is a, c, g, or t
  misc_feature (171)..(171): n is a, c, g, or t
  misc_feature (205)..(205): n is a, c, g, or t
  misc_feature (210)..(210): n is a, c, g, or t
  misc_feature (213)..(213): n is a, c, g, or t
  misc_feature (248)..(248): n is a, c, g, or t
  misc_feature (294)..(294): n is a, c, g, or t
  misc_feature (366)..(366): n is a, c, g, or t
  misc_feature (380)..(380): n is a, c, g, or t
  misc_feature (386)..(386): n is a, c, g, or t
  misc_feature (423)..(423): n is a, c, g, or t
  misc_feature (428)..(428): n is a, c, g, or t
  misc_feature (525)..(525): n is a, c, g, or t
  misc_feature (532)..(532): n is a, c, g, or t
  misc_feature (561)..(561): n is a, c, g, or t
  misc_feature (588)..(588): n is a, c, g, or t
  misc_feature (653)..(653): n is a, c, g, or t
  misc_feature (660)..(660): n is a, c, g, or t
  misc_feature (678)..(678): n is a, c, g, or t
  misc_feature (697)..(697): n is a, c, g, or t
  misc_feature (702)..(702): n is a, c, g, or t
  misc_feature (763)..(763): n is a, c, g, or t
agagctgataaatataacgcaaccaatgagtgctgcaggatagtggnacaaagtgtgtcatgtgtctgcatagcttctttgcgccatataatgcattccacacttaagnttctccntctaaaaggcggcgnacangtgaatatgtgctcataaatgtgctgtaaataagtngcattttcatggcaagccctctcatctgccagcnatggntanactcacactattggaaaaaatctaaagttaacaanctggtttagctatggaaatgtgtctatttgttcctcagctatgctntctgtatcttacattagtggctctctagggggcggggggtgacaagagcagcatgttctccaaagagggtgnatcataatccccantgattnagatactgtgcctggggacaatcttccttcaagtccnaatgnatcattataattatcaaccaatggtacatataagagtacggcatgtgctgggacagagaaaagacagtcgacaaacactattctacatgaaacaggnaatcttnttttatgagtcactagaaaactaactgtnatactgacaggctccatccagattatnaaatactacaaaatgagaactgtttcaacaactattcagcataacgtttatggacaaaatgtatntagtatntcttatattctatatgtnttttatcacatagtaaggnatgcngaggtgcttaagccatccaataaattgaaaatacaaactttacatttctacgtttgtcagngtacaggattctg

SEQ ID NO: 628161 - DNA, 470 bp, Homo sapiens
  misc_feature (31)..(31): n is a, c, g, or t
  misc_feature (47)..(47): n is a, c, g, or t
  misc_feature (61)..(61): n is a, c, g, or t
  misc_feature (167)..(167): n is a, c, g, or t
  misc_feature (395)..(395): n is a, c, g, or t
ctgcagggcctcaagagaagtcctttctatnaatagttctgcctgcnagccttacctattngactgagtcacttgcttctctgggcttgcagcagcatccagggaggggtgtggtgagagtgcccctgttcccagcccaacagctcctcttttttctcttatgcatnggatttttttttcaagaaacatgcttttactttaacaaaaactgaaatccactggtctacgtgatttctaagatttcctatgtgcttagtcacccacagatgaaggaagatgggacagcaatgaagttatgaaaatgagtaagtacagctatccataggagtagcggctactaccagcaatcgctctgcttaggtctccagcactgtcaagttactctactggccctnggcttagtcaagactatttgaagataaacttttatctttggttaaagctaatatatttttgctgcctcattaaat

SEQ ID NO: 628162 - DNA, 716 bp, Homo sapiens
  misc_feature (673)..(673): n is a, c, g, or t
  misc_feature (675)..(675): n is a, c, g, or t
  misc_feature (700)..(700): n is a, c, g, or t
tttggtggtggtggttttgttttgttttggagacggagtctcactcttgtcgcccaggctggagtgcaggcttggctcactgcaacctccacctcccgggttcaagcaattctcctgcctcagcctcctgagtagctgggattacaggcacccgccaccaccccccgctaattttttgtatttttatttttattttatttttttatttttttttgagacagagtgtcgctctgttgcccaggctggagtgtagtggtgcgatctcggctcactgcaagctccgcctcctgggttcgcgccattctcctgcctcagcctcctgagtagctggggctacaggtacccgccaccgcgcccagctaatttttttttttttgtatttttagtaaagacggggtttcacggtgttagccaggatggtctcaatctcctgacctcgtgatccgcccgccttggcctcccaaagtgctgggatcacaggcgtgagccaccgcgcccggcctattttttgtatttttagtagagactgggtttcatcatgttggtcgggctggtctccaactcctgacctcaggtgatccacctgccccgccccccaaagtgctagtgttacaagtgcgagccaccgtgtccggccgattctgaacagttttaataccattgctatttttgngnttttcctgggccttttttttttttnttttttttttgagaca

SEQ ID NO: 628163 - DNA, 158 bp, Homo sapiens
ttatgcacgtctctttgacatccacaagcaagtctaaaagagggcattgcccagactgtgtaccatgggcctgaatcgctcagactacatgtaccagcgcagctgcaatggtccccagccctgaaacatgatcgaaatcaacaccatctctgccagca

SEQ ID NO: 628164 - DNA, 645 bp, Homo sapiens
caccgatccattatggtaaacccaaaggattataaatcatgctactataaagacatatgcacacgtatgtttagtgcggcactattcacaatagcaaacacttggaaccaacccaaatgtccatcaatgatagactgggttaagaaaatgtggcatatatacaccatggaatactatgcagccataaaaacagatgagttcatgtcctttgcagggaaatggatgaagctggaaaccatcattctgagaaaactatcacaaggacagaaaaccaaacaccgcatgttctcactcataggtgggaatttaacaatgagaacatttggacacagtgcagggaacatcacacaccagggcccatcatgaggtgtggggctgggggagggatagcattaggagaaatacctaatgtaaatgacgagttaatgggcacagcaaaccaacatggcacatgtatacctatgcaacaaacctgcacattgtgcacatgtaccctagaacttaaagtatagtaataaaaaaaattcaccaaacaccacaaaaaaaatcaagattgtcaaagaaaatttccacgtcccccgaaatcaaataaatagttagacaagcaggagttaaccagatatggccccattggcaaagtgtcca

SEQ ID NO: 628165 - DNA, 472 bp, Homo sapiens
gtgtcgtctagaggatcccatgcgcgacgcttccatcaagattatgctctgggggcaagaataaaaaaagagaggctagggtgtggtggctcatgcctgtaatcccagcactttgggaggacgaggagagtggatcacgaggtcaggagattgagaccatcctgacccatatggtgaaaccccgtctctactaaaaatacaaaaattagctgggcgtggtggtgcatgcctgtaatcccagctactcgggaggctgaggcaggagaatcgcttgaacccaggaggtggaggttgcagtgagctgagatagcaccacttcactccagcctgggcaaaagaacgaaactctgtcaaaaaaaaaaaaaaaaaaggtcccaggggtatgggattggggccgggggggagagctgctatatcctcgagacggggcacatattagattctcataaagaactcggggtgggaggaacgc

SEQ ID NO: 628166 - DNA, 103 bp, Homo sapiens
gtctccggtgttatagaggatccctgtggagacggggtactaatctgtgtcaggcaggagtgcagtggggcagtcatggctcattgtagccttgatctcccaa

SEQ ID NO: 628167 - DNA, 179 bp, Homo sapiens
aaatcggataacacaggccccagcatgttggagtgtccttggggggacagatcttggggtctacaggtggctcacacctggtaatcctagcactttggggaagccaagattgggaggatcacttgagggccaggagcttaagaccatcctgggcaacatggcgagacctcgtctctata

SEQ ID NO: 628168 - DNA, 674 bp, Homo sapiens
cgtggtggctcacacctgtaatcccagcaccttgggaggctgaggtgggaggatcatttgaggccaggagtttgagacctgcctgggcaacataatgaaacttcctttccagggagaaacaaacaaaaaaacaaaaaaaagaggcctctgggaagagccttcttaatttggggttaaagggccagaaatattaaaatttccctttgtgtggtgccaaaaaaaaaaaaaaaaacaaaaaacaaaacaattgttgtggcggcgcggatccgggccccctagagagagaacgtttctatagaaccaactgggtgtgtgggggccgggaggcgcacaaatatggagtcaaggggacacaggtggcgcaaaaatacgggtgtccccaaaagagaagaaaccggggggacaacggtaacaaacagcggcgcgaggagatcactacacaacaagaataacaaaaaccccgcgaggggaggaacaacaagcaggaggggcggttatgcgggagacaagaactctaccacgaaagaggagagagcttcactgagaggggaccaaaaacaccagggggggcgaacttattacccaacaagagagggggcactcaccaaacagggcaggccaccgcggaacttactccaaaatatataaccccccgggggggtcggggggggcgt

SEQ ID NO: 628169 - DNA, 374 bp, Homo sapiens
tttcatgctgacagcagctcaaaagtctgtgggacaaaactcccaccagggatgggctgggctgccatctttgctgtttcgcagtccttcactgttgataccttctagcctgctgaacaatctgacgtggttatgcactggagtgaacccccaagagactgcagcacccctaggacacagtggccacactctttattatgtgggtcccccttcctgtacctcctcactacacaggtcctcccagactgggtctctaaccacccctgctgtgtctatcaagccagtggcatctatgccactcactgagacaatgctcccagttagaagagtgggatgccatctttgctgtctccaggccctggatcagtccacag

SEQ ID NO: 628170 - DNA, 1845 bp, Homo sapiens
actagttctagatcgcgagcggctgccctttattttttttttttctgagtagaaaaaggcacaattaatgggattacgcagcactttccactcagtgggaactggtgggcgtgcatttccctttcgtgacattgtcacaacaccccacgtggaaatttagcctcccatacattctaagttcgtgctagtgctgtgaacaaacgcaaccaatacaggaaagaacatctcgacccccactctatattctcctccattatatataaccagaggagaagccagagagctgtgcaacacgcccaacagaagaaataggacaagaaaagagcgcgttcactctatttctcacaggagcccgtgggacacccaagagagggaccccaaacacgctctcacgcgtgagaccagcccaagagtgcgtgggaagagaagacgcaacagggcacataaaacgcgggagcagacccaacacagagccacaacaagaagcactcattctcaataacgcgagcgccacccgcaacgtgagcaacatctacaccagtgtatgaagggagaggagtacgactctgatggaggacaccctatcaaacaccacatggagcgtagggcgaccactgggacgacgctaggaaacagtggccaggccaggtaggccgccccaacacagccacctccaggacactgagcgccaaggcggcggcgccacaccaccgagagtggggacaaccaccaccgcgatgggcgccccaacgcacagaggcggccccccagactgctgagtggaccacatctatccaactcactaataataggccgcgacgaaaacggaaccagacgagacaacggaggtaccccccagagaaaacaatcacgcataccatcatcccccagacaccagtgggcgcaacacgctacaacacaccatacacggagactgacgcgccgcgtcagcgaacatactatcacaccccctggatgagcgccagctacccccactttcgatcagccaacaagccccccaaacaggaagaccaatcaagccgttgggagggagaaacaaagacgccacacaggagaggatgacacacgacattcccgcgccagttggcagccaatacccatcacaaggacccgctcataacggaacctcaacacgatggcgcaccccgaggaggaacacacccccccacgggagcgaggagggcacagcctattatcaagacagcgccacacttaaaaacacgaggcagccagaggccaatgtggggagcgggcatccaacgcccggctgccagacacggacctcgtgggccgtacacacaacatgtaaacaacaacaggggcagcagacacacatggattacgtaaaccccccccctgcatactagcccacccaacacgggcgcatcactgccgcagcgaaagagcaaacgacggcccatttgtcgaaaggaccgcatccccactgatgactaacggagtcgccccgacgaaacgacaccctcacgtagcgtgccggacatagaacggcatgtcccagcaaggaggtaaaatggaagcacaacacatctagggtcagcacacctactccagtcacaacaatagggagcacatagtcatgcaccagcaccctcccagtcgcgccggaacaacagcatcctacgaccccacgaggcgaagtcaacaaacaacacgtagacgaatagaggcactactacgagagagaacgcagcaacgaagtgaagcacctaaaccaggagagcgagacccactaaacagagcgccacttcagcagcgcactaacctcaggccgaaaggacgacacacacaccccaacgggacaaa

SEQ ID NO: 628171 - DNA, 878 bp, Homo sapiens
  misc_feature (229)..(229): n is a, c, g, or t
  misc_feature (280)..(280): n is a, c, g, or t
  misc_feature (284)..(284): n is a, c, g, or t
  misc_feature (309)..(309): n is a, c, g, or t
  misc_feature (311)..(311): n is a, c, g, or t
  misc_feature (319)..(319): n is a, c, g, or t
  misc_feature (334)..(334): n is a, c, g, or t
  misc_feature (353)..(353): n is a, c, g, or t
  misc_feature (356)..(356): n is a, c, g, or t
  misc_feature (358)..(358): n is a, c, g, or t
  misc_feature (364)..(364): n is a, c, g, or t
  misc_feature (367)..(367): n is a, c, g, or t
  misc_feature (369)..(369): n is a, c, g, or t
  misc_feature (374)..(374): n is a, c, g, or t
  misc_feature (382)..(382): n is a, c, g, or t
  misc_feature (401)..(401): n is a, c, g, or t
  misc_feature (415)..(415): n is a, c, g, or t
  misc_feature (428)..(429): n is a, c, g, or t
  misc_feature (431)..(433): n is a, c, g, or t
  misc_feature (437)..(439): n is a, c, g, or t
  misc_feature (448)..(448): n is a, c, g, or t
  misc_feature (571)..(571): n is a, c, g, or t
  misc_feature (577)..(577): n is a, c, g, or t
  misc_feature (592)..(593): n is a, c, g, or t
  misc_feature (601)..(601): n is a, c, g, or t
  misc_feature (611)..(611): n is a, c, g, or t
  misc_feature (617)..(618): n is a, c, g, or t
  misc_feature (626)..(626): n is a, c, g, or t
  misc_feature (628)..(628): n is a, c, g, or t
  misc_feature (878)..(878): n is a, c, g, or t
gactggttagtgatgcagttagtatagctttatactctctccactttatagctctaataagttgtgttagaaaagtttcgacttattttcttaaagcttgttttttgttcgcccatcactctttacatggtggtgatgtccaaaagatacccaaattttaatattccagaagaacaactttagcatcagaaggttcacccagcacctgcagattttcttaaggaatttngtctcacttttaaaaagaaggggagaagtcagctactctagttctgtggtntggngtatataattttttaaaaaaaattngngtgcttcngctcattactacacnggtgtgtccctctgccttnttntntttttnttnanagacngggtctcnttctatcggccaggctggngtgcaggggtgcantcacagctcatgnngnnnttgnnnctcccaggntcaagctatcctgtggcaccgtcagcctcccaagatagctgggaccacaggcattgcaccatatacgcattgactaattttttaaagatattggaggacggggtctcccgtggtgttacccgngctggntctcaaactctgggnntcaggtgntcctcccatntgggcnncccagagntntgggattacagacgtgaggcagttgatctggcgagttcccgaatcccggggcctttcttaaagagacagtttcgtccattgccaaggcgtggattgcgggtggtgaacattggccgtgggcgtccaaattctgggggccacgagtttttccagcacagccccttttatttctgccagcggggttcgtaagttgtgccacgtggtgtaatcctgggctagatctttgttgtggcgccaatgttgttttttn

SEQ ID NO: 628172 - DNA, 197 bp, Homo sapiens
ttggcaggcacttggggggccctatggcatgaaagcacttggggttggtgaggggacaggggatgtactgcgggactgggcggagccaagccctggggtttggcaagacactagagctggggttgggcaagttgggccccgacagcccagaaggcttttgtagtggcacgcacagtctctgggccgggtctgcatta

SEQ ID NO: 628173 - DNA, 715 bp, Homo sapiens
aagaagcgagagcaggtacaagtccaccagggatacttaactttaacttcaaaagaaaaggtgcacagaggggagcagaaaatggcaggaatcatcatttcccttgacaaatgagatcgtttaaaatgcgagccacagagatctcagggtcttcttaataactccaccccctggagtgtgtaacccaatagcctagcaaaggaacctgacgagctccagggcatacaaccaccataggctctaactcagaatatgattccttacctctcaggaagtgaggagggtagcaaagatctgtcctctgagggtaaaaacgggcttaaatttcccaggccagggacagtggctcacgcctgtaagatcccagcacttagggaggctggggtgggtgggacgtgcttgaggtcaggagttcgggacctaccctgaccaagctagtgctgaaacaccatctctactaaaagtacaaaacattagctgggcatggtggccggtgcctgtaatcccagctactggggaggctgaggcaggagaatcgcttgaacccgggaggatggaggttgccagtgatgcctgagatcgtgccactgcactccagcctgggtgacaagcgagacttcatctcagaaacaacaacgatgaaaggacttaattccctttggtagtgcaacgtcttgcaacatctaggtccgcgtgggggttccacctgtatcca

SEQ ID NO: 628174 - DNA, 426 bp, Homo sapiens
tcctgtctacttaccactttctcagctcttccatttataggaatatcaaacttcaaaagaagacttttattacattagatctgttgtgagttacagcaacagaacagtcttataaaaactaaatttggcaagcttcctattcctctactttcttcctgtgatttttttttttttttttttaaaatcgaaatctcgcctgtgtcgcccaggctgaagtgcagtggagttatctcagctcactgcaagctctgccctccgtgggtcacgccatttctcccgcctaagccttcccgagcagtgggaactacaggcgcccgcaaccaggcccggttaatttttgggtatattaagtagagatgggtttcacagtgctagccaaggatgttctcgatctcctgacctcgtgatctgcctccatgaggggat

SEQ ID NO: 628175 - DNA, 87 bp, Homo sapiens
gatatggcgtgggattgtagtggtggtagctgctacgacctgatatttgactactggggccagggaaccctggtcaccgtctcctca

SEQ ID NO: 628176 - DNA, 304 bp, Homo sapiens
ttctctcgcttcttcattgattggggaattttgaaagagtaattagcttgattcttgccctgggtccaagcgtgtgtgtgcctggtcagaacttgagtctcaggagcagtctcccactaggatgctgtccagatgtaatcagccactgcttagcacatgctcctcgtcccagacttacggcatcatggcccttccgggctggagagggtccagtccagagcacgagactcactgtctctttctcccaaggactcgactcatgcagggtgtttccttctcctgctattttccaccttgttgcagc

SEQ ID NO: 628177 - DNA, 258 bp, Homo sapiens
aagagctccgggctgaccaggttgaggcccgcaggtctaagaccaaggaagcacgcaagcgcggtgaagagcgcctctaggccacgagggaggagatcatcaagattttatccaaggaggacgagaccaagaaataaaacctcccagttggtctgtacttactgggcctctggtgattactatagatcagcctattaaaataaaacaagccttatctggcgctataccttatctggcgctatgccattatctggcggg

SEQ ID NO: 628178 - DNA, 1336 bp, Homo sapiens
  misc_feature (223)..(223): n is a, c, g, or t
agcggagggtggatgtgcagtcatgctgaaggtgccgtgatgagcggcagtcatgtgaaagtatttagggaaagcagtcctatgctctgatcacctgaattagatgacgagttcttggctaagacaccatcgtaagatcaggtctgtgctctaagattgtcgtgaatcttcttgctcgggtctagctatagtgcgatcgtgtccagttactacatcactgtgntgttttgtcgagtccaattactgcagagtgggtacagacgtattagattgtataagaatggagtttgaactagagtgaaccttgaaccacagagcgaacgtgctgtatgtgaacagagtggcaacatgtttggggtgaatgaccgggtcaaagttgtgtggcccagtacctgttggagatggtcgtgaatccctctgcccgttggacaagtacacatactcgtgaggacaagtatgcgagagaccgtagtacgatccgagtcagtctgtgataagcatgtcacaagttaggcttagtttcgaagttcctgtcagtacatgtaccactggttagtttgaacagcagtaacgtcgaattaaagttagtagtgctgtgtgagcaggattgaagaagttcagagggcgccttctgacgagaagggtatagtcgtttgtcgagccagagcagagtgggttatggtgagctaaaataatctgcctgtgaaatagagcttttctaaagccaggagggaagtttggctctggccgtggaattgccccattgtgggttccgtttttttagaccgattcagaaggtgtcccaaaggaagcgcagcaggttgaccttccgtactggccttggtgagaacgattcccagcgttgggagattttctgattgggccccttccagatgcgaaggtttcctcaaaattgacacgtggaaaacttcctcaatggggtcatgttgttggggacgtccaacacgtggcctcggttaaacatcagggtcttgaatgaaattggtttcgtatcgggttgaggagggccgtccctgacgacgttgggaaacgctttgctgggagacgtggtccctttgttgcgaaagaggttgtggcgacacgattggggaagcgatgcttcttggaagtcacttcgatcgccatgatgagtcgtggtgattctcaagcaggtgacacgttttggtgaaactgtgggggacacatttgaccgttgggacacatttttatcttcacggaaaacgagtgcctgacaagacaatggttgtggcctcctgcctgacagtaaatgaccccactgattgaatgcctgtctctggatcttaatcactgcgtg

SEQ ID NO: 628179 - DNA, 902 bp, Homo sapiens
ctgtttgaaggcttactgtagaagtggcttactgtagaagcagcttgctgagcccctccgagcggtccccagaattagctggttcacaacccccacctcccccgccccgctgtgtcaggtgtggatgaggtcgtcacactcagaaggacaggttgtctgcaggtcacaaggggaggcgcagtgggtttgggagctggtgtaggccctggtgtctgagggcccaggccttgccagcctctgctggctcctgctcctgggtttgaagatgtccgaggccgatcgctcagctccgtggtcgagcggtcactaaggacactcctgactgtgccatcttggactcctcaggcggggctccggagatagaagacaggtcgccggaggctccccctcctctcctctcccctctgcagatgctgccctgggcgctactcctgcagggtgccagggcaggagtggtctcgagaaacgtgtcgcttgctgattatttcaagctggggtccatatgtccagattccgtctttgattgtgaaaatatatttttagctttgtagtcttgctagattgtagtaaatgatccatattaaaaatagagaaatacaagtcctttagggaaggttaacgaaacaaaagggggcgttaaaatatcctgaggggccaagtaaaggtaccagggttctgtcaaagtggtcctataggtgagtcgattataagtaggatgccgtgttaacaacgtcgggagggaaactgcaattggtctgggaagacttatctggggtgctatggccctaccaggattaagcaggaataattaggtaggtacacgctgttgaaatgttcgtagataaattaaggatgtaggaaagagagggaggaagcaagagagatagcattaggacctgata

SEQ ID NO: 628180 - DNA, 529 bp, Homo sapiens
gctctagacggatccccgccacagcaggtccaggcacacgtattgggtggattgatactatttttctgagtgtatgtggattcttgtgggggttcataataatagctaacactggctaatatctcaggcactttcctaatcagttagtaggtactaattttctcctcagaacaagtggagatggatactataattataaagggtggtcaaaaggtgcaagagtgaggcacacagcgagacgcagaaaagtaagtggcccacagccacagcagtcctgaggggctgtgggcaagcggggatgtggccaggggcctctgtatcggggtcttcagcagggggctctagtgccggcaataccgggtgacggcccgagagcgggctcttttatcatcctgccagtatgcggactcacaaaatcctccagagacctaaatgcaccgactgagagcagcatcacacagcagcagttgaaaagacaatggcacctgaatcttgagcacttcggacagtttctcaagaagaccagaaa

SEQ ID NO: 628181 - DNA, 235 bp, Homo sapiens
ttgatcagcgatcctcccactcagctcctaaaagtgctgggattacaggtgcccaccacacgcccggataatttgttttgtattttttagtagagacggggtttcaccttgttagcctgggatggtctcgatctcctgacctcatgatccacccgcctgcgcctcccaaagtgctggtattacaggcacgagccaccgcgcccggcagaaatttctctaggatacagtagggaga

SEQ ID NO: 628182 - DNA, 165 bp, Homo sapiens
ttggtttatagttccatccaggagggaaagagggcgtgtggtcctccagtctggagtgtctgcaggtgggcgggcatctctactcagacagtctgttgcgcatcgactccttctcctggagggcggacatggcaagacgcatgtgctccttcaggtgctcccctt

SEQ ID NO: 628183 - DNA, 1161 bp, Homo sapiens
gccgggctgagaggagcgtggctgtctcctctctccgccatggcgtgtgctcgcccactgatatcggtgtactccgaaaagggggagtcatctggcaaaaatgtcactttgcctgctgtattcaaggctcctattcgaccagatattgtgaactttgttcacaccaacttgcgcaaaaacaacagacagccctatgctgtcagtgaattagcaggtcatcagactagtgctgagtcttggggtactggcagagctgtggctcgaattcccagagttcgaggtggtgggactcaccgctctggccagggtgcttttggaaacatgtgtcgtggaggccgaatgtttgcaccaaccaaaacctggcgccgttggcatcgtagagtgaacacaacccaaaaacgatacgccatctgttctgccctggctgcctcagccctaccagcactggtcatgtctaaaggtcatcgtattgaggaagttcctgaacttcctttggtagttgaagataaagttgaaggctacaagaaagaccaaggaagctgttttgctccttaagaaacttaaagcctggaatgatatcaaaaaggtctatgcctctcagcgaatgagagctggcaaaggcaaaatgagaaaccgtcgccgtatccagcgcaggggcccgtgcatcatctataatgaggataatggtatcatcaaggccttcagaaacatccctggaattactctgcttaatgtaagcaagctgaacattttgaagcttgctcctggtgggcatgtgggacgtttctgcatttggactgaaagtgctttccggaagttagatgaattgtacggcacttggcgtaaagccgcttccctcaagagtaactacaatcttcccatgcacaagatgattaatacagatcttagcagaatcttgaaaagcccagagaaagaaggctgctgttggtgttaagaagcagaagaagcctctggtgggaaaaaaggcagcagctaccaagaaaccagcccctgaaaagaagcctgcagagaagaaacctactacagaggagaagaagcctgctgcataaactcttaaatttgattattccataaaggtcaaatcattttggacagcttcttttgaataaagacctgattatacaggcagtgagaaaacca

SEQ ID NO: 628184 - DNA, 1679 bp, Homo sapiens
gccgggctgagaggagcgtggctgtctcctctctccgccatggcgtgtgctcgcccactgatatcggtgtactccgaaaagggggagtcatctggcaaaaatgtcactttgcctgctgtattcaaggctcctattcgaccagatattgtgaactttgttcacaccaacttgcgcaaaaacaacagacagccctatgctgtcagtgaattagcaggtcatcagactagtgctgagtcttggggtactggcagagctgtggctcgaattcccagagttcgaggtggtgggactcaccgctctggccagggtgcttttggaaacatgtgtcgtggaggccgaatgtttgcaccaaccaaaacctggcgccgttggcatcgtagagtgaacacaacccaaaaacgatacgccatctgttctgccctggctgcctcagccctaccagcactggtcatgtctaaaggtcatcgtattgaggaagttcctgaacttcctttggtagttgaagataaagttgaaggctacaagaaagaccaaggaagctgttttgctccttaagaaacttaaagcctggaatgatatcaaaaaggtctatgcctctcagcgaatgagagctggcaaaggcaaaatgagaaaccgtcgccgtatccagcgcaggggcccgtgcatcatctataatgaggataatggtatcatcaaggccttcagaaacatccctggaattacaactgcttacatatattgactaggtatactctgcaagtctactcagcttttgttatgatgagattccacttaaggtccgtgtttctgaaacaaatgattttgtggaagttctgatttatggctgaaagagttgcaccattgatggttgaaacttcataattaataagttctcaggtaccttttatagctcttaagccataaagatgatttgtgtttcttttgttgaaatacaggctccctaatttttctttccctttggaattatctgcttaatgtaagcaagctgaacattttgaagcttgctcctggtgggcatgtgggacgtttctgcatttggactgaaagtgctttccggaagttagatgaattgtacggcacttggcgtaaagccgcttccctcaagagtaactacaatcttcccatgcacaagatgattaatacagatcttagcagaatcttgaaaagcccagagatccaaagagcccttcgagcaccacgcaagaagatccatcgcagagtcctaaagaagaacccactgaaaaacttgagaatcatgttgaagctaaacccatatgcaaagaccatgcgccggaacaccattcttcgccaggccaggaatcacaagctccgggtggataaggcagctgctgcagcagcggcactacaagccaaatcagatgagaaggcggcggttgcaggcaagaagcctgtggtaggtaagaaaggaaagaaggctgctgttggtgttaagaagcagaagaagcctctggtgggaaaaaaggcagcagctaccaagaaaccagcccctgaaaagaagcctgcagagaagaaacctactacagaggagaagaagcctgctgcataaactcttaaatttgattattccataaaggtcaaatcattttggacagcttcttttgaataaagacctgattatacaggcagtgagaaaacca

SEQ ID NO: 628185 - DNA, 1455 bp, Homo sapiens
gccgggctgagaggagcgtggctgtctcctctctccgccatggcgtgtgctcgcccactgatatcggtgtactccgaaaagggggagtcatctggcaaaaatgtcactttgcctgctgtattcaaggctcctattcgaccagatattgtgaactttgttcacaccaacttgcgcaaaaacaacagacagccctatgctgtcagtgaattagcaggtcatcagactagtgctgagtcttggggtactggcagagctgtggctcgaattcccagagttcgaggtggtgggactcaccgctctggccagggtgcttttggaaacatgtgtcgtggaggccgaatgtttgcaccaaccaaaacctggcgccgttggcatcgtagagtgaacacaacccaaaaacgatacgccatctgttctgccctggctgcctcagccctaccagcactggtcatgtctaaaggtcatcgtattgaggaagttcctgaacttcctttggtagttgaagataaagttgaaggctacaagaaagaccaaggaagctgttttgctccttaagaaacttaaagcctggaatgatatcaaaaaggtctatgcctctcagcgaatgagagctggcaaaggcaaaatgagaaaccgtcgccgtatccagcgcaggggcccgtgcatcatctataatgaggataatggtatcatcaaggccttcagaaacatccctggaattactcagcttgcttacattaagcagagtaattccagggatgtttctgcttaatgtaagcaagctgaacattttgaagcttgctcctggtgggcatgtgggacgtttctgcatttggactgaaagtgctttccggaagttagatgaattgtacggcacttggcgtaaagccgcttccctcaagagtaactacaatcttcccatgcacaagatgattaatacagatcttagcagaatcttgaaaagcccagagatccaaagagcccttcgagcaccacgcaagaagatccatcgcagagtcctaaagaagaacccactgaaaaacttgagaatcatgttgaagctaaacccatatgcaaagaccatgcgccggaacaccattcttcgccaggccaggaatcacaagctccgggtggataaggcagctgctgcagcagcggcactacaagccaaatcagatgagaaggcggcggttgcaggcaagaagcctgtggtaggtaagaaaggaaagaaggctgctgttggtgttaagaagcagaagaagcctctggtgggaaaaaaggcagcagctaccaagaaaccagcccctgaaaagaagcctgcagagaagaaacctactacagaggagaagaagcctgctgcataaactcttaaatttgattattccataaaggtcaaatcattttggacagcttcttttgaataaagacctgattatacaggcagtgagaaaacca

SEQ ID NO: 628186 - DNA, 1383 bp, Homo sapiens
accctcatcaatagatggagacttacagaaatagtcaaaccacatctacaaaatgtgccagttatctcaggcggcggctttcaaagccaaaggtgaatgttgtggcatctgttaagtgtgaaattatttagtgtggcggcattgaaccaaattaggtgagagaaagtttgacccaatataatgtgacgtgtgaagttcccggtggacagccctgtgtgtggcttaccaaaaaatgtgtgtgtgacgccgctagaattgtccgctcgagaacatgtggtgtagaaggagaaatctctcgacacgtatacctctgtgaggcgctctgtgtctacgagagcgtggatataccatataagagagatcccaccacgtatacaacattgtgttatactataaaccggcacagcgtgctctgtggacatctatttatatgtgggtttatctcggcgtgtagtggaatttatctctataatttattacagacctattatagtagagggtggagcgacctctcctaaagggtgttgataattgttggataatatctcttcccctgttgaagtgttctccaagcaaagctataatatattaccgcggcgaaatgttgttgtgttgttctattaggggggaaaccgtgttggcggcagcaactattcttcctgttacggcgtcgctggcatcttctcttcctcgccctggtgtgtcgctgcttggatgtgtccgccatgttgtgctgccggcgaggccgcggccccctacggtgttgggccccccctcttcggcctcattaagactcgtctgtggacgcggaggaggcggttataaacggcggtggcagtcccaccttaaagaagggcctctttggagacaaagtgacgatgggtggtgttcacccacaaacagacggcgggcgtccatacccaaagcgatgaaccacgaatcgatagacaccatccctccctgatttggtaccccggacaaatcgatgcactcacacaactgagcgaaccatcacacgaagcgcgacttctcctcgtttgataacacgtgcggctagcttacatcaaccgatttaacgaagcacatcattaagacgggagcgcaatgcgtattactatcatagcttttccccgcgcacccgggaagactagacttgattgcccgaggaaatgacaagatgtagctacgcctgcgttcgttgctattcatggtcaggggaggcaaaaccacaacgagtagatagaatggtgcagatactagtacgcattggataatatcggagggactgtatgggtgagacccccgcattgtatagtaatgcgcatatcagatacactgagcgcagctctgcagcagccaatctatcatgtggaacaatacccg

SEQ ID NO: 628187 - DNA, 1722 bp, Homo sapiens
gccgggctgagaggagcgtggctgtctcctctctccgccatggcgtgtgctcgcccactgatatcggtgtactccgaaaagggggagtcatctggcaaaaatgtcactttgcctgctgtattcaaggctcctattcgaccagatattgtgaactttgttcacaccaacttgcgcaaaaacaacagacagccctatgctgtcagtgaattagcaggtcatcagactagtgctgagtcttggggtactggcagagctgtggctcgaattcccagagttcgaggtggtgggactcaccgctctggccagggtgcttttggaaacgtatcctttgtttcactacctaagactggtcatctctgatggaatttagcggcctgggtctggtttattgatgataatacggtgtaaaaatattacttttttttgtcttgaagagaaggggcttcatttatatggggttattttgcttgcaatgatgtcgtaatttgcgtcttactctgttctcagcgacagttgcctgctgtcagtaagctggtacagaaggttgacgaaaattcttactgagcaagaaataaccttgttgtaattactaaaatttgagaaatgtgattcttgactggaaaaatagatgtgtcgtggaggccgaatgtttgcaccaaccaaaacctggcgccgttggcatcgtagagtgaacacaacccaaaaacgatacgccatctgttctgccctggctgcctcagccctaccagcactggtcatgtctaaaggtcatcgtattgaggaagttcctgaacttcctttggtagttgaagataaagttgaaggctacaagaaagaccaaggaagctgttttgctccttaagaaacttaaagcctggaatgatatcaaaaaggtctatgcctctcagcgaatgagagctggcaaaggcaaaatgagaaaccgtcgccgtatccagcgcaggggcccgtgcatcatctataatgaggataatggtatcatcaaggccttcagaaacatccctggaattactctgcttaatgtaagcaagctgaacattttgaagcttgctcctggtgggcatgtgggacgtttctgcatttggactgaaagtgctttccggaagttagatgaattgtacggcacttggcgtaaagccgcttccctcaagagtaactacaatcttcccatgcacaagatgattaatacagatcttagcagaatcttgaaaagcccagagatccaaagagcccttcgagcaccacgcaagaagatccatcgcagagtcctaaagaagaacccactgaaaaacttgagaatcatgttgaagctaaacccatatgcaaagaccatgcgccggaacaccattcttcgccaggccaggaatcacaagctccgggtggataaggcagctgctgcagcagcggcactacaagccaaatcagatgagaaggcggcggttgcaggcaagaagcctgtggtaggtaagaaaggaaagaaggctgctgttggtgttaagaagcagaagaagcctctggtgggaaaaaaggcagcagctaccaagaaaccagcccctgaaaagaagcctgcagagaagaaacctactacagaggagaagaagcctgctgcataaactcttaaatttgattattccataaaggtcaaatcattttggacagcttcttttgaataaagacctgattatacaggcagtgagaaaacca

SEQ ID NO: 628188 - DNA, 237 bp, Homo sapiens
acgcaccatgcctggctaatttttgtattttttacagagacagggctttgcattgttgccaaggctagatcctattggttttcaaatggtatatcacatttacttctataatatcttacaattacacttctgtttcatcattctcataacttactattacgtgttcaaccacgtttcaggtatcatttaatacacattgctaggtactaaatgattgctatgtacattattgttagt

SEQ ID NO: 628189 - DNA, 1442 bp, Homo sapiens
gccgggctgagaggagcgtggctgtctcctctctccgccatggcgtgtgctcgcccactgatatcggtgtactccgaaaagggggagtcatctggcaaaaatgtcactttgcctgctgtattcaaggctcctattcgaccagatattgtgaactttgttcacaccaacttgcgcaaaaacaacagacagccctatgctgtcagtgaattagcaggtcatcagactagtgctgagtcttggggtactggcagagctgtggctcgaattcccagagttcgaggtggtgggactcaccgctctggccagggtgcttttggaaacaaatgtgattcttgactggaaaaatagatgtgtcgtggaggccgaatgtttgcaccaaccaaaacctggcgccgttggcatcgtagagtgaacacaacccaaaaacgatacgccatctgttctgccctggctgcctcagccctaccagcactggtcatgtctaaaggtcatcgtattgaggaagttcctgaacttcctttggtagttgaagataaagttgaaggctacaagaaagaccaaggaagctgttttgctccttaagaaacttaaagcctggaatgatatcaaaaaggtctatgcctctcagcgaatgagagctggcaaaggcaaaatgagaaaccgtcgccgtatccagcgcaggggcccgtgcatcatctataatgaggataatggtatcatcaaggccttcagaaacatccctggaattactctgcttaatgtaagcaagctgaacattttgaagcttgctcctggtgggcatgtgggacgtttctgcatttggactgaaagtgctttccggaagttagatgaattgtacggcacttggcgtaaagccgcttccctcaagagtaactacaatcttcccatgcacaagatgattaatacagatcttagcagaatcttgaaaagcccagagatccaaagagcccttcgagcaccacgcaagaagatccatcgcagagtcctaaagaagaacccactgaaaaacttgagaatcatgttgaagctaaacccatatgcaaagaccatgcgccggaacaccattcttcgccaggccaggaatcacaagctccgggtggataaggcagctgctgcagcagcggcactacaagccaaatcagatgagaaggcggcggttgcaggcaagaagcctgtggtaggtaagaaaggaaagaaggctgctgttggtgttaagaagcagaagaagcctctggtgggaaaaaaggcagcagctaccaagaaaccagcccctgaaaagaagcctgcagagaagaaacctactacagaggagaagaagcctgctgcataaactcttaaatttgattattccataaaggtcaaatcattttggacagcttcttttgaataaagacctgattatacaggcagtgagaaaacca

SEQ ID NO: 628190 - DNA, 675 bp, Homo sapiens
  misc_feature (44)..(44): n is a, c, g, or t
  misc_feature (122)..(122): n is a, c, g, or t
  misc_feature (180)..(180): n is a, c, g, or t
  misc_feature (194)..(194): n is a, c, g, or t
  misc_feature (241)..(241): n is a, c, g, or t
  misc_feature (271)..(271): n is a, c, g, or t
  misc_feature (338)..(338): n is a, c, g, or t
  misc_feature (529)..(529): n is a, c, g, or t
  misc_feature (546)..(546): n is a, c, g, or t
ttcgaattggggcggcgaagtgatgctgcgctggacgaggctgntgcgcggcgctggatcgggacacgatgatgtgcacgatttatgagcgtcggccgctgatttgtcgggaattcgagatnggcgcaccggagtgcctgaccgaacgcgaaggaatcgccacggcgtaccgctgatctnaggccagtgacganctcaatgtggaagggggcttgaccccgatagtggtggatcagttggnagattccgcgactgacactccgccatcggngcaagccccctcccacaaggttttgaattacagcggcatcgtgtagtgcagtgagtagctttctacnccgtcgttattgctgctgatcccggcattagagtagtgcgtggcgcgaatgcccacttcatgcccaccggtgaagcgcaggccgaaacccaagcggtcttcgaactggaaagcctggccgatgttgttgtcctccagtttggtacgggagaacaccgccacgccgatcccggcttcgatgtagggcttgancgactgaccggcaaatncatacacaaagacaggcgagaacgacaggctgctggcgcctgcacggtcatcaccttcccaataggtataggcgccgctccaatagccggtcaggcgaccgacatcactttgcattcaagtcttgtccc

SEQ ID NO: 628191 - DNA, 1447 bp, Homo sapiens
  misc_feature (303)..(303): n is a, c, g, or t
gccgggctgagaggagcgtggctgtctcctctctccgccatggcgtgtgctcgcccactgatatcggtgtactccgaaaagggggagtcatctggcaaaaatgtcactttgcctgctgtattcaaggctcctattcgaccagatattgtgaactttgttcacaccaacttgcgcaaaaacaacagacagccctatgctgtcagtgaattagcaggtcatcagactagtgctgagtcttggggtactggcagagctgtggctcgaattccccaaacactttttttccccccccccagaaggttntcccgcacggtggtgggactcaccgcgtctggccaggtgcttttggaaacatgtgtcgtggaggccgaatgtttgcaccaaccaaaacctggcgccgttggcatcgtagagtgaacacaacccaaaaacgatacgccatctgttctgccctggctgcctcagccctaccagcactggtcatgtctaaaggtcatcgtattgaggaagttcctgaacttcctttggtagttgaagataaagttgaaggctacaagaaagaccaaggaagctgttttgctccttaagaaacttaaagcctggaatgatatcaaaaaggtctatgcctctcagcgaatgagagctggcaaaggcaaaatgagaaaccgtcgccgtatccagcgcaggggcccgtgcatcatctataatgaggataatggtatcatcaaggccttcagaaacatccctggaattactctgcttaatgtaagcaagctgaacattttgaagcttgctcctggtgggcatgtgggacgtttctgcatttggactgaaagtgctttccggaagttagatgaattgtacggcacttggcgtaaagccgcttccctcaagagtaactacaatcttcccatgcacaagatgattaatacagatcttagcagaatcttgaaaagcccagagatccaaagagcccttcgagcaccacgcaagaagatccatcgcagagtcctaaagaagaacccactgaaaaacttgagaatcatgttgaagctaaacccatatgcaaagaccatgcgccggaacaccattcttcgccaggccaggaatcacaagctccgggtggataaggcagctgctgcagcagcggcactacaagccaaatcagatgagaaggcggcggttgcaggcaagaagcctgtggtaggtaagaaaggaaagaaggctgctgttggtgttaagaagcagaagaagcctctggtgggaaaaaaggcagcagctaccaagaaaccagcccctgaaaagaagcctgcagagaagaaacctactacagaggagaagaagcctgctgcataaactcttaaatttgattattccataaaggtcaaatcattttggacagcttcttttgaataaagacctgattatacaggcagtgagaaaacca

SEQ ID NO: 628192 - DNA, 236 bp, Homo sapiens
tgcagtacggatgtgcgggctctggaccagggttggcaaactttttccataaagggccagacaatagactttttttttttggagtcagagtctcgctctgtcacccatgctgggagtgcagtggcacaatctcagctcacggcaacctcggcctcccgggttcaagcaattctccggcctcagcctcctgagtcgtggggactacaggcgcccaccaccacatcggtacgggccgg

SEQ ID NO: 628193 - DNA, 1447 bp, Homo sapiens
  misc_feature (286)..(286): n is a, c, g, or t
gccgggctgagaggagcgtggctgtctcctctctccgccatggcgtgtgctcgcccactgatatcggtgtactccgaaaagggggagtcatctggcaaaaatgtcactttgcctgctgtattcaaggctcctattcgaccagatattgtgaactttgttcacaccaacttgcgcaaaaacaacagacagccctatgctgtcagtgaattagcaggtcatcagactagtgctgagtcttggggtactggcagagctgtggctcgaattccccccgaagcaaggtttnggacgggggctggagactggccgggaaacctttcaactcgcttcttggccagggtgcttttggaaacatgtgtcgtggaggccgaatgtttgcaccaaccaaaacctggcgccgttggcatcgtagagtgaacacaacccaaaaacgatacgccatctgttctgccctggctgcctcagccctaccagcactggtcatgtctaaaggtcatcgtattgaggaagttcctgaacttcctttggtagttgaagataaagttgaaggctacaagaaagaccaaggaagctgttttgctccttaagaaacttaaagcctggaatgatatcaaaaaggtctatgcctctcagcgaatgagagctggcaaaggcaaaatgagaaaccgtcgccgtatccagcgcaggggcccgtgcatcatctataatgaggataatggtatcatcaaggccttcagaaacatccctggaattactctgcttaatgtaagcaagctgaacattttgaagcttgctcctggtgggcatgtgggacgtttctgcatttggactgaaagtgctttccggaagttagatgaattgtacggcacttggcgtaaagccgcttccctcaagagtaactacaatcttcccatgcacaagatgattaatacagatcttagcagaatcttgaaaagcccagagatccaaagagcccttcgagcaccacgcaagaagatccatcgcagagtcctaaagaagaacccactgaaaaacttgagaatcatgttgaagctaaacccatatgcaaagaccatgcgccggaacaccattcttcgccaggccaggaatcacaagctccgggtggataaggcagctgctgcagcagcggcactacaagccaaatcagatgagaaggcggcggttgcaggcaagaagcctgtggtaggtaagaaaggaaagaaggctgctgttggtgttaagaagcagaagaagcctctggtgggaaaaaaggcagcagctaccaagaaaccagcccctgaaaagaagcctgcagagaagaaacctactacagaggagaagaagcctgctgcataaactcttaaatttgattattccataaaggtcaaatcattttggacagcttcttttgaataaagacctgattatacaggcagtgagaaaacca

SEQ ID NO: 628194 - DNA, 211 bp, Homo sapiens
acccccgggcgcgggggtgaaaaaaaaccttttgacaaagggtttttttactaccggggggccgggggggaaaacacccccttccaaacgggggggtatactttttggaaccctggggggggggtcctcttttttttattggggggggtgataattttagggttgagaaaaaggtttttttttaaatgaatccctttattaaattttaaaa

SEQ ID NO: 628195 - DNA, 1431 bp, Homo sapiens
gccgggctgagaggagcgtggctgtctcctctctccgccatggcgtgtgctcgcccactgatatcggtgtactccgaaaagggggagtcatctggcaaaaatgtcactttgcctgctgtattcaaggctcctattcgaccagatattgtgaactttgttcacaccaacttgcgcaaaaacaacagacagccctatgctgtcagtgaattagcaggtcatcagactagtgctgagtcttggggtactggcagagctgtggctcgaattcccaccagctccgaggtagagtcgggactcacacgctctgcgccacgctagcttaccggaaacactgtgtcgtagacagcgccgaactgtctttgcaccaaccaaaacctggcgccgttggcatcgtagagtgaacacaacccaaaaacgatacgccatctgttctgccctggctgcctcagccctaccagcactggtcatgtctaaaggtcatcgtattgaggaagttcctgaacttcctttggtagttgaagataaagttgaaggctacaagaaagaccaaggaagctgttttgctccttaagaaacttaaagcctggaatgatatcaaaaaggtctatgcctctcagcgaatgagagctggcaaaggcaaaatgagaaaccgtcgccgtatccagcgcaggggcccgtgcatcatctataatgaggataatggtatcatcaaggccttcagaaacatccctggaattactctgcttaatgtaagcaagctgaacattttgaagcttgctcctggtgggcatgtgggacgtttctgcatttggactgaaagtgctttccggaagttagatgaattgtacggcacttggcgtaaagccgcttccctcaagagtaactacaatcttcccatgcacaagatgattaatacagatcttagcagaatcttgaaaagcccagagatccaaagagcccttcgagcaccacgcaagaagatccatcgcagagtcctaaagaagaacccactgaaaaacttgagaatcatgttgaagctaaacccatatgcaaagaccatgcgccggaacaccattcttcgccaggccaggaatcacaagctccgggtggataaggcagctgctgcagcagcggcactacaagccaaatcagatgagaaggcggcggttgcaggcaagaagcctgtggtaggtaagaaaggaaagaaggctgctgttggtgttaagaagcagaagaagcctctggtgggaaaaaaggcagcagctaccaagaaaccagcccctgaaaagaagcctgcagagaagaaacctactacagaggagaagaagcctgctgcataaactcttaaatttgattattccataaaggtcaaatcattttggacagcttcttttgaataaagacctgattatacaggcagtgagaaaacca

SEQ ID NO: 628196 - DNA, 782 bp, Homo sapiens
ccaatctccagaaggtttctgggtgtcttcttttccctcgggtccccttgctgccccgagcaccattgtgtacctctgccacagtgtgctttggttactccatttcacagtaggttcctctatcagcatcttgcacagttgcctagcaacatagtttaatgtgtggaggcaagaagggaggaaattcacaccatgttcatcctactcagtgtgaactgagtctatagttgatatcctctttgtgtcactcaatgttgtcctgcctgagttcaggcttggttcttacgttgcggcagctctttgtgcctttatttaggcaacagaccagaaatagaaacccttgaattttttttttttaatcccttatattttcctggcagcacctgggtagatttctataactactttttctggagtcttggtaacgtataattcacactttaccgggcttacgatctaaagaatacttaatcagggtaattcaaattacaggtcaattggtatggataaggtctggcgtgtggcccagactgttctcggactccgtggactcaaagcagtccttccacctgtggctcccaaagtgcgtggattacaggccgtgggccaccaaattggctcatttttatttctaaagtccgtggcataaactttccaggtttccataagttgtggtgtgggcctgtgtcccaccacatcctggcgggtttatttagggcgctggcccagtggttggaaagctcactataggggtggtgacttggtcccccgaatggcgtaag

SEQ ID NO: 628197 - DNA, 1440 bp, Homo sapiens
gccgggctgagaggagcgtggctgtctcctctctccgccatggcgtgtgctcgcccactgatatcggtgtactccgaaaagggggagtcatctggcaaaaatgtcactttgcctgctgtattcaaggctcctattcgaccagatattgtgaactttgttcacaccaacttgcgcaaaaacaacagacagccctatgctgtcagtgaattagcaggtcatcagactagtgctgagtcttggggtactggcagagctgtggctcgaattcccagagttcgaggtggtgggactcaccgctctggccagggctgctttcggcaaacatgtgtcgtggaggccgaatgttcgcaaccaaccccaaaaaaacaaaaacccccttggggtcgcggccggttggcatcgtagagtgaacacaacccaaaaacgatacgccatctgttctgccctggctgcctcagccctaccagcactggtcatgtctaaaggtcatcgtattgaggaagttcctgaacttcctttggtagttgaagataaagttgaaggctacaagaaagaccaaggaagctgttttgctccttaagaaacttaaagcctggaatgatatcaaaaaggtctatgcctctcagcgaatgagagctggcaaaggcaaaatgagaaaccgtcgccgtatccagcgcaggggcccgtgcatcatctataatgaggataatggtatcatcaaggccttcagaaacatccctggaattactctgcttaatgtaagcaagctgaacattttgaagcttgctcctggtgggcatgtgggacgtttctgcatttggactgaaagtgctttccggaagttagatgaattgtacggcacttggcgtaaagccgcttccctcaagagtaactacaatcttcccatgcacaagatgattaatacagatcttagcagaatcttgaaaagcccagagatccaaagagcccttcgagcaccacgcaagaagatccatcgcagagtcctaaagaagaacccactgaaaaacttgagaatcatgttgaagctaaacccatatgcaaagaccatgcgccggaacaccattcttcgccaggccaggaatcacaagctccgggtggataaggcagctgctgcagcagcggcactacaagccaaatcagatgagaaggcggcggttgcaggcaagaagcctgtggtaggtaagaaaggaaagaaggctgctgttggtgttaagaagcagaagaagcctctggtgggaaaaaaggcagcagctaccaagaaaccagcccctgaaaagaagcctgcagagaagaaacctactacagaggagaagaagcctgctgcataaactcttaaatttgattattccataaaggtcaaatcattttggacagcttcttttgaataaagacctgattatacaggcagtgagaaaacca

SEQ ID NO: 628198 - DNA, 821 bp, Homo sapiens
  misc_feature (301)..(301): n is a, c, g, or t
  misc_feature (338)..(338): n is a, c, g, or t
  misc_feature (343)..(343): n is a, c, g, or t
  misc_feature (377)..(377): n is a, c, g, or t
  misc_feature (395)..(395): n is a, c, g, or t
  misc_feature (401)..(401): n is a, c, g, or t
  misc_feature (412)..(412): n is a, c, g, or t
atggagtgctggttgggtgaaaccggttggtcatttttgtctgtttctatagaagataaaataattgggggccatctagaaatagaaaggcagtgggaagacagattctacggcactgctttcatttaattgggctttaggcactccattcgaatgcagaacctcacctctagttgagaccaagaattggcaaatttgcatgagctcctggaaagagttgctgactttgtatctaagacctgccagggaataccaagagttgtttctacagactttttttttttttttggtttgggaaaanatcctgggggcacccaggagggattggaaaaaaattnctttnctctacagcaatttatgtgtgaggaagctcctcnaattcctcgtggctattnagggtncaaaatcaagntgcctagggaaattcccaagggagtgatttccggggagctatctggtctacctggaggtccctgaacaatgattccccatttaattgagcagtctccagttttaaacccactgtcttgtcccctcatttggcataacggtctcccggggatgttcacagttacaccggtacggttcactttatagaccacaactttattcccattaaaggctaaccttattttccaatatttatgataatctatgtacatatatggtcggtccatatgtattggtaaataggtggtatataaggtcaggttggggtctggggtccaagtgtatatatcccttgtaagttctaaacggcatttggatgaatcacattatgtacctataagattggtcccaaaagtacctgtacagaaact

SEQ ID NO: 628199 - DNA, 412 bp, Homo sapiens
  misc_feature (84)..(84): n is a, c, g, or t
agatccccctttccatcccctaaagggtgtactattcttcatgcaaattaggctgtaggtgtgtaagcaagattcccccttcangcagggtgccaaggaaggtccagccaggctagcccgtagtccccgcagagaagcgtagctctggggagagggccatagagacaggtggtgccgaagggactggtgatgccgtgttgggggaaaaggtgcttgaagaagctctgttgtctcgggagcatgtcttggaattggagaacagcaagggccccagcctggcctctttagagggggaagaagataaggggaagagcagctcatcccaggtggtggggccagtgcaggaggaagagtatgtagcagagaagttgccaagtaggttcatcgagtcggctcacacagagctggcaaa

SEQ ID NO: 628200 - DNA, 1266 bp, Homo sapiens
gactagcactagtctgatgacccgctaattcactgacagcatagggctgtctgtagtttttgcgggtcatcagactagtgctgagtcttggggtactggcagagctgtggctcgaattcccagagttcgaggtggtgggactcaccgctctggccagggtgcttttggaaacatgtgtcgtggaggccgaatgtttgcaccaaccaaaacctggcgccgttggcatcgtagagtgaacacaacccaaaaacgatacgccatctgttctgccctggctgcctcagccctaccagcactggtcatgtctaaaggtcatcgtattgaggaagttcctgaacttcctttggtagttgaagataaagttgaaggctacaagaaagaccaaggaagctgttttgctccttaagaaacttaaagcctggaatgatatcaaaaaggtctatgcctctcagcgaatgagagctggcaaaggcaaaatgagaaaccgtcgccgtatccagcgcaggggcccgtgcatcatctataatgaggataatggtatcatcaaggccttcagaaacatccctggaattactctgcttaatgtaagcaagctgaacattttgaagcttgctcctggtgggcatgtgggacgtttctgcatttggactgaaagtgctttccggaagttagatgaattgtacggcacttggcgtaaagccgcttccctcaagagtaactacaatcttcccatgcacaagatgattaatacagatcttagcagaatcttgaaaagcccagagatccaaagagcccttcgagcaccacgcaagaagatccatcgcagagtcctaaagaagaacccactgaaaaacttgagaatcatgttgaagctaaacccatatgcaaagaccatgcgccggaacaccattcttcgccaggccaggaatcacaagctccgggtggataaggcagctgctgcagcagcggcactacaagccaaatcagatgagaaggcggcggttgcaggcaagaagcctgtggtaggtaagaaaggaaagaaggctgctgttggtgttaagaagcagaagaagcctctggtgggaaaaaaggcagcagctaccaagaaaccagcccctgaaaagaagcctgcagagaagaaacctactacagaggagaagaagcctgctgcataaactcttaaatttgattattccataaaggtcaaatcattttggacagcttcttttgaataaagacctgattatacaggcagtgagaaaacca

SEQ ID NO: 628201 - DNA, 337 bp, Homo sapiens
  misc_feature (4)..(4): n is a, c, g, or t
  misc_feature (85)..(85): n is a, c, g, or t
  misc_feature (158)..(158): n is a, c, g, or t
  misc_feature (171)..(171): n is a, c, g, or t
  misc_feature (174)..(174): n is a, c, g, or t
  misc_feature (180)..(180): n is a, c, g, or t
  misc_feature (259)..(259): n is a, c, g, or t
  misc_feature (329)..(329): n is a, c, g, or t
  misc_feature (335)..(335): n is a, c, g, or t
ggantgggcaaccttgtcagaatggattcctacccataaccactgaatcagaatttcttaggtggggagtactcagtaatatttnaatttgtattaagtctctcaggtcaatctgcgtactaaagttggagaaacactgtcctagaacagtggtcctncaactttttgggncantttccncccagaaagagctttttaaaataatgcgcttcttggctgggagtacgtgtcacgcctgtaatcccagcattttgggagnccgaggcaggaggattgcttgagcccaggagtttgtgaccagcctgggcaacatagcaagaccccgtttntatttnac

SEQ ID NO: 628202 - DNA, 586 bp, Homo sapiens
  misc_feature (25)..(25): n is a, c, g, or t
  misc_feature (71)..(71): n is a, c, g, or t
  misc_feature (158)..(158): n is a, c, g, or t
  misc_feature (160)..(160): n is a, c, g, or t
  misc_feature (176)..(176): n is a, c, g, or t
  misc_feature (178)..(178): n is a, c, g, or t
  misc_feature (237)..(237): n is a, c, g, or t
  misc_feature (252)..(252): n is a, c, g, or t
  misc_feature (283)..(283): n is a, c, g, or t
  misc_feature (343)..(343): n is a, c, g, or t
  misc_feature (436)..(436): n is a, c, g, or t
  misc_feature (443)..(443): n is a, c, g, or t
  misc_feature (518)..(518): n is a, c, g, or t
  misc_feature (522)..(522): n is a, c, g, or t
  misc_feature (574)..(574): n is a, c, g, or t
ccaacatgggcaaatgtctacagangaatgcgctgttctatatgtctgtaaggaatctgcccttaactggnaactacagggtccctcggaaagttaaatttaaaaaagatcggccatagccaagttcttcgtggattatggaaaaaaaatggccctgntnggtcttggttcaaaanangggccccggttgaatggaaatgcttctccctggggcaggaatgtcgtggatctggggtnctcgggtctcttggnggcggaagacgccgtctgtgcgtctcccggngctttctggtgcccctttccggggggcttggctgtttctggctcccttggggtgtttggngggtggggtttgtggcgcccttgggccttgccgcgttcttctcgcgctgcagaggtgaattttcggaccagacacaatgttgtcacaatagcnaaaagcnaattgtaggataatacaatatagaagtttcccagccaatttaaaccttccaaagtcgccaagtagatcaaatctngtgnttcccagtgttctcgacatcacaggcagagcagagctcaaaacccagatggncccacaatttcc

SEQ ID NO: 628203 - DNA, 216 bp, Homo sapiens
ctcccgtttccctttttggggttttttttcccctccgaatgggtgaggccccccctgccccgggaggttgggggttgtgggacccggtcccctgggggggaggccccccggggcctgccccgcgggccatttctgtcttcccccccctcggggcccctgtcttgtttttgggttttggtggggggcccggccaaaaaaccgggtttttttgcagga

SEQ ID NO: 628204 - DNA, 270 bp, Homo sapiens
ttaagttttttagacgggggcctgatcccccgttaggtgactttctcctcaaattcagattgcacatggcaattattgggtaaaagacttaatcagacatatttgggttcaaggctcactaatataaactggtgcaaacattatacttccactcattcaatggttgcatcctgccaggcatccagtgggactgggaatatggacacttgaacattaaacatctgaagaattttggaatgacaggttacaagtgaacataatcagttttat

SEQ ID NO: 628205 - DNA, 726 bp, Homo sapiens
  misc_feature (170)..(170): n is a, c, g, or t
tttcaatctttttcttgccagattcaataacaagctttttatggcctgggtgaagcgaaaaaaattcttgtgttacaacaatcacatttgaattgtaggatacttgtgccaaaagcccaggcgtcagattgagaatgaacagtttgctcgtcattgtgtcaaggcaaaanaatagacaataagcatttttaggtagaactctctccataaggcaagtgtctttcagtgagtaaaagctttgacctgtatgtttaattcatagagcaggttaatggtttgctcaacacaagcacgatctattttcacgttcgctttgaaaatatctgtaacgcctatagatcctatagccacagagttttcctttaagactttttccttttgctttcgtgtgatcacatgttttctgttccagtcactggggaaaaacgtgagttgaaggcgtgtgttataaaagctttgattgtctatttagcattcctttgtgggtctcaagatatatgaagcaataaatgtcattcaaggccgtgtgcttattctgaatgcctcatcgggttttataagcggggtaaaaatacttagatgcttaccagtcttgatattagactgagtggcattggacgtaagtttgtccgagtgcatcaggctatataaagtacggcacccgcgaatttgtggctttgttttttgaatagcaggatgtacgcatttcagtataataaatgtttt

SEQ ID NO: 628206 - DNA, 749 bp, Homo sapiens
ccactgcgttcggaggctgtgatctctcggtgggggggccactcgtctgctgacgtgggtgtggcggagggagaggcgatgctgaaagtgtattgtgtgtcccactgtcttgaagctgggcctgccaacgcctgggcccacagctgcaccggaaggcccgggtggaaggaccggttggagggaaccggggctgatgtgaggccctgggccaggtggatgcggctgtgggggcggtgcggcaaatgtatctgcagcaagtatctgcactactctagaaaagtcctcagaagctttaccttggagggtactagcttcctatcactgtccctattcctagacctggggctgagactgaggaatgcgagacggatgtgcccagggagggacccaacgagagcagcaaagacgaaggtggcgtacctgggggtgtcccaggggactcttgtcacgtgccttcagaccaccagcatggaggctgggaggtagaggggagtggggatgagtccggcaagcaccaactggtatctctgagatgcgaaacgcgaagacgaaagcaaccggacgcgtacgtgaaccccacaagtccattgccccccccaagggagccaccctcgcaagcgagaccgcaatcaagacaaagggcaggtgcggatagagcgcggatagaccgaactggccgacaggcacagggccacgtgcaaaaggaaagtacacggggggaacgagccggggttctggctgacaacggg

SEQ ID NO: 628207 - DNA, 365 bp, Homo sapiens
ttgaagtcctcccagatagggtaggagctcttcatgtcgttgactatggcctggaagagcccgcccagggcgccgcactccttctccgccgtctccatgctctggctgggccgggccgcggcggcggctaggcgcacggagcgcggggagcagcgcaagggagggggccaggccgcgcgggcgctcgctccgaggccgggccgggcctcccgcctccaggctgcgctcagcggccggccgcgccgcgctccggggtcgcgggcctccggcgggcggcgcgggccatgtcgcagcggggctggcgggcggcgcggggggcgcggcgcgggcagctcgcggcgcagccctagttctagatcgcgagc

SEQ ID NO: 628208 - DNA, 331 bp, Homo sapiens
cgtcgacactggcgaaagcaccaaaggggtcggcagtgtttctctcgaactctggtactgaagccaatgaggcggccatcaagatctgtttggctcgtaaaaacggacgtatcatcgcccttaatcatgctttccacggtcgtagtctcggcggtctttcgttgacccacaagatcgcttaccgtcaaccgttcggtccctcggctgtcgatgtcaccttcatagctcccgaagacccagacgcattagctagtgagctagacaggggccatgtttccggggtctttatggaacccattcagggtgaggctggggtcgtccccgtcgacgc

SEQ ID NO: 628209 - DNA, 121 bp, Homo sapiens
agagctgttcttgaggatcccccatgctgcagcacggtaaacaattctcctgcctcaacctcccaagtagctgggactacaggcgtgtgccagcagtgcctgggtaattttggtattattt

SEQ ID NO: 628210 - DNA, 775 bp, Homo sapiens
gaaagaaaaaaaattatctttagggtaagttgcacttggacatagtcaatgtatatggagttgtcagctgacgtcaggcatttaccctaaagatcaaatctgtgttcaaatagattgtgccattggccagagcacggttgacccaacacctgtaatcccgagcacttgggaggcctggaggcgtggcggatcacgaggtcgatggggttcaaagaccagcctggccaacatagtgaaaccccgtctctcactacaaaaatacaaaaaattagctgggcatggttggtgtggctgcctgtaatcccagctgcttgagaggctcaggcaggacgaatcgcttggacctgggagtggtgaggttcgccgtggcgagccgaaatggcgccatatgtattccaccccgggtgacagtgcaagactccatctcagaaaagaaaaaaaagacttgtggctttcacttgtccgcgtgtccataggaatagctgtcgagaggccgttgcctagtctagataacagctggggggtataaggggacttccataaatcggtaagcccccacgtagagcatagcgtatgtcgggcgagtcacttaattgaagacccgattttagctcgttttgacatttataactccgtggtccaataattccgcgtagatacatccgtaatggggggctagtgtcaataatatcattgatgaattccccctgtcagtataatgtttacaaatctattggctattgaaggggtgcccttgggggaccaggtgtgaatc

SEQ ID NO: 628211 - DNA, 91 bp, Homo sapiens
gtgtcagagtctgagtcggagtcagagcagcggccaggctgaggaggagaaggaggaggccgaagcgctcaaggagaaggagaagcccaag

SEQ ID NO: 628212 - DNA, 168 bp, Homo sapiens
aatgaaattaactacaatctcaagtactctgaagaagtcctgaagagtacagcccctggttaaaatccatgtgtgaatttacaggcctgaccataggcaattacaatggctttacctggcaggcctcgtggggaaatctgcctttccctcaccagactttatagccaa

SEQ ID NO: 628213 - DNA, 110 bp, Homo sapiens
gggggcctatgaatacttggttgatcttctcatggagtgtgtaagtgatgtactctgtatatcctgaatatgaatattggcctgccttgcaaggttggggaagtctcctg

SEQ ID NO: 628214 - DNA, 1136 bp, Homo sapiens
agcggaacggcggacgggggctggggcgccgagtcccccggctttgggcggtccgttcgctgatgccccttggtgatggccttttcctccgtcctccagaccaggagcttctgaaatgtcatctgacgagactcgacccaagattcgtggggactcgcaatgggccaacgagtttgagaagatgactatggagaagcagaaggactgaacccgaaattctcgtgttctgttgtcggaggcgaattctacgagttgactcacaatgtgcaagcctggctgctgagatgctatgcgaggtctagcttcatctgctagatggcatggctagacacccgcgcacggcgtgagaggccaagccgccgatccttttgtccaactcacagtggtcgagatggactcacgtttggtcctccggtcgttgccctatccctgacctgaggccacaagtggtcgactgccctattcgcaatgggactcgatgctcgaaatcccgagcacagaaactccagctggattacctcccttgaaaagcggtgcgatgccaagtctgacgtatggtcattgcgcgcgtcgaagaacgtagaggacgcttaagattggaccaaaggacgcgcgtctccgtcgcgacccaacaggcttggctagccgatcacactgggggatatggcacgtaaagtgcgtcttcctcgtgtcacgggaacgtaaccccaccagggccgtgtttgaacaactggtaggggggcatgtttcttttgggaaccagaacacgtttgcttgtagaacgcctcccctattagcagtgccaggattctgaccgattgcacgagctgctgagcagagaaacgaccgcgattacccatgcgccgtacgcgagcgggaagaggaaattcgctgcgaccatgggttccaaggccacgagtgtggtccaaaggcggtcacaccccgtggccggagcagcaatggtgtccagacctgggcaatgggacgcaggtggacacatcgccgtgcacgggtgataggcaccggggctaatctccacggcgcggttgacccgtgggggagggcaacaagcggtgtcagaaagccccatggaggggactggtcacacacatccatgcgtacgcacgaggacatcc

SEQ ID NO: 628215 - DNA, 108 bp, Homo sapiens
ccgggcacggaaaacagactggcattaacttcactccagagcgcaagaggcaccaagttctctcctacactctaggagcagaatcttaaacttgcatacaatcactct

SEQ ID NO: 628216 - DNA, 112 bp, Homo sapiens
  misc_feature (21)..(21): n is a, c, g, or t
gtttgcacctcgctgctccanctctggggcgcaattcaaccttcagcctgcgaccctgcggagaaaaaaaattacttattttcttgccccatacataccttgaggcgagcaa

SEQ ID NO: 628217 - DNA, 127 bp, Homo sapiens
cctcgccagtggagtacagaagcttatatactattaatatcttgaggttacagaaagaatggaggctcagagcatagccaaaaacaagtaatggtgataaatcaggtcacagtggcgaggctaggac

SEQ ID NO: 628218 - DNA, 105 bp, Homo sapiens
ttctttaagatataggatttttatttgagagttggggcagaggtgggggagggagtctagacatcttccccactatatgctgtctgaactgagctaaggagctaa

SEQ ID NO: 628219 - DNA, 130 bp, Homo sapiens
aggggggacccggggagggcagggggtttcccaaaaatcgccctggaaaattttataaaaaaatttttgtggggcggggggccagtaaacttcctgggccccgggggtccttcaggagtttttcaggcca

SEQ ID NO: 628220 - DNA, 978 bp, Homo sapiens
cctggactgtggagaaggggatgaaagtagcaaaaaatccagatagtgtgggaaggtatcaaagatatcaacacagggaggagctgtgcagtgagcaagcaaagcaggaaacaagcctattacaaatcaacttgtgattaacctttcagttacctctgccagaactgggagatatttcacaggtgcaagggacagcatttattgaatgtcaatcgaagttccaaacagttccatcagcccaccagttcattccagtttcagcccacgttccaaagcaatttactcattggcggtccaaaaacccaaccataatttcacataacaccatcagtgacatgcatatatatgttagcattatatccaaattggcctgtcgaccaaagaacaccagcacaagcgaccaccatatcaggcacgaaaaaacctatacgaaagtggtacatgcagtcacgggccacaaaggtctctcagaagttgatctatcacagaccattacctaaatacatcaaagatacatcgcaacacatggcaggcataaagccataaccagcatcgtccatgcacatggtggctacaaacctgtcgcagggcaccacagtccaggccatcagcatgaaccattcggcagacattcagtaccagcgcagcacgaacaccttcacacacatgctcacacgcagtgctggcacagctctatcacatcgcacattggcataacctttgcacgaacacagagcacaagtggcatacttgtgcgagcagtcccttacacacatgtcactgcagtgtggccaaggcccttcagctcgcaattacaataccttggtacgaacatcagaaccattccttactaagagataaaaacctccattaaatggtaacaaatggtggtaccgggttaaaaagaaaacaggtccgagccttaacaacaaaactgggaagaattcaatacaggacaagaaccttacacacatggta

SEQ ID NO: 628221 - DNA, 207 bp, Homo sapiens
tatgcgtctcactagtagtaacaatataacgaaacttatggatctgagtatatccttgataatagaatcataaaccatatgaggaacatgaaagcctgcatctactatcaactatgaaaagtgattgacgaaccacttagctatcagatgatgaacactgataagtcatatgtcattactataaattttaaaatctgttaatcagat

SEQ ID NO: 628222 - DNA, 427 bp, Homo sapiens
tgtccctaacacacccttccagttgtccttaaatagtgaaaccagtacgtctttctaaacggaggtttcaagactaaacattatttaagaagaaccgaaatctttgattttacatccgatactttacacaatctaagtcctctatctctggttactttgtgttttgtttattcccgaattattgctacgttcacgatattctaataccattttttattttattcatatacttttcccgtgcgtacttcttaactttcttaagtaggaaccatttaatccgatccagaacaccgtttccgtgggtttcgattacttcttctcatttactataaactgacaatgtatacatatattcctgctttttcttttatatggttatttgtagaagtagttataccttaatttatgtaaatggataaaatctcta

SEQ ID NO: 628223 - DNA, 385 bp, Homo sapiens
atagatagatagatagatagatagatagatagatagatagatagatagatagatagatagatagacagacagacagataggtgataaatagatacatacatacaaagatagatagatagatagatagatagatagatagatagatagatagatatttgtagatagatatttggtaaatcaatggatgtctctattggtacacacgctgtgaatatcttatacacaacagctactcagtaatcattttgattaaataaaatactttctggtaatagaaacacctcatatcagataaaaattcttaaagaaaacaattacaagtactagacagaaaacatttacacacacacacacctatacaccttcaaacaaatgaggtcgacgc

SEQ ID NO: 628224 - DNA, 187 bp, Homo sapiens
gccgcggtatggatgtgtggatctggacgtcgtaataaatgatgtgactgcggctctagcaggaaggcgtctaggccagtctgatttaggaatgtgctgaggagcttagcattttccgggctcagatccgctttgtaccttgaactgatttccccaaatggctctttgtgcaaccgcatcacccgtt

SEQ ID NO: 628225 - DNA, 183 bp, Homo sapiens
actgccggtaggtcatccagaaaacagggaaacacgaaagtctagtagatgccccagaagcccagctcctcctcgaagagcggcccgaacacgtctgcggggcagtgcagctaaccggtgcggtagtaaatgagcacataggcgaagacgcccgggtaccgatagaagaagaactcgcgaccg

SEQ ID NO: 628226 - DNA, 105 bp, Homo sapiens
  misc_feature (13)..(13): n is a, c, g, or t
cttctcaccagcnaagacccacctgcctacattggctacagacccactgtccctcatgctgctgagatggaccctgagctcctagccaaggccaacccctccacc

SEQ ID NO: 628227 - DNA, 226 bp, Homo sapiens
agccaggtagcatattacatgattacacttatatgaaatatccagaatagataaatccacagaaacagaaaacaggctgttgatcaccaggtaccagaggtaaggggaaagaggaaataatcacctactgggtatgaagttttattctggggtgatgacaatgtttttccattacatagaggtggccattgcacaaccctgtgaatttactaaattccagtgaaat

SEQ ID NO: 628228 - DNA, 167 bp, Homo sapiens
aattcagtgcgcccagagtggacacacccctacagcatgttgtatacccagcactgagaggaacacctagccatccagaggggtcaggagagcaaactgaacagaggcgaatgtgctcagaggggtccatggcccagtgaaggaagccctggatagagctccaatca

SEQ ID NO: 628229 - DNA, 2443 bp, Homo sapiens
agctttcccagctagtcgaatcactggtgcacctccggaatccgaggttcgcattgctctcggacagagttctgcctccccagtactcccaaactcccagtcctgtgcaccaatgaggtccagctctgaggcttctttcctgagaaaaaaatttggaagtccgtgactgtttcctggaggagctgagaagaggaagctcacttccggcgtagggaggctttctgacccggaatggaggaggcggaggagctgctcttggaggggaagaaggcgctgcaactcgcccgcgagccgcgcctgggcctggacttaggatggaacccttccggagaaggctgtacgcagggcctcaaagacgtcccacccgagccgacccgagacatcctcgctttaaagagccttccccggggcttggcccttggcccctcactcgccaaggaacagcgcttgggggtctggtgtgtcggggaccccctgcagcccggcctgctgtgggggccgctggaagaggagtctgcctccaaggagaagggcgagggagtaaagccacggcaggaggagaacctgtcattaggcccatggggagacgtgtgtgcctgtgagcagagttctggctggactagcttggtacaacggggcaggctggagagtgagggaaatgtggccccagtgcggatcagcgagaggcttcatctgcaagtgtaccagctggtgctgccaggctctgaactgctgctgtggccccagccttcctctgagggcccaagtctcacccagcctgggctggacaaagaggcagctgtagcagtggtgacagaagtggagtctgctgtacagcaggaagtggcctcccctggggaggatgcagcagaaccttgcatagatcctggttcccagtcaccctctggcatccaggcagagaatatggtgagccctggacttaagttcccaacccaggaccgaatttccaaggatagccagccacttggcccattgcttcaggatggcgacgtggatgaggaatgcccggcccaggcacagatgccacctgaacttcagagcaattcggctacccagcaggacccagatggcagtggagccagtttctcatcttctgccaggggcacccagccgcatggctacctggccaagaagttacacagccccagtgatcagtgcccacccagagcaaagaccccagagcctggagcccagcagtctggcttccctacactctcgcggagccctcctggcccagcaggaagctccccaaagcaggggcgacggtaccggtgtggagagtgtggcaaggcattcctacagctgtgccacctaaagaagcacgcatttgtgcacacgggccacaagccctttctttgcactgagtgtggcaagagctatagctcagaggagagcttcaaagcccatatgctgggccaccgtggggtgcggcccttcccctgtccacaatgcgacaaggcctatggcacccagcgagacctcaaagagcaccaggtggtacattcaggtgcccggccctttgcttgtgaccagtgtggcaaggcctttgcccgccggccctccctgcggctgcatcgcaagacccaccaggtgccagctgcccctgccccttgcccatgccctgtgtgtgggcggcccctggccaaccagggctccctgcggaaccatatgaggctccatacaggagaaaagcctttcctgtgcccgcactgtggccgggcgtttcgtcagcggggcaacctgcgtgggcatttgcggctccacaccggggagcgtccttaccgctgcccacactgtgccgatgccttcccccagctgcctgaactgcggcgccatctcatctcacacaccggggaggcccacttgtgcccggtgtgtggcaaggccctccgagacccacacacgctccgagctcacgagcgcctgcactccggagagaggccctttccctgtccccagtgtggccgtgcttacacgctggccaccaagctgcggcgccacctcaaatctcacttggaggacaagccctaccgctgccccacctgtggcatgggctacaccctcccgcagagcctcaggcggcatcagctcagtcaccggcctgaggcaccctgcagcccaccctctgtgccttctgctgcttctgagcccactgtggtgctcctgcaggctgagccacaactgctggacacacacagagaggaggaagtctcccccgccagggatgttgttgaggtcaccatttcagaaagccaggagaagtgctttgtggtgccagaggagccagatgccgcccccagcctggtgctaatccataaggacatgggcctcggcgcctgggcagaggtggtggaggtggagatgggcacctgacagctttgccttttgctgacacagctccataaagactcgtgctttctca

SEQ ID NO: 628230 - DNA, 301 bp, Homo sapiens
  misc_feature (114)..(114): n is a, c, g, or t
  misc_feature (123)..(123): n is a, c, g, or t
  misc_feature (282)..(282): n is a, c, g, or t
acaaatgagagaatggtacacacttggcatttagaaaagttataccctccctccccggcctttttgtgtgtgtgtgtgtgtgtgtgtgtgtgtgtgtgtgtgtgtgcgcgcgcnccctgttgngaggggagacagtctatcacccaggctggaactcagtggtgcaatgatacctcactgtagcctccaactcctgggcttaagtgatcctcccatcttcgcctcccaagtaggtgggaatgcaggtgtttgccaccacacccagccaatttttgtattttnaaaaattttttgtagagac

SEQ ID NO: 628231 - DNA, 570 bp, Homo sapiens
tggaaaaagtcagggaggccagggggtgggtttgaaaccagcttgggggggttcgattccttcctttttggtctaaatttagtgctatataccggggttcttcgaagtggtggtggaacggggtggggggggcattccaataatagatccacatcacgggggggttaaagtgtgagagagtttcattctatacataattataaggaacatttttgcggccgttcgagaaggcgaaagagggattctctcgtaaatctccagtgcaacagagttatcttacaatattatcacgtgtgcgtggttagaacgacaatgtggaatgtggaggcccatacgagaagtagaataagagaagtgttatcacaagtggtgcggtgatagtgcaactcaggggggataagactcgcggagggaacaaatagaccctttggggccattcagctgtgcacattatacagcggggtggtgcggccccgaaaaactagtgcctcagtgagtgggtgcttcgacggaagagccagaaacatgtgacacatcgaccaagaagggccgggaagaaaacgtccacgt

SEQ ID NO: 628232 - DNA, 3150 bp, Homo sapiens
agctttcccagctagtcgaatcactggtgcacctccggaatccgaggttcgcattgctctcggacagagttctgcctccccagtactcccaaactcccagtcctgtgcaccaatgaggtccagctctgaggcttctttcctgagaaaaaaatttggaagtccgtgactgtttcctggaggagctgagaagaggaagctcacttccggcgtagggaggctttctgacccggaatggaggaggcggaggagctgctcttggaggggaagaaggcgctgcaactcgcccgcgagccgcgcctgggcctggacttaggatggaacccttccggagaaggctgtacgcagggcctcaaagacgtcccacccgagccgacccgagacatcctcgctttaaagagccttccccggggcttggcccttggcccctcactcgccaaggaacagcgcttgggggtctggtgtgtcggggaccccctgcagcccggcctgctgtgggggccgctggaagaggagtctgcctccaaggagaagggcgagggagtaaagccacggcaggaggagaacctgtcattaggcccatggggagacgtgtgtgcctgtgagcagagttctggctggactagcttggtacaacggggcaggctggagagtgagggaaatgtggccccagtgcggatcagcgagaggcttcatctgcaagtgtaccagctggtgctgccaggctctgaactgctgctgtggccccagccttcctctgagggcccaagtctcacccagcctgggctggacaaagaggcagctgtagcagtggtgacagaagtggagtctgctgtacagcaggaagtggcctcccctggggaggatgcagcagaaccttgcatagatcctggttcccagtcaccctctggcatccaggcagagaatatggtgagccctggacttaagttcccaacccaggaccgaatttccaaggatagccagccacttggcccattgcttcaggatggcgacgtggatgaggaatgcccggcccaggcacagatgccacctgaacttcagagcaattcggctacccagcaggacccagatggcagtggagccagtttctcatcttctgccaggggcacccagccgcatggctacctggccaagaagttacacagccccagtgatcagtgcccacccagagcaaagaccccagagcctggagcccagcagtctggcttccctacactctcgcggagccctcctggcccagcaggaagctccccaaagcaggggcgacggtaccggtgtggagagtgtggcaaggcattcctacagctgtgccacctaaagaagcacgcatttgtgcacacgggccacaagccctttctttgcactgagtgtggcaagagctatagctcagaggagagcttcaaagcccatatgctgggccaccgtggggtgcggcccttcccctgtccacaatgcgacaaggcctatggcacccagcgagacctcaaagagcaccaggtggtacattcaggtgcccggccctttgcttgtgaccagtgtggcaaggcctttgcccgccggccctccctgcggctgcatcgcaagacccaccaggtgccagctgcccctgccccttgcccatgccctgtgtgtgggcggcccctggccaaccagggctccctgcggaaccatatgaggctccatacaggagaaaagcctttcctgtgcccgcactgtggccgggcgtttcgtcagcggggcaacctgcgtgggcatttgcggctccacaccggggagcgtccttaccgctgcccacactgtgccgatgccttcccccagctgcctgaactgcggcgccatctcatctcacacaccggggaggcccacttgtgcccggtgtgtggcaaggccctccgagacccacacacgctccgagctcacgagcgcctgcactccggagagaggccctttccctgtccccagtgtggccgtgcttacacgctggccaccaagctgcggcgccacctcaaatctcacttggaggacaagccctaccgctgccccacctgtggcatgggctacaccctcccgcagagcctcaggcggcatcagctcagtcaccggcctgaggcaccctgcagcccaccctctgtgccttctgctgcttctgagcccactgtggtgctcctgcaggctgagccacaactgctggacacacacagagaggaggaagtctcccccgccagggatgttgttgaggtcaccatttcagaaagccaggagaagtgctttgtggtgccagaggagccagatgccgcccccagcctggtgctaatccataaggacatgggcctcggcgcctgggcagaggtggtggaggtggagatgggcacctgacagctttgccttttgctgacacagctccataaagactcgtgctttctcaaaaaaaacaaaaaaagaaaaaaaaaataaaaaaacaaaaagaaagagagagcggcggcgcgcggcaacaaagaagtcccccccgagagaggagccccacagaaaagcgagcgcgacccacgacaggttctgtagcgcgaaaccgggggcgaccctaatagaggagcaggagcgcgaaatatatatacgaagcagacagcaccgagggcgcccagagacgttaataaacaaacgagagcaagaagacagaggagaaacacagcgagcgaaacgcgcgaggagcaccaacttggaggaaagaggagagagacacacaaataaactctactgtaagagaggcagaacggaggcgaccacacatacatatgtgtgtgggccacaaattaaatatcatcacaagacgagagaataattaatataaaagaagaacttcaacatagaggagaaaaacaaatatctaaaaaccactttaacgcaggagcggacaactcggggcggcgactacccatagaaaaggacgaaaaagagacaagagcaaccgcgcagcggaaaaaaaccctaaagcgagccaccccagaggggaaacagagcggctccgcgccacaccacccaatgttactacccaacgggagacatcaaagcacccacaacacccgagccgaaccacaacccaaccgacacacacaagaaaagaagacagcaccacac

SEQ ID NO: 628233 - DNA, 1472 bp, Homo sapiens
agcggcttgtcctggtggcagtagccgggctgaaaggacgcgtgtgttgttctcctctctgccggctactgggcgatgtgctacgccccacgtggagtatccgcgtgatacctcccggaacacaagggagcgcagttcatcctgcgacagacagagatggtcgacttgtgcctgcatgtattcaaggctcctattcgaccagatattgtgaactttgttcacaccaacttgcgcaaaaacaacagacagccctatgctgtcagtgaattagcaggtcatcagactagtgctgagtcttggggtactggcagagctgtggctcgaattcccacggtggtgggactcaccgcgtctggccaggtgcttttggaaacatgtgtcgtggaggccgaatgttggcaccgaagccaaaaccgtaggcgccgttggcatcgtagagtgaacacaacccaaaaacgatacgccatctgttctgccctggctgcctcagccctaccagcactggtcatgtctaaaggtcatcgtattgaggaagttcctgaacttcctttggtagttgaagataaagttgaaggctacaagaaagaccaaggaagctgttttgctccttaagaaacttaaagcctggaatgatatcaaaaaggtctatgcctctcagcgaatgagagctggcaaaggcaaaatgagaaaccgtcgccgtatccagcgcaggggcccgtgcatcatctataatgaggataatggtatcatcaaggccttcagaaacatccctggaattactctgcttaatgtaagcaagctgaacattttgaagcttgctcctggtgggcatgtgggacgtttctgcatttggactgaaagtgctttccggaagttagatgaattgtacggcacttggcgtaaagccgcttccctcaagagtaactacaatcttcccatgcacaagatgattaatacagatcttagcagaatcttgaaaagcccagagatccaaagagcccttcgagcaccacgcaagaagatccatcgcagagtcctaaagaagaacccactgaaaaacttgagaatcatgttgaagctaaacccatatgcaaagaccatgcgccggaacaccattcttcgccaggccaggaatcacaagctccgggtggataaggcagctgctgcagcagcggcactacaagccaaatcagatgagaaggcggcggttgcaggcaagaagcctgtggtaggtaagaaaggaaagaaggctgctgttggtgttaagaagcagaagaagcctctggtgggaaaaaaggcagcagctaccaagaaaccagcccctgaaaagaagcctgcagagaagaaacctactacagaggagaagaagcctgctgcataaactcttaaatttgattattccataaaggtcaaatcattttggacagcttcttttgaataaagacctgattatacaggcagtgagaaaacca

SEQ ID NO: 628234 - DNA, 2134 bp, Homo sapiens
agctttcccagctagtcgaatcactggtgcacctccggaatccgaggttcgcattgctctcggacagagttctgcctccccagtactcccaaactcccagtcctgtgcaccaatgaggtccagctctgaggcttctttcctgagaaaaaaatttggaagtccgtgactgtttcctggaggagctgagaagaggaagctcacttccggcgtagggaggctttctgacccggaatggaggaggcggaggagctgctcttggaggggaagaaggcgctgcaactcgcccgcgagccgcgcctgggcctggacttaggatggaacccttccggagaaggctgtacgcagggcctcaaagacgtcccacccgagccgacccgagacatcctcgctttaaagagccttccccggggcttggcccttggcccctcactcgccaaggaacagcgcttgggggtctggtgtgtcggggaccccctgcagcccggcctgctgtgggggccgctggaagaggagtctgcctccaaggagaagggcgagggagtaaagccacggcaggaggagaacctgtcattaggcccatggggagacgtgtgtgcctgtgagcagagttctggctggactagcttggtacaacggggcaggctggagagtgagggaaatgtggccccagtgcggatcagcgagaggcttcatctgcaagtgtaccagctggtgctgccaggctctgaactgctgctgtggccccagccttcctctgagggcccaagtctcacccagcctgggctggacaaagaggcagctgtagcagtggtgacagaagtggagtctgctgtacagcaggaagtggcctcccctggggaggatgcagcagaaccttgcatagatcctggttcccagtcaccctctggcatccaggcagagaatatggtgagccctggacttaagttcccaacccaggaccgaatttccaaggatagccagccacttggcccattgcttcaggatggcgacgtggatgaggaatgcccggcccaggcacagatgccacctgaacttcagagcaattcggctacccagcaggacccagatggcagtggagccagtttctcatcttctgccaggggcacccagccgcatggctacctggccaagaagttacacagccccagtgatcagtgcccacccagagcaaagaccccagagcctggagcccagcagtctggcttccctacactctcgcggagccctcctggcccagcaggaagctccccaaagcaggggcgacggtaccggtgtggagagtgtggcaaggcattcctacagctgtgccacctaaagaagcacgcatttgtgcacacgggccacaagccctttctttgcactgagtgtggcaagagctatagctcagaggagagcttcaaagcccatatgctgggccaccgtggggtgcggcccttcccctgtccacaatgcgacaaggcctatggcacccagcgagacctcaaagagcaccaggtggtacattcaggtgcccggccctttgcttgtgaccagtgtggcaaggcctttgcccgccggccctccctgcggctgcatcgcaagacccaccaggtgccagctgcccctgccccttgcccatgccctgtgtgtgggcggcccctggccaaccagggctccctgcggaaccatatgaggctccatacaggagaaaagcctttcctgtgcccgcactgtggccgggcgtttcgtcagcggggcaacctgcgtgggcatttgcggctccacaccggggagcgtccttaccgctgcccacactgtgccgatgccttcccccagctgcctgaactgcggcgccatctcatctcacacaccggggaggcccacttgtgcccggtgtgtggcaaggccctccgagacccacacacgctccgagctcacgagcgcctgcactccggagagaggccctttccctgtccccagtgtggccgtgcttacacgctggccaccaagctgcggcgccacctcaaatctcacatgggcctcggcgcctgggcagaggtggtggaggtggagatgggcacctgacagctttgccttttgctgacacagctccataaagactcgtgctttctca

SEQ ID NO: 628235 - DNA, 1102 bp, Homo sapiens
ccacgtggttcggccggacaaatatcctggatcagacagggattcctctaaccggctcgtactccatcaagttacgttcacagtccatgatcattaactgcaatcagaccatacacaaaacatgatcatgtctaaagagtcaatcgatatagagagaaataacatgaactatcacatatatggatagtggaggacgtaagttgaaggctacagaagagcaaggaagctgttttgctccttaagaaacttaaagcctggaatgatatcaaaaaggtctatgcctctcagcgaatgagagctggcaaaggcaaaatgagaaaccgtcgccgtatccagcgcaggggcccgtgcatcatctataatgaggataatggtatcatcaaggccttcagaaacatccctggaattactctgcttaatgtaagcaagctgaacattttgaagcttgctcctggtgggcatgtgggacgtttctgcatttggactgaaagtgctttccggaagttagatgaattgtacggcacttggcgtaaagccgcttccctcaagagtaactacaatcttcccatgcacaagatgattaatacagatcttagcagaatcttgaaaagcccagagatccaaagagcccttcgagcaccacgcaagaagatccatcgcagagtcctaaagaagaacccactgaaaaacttgagaatcatgttgaagctaaacccatatgcaaagaccatgcgccggaacaccattcttcgccaggccaggaatcacaagctccgggtggataaggcagctgctgcagcagcggcactacaagccaaatcagatgagaaggcggcggttgcaggcaagaagcctgtggtaggtaagaaaggaaagaaggctgctgttggtgttaagaagcagaagaagcctctggtgggaaaaaaggcagcagctaccaagaaaccagcccctgaaaagaagcctgcagagaagaaacctactacagaggagaagaagcctgctgcataaactcttaaatttgattattccataaaggtcaaatcattttggacagcttcttttgaataaagacctgattatacaggcagtgagaaaacca

SEQ ID NO: 628236 - DNA, 2237 bp, Homo sapiens
ggcccaagtaaataccagtattctaaacaagctgcgtgtatcctatattgactcttttactgtttagctactcactggcagagacagtaatgtgttcaatgttagtaagttctccatacccttgggagggaggatgagcgagacgacagctttattggtccgttacatgaagtgaagaatcagacagcactgtcctgttagagggatgaagccagatggctttctaaacgcttccaggagtttcatcttaatatgtgtcccaggaaagtttcagtctagtttcttttttgattgctacccgaaccctcgaacaccatttgcagtaagagacgttctggtataggttctatttcagaacctgtcattaggcccatggggagacgtgtgtgcctgtgagcagagttctggctggactagcttggtacaacggggcaggctggagagtgagggaaatgtggccccagtgcggatcagcgagaggcttcatctgcaagtgtaccagctggtgctgccaggctctgaactgctgctgtggccccagccttcctctgagggcccaagtctcacccagcctgggctggacaaagaggcagctgtagcagtggtgacagaagtggagtctgctgtacagcaggaagtggcctcccctggggaggatgcagcagaaccttgcatagatcctggttcccagtcaccctctggcatccaggcagagaatatggtgagccctggacttaagttcccaacccaggaccgaatttccaaggatagccagccacttggcccattgcttcaggatggcgacgtggatgaggaatgcccggcccaggcacagatgccacctgaacttcagagcaattcggctacccagcaggacccagatggcagtggagccagtttctcatcttctgccaggggcacccagccgcatggctacctggccaagaagttacacagccccagtgatcagtgcccacccagagcaaagaccccagagcctggagcccagcagtctggcttccctacactctcgcggagccctcctggcccagcaggaagctccccaaagcaggggcgacggtaccggtgtggagagtgtggcaaggcattcctacagctgtgccacctaaagaagcacgcatttgtgcacacgggccacaagccctttctttgcactgagtgtggcaagagctatagctcagaggagagcttcaaagcccatatgctgggccaccgtggggtgcggcccttcccctgtccacaatgcgacaaggcctatggcacccagcgagacctcaaagagcaccaggtggtacattcaggtgcccggccctttgcttgtgaccagtgtggcaaggcctttgcccgccggccctccctgcggctgcatcgcaagacccaccaggtgccagctgcccctgccccttgcccatgccctgtgtgtgggcggcccctggccaaccagggctccctgcggaaccatatgaggctccatacaggagaaaagcctttcctgtgcccgcactgtggccgggcgtttcgtcagcggggcaacctgcgtgggcatttgcggctccacaccggggagcgtccttaccgctgcccacactgtgccgatgccttcccccagctgcctgaactgcggcgccatctcatctcacacaccggggaggcccacttgtgcccggtgtgtggcaaggccctccgagacccacacacgctccgagctcacgagcgcctgcactccggagagaggccctttccctgtccccagtgtggccgtgcttacacgctggccaccaagctgcggcgccacctcaaatctcacttggaggacaagccctaccgctgccccacctgtggcatgggctacaccctcccgcagagcctcaggcggcatcagctcagtcaccggcctgaggcaccctgcagcccaccctctgtgccttctgctgcttctgagcccactgtggtgctcctgcaggctgagccacaactgctggacacacacagagaggaggaagtctcccccgccagggatgttgttgaggtcaccatttcagaaagccaggagaagtgctttgtggtgccagaggagccagatgccgcccccagcctggtgctaatccataaggacatgggcctcggcgcctgggcagaggtggtggaggtggagatgggcacctgacagctttgccttttgctgacacagctccataaagactcgtgctttctca

SEQ ID NO: 628237 - DNA, 343 bp, Homo sapiens
ggtcgacgactgatactcctcctaaaagtagatgaaaaaactcctaaggaaataacatgaggccgggcacggtggctcatgcctgtaatcccagcactttgggaggctgaggtgggtagatcatgaggtcaggagatcaagaccagtctgggcggcgtggtgaggcctcgtctctgctaaaaatggaaaggttagccgggagtggtggcgcacgcttgtggtcccggctgcttgggaggctggggcaggaggattgcctgagcccatgaggtggaggctgcagtgagcagacattgcaccgctgtactccagcctgggcaacagagtgagacgctgtttaaaa

SEQ ID NO: 628238 - DNA, 1083 bp, Homo sapiens
gcctgtgggatgtatggagagctggcagagcaagcggcagcgactgcaacacggaggcacttgcactatcttatcatgtatgagtgcgcttatgctttagtggctagacctgcactcgtgcaggcctgactggtgacaaacagtgacgaaagatgctatgcacgacgactcagatggaggtatgataagaatgcactgagggagcgtgtttctgaaacaaatgattttgtggaagttctgatttatggctgaaagagttgcaccattgatggttgaaacttcataattaataagttctcaggtaccttttatagctcttaagccataaagatgatttgtgtttcttttgttgaaatacaggctccctaatttttctttccctttggaattatctgcttaatgtaagcaagctgaacattttgaagcttgctcctggtgggcatgtgggacgtttctgcatttggactgaaagtgctttccggaagttagatgaattgtacggcacttggcgtaaagccgcttccctcaagagtaactacaatcttcccatgcacaagatgattaatacagatcttagcagaatcttgaaaagcccagagatccaaagagcccttcgagcaccacgcaagaagatccatcgcagagtcctaaagaagaacccactgaaaaacttgagaatcatgttgaagctaaacccatatgcaaagaccatgcgccggaacaccattcttcgccaggccaggaatcacaagctccgggtggataaggcagctgctgcagcagcggcactacaagccaaatcagatgagaaggcggcggttgcaggcaagaagcctgtggtaggtaagaaaggaaagaaggctgctgttggtgttaagaagcagaagaagcctctggtgggaaaaaaggcagcagctaccaagaaaccagcccctgaaaagaagcctgcagagaagaaacctactacagaggagaagaagcctgctgcataaactcttaaatttgattattccataaaggtcaaatcattttggacagcttcttttgaataaagacctgattatacaggcagtgagaaaacca

SEQ ID NO: 628239 - DNA, 2524 bp, Homo sapiens
agctttcccagctagtcgaatcactggtgcacctccggaatccgaggttcgcattgctctcggacagagttctgcctccccagtactcccaaactcccagtcctgtgcaccaatgaggtccagctctgaggcttctttcctgagaaaaaaatttggaagtccgtgactgtttcctggaggagctgagaagaggaagctcacttccggcgtagggaggctttctgacccggaatggaggaggcggaggagctgctcttggaggggaagaaggcgctgcaactcgcccgcgagccgcgcctgggcctggacttaggatggaacccttccggagaaggctgtacgcagggcctcaaagacgtcccacccgagccgacccgagacatcctcgctttaaagagccttccccggggcttggcccttggcccctcactcgccaaggaacagcgcttgggggtctggtgtgtcggggaccccctgcagcccggcctgctgtgggggccgctggaagaggagtctgcctccaatgtgatgaatgtgtgctgatggccgactgtaaaagccacctgtgcatgtgatgtgatgcaaccttgtcacttaggtgccacactgggggacgactgttgtgtcgccatgtagatgcattcaagttcctgtgctgtgaactactgcttgtgtacatactggtgtgcagtgcttggactgatgttgatgtggaacattgttgtgccccaagtagcgtgatcatgcgatgatggcttcaatcttgcaaatgtagtaccatgacttgtgttgctggccatgggctctgaactgctgctgtggccccagccttcctctgagggcccaagtctcacccagcctgggctggacaaagaggcagctgtagcagtggtgacagaagtggagtctgctgtacagcaggaagtggcctcccctggggaggatgcagcagaaccttgcatagatcctggttcccagtcaccctctggcatccaggcagagaatatggtgagccctggacttaagttcccaacccaggaccgaatttccaaggatagccagccacttggcccattgcttcaggatggcgacgtggatgaggaatgcccggcccaggcacagatgccacctgaacttcagagcaattcggctacccagcaggacccagatggcagtggagccagtttctcatcttctgccaggggcacccagccgcatggctacctggccaagaagttacacagccccagtgatcagtgcccacccagagcaaagaccccagagcctggagcccagcagtctggcttccctacactctcgcggagccctcctggcccagcaggaagctccccaaagcaggggcgacggtaccggtgtggagagtgtggcaaggcattcctacagctgtgccacctaaagaagcacgcatttgtgcacacgggccacaagccctttctttgcactgagtgtggcaagagctatagctcagaggagagcttcaaagcccatatgctgggccaccgtggggtgcggcccttcccctgtccacaatgcgacaaggcctatggcacccagcgagacctcaaagagcaccaggtggtacattcaggtgcccggccctttgcttgtgaccagtgtggcaaggcctttgcccgccggccctccctgcggctgcatcgcaagacccaccaggtgccagctgcccctgccccttgcccatgccctgtgtgtgggcggcccctggccaaccagggctccctgcggaaccatatgaggctccatacaggagaaaagcctttcctgtgcccgcactgtggccgggcgtttcgtcagcggggcaacctgcgtgggcatttgcggctccacaccggggagcgtccttaccgctgcccacactgtgccgatgccttcccccagctgcctgaactgcggcgccatctcatctcacacaccggggaggcccacttgtgcccggtgtgtggcaaggccctccgagacccacacacgctccgagctcacgagcgcctgcactccggagagaggccctttccctgtccccagtgtggccgtgcttacacgctggccaccaagctgcggcgccacctcaaatctcacttggaggacaagccctaccgctgccccacctgtggcatgggctacaccctcccgcagagcctcaggcggcatcagctcagtcaccggcctgaggcaccctgcagcccaccctctgtgccttctgctgcttctgagcccactgtggtgctcctgcaggctgagccacaactgctggacacacacagagaggaggaagtctcccccgccagggatgttgttgaggtcaccatttcagaaagccaggagaagtgctttgtggtgccagaggagccagatgccgcccccagcctggtgctaatccataaggacatgggcctcggcgcctgggcagaggtggtggaggtggagatgggcacctgacagctttgccttttgctgacacagctccataaagactcgtgctttctca

SEQ ID NO: 628240 - DNA, 1104 bp, Homo sapiens
  misc_feature (45)..(45): n is a, c, g, or t
ctgggggtgtttattctcacaggcgcctttaaatttttttgcgcngggtggtgggtagaagataaaatagtggggggaacaccgttttgggcggctgtgcccgcaaaaaatgttctctcttctcttgtgggatgttctgctagaagacgatttgttgtgataggcacagcgaggttgttatatccccctcggttgttagccctcagagccgctcacctcgtgatagcgccctcccgcgctctctctggtcgccccctttgtatgtctccgcattggtagaaagagtggttgttgatatgatagagagagagaagacaaaaataatagtagatagagagagtgtcacaggtgtggggtaatatgtttgaaagagagagagtggggggagatagagaaaaaagtgttctcatgaagaagtgtttgtttagaaagaactatcacatcgcgcgcacacactaggtctcacagagatttcttctctggtgtctctgtcccctatataataggtggcggcgcccccgtggggtgtcgtccacaagtatatctctccgggggcgcacaggagacacaagcggtgtgtctcaccccccgggtctcttcgcttctcccacagctccacagccttctgggtctcacagagagagaaccttggccacaggagactcgggggagagagcgcgagcacagaatggaggcgccctctcttgggacactctctttgtgcgccacgcgttcttttgcgaccgcccacagagccgggaaaaggcgggctgggctttgcgctatgtcgcattctcttcccggataacccctgagggagcccccccccactctcttttttatggaatgaaggggaaagctggaggcccccaactttgagtctctccacattggagagtggccccaaatttcttccaatctaagggcaaagttctgaaaaggccccaaggcgcccctccccaacagtttggccattggcctccagcacctggggggaaggggtaaaatcagagttattgtttcaaggcccacccccccccccggacaggagaccgtgtttttgataaagagttttgtaagagtgaaaaaaatttttaaaaatta

SEQ ID NO: 628241 - DNA, 555 bp, Homo sapiens
gccgggctgagaggagcgtggctgtctcctctctccgccatggcgtgtgctcgcccactgatatcggtgtactccgaaaagggggagtcatctggcaaaaatgtcactttgcctgctgtattcaaggctcctattcgaccagatattgtgaactttgttcacaccaacttgcgcaaaaacaacagacagccctatgctgtcagtgaattagcaggtcatcagactagtgctgagtcttggggtactggcagagctgtggctcgaattcccagagttcgaggtggtgggactcaccgctctggccagggtgcttttggaaacatgtgtcgtggaggccgaatgtttgcaccaaccaaaacctggcgccgttggcatcgtagagtgaacacaacccaaaaacgatacgccatctgttctgccctggctgcctcagccctaccagcactggtcatgtctaaaggtcatcgtattgaggaagttcctgatcttccttcgtgtagtctgaatataacgtctgacggcagcaagacaggcaagagtggcgtgctggcgcaa

SEQ ID NO: 628242 - DNA, 287 bp, Homo sapiens
atgcactatcaagggatcgtatatagtagatgtgtgagcatgcgtggttgggtagagacacgggcagtcaatcatggtagcgaagtgtagagtgcagtggcgtgatcatggcgcactgaagcctcaaactcctgggctcaggagatcctcccgcctcagcctcctgagtagctgggaccacaggcccacaccaccatgcccagctaattttgtattctttgtagagatggggttcatcatgtttgcccaggctggtctcgaactcctggactcaagcaatccaccca

SEQ ID NO: 628243 - DNA, 585 bp, Homo sapiens
ccgaggccccgttattgacgcgtctcctctgcttctgctctgcaccatcatcattctaatacactattacactattctaagtagtgtaatactacatcattctaatgtaacactacatcattctaatacactattaacttgtcttttctgtctctacagatatccatgtttactagaatgtaatattaagctctttggaggacaataattttttctttatttactactacagccctagaacctaaaaatcattcctggaacataataggagctctgaaaacatttcttgttgaatgagttaaaaacttaggaactaaattacaactagagtttggtggagcaaaacatgccaaatagtcacaaatttaaaagtatatggttttctttcctttggagctggggcttcactctattaaccaggtgggagtgcaaggttgcgatcttggctcactacaacctccacctatcaggctcaagcaatcttcccaactcagactcccgagtagcctggaccacaggtgcacgccatcatacctggctaatgttttgtatttttttttataattttttatttaaaagagaaag

SEQ ID NO: 628244 - DNA, 473 bp, Homo sapiens
  misc_feature (131)..(131): n is a, c, g, or t
gccgggctgagaggagcgtggctgtctcctctctccgccatggcgtgtgctcgcccactgatatcggtgtactccgaaaagggggagtcatctggcaaaaatgtcactttgcctgctgttggtgttaagangcagaagaagcctccgggtggataaggcagctgctgcagcagcggcactacaagccaaatcagatgagaaggcggcggttgcaggcaagaagcctgtggtaggtaagaaaggaaagaaggctgctgttggtgttaagaagcagaagaagcctctggtgggaaaaaaggcagcagctaccaagaaaccagcccctgaaaagaagcctgcagagaagaaacctactacagaggagaagaagcctgctgcataaactcttaaatttgattattccataaaggtcaaatcattttggacagcttcttttgaataaagacctgattatacaggcagtgagaaaacca

SEQ ID NO: 628245 - DNA, 424 bp, Homo sapiens
  misc_feature (26)..(26): n is a, c, g, or t
  misc_feature (44)..(44): n is a, c, g, or t
  misc_feature (109)..(109): n is a, c, g, or t
  misc_feature (268)..(268): n is a, c, g, or t
  misc_feature (381)..(381): n is a, c, g, or t
cccgcggtttttatcccttgaccatntactatgacataaggttntgtacacaggagatattctattgatgctacaaatggaaagccaatgcctttaccatacatagaanaacaaccctaagaaacaagcaaaacaaaaacaaaacaggggctgggtatggtggctcacgcctgtaatcccagcactttgggaggccgaggtgggtggatcacaaggtcaggagttccagaccagcctggccaatatggtgaaaccctgtctctaatanaatacaaaaattagccgggtgtggtggtgggcgccttagtcccacctacttgggaggctgaggcaggagaatagtttgaacccgggaggcagagtctgcagtgagccgagatngcaccactgcactccagcctaggagacagagcgagactctgtc

SEQ ID NO: 628246 - DNA, 987 bp, Homo sapiens
aggggagcgatggcagccgggggtctgagcctgctccgagcgcaaatgcggcgtgactgggtggggaggttgcgggaggagcagcagaggggacgcgcctccgccaggtgtcgcgcatcctgagtgaaggcggctggctggagctgcagcgccgagcgagtggcctggctgctggcctgagagctgcggacctggtaactgtgagctgcagggccgtgagccggtgctggctgctggaggggccattgaagcgggcggccaggcaggaggtgtgcgaacgaccctggatggagctgcggggggaaaggtccgggaggcctggcacatgctgcccgttcctggacaccgccaaaatagcttggtccgtctacaacagtgctgcggggaatcaggcacggtgccagcggtctatcccagacgtaccggtggaccctaattgcgagttgttggaccactggctttccagaaaacggggacgaacgcggtttcagttgcctgccccgacctgacgcggacgggcccgtagccaatagcccttcagcccaccattgaggcattcacccctgatcttgccattgacgcacggaaaggcgtgggattgcaagccactgctgcgtggtctcaggaaacctggtggaccgggggcttccaaccttgcacgcgcagttggcgcttggcctgtcggcaacggtgccaatcttcctgaagcttcccaccgggggaaacccacttgtcacatttcggaaaggttcgtggtacccttcccttggcggtttccccagggcaggggcaggatacgggttgccggggggttgttaccgacgtggtttaccgtgagtaccggcaacgttgtcccttccagcccgtgaacacccagaaaccatgggcccggcgaacctttgtccagccacagttggtggcggaacccaagtgcctggcgggtgtaccacccacttggttgccacatttagggcgggcacgcagtgg

SEQ ID NO: 628247 - DNA, 201 bp, Homo sapiens
gagtattccgatttcatttagggagatacttgggattaggattacgaccgttgcgaagcggagtacggatgctactcagggaatgatggtaaaagggtagcttactgcttgtcctccgattcaggatagaatgacgaggtctgcggctaagagacaataaagtgattggcttagtggacacacattctggaggggtaccga

SEQ ID NO: 628248 - DNA, 825 bp, Homo sapiens
gatcgctctcccgggcttagaaggcccggtactgacgcgcagtgccagaccttagccctcacggtccttaagtctcggtcgccctcgcctcgaagcctgccacccgcgctcagttgcccgcctcctcagccagcatgcttggaccattctgagctcgtgcccacgcaagatggatcacaagggccagaaggctagctgaacagattgttccagggaattattcttttttctggcaatagtgtgggatttatctacggggtacgtggctgaaacaagtttcggggtggacttgtcctatattagttaattggccggatttgtgctttcttcatgtgtttgtgctgacaacttcctccattggcccatcttatccgcggggaatcctctcaagtgtgtttaccttgtctcaaggaatcaaggcaccaggaacggaaaaggaaaccagtgggaacggaaaatttaacacgaggcattgctaaaaacataatggaggtttttcatggattcagcaccgtgcttttgtgttccttgtgagatgagctaaattggtttcaataccccaagaataagagttaaaaccacctaaatgctctttatggcacagtgtggtataagattagttctctttaatacttcattttctagcccagtgggggttttgatttatataaagtaggtttagaccttttcctttcataatctgtgtctctgagatggggaacaggaacccacaagtttgaagttctttcaggtgtgaataatggaaaataaatgctccataaatgatgtgacaatgtgctattcaaaggttataatctttggttc

SEQ ID NO: 628249 - DNA, 473 bp, Homo sapiens
ccgagttatgacacgagaatgcccagagactgagtctagcccttagagaatgctctgaatttggtactcgggcattatacagttagtaattaaacttgaaatgccattactactagtatattcatatcccaagaataagaacatgtctatgtacccgtttctaggaaggaggagtatatgccttttgtctatttctgacacagatgcatttggtctgtcaaaactgcaaccatggggtatgtagtatgaccaactgcatttaacaaaactcctctaagtacttctaaatattctgtgcaaatatcttgagaacttcaacatcctaaaaatgtgtttctacaagactttatattttaagctaagtggaataatacaacgtaactaaaacatggcgggtaccgaaaggagggcaattcatggaagaaatttcctctgttcattccgtcctcttcaacctaagcaatatggatgtc

SEQ ID NO: 628250 - DNA, 737 bp, Homo sapiens
gacgattctcatgtgacctagggaagtcagatcggtgtgcaggaagtcctggtaattctggtccgttgtacccgtctggataccagcgttccttcagcagcgcaggctggtggtcccatgaggcccgtggaaggagtcaaatcttgacggggaattatgggcagttttaatcttgctagggcatgttgttatccagccaagaactccgaaagctcagaacaaggacggaggaagaaactgacccgatcagtgccagaagtcgattgtattcaatagaagaataacgcaagaacagtaaaagaaggaaggaagagaggtagacagatacaagatgaacctcctgtcaaacaaatggaagggaaaccagatacaatgatgagtgaaccaaagcactgaggaagagccaaagcctgaggcaaaagccagaagaggaggagaagctagaggaggaggccagagcacaaggaacttgtagagaaaggctgattcaatcgtctccaggagtttaacatgaagatatacagcaacaggcactttaagcaatgtgcaagatatgtgtagagaagtggctgacatagatgagataaggagagtcacgaaatcaagctgatagtgaatgcgttggcaaggctcaatcgagaacatccttatacgctatttaatggtagttaccttgattccagtctgatatgaacaataccatataggtagggtaaatcagcatctctgactattcc

SEQ ID NO: 628251 - DNA, 118 bp, Homo sapiens
ggcaaccagcgagacttcccagtgacgatctctgactatgggtggactcgggtgtagacctctgaagctgagatcacacgaaaacctggcctccccaccacttgccttcggtgcgggg

SEQ ID NO: 628252 - DNA, 268 bp, Homo sapiens
atctgaactaaggaccagaggctgccagatgtttctggctcctcacgtgtccttcaggacagaacagaagcacaaaggcttagccaagagttcttttttattccctttgatcctcccccaaaggggaggggcttaggcagcttttggacccccaggaatggaccgggattccaggcaatctgtttagaggccccccattccaaattttatccttttcctttccttcccctaagatgtttccagggccctctggtccccacactgtcct

SEQ ID NO: 628253 - DNA, 387 bp, Homo sapiens
ccaccttggtggagaataagaaggctcaagctggtggtgactggacatggatgtggatccccatcggagcttagttgtcttctgcctgccccctagcctcagccgcctcatctggaaagtgggtgatgataggccgggtgtggtggcttacacctgtaatcccagcactttgggaggccgaggcaggcagatcacgaggtcaggagatcaagaccatcctggctaacatggtgaaaccccgtctctactaaaaatacaaaacaattacccgggcgtggtggcgggtgcctgtagtcccagatactggggaggctgaggcaggagaatagcgtgaacccaggaggtggagcttacagggagctgagattgtgccactgcactccagcc

SEQ ID NO: 628254 - DNA, 1428 bp, Homo sapiens
cccccctgtttttgtgcgccctcttacttctttatagcggtgcgctccaccagctttgatgtatggactcacctcaacgtttgttgtgtgtcccgctccaagatgattagtcctccaagggcttttggggttgcactcgctgtcgtgctctcggggtaaattttctccctccctcggggaagcattttccttgcgtctgcggagactccctccaccactgcgtggttctccttcgtgtgggtccctcccccattgtgcgtgccgcagcaaccactccttaggagagtgttctcgctgcgttgtggttgatcattttcgctgttgtgccgccccaccatctcgtcgtttctcgccgctttttgttcttcccttcccctcggccgcctacgcccactccaatttgttctgctcgcatcccaccataaactccccccggaagattatattgtgcgtcctgctttgagaagaaatcttcctcctacgagagagtatattctcttcgtaagaattatcatagtcttctcgggtatatatcttgtgattagtagtagaaaatgtatcctcctagaagtagatcctccttccctataagagtgtagattagaatatcatccccccctctctgctcccttcttgttccccccatcacggtgtgtctacccggcattgttggtggaacaccaccgcgtagagtgatatcgtctcctcacgccctccgcgggccgcgtcatattcctcgtgtgatattatagtaaggggcgctgttctgttgctctccctccgcctcccattatatatggcgcccactccgtgtaacacactactttcccctccgcacaggcccactttgttgcgcccctctctctctgatatttatcactcctttcttctttgatactctctgtgtgtataacaactctctctgttatatagagtttcccccaccacagagagtgtgtgtggagtcatcacacagctgtgtataaatagtgagactctgtgtgttctccgccccccctctttccacacactctcacacaagagagtctctctctctgacaacacccgacatagggccccgcccctcccacactctttccccactctctctgtgtctcagttctcacttctctggtctctgcgaccagcggagaaaggagaaagagaactctggccactctgtgttgtgtgtgagaaggagaagaaattgtgtggcgttgggaataaatatgtgtgggtgtggagccaccccgtgaattctatagaggtataaactcacaagcttggcccccacaggtggtccgccccaggctgttaatccagcgtttaaatccagagggctcccctttttttttttgttccaatgattttaagttattggaaatgccccatttttttaatatgccaattaaaagttttaaaacttta

SEQ ID NO: 628255 - DNA, 359 bp, Homo sapiens
tttcaacagtgaacgcgccagtctatgagaggcggctgggtggtgaagaacacctgcggttcgtttgacacagcggttcctaaacggtttggtctcaggacccgtttacacgtctaaaaaataacttgaggaccccccaaagctttagcttatatctatagatatttgtggcatgaggaattggggccagaactttcaaacaacatattcacttaataacaaacccattaacttttaatacaaataacactttaatgcataaacttctcaaaaacaaagtgagaagataggctcatggttaacatatttttgccacatttctttggtctaaataaaggacaagctggggtctcatatca

SEQ ID NO: 628256 - DNA, 456 bp, Homo sapiens
aaaaccccaggcatatgagtgtatatacatgtagtcaaagagtaatcttttcctatatggataccaataatataaatggtttatattcctagctaaatctttcaggcagtgacaagaacaagaggaaggaagaaacccctctcaggcaatcatgtacagccacccgaaacaatgaaatgtaatacattcataagacaagtgaaagaagagcatggcagacacacagatgcaactgtgaaagttccttttcttaagaaatgcaaggaagcaggtcttcttaattacttacttgaagaaatattagacaaagttcattcaattccagaaaaactcatggatgagactacttcagaatcagactatgaagaaatcgggagtgcacttttagactgtagattgtacgaagacacatttgtaaattttcaagcagcaatagagaacaacattcatgcatct

SEQ ID NO: 628257 - DNA, 688 bp, Homo sapiens
aattcggccattatggccggggctacaccaacccgcttttcttgtgacacagtacaaccaccacactccaatagtacgtaaacatggtacgccacataaaaggtccaccgcagagagaaattgttttgtttgggagatggaaggcgacgcggagaggagcgactgaaaaccctaagcccgagtgagggcacaaggaataccacccataccctttgtacaccgagaggactagaaccccttataaggggagagcgcaggcttataccacggagcccggaccagcgagctgagaacgggtaccacagaagagagggatatgaaccagcactgggggttgatttataggtagaggcgacaaacctaccgagcctggtgaaagctggttgtccaagatagaatcttaagccaacttttaaaggtggccacagaaccctgtaaatccccttgtaaaattaaccgtcagcccaaagaggaacagctctttggacactaggaaaaaaccttggcgagagagcaaaaaattaacacccatagtaggcctaaaagccggcaccaattaagaaagggttccagcttaccacccaataccctaaaaaaaccatccacgatcctgactccccgccttgtgcgcccgcccttggccccaaactactcttagactagaagaaagcttatgccttgccggccc

SEQ ID NO: 628258 - DNA, 162 bp, Homo sapiens
ggagtactcgccaacagcactacagctccaggctggggtccgcaatcttctcctctgggtgatgacctgggggaagatgatgaagatgcccctatgataactgcatttacagataacgtccccatggtgatagccgagtctcaggctgaccaaggagcttgc

SEQ ID NO: 628259 - DNA, 257 bp, Homo sapiens
  misc_feature (35)..(35): n is a, c, g, or t
gccctttgaccggccccttgatcccaaatttattnccgtgtccaaaggaataatagggaaggggtttggttttggccaacccatgtaacaaaggcccctgttaaaaaaaaaaaaaaagtttggcatcagagggggcatgtggagagcaacttgggaagaacaagttcattttgtattgaatgatttttaatgaatgcaaaattaatccttgcagatgggcaataatcattaaaatcgattaaaatgataagccctta

SEQ ID NO: 628260 - DNA, 966 bp, Homo sapiens
  misc_feature (712)..(712): n is a, c, g, or t
agggctggtggaggctgggtgttcgatgcatggttggcgcctttgaggattcatgagcgactgggcgcaggccctcaggaaggatgacaggggaggcctggtctgatgcttgtcatccccacagggaaaagccatctttgatacttgggcaggcctgactgtgttcacggcataccttggcctaaaatggcgatcccagagtggtttagccagcttgcagcaaggatttactgtgaactggaaatcacttggaaacgcattcattatttcagtgtccataggtggaccattgtctagtcttctaaggttatatggccaccatatactagcttatttccagcaattccatagcaaaagcagtataagcatgcctgggaacgttcccatgcgagagtcgtggtcttgggtgtggtcttcgtagtaccgtgagctgggcaccatgaacctctcggcaggtcttccaagtggggaactccagcgaagacgttattgggccgtgccatgtgtttgcgagttgtgacttgttgccggttttcccgatcgaggccttgtggtcctgagttgggggaattggatgcccggtgaagatttggtcagctggaggatgctagcttgggtgggtgaccttcgaaggtccggcagcggagcgtttcctggtgcacgcatcgtcagatcggggggaccgaaatgcggagtctagctctcgagatgngacaggacgaacttgggattgtgcggggccagcctggttgtgagtcttgcaccatgtgtcctctatcacaggcggggcgaggggcctgagatccaaaacttggtccccttgaatggacaggggccttattggcagaagacacaggggagggatctcggcagagaagggggccacagagacaaacggtgtagaaggcgcacacaaacggagccacccttgaggaagacgggggtggcacacaaggcagacgggac

SEQ ID NO: 628261 - DNA, 114 bp, Homo sapiens
gaatgagctggtcacatcatggttatgtagatattggtcgtcggattgttggagacatgcgccacgcggtttgtcgcgtttaatctgcgcggaatagccgacgttgacccaacg

SEQ ID NO: 628262 - DNA, 460 bp, Homo sapiens
tagattatgggttgataggtgcagcaaaccaccatggcatatgtatacctatgtaacaatccggcatatgtatacctatgtaacaatcctgcacattctgcatatgtatcccggaacttaaaagaaaaaaagaaaatatgccatgaagtggtcactgtaaaagccgttattggctgggcgtggtggctcacgcctgtaatcccagcactttgggaggccgagatgggcggatcatgaggtcaggagatcgagatcatcctggctaacaccgtgaaacccccgtctctactaaaaatacaaaaaattagctgggtgtattggcgggcgcctgtagtcccagctactcgggaggctgaggcaggagaatggcgtgaacctgggaggtggagcttgcagtgagccgagatcgcgccactgaactccagcctgggggacagagcaagactccatctcaaaaaaa

SEQ ID NO: 628263 - DNA, 182 bp, Homo sapiens
ctttgtacttgctaatgactttagctcggtcatggagtttatgaccgacactagccatttttttctagtccactgtcagaatctctcattgctttcctggtttcctttattcctcctggagctcgacgagtttgagttgaggcctgcataatccttggcggatcactctatatttgactgct

SEQ ID NO: 628264 - DNA, 106 bp, Homo sapiens
  misc_feature (35)..(35): n is a, c, g, or t
ctttcttcttgtcttcagttccacagcatcatggntcatccaatcggccagtcagtcttccccctggcaagggcagccccaacgaggtcacggcgagctcgcaatt

SEQ ID NO: 628265 - DNA, 254 bp, Homo sapiens
aaaaaaacaaaaaacaaaaaacaaaccacatttttttagagacaggggtcttgctatgttacccaggctgaactttttaagtagaagtatactccaacataacatgaaaagtataatatagtaaacacgtaaaccacagtaacatagtcattttttgtcattatcaagtagagtattatgtagtgtacataattgttctatatttttatatgactgtcaacatactaggttggtttataccagcatcaccacag

SEQ ID NO: 628266 - DNA, 899 bp, Homo sapiens
  misc_feature (38)..(38): n is a, c, g, or t
  misc_feature (480)..(480): n is a, c, g, or t
  misc_feature (492)..(492): n is a, c, g, or t
  misc_feature (650)..(650): n is a, c, g, or t
  misc_feature (880)..(880): n is a, c, g, or t
ggtgaaagaatggtaggaattatctgtggttgaaagancttatcatcttataagattggagaagttaattatgtttgtatcctaaggtggcaagtcagtagagatggaaaagttagaagtgtaaggatgaaaggagataattaatagctaagttgctgtggaaggtgtgaggaatgggatatggagcatagcctgggagttagtcttgaatgtggaagggtgagccatttcacagatgtagaaggggaggaagtgatggaagggaaggaattggaagaggtagtagatatcagatacgatattttggaaagttggacattaagaagagtgtgattggggaggttgttgtgactttctgcctgaagattcagagtcaggatcatgtgctaacaggtgacttgaagtttagaatagccatttggggagagtagacacaagaggtggggcactcatggctgacatttgttagagcaaaagganttattagagtgnaaaaaaaacagacctgtgagatagtctgaaggagtctagacgcaggctttcaaagtttgtctcccagagctagggttgaggggctactccttcctcaagcaatgaaatagagcaatgtgggctgggcacagtggctcacacgtgtaatcctagcactntgggaggcctgggtgggcagatcacttgaggttgggagtttgagatcagcctggccaacatggtgaaacctcgtctctactaaaaatacaaaaattagccaggcgtggtggcacatgcctctagtcccagctactcgggaggctgaggcacaagaatcacttgaacctgggaggtggaggctgcagtgagatgagattgtgccattgcactccagcctgggtgacagggngagactctgttaaaaaaaa

SEQ ID NO: 628267 - DNA, 549 bp, Homo sapiens
tggaatagaggccaaagcagtcatccttaaaaattaaaaagtcttcagcatatggctagccagttttcccaacaccatttattagacagggaatcctttccccattgcttgtttttgtctggtttgtcgaagatcagatggctttagatgtgtggtgtaatttctgaggcctctgttatgtcccattgttctatgtatctgtttttgtaccagtactatgctgtttttgttactgtagccttgtagtgtagtttgaagtcaggtagtgtgatgcctccagctttgttatttttgcttaggattgtctttgctatacggactcttttttagttccatatgaaatttaaagtagttttttccaattctgtgaagaaagccaatggtagcttgatggggatacattgaatctgtaaattactttgggcactgtggccattttcacgatactgattcttcctatccatgagaatggggtcgttcttccatttgtttctgtcctcttctagttccttgagcagtggtttgccgttcttcttgaaaaggtccttc

SEQ ID NO: 628268 - DNA, 918 bp, Homo sapiens
gctcctcttttgccggctgaagcatggagggtgtatgaagagacgacgaaggaggttcctgctgtgcagagacccttaagaaaaagcgaaggaattcgcagagtctgaagatcacgcgcctgagaaagaagtttgcccaaaagatgctcgaaaggccctggaggacagcttatctatgaccaatggcaatagcggtatcacaaggaatatgggccagatgtacagaatctgaaatccgatggtggggagggcatgtgcaagaaaagctgggaagtcctatgtacctgcaagaacccaaattggcgttgccattcagaatcaggcaggtctcacatgggacgtgaggcccaaaggtccgaaacgggtgtcgcaggcttcttccgcccttcggttcaacattctttccaaatgtgggaccccttggtgtaggaaggcttccaaccaaaggggtttccgaattaaaccaagtgcctagcagggacttgtgttagcaagccattatattggacattggggggtacccccaagttcgtgacaaggtccacgtaactcttgtaagaccttatgtcctacgaggcggtgcgtttaatggagcaaacatccaaattacagaacaggcgaaaatgtgtttgggaccagtagtagccgctttttgattggcctacgaagtctctttgggtaccaatgagcggagcagttcaatcttgcagtgggagagcatttgcgattcatttgagaatcttactacgggtggcgggcaaaggccttccacaagagcgccaattacacctttcccggtgggccctttcacaattggtccttcctccgacgaagctggggactgggagccaatacaggaccccccaatatgtaaaacgggggggcgtgtgcctgtcaaccggcgaggcccaatttaca

SEQ ID NO: 628269 - DNA, 999 bp, Homo sapiens
  misc_feature (580)..(580): n is a, c, g, or t
  misc_feature (592)..(592): n is a, c, g, or t
  misc_feature (750)..(750): n is a, c, g, or t
  misc_feature (980)..(980): n is a, c, g, or t
caggctttcaaagttgtctcccagagctagggttgaggggctactccttcctcaagcaatgaaatagagcaatgtgggctgggcacagtggctcacacgtgtaatcctagcactttgggaggcctgggtgggcagatcactatcatcttataagattggagaagttaattatgtttgtatcctaaggtggcaagtcagtagagatggaaaagttagaagtgtaaggatgaaaggagataattaatagctaagttgctgtggaaggtgtgaggaatgggatatggagcatagcctgggagttagtcttgaatgtggaagggtgagccatttcacagatgtagaaggggaggaagtgatggaagggaaggaattggaagaggtagtagatatcagatacgatattttggaaagttggacattaagaagagtgtgattggggaggttgttgtgactttctgcctgaagattcagagtcaggatcatgtgctaacaggtgacttgaagtttagaatagccatttggggagagtagacacaagaggtggggcactcatggctgacatttgttagagcaaaagganttattagagtgnaaaaaaaacagacctgtgagatagtctgaaggagtctagacgcaggctttcaaagtttgtctcccagagctagggttgaggggctactccttcctcaagcaatgaaatagagcaatgtgggctgggcacagtggctcacacgtgtaatcctagcactntgggaggcctgggtgggcagatcacttgaggttgggagtttgagatcagcctggccaacatggtgaaacctcgtctctactaaaaatacaaaaattagccaggcgtggtggcacatgcctctagtcccagctactcgggaggctgaggcacaagaatcacttgaacctgggaggtggaggctgcagtgagatgagattgtgccattgcactccagcctgggtgacagggngagactctgttaaaaaaaa

SEQ ID NO: 628270 - DNA, 218 bp, Homo sapiens
  misc_feature (148)..(148): n is a, c, g, or t
ctttgttctacttcaactgggaacatgcacattggattataatggggaatcttggaaatgcagacatgccttcaacaagaacgcggtcctgtacccaagtctctggtgtagtgcagctcacagatttgctgtcccattttgactcccncaattcttctcctcctctgatgaagactttattgaggtcaggattgaatgggaaatgaagagagattatt

SEQ ID NO: 628271 - DNA, 698 bp, Homo sapiens
cccacgcgtcgagcgagtgagtgagtgagtgagtgtgtgtgtgggggggactcggctagttgtagtcaggtgacattccccgcgtccaccattcaccccataccccatccaccgccgtcagctgcaacgtggacggcgtcccatgagtgccgtagagaacatgagcagaaaagcggaatagacatcggaaggctggaagagctgacggaaagcagcaacccgcaggagtttcacagtcgtgacggacatgatcgacacagcggcgtccagtcactaaaatgcacgtgcgacacagaaacacgctgagcggacacacacactacaaccagcacagacatatatcaacaagataatgacgaggacagtcagaacaccaatcactaccgaagcgacgagaaaggcactccacgaggacgcgaaataccatacgcacaacagcgcaccacgaagtaatataccaagctatactgccgcaacggaagaaaaccaacacgacacacaagccaaaagactactccgcacgacacatacagaagacgcgacacgacactcgctactatacatggaagcacgcacaggagagcaaacgccgagcagcatcgatacaacgatactaaaagatgcactggtggaattacaccaatcatctaacactacacctcactggcaacgactgcacaggtacaacggaaaatgca

SEQ ID NO: 628272 - DNA, 380 bp, Homo sapiens
gtccctgaggatttaatgagattagattaaatagccatgaaactcttatcaatatttatcatgctgcaatctcagcacttcgggaggctgaggtgggaaaatcacttgagctcaggagctcaagaccagcctgggcaacatagcaccagaccccatctcaaccaaaaataaacaaaattagccagatagggtggcacacttctgtagtcgcagctactcaagaggctgaggaggatcacttgagcccaggaggttgaggctgtagtgagctatgattgtgccgctgcattccagcctgggcaacagagtaagaacttgtctcaaacaaaacaaagcaagaataacttggtctacccgtacgaggccacgggtaccgagct

SEQ ID NO: 628273 - DNA, 346 bp, Homo sapiens
  misc_feature (318)..(318): n is a, c, g, or t
  misc_feature (330)..(330): n is a, c, g, or t
tccagagtatcccattcaattgcggtgagcatcttatcgcctgctttcaaagtcagagaattttctatcactgatgtagtaccatatccaatatctctgagatggaattctccagctgaagaagggtcaagtgactgtgaagtcttttccaaaaatcatgctgctcctttctctaaagttcttacattttatagaaaggaacctttcactcttgaggcctactacagctctcctcaggatttgccctatccagatcctgctatagctcagttttcagttcagaaagtcactcctcagtctgatgctcaccgcaatatnatggtaccgagncgatcactgcgtgttt

SEQ ID NO: 628274 - DNA, 466 bp, Homo sapiens
  misc_feature (454)..(454): n is a, c, g, or t
cattttatcatagtgcatgaaggaagtggtcatttattttagtcagaataaatttgtgtccttaattagtttctcacacttgattctgctgaaatcatcagtgccttttatgtgcagattgacgtatattccttttttactgactttatatataaagattcttgggaactcttataatctggaaataataccaattgaaaagagagagaaactaacactgtacaataattacaaacctagaacacatgggtaaaagtgttaggaatatcctgaatttgtgtttttgtctttttcctccattcagtgactgtgaagtcttttccaaaaatcatgctgctcctttctctaaagttcttacattttatagaaaggaacctttcactcttgaggcctactacagctctcctcaggatttgccctatccagatcctgctataggtaagtaaagagttgnaaattaaaaaag

SEQ ID NO: 628275 - DNA, 128 bp, Homo sapiens
gggccgatgtcagcctcagaacttctggaactgcttcttggtgccgggcagcctttggtgaccttgagcacgttgaagcgcactgtcttgctccgagggccggcactcgcccagtgtgacgatgcacc

SEQ ID NO: 628276 - DNA, 5401 bp, Homo sapiens
ctcgactttttttacacatatggagacttggagattcaggttctccttagatctctctgggtaatttattagaaatgcttacatagatttgcttcctaatctcaagctggcttcccctctccacaactcagcaactatctattctcccaggaggccatacaagcgaggggccctgaagcttaacatttattaacttcatgtaaaggtctgagcggacctttcaggccaggcagcgtgtcacttgcctgtgttccttgttagggcctaccaccgggtaggtgcttggaatgtgctgtggattaaaggcttaaatcctgcgggcccctcaatctgatctaaggacatgagtggcttagagaacggcgcaacaaggctaagcgaaagaaaacaaagcggtgtggctgggagtgggctccttccctccgctggtgagggtgcgatcttagactcttgagagaacccgacataaaggccgcgttccaatggcggccttctcccctaccggccaacctgccccgaaaagagcagaaggcaccctgcgggatctgcagatcagcttgcgtctcattctggggcaccgacacggtggaatgcaagacaccccactaccggaagtttctttgatgttaagaaaaacggcggaagtaggccgcagcgcttcctcagtatagtgcctcgagctggctcgcctactttctacggtaaagggaggtgctccacatctctatgcagctgtgcagcgccgcaggttccatgcgcaggctcggttggctaaatgcgctttccagccatctttcagccacccagtcctttcccaggttctcgagccaggacgtgacgtattcagacgtactgggggcggggcctcaaggggaaaagcgcctgagccgggatatcgcgagaacatcccgttctttcgtagctctggtgctgcggctccgctctcgtcgcaacgagatctttcgagatcttctccgcccccgctaccggcgcctcctctgcggccactgagccggagccggcctgagcagcgctctcggttgcagtacccactggaaggacttaggcgctcgcgtggacaccgcaagcccctcagtagcctcggcccaagaggcctgctttccactcgctagccccgccgggggtccgtgtcctgtctcggtggccggacccgggcccgagcccgagcagtagccggcgccatgtcggtggtgggcatagacctgggcttccagagctgctacgtcgctgtggcccgcgccggcggcatcgagactatcgctaatgagtatagcgaccgctgcacgccggcttgcatttcttttggtcctaagaatcgttcaattggagcagcagctaaaagccaggtaatttctaatgcaaagaacacagtccaaggatttaaaagattccatggccgagcattctctgatccatttgtggaggcagaaaaatctaaccttgcatatgatattgtgcagttgcctacaggattaacaggtataaaggtgacatatatggaggaagagcgaaattttaccactgagcaagtgactgccatgcttttgtccaaactgaaggagacagccgaaagtgttcttaagaagcctgtagttgactgtgttgtttcggttccttgtttctatactgatgcagaaagacgatcagtgatggatgcaacacagattgctggtcttaattgcttgcgattaatgaatgaaaccactgcagttgctcttgcatatggaatctataagcaggatcttcctgccttagaagagaaaccaagaaatgtagtttttgtagacatgggccactctgcttatcaagtttctgtatgtgcatttaatagaggaaaactgaaagttctggccactgcatttgacacgacattgggaggtagaaaatttgatgaagtgttagtaaatcacttctgtgaagaatttgggaagaaatacaagctagacattaagtccaaaatccgtgcattattacgactctctcaggagtgtgagaaactcaagaaattgatgagtgcaaatgcttcagatctccctttgagcattgaatgttttatgaatgatgttgatgtatctggaactatgaatagaggcaaatttctggagatgtgcaatgatctcttagctagagtggagccaccacttcgtagtgttttggaacaaaccaagttaaagaaagaagatatttatgcagtggagatagttggtggtgctacacgaatccctgcggtaaaagagaagatcagcaaatttttcggtaaagaacttagtacaacattaaatgctgatgaagctgtcactcgaggctgtgcattgcagtgtgccatcttatcgcctgctttcaaagtcagagaattttctatcactgatgtagtaccatatccaatatctctgagatggaattctccagctgaagaagggtcaagtgactgtgaagtcttttccaaaaatcatgctgctcctttctctaaagttcttacattttatagaaaggaacctttcactcttgaggcctactacagctctcctcaggatttgccctatccagatcctgctatagctcagttttcagttcagaaagtcactcctcagtctgatggctccagttcaaaagtgaaagtcaaagttcgagtaaatgtccatggcattttcagtgtgtccagtgcatctttagtggaggttcacaagtctgaggaaaatgaggagccaatggaaacagatcagaatgcaaaggaggaagagaagatgcaagtggaccaggaggaaccacatgttgaagagcaacagcagcagacaccagcagaaaataaggcagagtctgaagaaatggagacctctcaagctggatccaaggataaaaagatggaccaaccaccccaagccaagaaggcaaaagtgaagaccagtactgtggacctgccaatcgagaatcagctattatggcagatagacagagagatgctcaacttgtacattgaaaatgagggtaagatgatcatgcaggataaactggagaaggagcggaatgatgctaagaacgcagtggaggaatatgtgtatgaaatgagagacaagcttagtggtgaatatgagaagtttgtgagtgaagatgatcgtaacagttttactttgaaactggaagatactgaaaattggttgtatgaggatggagaagaccagccaaagcaagtttatgttgataagttggctgaattaaaaaatctaggtcaacctattaagatacgtttccaggaatctgaagaacgaccaaaattatttgaagaactagggaaacagatccaacagtatatgaaaataatcagctctttcaaaaacaaggaggaccagtatgatcatttggatgctgctgacatgacaaaggtagaaaaaagcacaaatgaagcaatggagtggatgaataacaagctaaatctgcagaacaagcagagtttgaccatggatccagttgtcaagtcaaaagagattgaagctaaaattaaggagctgacaagtacttgtagccctataatttcaaagcccaaacccaaagtggaacctccaaaagaggaacaaaaaaatgcagagcagaatggaccagtggatggacaaggagacaacccaggcccccaggctgctgagcagggtacagacacagctgtgccttcggattcagacaagaagcttcctgaaatggacattgattgattccaacacttgtttctattaaaacagactattataaagctttaagttgtcaactttgttctaaatatcaactagcgcaagtgaatactgaagatttcttagtcagtttttaggggattttcggggaggggaaataggtaatgtatggagcattttcacttctaaatagttagatacagaaattaagtgcattgtatctttttcataatggtactatttagaagcccagttagtcttactgagcttatgcttcactcctttatgtttaaccatgtgtctacaagaataagtttgttttggaaagttgagctatagctacagctctagctatccagcagacttttcattatgacttacatggcaggagctctaattatgctttaaaaatctgttgtggagattgctttaaatgctccctgcctggtgtggggatggggtccccctctttgtgagggctggagcatggcacggcatggattaacacggcagaggaacaaaggtgtgctctgagcttcttcatatttcaccttcaccctcacctgtgttctcttccctctctcccaataaaagggctcccattataaatgccatgtacttctcttgggaaaatagacccccttgcctagagtaagttgttaactgagggctttaaacctggaggctcttcctgaaagtatgttcatgaataccccaagcatcaaggtctaaataattttcagaagattagaattgggtagatatactgttggatatagccatggtaaatttaactgaggaattaaatccttgttaattttggtgtaaagatttgtatcctggcctgtttattcaggtgggagatgttctgtataattttgaggtatagcttgaactcctagaacaagagttaaaagttctttttagctcattcacaatcacttgtgtgttaagtgttaatatctgtcatgaacctgccaatttgtacgtgttaagcagctgacagatgatgcaaaaaaaactaagatacactggattgtactggatgagtctgaaattagtgttaaagaagtgtggtgcctgatgttataacaacacctcattcttaactgtgtggccaatgtcaggtataccaaagcattcctctgactgctttttggggcagtgttgacaggagtgaggcattttggaaactccaagggaagcctgtgtttgaggccagagttggtacctgctttaagaaactgttacagggcttgttggtaatgttttgaatctttgtaaaaattgatattctgtataacagagtgcctctctgttacttttggcctatgttgttagaaataagatgctatcttgcatagttagaattaagcgtttgtccatctctagataacattgaaaagtttgagtgttacaggctctaaagtgcaatggagaacaattgcttaggaggaggaaggggaaagtatacttatgttggtgtgtaagcatgcatggaggcctcgaggcaccacaacaaggccaggttcttagcacatcctctgttctctacctgtcatgcttcaagagttccagctggcctgctgtgaagccagtagctattttaaaagtgctggctgcaggattaagccaaccctttacaactggcccagaccgtaatggccatttcttcttaaaaaaaaacatctgggttttta

SEQ ID NO: 628277 - DNA, 5437 bp, Homo sapiens
ctcgactttttttacacatatggagacttggagattcaggttctccttagatctctctgggtaatttattagaaatgcttacatagatttgcttcctaatctcaagctggcttcccctctccacaactcagcaactatctattctcccaggaggccatacaagcgaggggccctgaagcttaacatttattaacttcatgtaaaggtctgagcggacctttcaggccaggcagcgtgtcacttgcctgtgttccttgttagggcctaccaccgggtaggtgcttggaatgtgctgtggattaaaggcttaaatcctgcgggcccctcaatctgatctaaggacatgagtggcttagagaacggcgcaacaaggctaagcgaaagaaaacaaagcggtgtggctgggagtgggctccttccctccgctggtgagggtgcgatcttagactcttgagagaacccgacataaaggccgcgttccaatggcggccttctcccctaccggccaacctgccccgaaaagagcagaaggcaccctgcgggatctgcagatcagcttgcgtctcattctggggcaccgacacggtggaatgcaagacaccccactaccggaagtttctttgatgttaagaaaaacggcggaagtaggccgcagcgcttcctcagtatagtgcctcgagctggctcgcctactttctacggtaaagggaggtgctccacatctctatgcagctgtgcagcgccgcaggttccatgcgcaggctcggttggctaaatgcgctttccagccatctttcagccacccagtcctttcccaggttctcgagccaggacgtgacgtattcagacgtactgggggcggggcctcaaggggaaaagcgcctgagccgggatatcgcgagaacatcccgttctttcgtagctctggtgctgcggctccgctctcgtcgcaacgagatctttcgagatcttctccgcccccgctaccggcgcctcctctgcggccactgagccggagccggcctgagcagcgctctcggttgcagtacccactggaaggacttaggcgctcgcgtggacaccgcaagcccctcagtagcctcggcccaagaggcctgctttccactcgctagccccgccgggggtccgtgtcctgtctcggtggccggacccgggcccgagcccgagcagtagccggcgccatgtcggtggtgggcatagacctgggcttccagagctgctacgtcgctgtggcccgcgccggcggcatcgagactatcgctaatgagtatagcgaccgctgcacgccggcttgcatttcttttggtcctaagaatcgttcaattggagcagcagctaaaagccaggtaatttctaatgcaaagaacacagtccaaggatttaaaagattccatggccgagcattctctgatccatttgtggaggcagaaaaatctaaccttgcatatgatattgtgcagttgcctacaggattaacaggtataaaggtgacatatatggaggaagagcgaaattttaccactgagcaagtgactgccatgcttttgtccaaactgaaggagacagccgaaagtgttcttaagaagcctgtagttgactgtgttgtttcggttccttgtttctatactgatgcagaaagacgatcagtgatggatgcaacacagattgctggtcttaattgcttgcgattaatgaatgaaaccactgcagttgctcttgcatatggaatctataagcaggatcttcctgccttagaagagaaaccaagaaatgtagtttttgtagacatgggccactctgcttatcaagtttctgtatgtgcatttaatagaggaaaactgaaagttctggccactgcatttgacacgacattgggaggtagaaaatttgatgaagtgttagtaaatcacttctgtgaagaatttgggaagaaatacaagctagacattaagtccaaaatccgtgcattattacgactctctcaggagtgtgagaaactcaagaaattgatgagtgcaaatgcttcagatctccctttgagcattgaatgttttatgaatgatgttgatgtatctggaactatgaatagaggcaaatttctggagatgtgcaatgatctcttagctagagtggagccaccacttcgtagtgttttggaacaaaccaagttaaagaaagaagatatttatgcagtggagatagttggtggtgctacacgaatccctgcggtaaaagagaagatcagcaaatttttcggtaaagaacttagtacaacattaaatgctgatgaagctgtcactcgaggctgtgcattgcagtgtgccatcttatcgcctgctttcaaagtcagagaattttctatcactgatgtagtaccatatccaatatctctgagatggaattctccagctgaagaagggtcaagtgactgtgaagtcttttccaaaaatcatgctgctcctttctctaaagttcttacattttatagaaaggaacctttcactcttgaggcctactacagctctcctcaggatttgccctatccagatcctgctatagctcagttttcagttcagaaagtcactcctcagtctgatggctccagttcaaaagtgaaagtcaaagttcgagtaaatgtccatggcattttcagtgtgtccagtgcatctttagtggaggttcacaagtctgaggaaaatgaggagccaatggaaacagatcagaatgcaaaggaggaagagaagatgcaagtggaccaggaggaaccacatgttgaagagcaacagcagcagacaccagcagaaaataaggcagagtctgaagaaatggagacctctcaagctggatccaaggataaaaagatggaccaaccaccccaagccaagaaggcaaaagtgaagaccagtactgtggacctgccaatcgagaatcagctattatggcagatagacagagagatgctcaacttgtacattgaaaatgagggtaagatgatcatgcaggataaactggagaaggagcggaatgatgctaagaacgcagtggaggaatatgtgtatgaaatgagagacaagcttagtggtgaatatgagaagtttgtgagtgaagatgatcgtaacagttttactttgaaactggaagatactgaaaattggttgtatgaggatggagaagaccagccaaagcaagtttatgttgataagttggctgaattaaaaaatctaggtcaacctattaagatacgtttccaggaatctgaagaacgaccaaaattatttgaagaactagggaaacagatccaacagtatatgaaaataatcagctctttcaaaaacaaggaggaccagtatgatcatttggatgctgctgacatgacaaaggtagaaaaaagcacaaatgaagcaatggagtggatgaataacaagctaaatctgcagaacaagcagagtttgaccatggatccagttgtcaagtcaaaagagattgaagctaaaattaaggagctgacaagtacttgtagccctataatttcaaagcccaaacccaaagtggaacctccaaaagaggaacaaaaaaatgcagagcagaatggaccagtggatggacaaggagacaacccaggcccccaggctgctgagcagggtacagacacagctgtgccttcggattcagacaagaagcttcctgaaatggacattgattgattccaacacttgtttctattaaaacagactattataaagctttaagttgtcaactttgttctaaatatcaactagcgcaagtgaatactgaagatttcttagtcagtttttaggggattttcggggaggggaaataggtaatgtatggagcattttcacttctaaatagttagatacagaaattaagtgcattgtatctttttcataatggtactatttagaagcccagttagtcttactgagcttatgcttcactcctttatgtttaaccatgtgtctacaagaataagtttgttttggaaagttgagctatagctacagctctagctatccagcagacttttcattatgacttacatggcaggagctctaattatgctttaaaaatctgttgtggagattgctttaaatgctccctgcctggtgtggggatggggtccccctctttgtgagggctggagcatggcacggcatggattaacacggcagaggaacaaaggtgtgctctgagcttcttcatatttcaccttcaccctcacctgtgttctcttccctctctcccaataaaagggctcccattataaatgccatgtacttctcttgggaaaatagacccccttgcctagagtaagttgttaactgagggctttaaacctggaggctcttcctgaaagtatgttcatgaataccccaagcatcaaggtctaaataattttcagaagattagaattgggtagatatactgttggatatagccatggtaaatttaactgaggaattaaatccttgttaattttggtgtaaagatttgtatcctggcctgtttattcaggtgggagatgttctgtataatgttagagatacatagattcgacactcctacagaacacaagaagttcaccacagattctctatagactcatatcaccatcaccttgcgtggtacagctgtgcaataatacttgtgccagacgcactggcaccactggtgaagagtgaccacgccagcgcatggcaagcagccgtgccagcgtcgacaaacgaaacacaggacaacacaagcgagcggaagcagcactgcaccgccgcacaccacctggcgtgaccagacacgagggggagggccggcatggaacactcaccaacccacacacatcacgacacccggattgacccaccccacgcgccaggagaaagtacccaaaccacaatcccatcacgcacctggatgcgcaggcgaagccacgccgcaacacaacggacaaggaaagccacacgcaaggccacgcgaccccacagcgccacgcgcagacacactggcatacccagacacagggcaaccagcacccaacgaacaactggcacaccggacccggcgggcacgggtaagacaaccgggaaaacacgcgtccacatcgggtacaccagacaagcagcactcgaccaaggcccactgacgacaagaaagcagcagagacaagcgaaacaagaaagagaatggcacagccaaggaaaaaaacgaagacaggagaaaagacacaaaaggcatcgaaacacaacacagacgggcaaaccgcggcgcaaaaatgagaaaggcaaagcagaaaagctaaaccacgcgaaccaacaggcaccaaatacaagagaacacaaaggaacgcaacagatggaaaacaacagaatagctcacgcctaacacccgcaccagaaga

SEQ ID NO: 628278 - DNA, 222 bp, Homo sapiens
tctggaagtactgacatctctgccaccagaggcactatgaaatcatcagtaggctacctgtgggagagaagatcccagaaaatacttcaataggcatttgggccatgagaacatgcagcagaattatttacaactctcacatgcatatgccttgctcggcaatatgtgcaggagcatacatcagtcattcactttgcgtatggtctagtgtgcagctattaa

SEQ ID NO: 628279 - DNA, 4182 bp, Homo sapiens
ctcgactttttttacacatatggagacttggagattcaggttctccttagatctctctgggtaatttattagaaatgcttacatagatttgcttcctaatctcaagctggcttcccctctccacaactcagcaactatctattctcccaggaggccatacaagcgaggggccctgaagcttaacatttattaacttcatgtaaaggtctgagcggacctttcaggccaggcagcgtgtcacttgcctgtgttccttgttagggcctaccaccgggtaggtgcttggaatgtgctgtggattaaaggcttaaatcctgcgggcccctcaatctgatctaaggacatgagtggcttagagaacggcgcaacaaggctaagcgaaagaaaacaaagcggtgtggctgggagtgggctccttccctccgctggtgagggtgcgatcttagactcttgagagaacccgacataaaggccgcgttccaatggcggccttctcccctaccggccaacctgccccgaaaagagcagaaggcaccctgcgggatctgcagatcagcttgcgtctcattctggggcaccgacacggtggaatgcaagacaccccactaccggaagtttctttgatgttaagaaaaacggcggaagtaggccgcagcgcttcctcagtatagtgcctcgagctggctcgcctactttctacggtaaagggaggtgctccacatctctatgcagctgtgcagcgccgcaggttccatgcgcaggctcggttggctaaatgcgctttccagccatctttcagccacccagtcctttcccaggttctcgagccaggacgtgacgtattcagacgtactgggggcggggcctcaaggggaaaagcgcctgagccgggatatcgcgagaacatcccgttctttcgtagctctggtgctgcggctccgctctcgtcgcaacgagatctttcgagatcttctccgcccccgctaccggcgcctcctctgcggccactgagccggagccggcctgagcagcgctctcggttgcagtacccactggaaggacttaggcgctcgcgtggacaccgcaagcccctcagtagcctcggcccaagaggcctgctttccactcgctagccccgccgggggtccgtgtcctgtctcggtggccggacccgggcccgagcccgagcagtagccggcgccatgtcggtggtgggcatagacctgggcttccagagctgctacgtcgctgtggcccgcgccggcggcatcgagactatcgctaatgagtatagcgaccgctgcacgccggcttgcatttcttttggtcctaagaatcgttcaattggagcagcagctaaaagccaggtaatttctaatgcaaagaacacagtccaaggatttaaaagattccatggccgagcattctctgatccatttgtggaggcagaaaaatctaaccttgcatatgatattgtgcagttgcctacaggattaacaggtataaaggtgacatatatggaggaagagcgaaattttaccactgagcaagtgactgccatgcttttgtccaaactgaaggagacagccgaaagtgttcttaagaagcctgtagttgactgtgttgtttcggttccttgtttctatactgatgcagaaagacgatcagtgatggatgcaacacagattgctggtcttaattgcttgcgattaatgaatgaaaccactgcagttgctcttgcatatggaatctataagcaggatcttcctgccttagaagagaaaccaagaaatgtagtttttgtagacatgggccactctgcttatcaagtttctgtatgtgcatttaatagaggaaaactgaaagttctggccactgcatttgacacgacattgggaggtagaaaatttgatgaagtgttagtaaatcacttctgtgaagaatttgggaagaaatacaagctagacattaagtccaaaatccgtgcattattacgactctctcaggagtgtgagaaactcaagaaattgatgagtgcaaatgcttcagatctccctttgagcattgaatgttttatgaatgatgttgatgtatctggaactatgaatagaggcaaatttctggagatgtgcaatgatctcttagctagagtggagccaccacttcgtagtgttttggaacaaaccaagttaaagaaagaagatatttatgcagtggagatagttggtggtgctacacgaatccctgcggtaaaagagaagatcagcaaatttttcggtaaagaacttagtacaacattaaatgctgatgaagctgtcactcgaggctgtgcattgcagtgtgccatcttatcgcctgctttcaaagtcagagaattttctatcactgatgtagtaccatatccaatatctctgagatggaattctccagctgaagaagggtcaagtgactgtgaagtcttttccaaaaatcatgctgctcctttctctaaagttcttacattttatagaaaggaacctttcactcttgaggcctactacagctctcctcaggatttgccctatccagatcctgctatagctcagttttcagttcagaaagtcactcctcagtctgatggctccagttcaaaagtgaaagtcaaagttcgagtaaatgtccatggcattttcagtgtgtccagtgcatctttagtggaggttcacaagtctgaggaaaatgaggagccaatggaaacagatcagaatgcaaaggaggaagagaagatgcaagtggaccaggaggaaccacatgttgaagagcaacagcagcagacaccagcagaaaataaggcagagtctgaagaaatggagacctctcaagctggatccaaggataaaaagatggaccaaccaccccaagccaagaaggcaaaagtgaagaccagtactgtggacctgccaatcgagaatcagctattatggcagatagacagagagatgctcaacttgtacattgaaaatgagggtaagatgatcatgcaggataaactggagaaggagcggaatgatgctaagaacgcagtggaggaatatgtgtatgaaatgagagacaagcttagtggtgaatatgagaagtttgtgagtgaagatgatcgtaacagttttactttgaaactggaagatactgaaaattggttgtatgaggatggagaagaccagccaaagcaagtttatgttgataagttggctgaattaaaaaatctaggtcaacctattaagatacgtttccaggaatctgaagaacgaccaaaattatttgaagaactagggaaacagatccaacagtatatgaaaataatcagctctttcaaaaacaaggaggaccagtatgatcatttggatgctgctgacatgacaaaggtagaaaaaagcacaaatgaagcaatggagtggatgaataacaagctaaatctgcagaacaagcagagtttgaccatggatccagttgtcaagtcaaaagagattgaagctaaaattaaggagctgacaagtacttgtagccctataatttcaaagcccaaacccaaagtggaacctccaaaagaggaacaaaaaaatgcagagcagaatggaccagtggatggacaaggagacaacccaggcccccaggctgctgagcagggtacagacacagctgtgccttcggattcagacaagaagcttcctgaaatggacattgattgattccaacacttgtttctattaaaacagactattataaagctaaaaaaaaaacaaaacaaaaaagaaaaaaaaacatgagtgtgggggcggccctgggcccccgcgaagaaaggctttcatgaaacacaccacgtgtggcgcccgcacaggagcgccaccaaaagagtggagtaacagagtagaaaacactaggggggcacaactacagcgggggtgcacacacagagaggagagcacccctgggggggaccaaggagaaacaaagggccgcactagaggggatcttactcaaaacgccaaactaaacacaaaaaagcgaccccgccggggtagcgacgacaaaacaccggaacaggcggtgatccgtgagagagacaagcaacctcaccaaagaagaatgggagagaactaacccaggaaggggacaataaccaacggggggggacgaataaacaca

SEQ ID NO: 628280 - DNA, 385 bp, Homo sapiens
aggatacccagtaaatcagaggcaattctgggttttcagtggcaccaaattctggagatctgagtattgggtaattttggtattgtccttctattaaaaaacaacaaaacccagtggggtggggaggagtggggggcaaaaaaaaaaaaaaaagaaaaaccaaaccaaaactcattgtatttttctgattataaattcaatatttatgtgttctgattataaattcaatattcatgaaaattcagaagaacgttatgaagtaatgccattaacattcccatactgttatcttgaacacgatggtcaatggtttgatgtatttccttcaaaatttttgtctgtatatatttatgtttttaaaaataaaatcaggatatcatgtgta

SEQ ID NO: 628281 - DNA, 5347 bp, Homo sapiens
ctcgactttttttacacatatggagacttggagattcaggttctccttagatctctctgggtaatttattagaaatgcttacatagatttgcttcctaatctcaagctggcttcccctctccacaactcagcaactatctattctcccaggaggccatacaagcgaggggccctgaagcttaacatttattaacttcatgtaaaggtctgagcggacctttcaggccaggcagcgtgtcacttgcctgtgttccttgttagggcctaccaccgggtaggtgcttggaatgtgctgtggattaaaggcttaaatcctgcgggcccctcaatctgatctaaggacatgagtggcttagagaacggcgcaacaaggctaagcgaaagaaaacaaagcggtgtggctgggagtgggctccttccctccgctggtgagggtgcgatcttagactcttgagagaacccgacataaaggccgcgttccaatggcggccttctcccctaccggccaacctgccccgaaaagagcagaaggcaccctgcgggatctgcagatcagcttgcgtctcattctggggcaccgacacggtggaatgcaagacaccccactaccggaagtttctttgatgttaagaaaaacggcggaagtaggccgcagcgcttcctcagtatagtgcctcgagctggctcgcctactttctacggtaaagggaggtgctccacatctctatgcagctgtgcagcgccgcaggttccatgcgcaggctcggttggctaaatgcgctttccagccatctttcagccacccagtcctttcccaggttctcgagccaggacgtgacgtattcagacgtactgggggcggggcctcaaggggaaaagcgcctgagccgggatatcgcgagaacatcccgttctttcgtagctctggtgctgcggctccgctctcgtcgcaacgagatctttcgagatcttctccgcccccgctaccggcgcctcctctgcggccactgagccggagccggcctgagcagcgctctcggttgcagtacccactggaaggacttaggcgctcgcgtggacaccgcaagcccctcagtagcctcggcccaagaggcctgctttccactcgctagccccgccgggggtccgtgtcctgtctcggtggccggacccgggcccgagcccgagcagtagccggcgccatgtcggtggtgggcatagacctgggcttccagagctgctacgtcgctgtggcccgcgccggcggcatcgagactatcgctaatgagtatagcgaccgctgcacgccggcttgcatttcttttggtcctaagaatcgttcaattggagcagcagctaaaagccaggtaatttctaatgcaaagaacacagtccaaggatttaaaagattccatggccgagcattctctgatccatttgtggaggcagaaaaatctaaccttgcatatgatattgtgcagttgcctacaggattaacaggtataaaggtgacatatatggaggaagagcgaaattttaccactgagcaagtgactgccatgcttttgtccaaactgaaggagacagccgaaagtgttcttaagaagcctgtagttgactgtgttgtttcggttccttgtttctatactgatgcagaaagacgatcagtgatggatgcaacacagattgctggtcttaattgcttgcgattaatgaatgaaaccactgcagttgctcttgcatatggaatctataagcaggatcttcctgccttagaagagaaaccaagaaatgtagtttttgtagacatgggccactctgcttatcaagtttctgtatgtgcatttaatagaggaaaactgaaagttctggccactgcatttgacacgacattgggaggtagaaaatttgatgaagtgttagtaaatcacttctgtgaagaatttgggaagaaatacaagctagacattaagtccaaaatccgtgcattattacgactctctcaggagtgtgagaaactcaagaaattgatgagtgcaaatgcttcagatctccctttgagcattgaatgttttatgaatgatgttgatgtatctggaactatgaatagaggcaaatttctggagatgtgcaatgatctcttagctagagtggagccaccacttcgtagtgttttggaacaaaccaagttaaagaaagaagatatttatgcagtggagatagttggtggtgctacacgaatccctgcggtaaaagagaagatcagcaaatttttcggtaaagaacttagtacaacattaaatgctgatgaagctgtcactcgaggctgtgcattgcagtgtgccatcttatcgcctgctttcaaagtcagagaattttctatcactgatgtagtaccatatccaatatctctgagatggaattctccagctgaagaagggtcaagtgactgtgaagtcttttccaaaaatcatgctgctcctttctctaaagttcttacattttatagaaaggaacctttcactcttgaggcctactacagctctcctcaggatttgccctatccagatcctgctatagctcagttttcagttcagaaagtcactcctcagtctgatggctccagttcaaaagtgaaagtcaaagttcgagtaaatgtccatggcattttcagtgtgtccagtgcatctttagtggaggttcacaagtctgaggaaaatgaggagccaatggaaacagatcagaatgcaaaggaggaagagaagatgcaagtggaccaggaggaaccacatgttgaagagcaacagcagcagacaccagcagaaaataaggcagagtctgaagaaatggagacctctcaagctggatccaaggataaaaagatggaccaaccaccccaagccaagaaggcaaaagtgaagaccagtactgtggacctgccaatcgagaatcagctattatggcagatagacagagagatgctcaacttgtacattgaaaatgagggtaagatgatcatgcaggataaactggagaaggagcggaatgatgctaagaacgcagtggaggaatatgtgtatgaaatgagagacaagcttagtggtgaatatgagaagtttgtgagtgaagatgatcgtaacagttttactttgaaactggaagatactgaaaattggttgtatgaggatggagaagaccagccaaagcaagtttatgttgataagttggctgaattaaaaaatctaggtcaacctattaagatacgtttccaggaatctgaagaacgaccaaaattatttgaagaactagggaaacagatccaacagtatatgaaaataatcagctctttcaaaaacaaggaggaccagtatgatcatttggatgctgctgacatgacaaaggtagaaaaaagcacaaatgaagcaatggagtggatgaataacaagctaaatctgcagaacaagcagagtttgaccatggatccagttgtcaagtcaaaagagattgaagctaaaattaaggagctgacaagtacttgtagccctataatttcaaagcccaaacccaaagtggaacctccaaaagaggaacaaaaaaatgcagagcagaatggaccagtggatggacaaggagacaacccaggcccccaggctgctgagcagggtacagacacagctgtgccttcggattcagacaagaagcttcctgaaatggacattgattgattccaacacttgtttctattgcgcaagtgaatactgaagatttcttagtcagtttttaggggattttcggggaggggaaataggtaatgtatggagcattttcacttctaaatagttagatacagaaattaagtgcattgtatctttttcataatggtactatttagaagcccagttagtcttactgagcttatgcttcactcctttatgtttaaccatgtgtctacaagaataagtttgttttggaaagttgagctatagctacagctctagctatccagcagacttttcattatgacttacatggcaggagctctaattatgctttaaaaatctgttgtggagattgctttaaatgctccctgcctggtgtggggatggggtccccctctttgtgagggctggagcatggcacggcatggattaacacggcagaggaacaaaggtgtgctctgagcttcttcatatttcaccttcaccctcacctgtgttctcttccctctctcccaataaaagggctcccattataaatgccatgtacttctcttgggaaaatagacccccttgcctagagtaagttgttaactgagggctttaaacctggaggctcttcctgaaagtatgttcatgaataccccaagcatcaaggtctaaataattttcagaagattagaattgggtagatatactgttggatatagccatggtaaatttaactgaggaattaaatccttgttaattttggtgtaaagatttgtatcctggcctgtttattcaggtgggagatgttctgtataattttgaggtatagcttgaactcctagaacaagagttaaaagttctttttagctcattcacaatcacttgtgtgttaagtgttaatatctgtcatgaacctgccaatttgtacgtgttaagcagctgacagatgatgcaaaaaaaactaagatacactggattgtactggatgagtctgaaattagtgttaaagaagtgtggtgcctgatgttataacaacacctcattcttaactgtgtggccaatgtcaggtataccaaagcattcctctgactgctttttggggcagtgttgacaggagtgaggcattttggaaactccaagggaagcctgtgtttgaggccagagttggtacctgctttaagaaactgttacagggcttgttggtaatgttttgaatctttgtaaaaattgatattctgtataacagagtgcctctctgttacttttggcctatgttgttagaaataagatgctatcttgcatagttagaattaagcgtttgtccatctctagataacattgaaaagtttgagtgttacaggctctaaagtgcaatggagaacaattgcttaggaggaggaaggggaaagtatacttatgttggtgtgtaagcatgcatggaggcctcgaggcaccacaacaaggccaggttcttagcacatcctctgttctctacctgtcatgcttcaagagttccagctggcctgctgtgaagccagtagctattttaaaagtgctggctgcaggattaagccaaccctttacaactggcccagaccgtaatggccatttcttcttaaaaaaaaacatctgggttttta

SEQ ID NO: 628282 - DNA, 317 bp, Homo sapiens
gttatcctgaaaacgcaactgatatgggtggtgaggaatagtgcaacaggacaacgagaaatgagtgttggacagatagcgaggaggccatggtagtctcagcttatatccttcctgtttaggagtatgaggcgttactgagaagccatgacaccctggagccccgttgttttgaaatgattcccgttaactaagctcagcactcaaaacttcctcagggccagctgatcagacccaaatccttgctcatgtctgaccacaagaagtgtttcccaagcttcctcactggacagctacccaataagggtatgactttg

SEQ ID NO: 628283 - DNA, 4639 bp, Homo sapiens
  misc_feature (63)..(63): n is a, c, g, or t
cgactcttgagatcccccatgtacctcctcagtctgatgctccagttcaaaagtgaaagtcanagttcgagtaaatgtccatggcattttcaggtgccagtgcatctttagtggaggtcacaagtctgaggaaaatgaggagccaatggaaacagatcagaatgcaaaggaggaagagaagatgcaagtggaccaggaggaaccacatgttgaagagcaacagcagcagacaccagcagaaaataaggcagagtctgaagaaatggagacctctcaagctggatccaaggataaaaagatggaccaaccaccccaagccaagaaggcaaaagtgaagaccagtactgtggacctgccaatcgagaatcagctattatggcagatagacagagagatgctcaacttgtacattgaaaatgagggtaagatgatcatgcaggataaactggagaaggagcggaatgatgctaagaacgcagtggaggaatatgtgtatgaaatgagagacaagcttagtggtgaatatgagaagtttgtgagtgaagatgatcgtaacagttttactttgaaactggaagatactgaaaattggttgtatgaggatggagaagaccagcgcaaagaacacagtccaaggatttaaaagattccatggccgagcattctctgatccatttgtggaggcagaaaaatctaaccttgcatatgatattgtgcagttgcctacaggattaacaggtataaaggtgacatatatggaggaagagcgaaattttaccactgagcaagtgactgccatgcttttgtccaaactgaaggagacagccgaaagtgttcttaagaagcctgtagttgactgtgttgtttcggttccttgtttctatactgatgcagaaagacgatcagtgatggatgcaacacagattgctggtcttaattgcttgcgattaatgaatgaaaccactgcagttgctcttgcatatggaatctataagcaggatcttcctgccttagaagagaaaccaagaaatgtagtttttgtagacatgggccactctgcttatcaagtttctgtatgtgcatttaatagaggaaaactgaaagttctggccactgcatttgacacgacattgggaggtagaaaatttgatgaagtgttagtaaatcacttctgtgaagaatttgggaagaaatacaagctagacattaagtccaaaatccgtgcattattacgactctctcaggagtgtgagaaactcaagaaattgatgagtgcaaatgcttcagatctccctttgagcattgaatgttttatgaatgatgttgatgtatctggaactatgaatagaggcaaatttctggagatgtgcaatgatctcttagctagagtggagccaccacttcgtagtgttttggaacaaaccaagttaaagaaagaagatatttatgcagtggagatagttggtggtgctacacgaatccctgcggtaaaagagaagatcagcaaatttttcggtaaagaacttagtacaacattaaatgctgatgaagctgtcactcgaggctgtgcattgcagtgtgccatcttatcgcctgctttcaaagtcagagaattttctatcactgatgtagtaccatatccaatatctctgagatggaattctccagctgaagaagggtcaagtgactgtgaagtcttttccaaaaatcatgctgctcctttctctaaagttcttacattttatagaaaggaacctttcactcttgaggcctactacagctctcctcaggatttgccctatccagatcctgctatagctcagttttcagttcagaaagtcactcctcagtctgatggctccagttcaaaagtgaaagtcaaagttcgagtaaatgtccatggcattttcagtgtgtccagtgcatctttagtggaggttcacaagtctgaggaaaatgaggagccaatggaaacagatcagaatgcaaaggaggaagagaagatgcaagtggaccaggaggaaccacatgttgaagagcaacagcagcagacaccagcagaaaataaggcagagtctgaagaaatggagacctctcaagctggatccaaggataaaaagatggaccaaccaccccaagccaagaaggcaaaagtgaagaccagtactgtggacctgccaatcgagaatcagctattatggcagatagacagagagatgctcaacttgtacattgaaaatgagggtaagatgatcatgcaggataaactggagaaggagcggaatgatgctaagaacgcagtggaggaatatgtgtatgaaatgagagacaagcttagtggtgaatatgagaagtttgtgagtgaagatgatcgtaacagttttactttgaaactggaagatactgaaaattggttgtatgaggatggagaagaccagccaaagcaagtttatgttgataagttggctgaattaaaaaatctaggtcaacctattaagatacgtttccaggaatctgaagaacgaccaaaattatttgaagaactagggaaacagatccaacagtatatgaaaataatcagctctttcaaaaacaaggaggaccagtatgatcatttggatgctgctgacatgacaaaggtagaaaaaagcacaaatgaagcaatggagtggatgaataacaagctaaatctgcagaacaagcagagtttgaccatggatccagttgtcaagtcaaaagagattgaagctaaaattaaggagctgacaagtacttgtagccctataatttcaaagcccaaacccaaagtggaacctccaaaagaggaacaaaaaaatgcagagcagaatggaccagtggatggacaaggagacaacccaggcccccaggctgctgagcagggtacagacacagctgtgccttcggattcagacaagaagcttcctgaaatggacattgattgattccaacacttgtttctattaaaacagactattataaagctttaagttgtcaactttgttctaaatatcaactagcgcaagtgaatactgaagatttcttagtcagtttttaggggattttcggggaggggaaataggtaatgtatggagcattttcacttctaaatagttagatacagaaattaagtgcattgtatctttttcataatggtactatttagaagcccagttagtcttactgagcttatgcttcactcctttatgtttaaccatgtgtctacaagaataagtttgttttggaaagttgagctatagctacagctctagctatccagcagacttttcattatgacttacatggcaggagctctaattatgctttaaaaatctgttgtggagattgctttaaatgctccctgcctggtgtggggatggggtccccctctttgtgagggctggagcatggcacggcatggattaacacggcagaggaacaaaggtgtgctctgagcttcttcatatttcaccttcaccctcacctgtgttctcttccctctctcccaataaaagggctcccattataaatgccatgtacttctcttgggaaaatagacccccttgcctagagtaagttgttaactgagggctttaaacctggaggctcttcctgaaagtatgttcatgaataccccaagcatcaaggtctaaataattttcagaagattagaattgggtagatatactgttggatatagccatggtaaatttaactgaggaattaaatccttgttaattttggtgtaaagatttgtatcctggcctgtttattcaggtgggagatgttctgtataattttgaggtatagcttgaactcctagaacaagagttaaaagttctttttagctcattcacaatcacttgtgtgttaagtgttaatatctgtcatgaacctgccaatttgtacgtgttaagcagctgacagatgatgcaaaaaaaactaagatacactggattgtactggatgagtctgaaattagtgttaaagaagtgtggtgcctgatgttataacaacacctcattcttaactgtgtggccaatgtcaggtataccaaagcattcctctgactgctttttggggcagtgttgacaggagtgaggcattttggaaactccaagggaagcctgtgtttgaggccagagttggtacctgctttaagaaactgttacagggcttgttggtaatgttttgaatctttgtaaaaattgatattctgtataacagagtgcctctctgttacttttggcctatgttgttagaaataagatgctatcttgcatagttagaattaagcgtttgtccatctctagataacattgaaaagtttgagtgttacaggctctaaagtgcaatggagaacaattgcttaggaggaggaaggggaaagtatacttatgttggtgtgtaagcatgcatggaggcctcgaggcaccacaacaaggccaggttcttagcacatcctctgttctctacctgtcatgcttcaagagttccagctggcctgctgtgaagccagtagctattttaaaagtgctggctgcaggattaagccaaccctttacaactggcccagaccgtaatggccatttcttcttaaaaaaaaacatctgggttttta

SEQ ID NO: 628284 - DNA, 324 bp, Homo sapiens
caaccctgtgatgtgggatcccagacttccctatctgttaactaaagggctgttttcaatcaaataattgttacgagaagcagactggcgcctgtagcactgctgttggagatccaaataggagattgggttgggaagtttttccctcgagtctctgctataatgatgtgtaattagcactgtccaggcgagtgtgtgtgttgcatctggacgccttggtatgcccaatcattgagcgttaggttaaacgtacaaactgtagctttctaccggagccagtcggctggctctgcccttacgttacatatttttaaacatgccaaa

SEQ ID NO: 628285 - DNA, 5433 bp, Homo sapiens
ctcgactttttttacacatatggagacttggagattcaggttctccttagatctctctgggtaatttattagaaatgcttacatagatttgcttcctaatctcaagctggcttcccctctccacaactcagcaactatctattctcccaggaggccatacaagcgaggggccctgaagcttaacatttattaacttcatgtaaaggtctgagcggacctttcaggccaggcagcgtgtcacttgcctgtgttccttgttagggcctaccaccgggtaggtgcttggaatgtgctgtggattaaaggcttaaatcctgcgggcccctcaatctgatctaaggacatgagtggcttagagaacggcgcaacaaggctaagcgaaagaaaacaaagcggtgtggctgggagtgggctccttccctccgctggtgagggtgcgatcttagactcttgagagaacccgacataaaggccgcgttccaatggcggccttctcccctaccggccaacctgccccgaaaagagcagaaggcaccctgcgggatctgcagatcagcttgcgtctcattctggggcaccgacacggtggaatgcaagacaccccactaccggaagtttctttgatgttaagaaaaacggcggaagtaggccgcagcgcttcctcagtatagtgcctcgagctggctcgcctactttctacggtaaagggaggtgctccacatctctatgcagctgtgcagcgccgcaggttccatgcgcaggctcggttggctaaatgcgctttccagccatctttcagccacccagtcctttcccaggttctcgagccaggacgtgacgtattcagacgtactgggggcggggcctcaaggggaaaagcgcctgagccgggatatcgcgagaacatcccgttctttcgtagctctggtgctgcggctccgctctcgtcgcaacgagatctttcgagatcttctccgcccccgctaccggcgcctcctctgcggccactgagccggagccggcctgagcagcgctctcggttgcagtacccactggaaggacttaggcgctcgcgtggacaccgcaagcccctcagtagcctcggcccaagaggcctgctttccactcgctagccccgccgggggtccgtgtcctgtctcggtggccggacccgggcccgagcccgagcagtagccggcgccatgtcggtggtgggcatagacctgggcttccagagctgctacgtcgctgtggcccgcgccggcggcatcgagactatcgctaatgagtatagcgaccgctgcacgccggcttgcatttcttttggtcctaagaatcgttcaattggagcagcagctaaaagccaggtaatttctaatgcaaagaacacagtccaaggatttaaaagattccatggccgagcattctctgatccatttgtggaggcagaaaaatctaaccttgcatatgatattgtgcagttgcctacaggattaacaggtataaaggtgacatatatggaggaagagcgaaattttaccactgagcaagtgactgccatgcttttgtccaaactgaaggagacagccgaaagtgttcttaagaagcctgtagttgactgtgttgtttcggttccttgtttctatactgatgcagaaagacgatcagtgatggatgcaacacagattgctggtcttaattgcttgcgattaatgaatgaaaccactgcagttgctcttgcatatggaatctataagcaggatcttcctgccttagaagagaaaccaagaaatgtagtttttgtagacatgggccactctgcttatcaagtttctgtatgtgcatttaatagaggaaaactgaaagttctggccactgcatttgacacgacattgggaggtagaaaatttgatgaagtgttagtaaatcacttctgtgaagaatttgggaagaaatacaagctagacattaagtccaaaatccgtgcattattacgactctctcaggagtgtgagaaactcaagaaattgatgagtgcaaatgcttcagatctccctttgagcattgaatgttttatgaatgatgttgatgtatctggaactatgaatagaggcaaatttctggagatgtgcaatgatctcttagctagagtggagccaccacttcgtagtgttttggaacaaaccaagttaaagaaagaagatatttatgcagtggagatagttggtggtgctacacgaatccctgcggtaaaagagaagatcagcaaatttttcggtaaagaacttagtacaacattaaatgctgatgaagctgtcactcgaggctgtgcattgcagtgtgccatcttatcgcctgctttcaaagtcagagaattttctatcactgatgtagtaccatatccaatatctctgagatggaattctccagctgaagaagggtcaagtgactgtgaagtcttttccaaaaatcatgctgctcctttctctaaagttcttacattttatagaaaggaacctttcactcttgaggcctactacagctctcctcaggatttgccctatccagatcctgctatagctcagttttcagttcagaaagtcactcctcagtctgatggctccagttcaaaagtgaaagtcaaagttcgagtaaatgtccatggcattttcagtgtgtccagtgcatctttagtggaggttcacaagtctgaggaaaatgaggagccaatggaaacagatcagaatgcaaaggaggaagagaagatgcaagtggaccaggaggaaccacatgttgaagagcaacagcagcagacaccagcagaaaataaggcagagtctgaagaaatggagacctctcaagctggatccaaggataaaaagatggaccaaccaccccaagccaagaaggcaaaagtgaagaccagtactgtggacctgccaatcgagaatcagctattatggcagatagacagagagatgctcaacttgtacattgaaaatgagggtaagatgatcatgcaggataaactggagaaggagcggaatgatgctaagaacgcagtggaggaatatgtgtatgaaatgagagacaagcttagtggtgaatatgagaagtttgtgagtgaagatgatcgtaacagttttactttgaaactggaagatactgaaaattggttgtatgaggatggagaagaccagccaaagcaagtttatgttgataagttggctgaattaaaaaatctaggtcaacctattaagatacgtttccaggaatctgaagaacgaccaaaattatttgaagaactagggaaacagatccaacagtatatgaaaataatcagctctttcaaaaacaaggaggaccagtatgatcatttggatgctgctgacatgacaaaggtagaaaaaagcacaaatgaagcaatggagtggatgtaatgaacaagctgtatatctggcagtaacatagcgagagtcttgaccatggtatcctagttcgtgcaagtctataatagagattgagagctataaatgtagaggatgctgacaagtgacttggtaagccctatgaattttcaaagccctaaatcccataagtcggaacctccagaatagaggtacaaataaatgcagagcagaatggaccagtggatggacaaggagacaacccaggcccccaggctgctgagcagggtacagacacagctgtgccttcggattcagacaagaagcttcctgaaatggacattgattgattccaacacttgtttctattaaaacagactattataaagctttaagttgtcaactttgttctaaatatcaactagcgcaagtgaatactgaagatttcttagtcagtttttaggggattttcggggaggggaaataggtaatgtatggagcattttcacttctaaatagttagatacagaaattaagtgcattgtatctttttcataatggtactatttagaagcccagttagtcttactgagcttatgcttcactcctttatgtttaaccatgtgtctacaagaataagtttgttttggaaagttgagctatagctacagctctagctatccagcagacttttcattatgacttacatggcaggagctctaattatgctttaaaaatctgttgtggagattgctttaaatgctccctgcctggtgtggggatggggtccccctctttgtgagggctggagcatggcacggcatggattaacacggcagaggaacaaaggtgtgctctgagcttcttcatatttcaccttcaccctcacctgtgttctcttccctctctcccaataaaagggctcccattataaatgccatgtacttctcttgggaaaatagacccccttgcctagagtaagttgttaactgagggctttaaacctggaggctcttcctgaaagtatgttcatgaataccccaagcatcaaggtctaaataattttcagaagattagaattgggtagatatactgttggatatagccatggtaaatttaactgaggaattaaatccttgttaattttggtgtaaagatttgtatcctggcctgtttattcaggtgggagatgttctgtataattttgaggtatagcttgaactcctagaacaagagttaaaagttctttttagctcattcacaatcacttgtgtgttaagtgttaatatctgtcatgaacctgccaatttgtacgtgttaagcagctgacagatgatgcaaaaaaaactaagatacactggattgtactggatgagtctgaaattagtgttaaagaagtgtggtgcctgatgttataacaacacctcattcttaactgtgtggccaatgtcaggtataccaaagcattcctctgactgctttttggggcagtgttgacaggagtgaggcattttggaaactccaagggaagcctgtgtttgaggccagagttggtacctgctttaagaaactgttacagggcttgttggtaatgttttgaatctttgtaaaaattgatattctgtataacagagtgcctctctgttacttttggcctatgttgttagaaataagatgctatcttgcatagttagaattaagcgtttgtccatctctagataacattgaaaagtttgagtgttacaggctctaaagtgcaatggagaacaattgcttaggaggaggaaggggaaagtatacttatgttggtgtgtaagcatgcatggaggcctcgaggcaccacaacaaggccaggttcttagcacatcctctgttctctacctgtcatgcttcaagagttccagctggcctgctgtgaagccagtagctattttaaaagtgctggctgcaggattaagccaaccctttacaactggcccagaccgtaatggccatttcttcttaaaaaaaaacatctgggttttta

SEQ ID NO: 628286 - DNA, 634 bp, Homo sapiens
  misc_feature (15)..(15): n is a, c, g, or t
  misc_feature (125)..(125): n is a, c, g, or t
  misc_feature (154)..(154): n is a, c, g, or t
  misc_feature (189)..(189): n is a, c, g, or t
  misc_feature (401)..(401): n is a, c, g, or t
  misc_feature (413)..(413): n is a, c, g, or t
  misc_feature (496)..(496): n is a, c, g, or t
ataaaatggtgcaanattttaaataaaaatactgctggtggtggcccagattctggtagttgaagggttggggtagggctgaaaattccttttgcccaagggagggccgggtggcgggggcagcnattttaagaaccccctgtttttagctctnccggctactttgggatggtgtgttgtgttagaaancccaagttcagaatctaggccccaggactagaaagaaaagttaaggccggggagaaattgaggctcagttttgcagcccactcctccagtccccacctctgggcagggatagagcgaaggggcaggacaaccctagaggtggactccaccctctcccgagtgcttcacgattggatgcggtggcagaaaaacgcaggtggggcttgcgccanccaccctaactnccttctagggaaatgacattgcccagaatcccttgcagcgaaggttctggatctgactaaagttcccccaaacagaatctctngtgaaaatttagatttgggaactgagtgaagtgggagaggggcagggctgaggacaactatgggctgggacggaccgcggcagagggagcgtagtgctgcagtaagcggctttgtggcatagtggcttgctgcagagg

SEQ ID NO: 628287 - DNA, 356 bp, Homo sapiens
atgaaaatatttaaatctgttcaagaatagttcaaaatattgcgggaaatgaacatgatcatctttatgccacgattcttcattaagtcatggcagatggagcctaccaagaagataatgatgaatcatcctcaaaacgttttttaatcctcaactatatgaaagcatgtgaattaggcttatcagaataacatgcttcagtgggaaatacaggacttatttatttaatcagatctaagatggactttcttattgcatgaataagatggagaaacatgccatttctcaatgaagattctaatattttatctattgtgttcattgaattccatggtttctcataacctgctttggtt

SEQ ID NO: 628288 - DNA, 5155 bp, Homo sapiens
ctcgactttttttacacatatggagacttggagattcaggttctccttagatctctctgggtaatttattagaaatgcttacatagatttgcttcctaatctcaagctggcttcccctctccacaactcagcaactatctattctcccaggaggccatacaagcgaggggccctgaagcttaacatttattaacttcatgtaaaggtctgagcggacctttcaggccaggcagcgtgtcacttgcctgtgttccttgttagggcctaccaccgggtaggtgcttggaatgtgctgtggattaaaggcttaaatcctgcgggcccctcaatctgatctaaggacatgagtggcttagagaacggcgcaacaaggctaagcgaaagaaaacaaagcggtgtggctgggagtgggctccttccctccgctggtgagggtgcgatcttagactcttgagagaacccgacataaaggccgcgttccaatggcggccttctcccctaccggccaacctgccccgaaaagagcagaaggcaccctgcgggatctgcagatcagcttgcgtctcattctggggcaccgacacggtggaatgcaagacaccccactaccggaagtttctttgatgttaagaaaaacggcggaagtaggccgcagcgcttcctcagtatagtgcctcgagctggctcgcctactttctacggtaaagggaggtgctccacatctctatgcagctgtgcagcgccgcaggttccatgcgcaggctcggttggctaaatgcgctttccagccatctttcagccacccagtcctttcccaggttctcgagccaggacgtgacgtattcagacgtactgggggcggggcctcaaggggaaaagcgcctgagccgggatatcgcgagaacatcccgttctttcgtagctctggtgctgcggctccgctctcgtcgcaacgagatctttcgagatcttctccgcccccgctaccggcgcctcctctgcggccactgagccggagccggcctgagcagcgctctcggttgcagtacccactggaaggacttaggcgctcgcgtggacaccgcaagcccctcagtagcctcggcccaagaggcctgctttccactcgctagccccgccgggggtccgtgtcctgtctcggtggccggacccgggcccgagcccgagcagtagccggcgccatgtcggtggtgggcatagacctgggcttccagagctgctacgtcgctgtggcccgcgccggcggcatcgagactatcgctaatgagtatagcgaccgctgcacgccggcttgcatttcttttggtcctaagaatcgttcaattggagcagcagctaaaagccaggtaatttctaatgcaaagaacacagtccaaggatttaaaagattccatggccgagcattctctgatccatttgtggaggcagaaaaatctaaccttgcatatgatattgtgcagttgcctacaggattaacaggtataaaggtgacatatatggaggaagagcgaaattttaccactgagcaagtgactgccatgcttttgtccaaactgaaggagacagccgaaagtgttcttaagaagcctgtagttgactgtgttgtttcggttccttgtttctatactgatgcagaaagacgatcagtgatggatgcaacacagattgctggtcttaattgcttgcgattaatgaatgaaaccactgcagttgctcttgcatatggaatctataagcaggatcttcctgccttagaagagaaaccaagaaatgtagtttttgtagacatgggccactctgcttatcaagtttctgtatgtgcatttaatagaggaaaactgaaagttctggccactgcatttgacacgacattgggaggtagaaaatttgatgaagtgttagtaaatcacttctgtgaagaatttgggaagaaatacaagctagacattaagtccaaaatccgtgcattattacgactctctcaggagtgtgagaaactcaagaaattgatgagtgcaaatgcttcagatctccctttgagcattgaatgttttatgaatgatgttgatgtatctggaactatgaatagaggcaaatttctggagatgtgcaatgatctcttagctagagtggagccaccacttcgtagtgttttggaacaaaccaagttaaagaaagaagatatttatgcagtggagatagttggtggtgctacacgaatccctgcggtaaaagagaagatcagcaaatttttcggtaaagaacttagtacaacattaaatgctgatgaagctgtcactcgaggctgtgcattgcagtgtgccatcttatcgcctgctttcaaagtcagagaattttctatcactgatgtagtaccatatccaatatctctgagatggaattctccagctgaagaagggtcaagtgactgtgaagtcttttccaaaaatcatgctgctcctttctctaaagttcttacattttatagaaaggaacctttcactcttgaggcctactacagctctcctcaggatttgccctatccagatcctgctatagctcagttttcagttcagaaagtcactcctcagtctgatggctccagttcaaaagtgaaagtcaaagttcgagtaaatgtccatggcattttcagtgtgtccagtgcatctttagtggaggttcacaagtctgaggaaaatgaggagccaatggaaacagatcagaatgcaaaggaggaagagaagatgatcatgcaggataaactggagaaggagcggaatgatgctaagaacgcagtggaggaatatgtgtatgaaatgagagacaagcttagtggtgaatatgagaagtttgtgagtgaagatgatcgtaacagttttactttgaaactggaagatactgaaaattggttgtatgaggatggagaagaccagccaaagcaagtttatgttgataagttggctgaattaaaaaatctaggtcaacctattaagatacgtttccaggaatctgaagaacgaccaaaattatttgaagaactagggaaacagatccaacagtatatgaaaataatcagctctttcaaaaacaaggaggaccagtatgatcatttggatgctgctgacatgacaaaggtagaaaaaagcacaaatgaagcaatggagtggatgaataacaagctaaatctgcagaacaagcagagtttgaccatggatccagttgtcaagtcaaaagagattgaagctaaaattaaggagctgacaagtacttgtagccctataatttcaaagcccaaacccaaagtggaacctccaaaagaggaacaaaaaaatgcagagcagaatggaccagtggatggacaaggagacaacccaggcccccaggctgctgagcagggtacagacacagctgtgccttcggattcagacaagaagcttcctgaaatggacattgattgattccaacacttgtttctattaaaacagactattataaagctttaagttgtcaactttgttctaaatatcaactagcgcaagtgaatactgaagatttcttagtcagtttttaggggattttcggggaggggaaataggtaatgtatggagcattttcacttctaaatagttagatacagaaattaagtgcattgtatctttttcataatggtactatttagaagcccagttagtcttactgagcttatgcttcactcctttatgtttaaccatgtgtctacaagaataagtttgttttggaaagttgagctatagctacagctctagctatccagcagacttttcattatgacttacatggcaggagctctaattatgctttaaaaatctgttgtggagattgctttaaatgctccctgcctggtgtggggatggggtccccctctttgtgagggctggagcatggcacggcatggattaacacggcagaggaacaaaggtgtgctctgagcttcttcatatttcaccttcaccctcacctgtgttctcttccctctctcccaataaaagggctcccattataaatgccatgtacttctcttgggaaaatagacccccttgcctagagtaagttgttaactgagggctttaaacctggaggctcttcctgaaagtatgttcatgaataccccaagcatcaaggtctaaataattttcagaagattagaattgggtagatatactgttggatatagccatggtaaatttaactgaggaattaaatccttgttaattttggtgtaaagatttgtatcctggcctgtttattcaggtgggagatgttctgtataattttgaggtatagcttgaactcctagaacaagagttaaaagttctttttagctcattcacaatcacttgtgtgttaagtgttaatatctgtcatgaacctgccaatttgtacgtgttaagcagctgacagatgatgcaaaaaaaactaagatacactggattgtactggatgagtctgaaattagtgttaaagaagtgtggtgcctgatgttataacaacacctcattcttaactgtgtggccaatgtcaggtataccaaagcattcctctgactgctttttggggcagtgttgacaggagtgaggcattttggaaactccaagggaagcctgtgtttgaggccagagttggtacctgctttaagaaactgttacagggcttgttggtaatgttttgaatctttgtaaaaattgatattctgtataacagagtgcctctctgttacttttggcctatgttgttagaaataagatgctatcttgcatagttagaattaagcgtttgtccatctctagataacattgaaaagtttgagtgttacaggctctaaagtgcaatggagaacaattgcttaggaggaggaaggggaaagtatacttatgttggtgtgtaagcatgcatggaggcctcgaggcaccacaacaaggccaggttcttagcacatcctctgttctctacctgtcatgcttcaagagttccagctggcctgctgtgaagccagtagctattttaaaagtgctggctgcaggattaagccaaccctttacaactggcccagaccgtaatggccatttcttcttaaaaaaaaacatctgggttttta

SEQ ID NO: 628289 - DNA, 227 bp, Homo sapiens
catcccccctcggaacccaatgagcatgcctgtgttgggttgtttgtgagttgtataatgacttgttggttgatgggggatggtgggctgttaattgtcagcccaccgcccttaatctgacgcaggcttatgcggaggagaatgttttcatgttacttatactaacattagttcttctatagggggatagattggtccaattgggtgtgaggagttcagttatatgt

SEQ ID NO: 628290 - DNA, 413 bp, Homo sapiens
gagaaaaacaaaggcaggaagtgacggtggcctgacggtgcgtgtgtgtatgcagagaagggagggagccggctcagtttattcttgttttgacaaacttcaaggtccaggcagccatgtgcagggccgggccccattgctccccgcgcggcattggaggtgtccgccggtgaggagaagcccaacgcctgctccaggcttgtcaggcggaaacggttaacaaggagatttggtcagcaaaacagacccagcctttccgaggcttcgtctgacttgccccgaaaggttggggaggggggacttgcgcagagcctcagggaccctcctctatggggactaccattcatgagctgtacgtttctttccacagcctttgcagggggaatatcggaataaagtgggttcaggcgcca

SEQ ID NO: 628291 - DNA, 3086 bp, Homo sapiens
tccagagtatcccattcaattgcggtgagcatcttatcgcctgctttcaaagtcagagaattttctatcactgatgtagtaccatatccaatatctctgagatggaattctccagctgaagaagggtcaagtgactgtgaagtcttttccaaaaatcatgctgctcctttctctaaagttcttacattttatagaaaggaacctttcactcttgaggcctactacagctctcctcaggatttgccctatccagatcctgctatagctcagttttcagttcagaaagtcactcctcagtctgatggctccagttcaaaagtgaaagtcaaagttcgagtaaatgtccatggcattttcagtgtgtccagtgcatctttagtggaggttcacaagtctgaggaaaatgaggagccaatggaaacagatcagaatgcaaaggaggaagagaagatgcaagtggaccaggaggaaccacatgttgaagagcaacagcagcagacaccagcagaaaataaggcagagtctgaagaaatggagacctctcaagctggatccaaggataaaaagatggaccaaccaccccaagccaagaaggcaaaagtgaagaccagtactgtggacctgccaatcgagaatcagctattatggcagatagacagagagatgctcaacttgtacattgaaaatgagggtaagatgatcatgcaggataaactggagaaggagcggaatgatgctaagaacgcagtggaggaatatgtgtatgaaatgagagacaagcttagtggtgaatatgagaagtttgtgagtgaagatgatcgtaacagttttactttgaaactggaagatactgaaaattggttgtatgaggatggagaagaccagccaaagcaagtttatgttgataagttggctgaattaaaaaatctaggtcaacctattaagatacgtttccaggaatctgaagaacgaccaaaattatttgaagaactagggaaacagatccaacagtatatgaaaataatcagctctttcaaaaacaaggaggaccagtatgatcatttggatgctgctgacatgacaaaggtagaaaaaagcacaaatgaagcaatggagtggatgaataacaagctaaatctgcagaacaagcagagtttgaccatggatccagttgtcaagtcaaaagagattgaagctaaaattaaggagctgacaagtacttgtagccctataatttcaaagcccaaacccaaagtggaacctccaaaagaggaacaaaaaaatgcagagcagaatggaccagtggatggacaaggagacaacccaggcccccaggctgctgagcagggtacagacacagctgtgccttcggattcagacaagaagcttcctgaaatggacattgattgattccaacacttgtttctattaaaacagactattataaagctttaagttgtcaactttgttctaaatatcaactagcgcaagtgaatactgaagatttcttagtcagtttttaggggattttcggggaggggaaataggtaatgtatggagcattttcacttctaaatagttagatacagaaattaagtgcattgtatctttttcataatggtactatttagaagcccagttagtcttactgagcttatgcttcactcctttatgtttaaccatgtgtctacaagaataagtttgttttggaaagttgagctatagctacagctctagctatccagcagacttttcattatgacttacatggcaggagctctaattatgctttaaaaatctgttgtggagattgctttaaatgctccctgcctggtgtggggatggggtccccctctttgtgagggctggagcatggcacggcatggattaacacggcagaggaacaaaggtgtgctctgagcttcttcatatttcaccttcaccctcacctgtgttctcttccctctctcccaataaaagggctcccattataaatgccatgtacttctcttgggaaaatagacccccttgcctagagtaagttgttaactgagggctttaaacctggaggctcttcctgaaagtatgttcatgaataccccaagcatcaaggtctaaataattttcagaagattagaattgggtagatatactgttggatatagccatggtaaatttaactgaggaattaaatccttgttaattttggtgtaaagatttgtatcctggcctgtttattcaggtgggagatgttctgtataattttgaggtatagcttgaactcctagaacaagagttaaaagttctttttagctcattcacaatcacttgtgtgttaagtgttaatatctgtcatgaacctgccaatttgtacgtgttaagcagctgacagatgatgcaaaaaaaactaagatacactggattgtactggatgagtctgaaattagtgttaaagaagtgtggtgcctgatgttataacaacacctcattcttaactgtgtggccaatgtcaggtataccaaagcattcctctgactgctttttggggcagtgttgacaggagtgaggcattttggaaactccaagggaagcctgtgtttgaggccagagttggtacctgctttaagaaactgttacagggcttgttggtaatgttttgaatctttgtaaaaattgatattctgtataacagagtgcctctctgttacttttggcctatgttgttagaaataagatgctatcttgcatagttagaattaagcgtttgtccatctctagataacattgaaaagtttgagtgttacaggctctaaagtgcaatggagaacaattgcttaggaggaggaaggggaaagtatacttatgttggtgtgtaagcatgcatggaggcctcgaggcaccacaacaaggccaggttcttagcacatcctctgttctctacctgtcatgcttcaagagttccagctggcctgctgtgaagccagtagctattttaaaagtgctggctgcaggattaagccaaccctttacaactggcccagaccgtaatggccatttcttcttaaaaaaaaacatctgggttttta

SEQ ID NO: 628292 - DNA, 85 bp, Homo sapiens
  misc_feature (9)..(9): n is a, c, g, or t
  misc_feature (21)..(21): n is a, c, g, or t
  misc_feature (26)..(30): n is a, c, g, or t
  misc_feature (35)..(36): n is a, c, g, or t
  misc_feature (38)..(38): n is a, c, g, or t
acatctgtntctctgtgccancagcnnnnngaccnngnggagcgatgagcagttcttcgggccagggacacggctcaccgtgcta

SEQ ID NO: 628293 - DNA, 589 bp, Homo sapiens
tgggttcacaatttttctcattactctccccgcgttgagaggtgtctccgggggccctttctcgtttagaaccccatctcttcacattttgaaaggttaaccgggttctcaggccaatatctctacatattgtgtgttttcagagatcgttaatctttggggatcaacccattctcagtgatgcacaaagggcacttgaggcgcagcttttatataggcgacacctgccggtatatgtgttcctcaatgaagttggtgctctcccgtatgttgaccccctcaaccagtgcatgctcattcttgataagctcctgaaaatccggcttggttttcttcttcatgatggattcacgggccccaatatggagactcagcaggcggtgctcctgtttcaggcccttagtctcttggcacacgaaattcttcatctgctaaatgtccatgcctctccggcgatcatactgggcctgcaagttccggcctatgtggctcaagaagccaaagacattggaagagtgctcgttccgaatctcattacaccctgtgtcctcgcgcattgagtagcaccttcagtctcttgtcagagtat

SEQ ID NO: 628294 - DNA, 154 bp, Homo sapiens
gcgcctagaggaccggccattcagtcactagtcttcagatggtatctcagactatagaaggagctccagttgaattcaccagtggacaaaatgaggaaaacaggtgaacaagctttttcttgtatatacatacaagtcagatcagttatgggac

SEQ ID NO: 628295 - DNA, 155 bp, Homo sapiens
acaacaacctatctgaaacaactttggagttttagctgaacgacgcgagggggctgagggtcagagtgggtctctgtggtccaggaggtcaggtagaggctagtctcaaagtgggaagccttctctgttgaaaaggctacattcagcccctcagc

SEQ ID NO: 628296 - DNA, 629 bp, Homo sapiens
  misc_feature (37)..(37): n is a, c, g, or t
  misc_feature (84)..(84): n is a, c, g, or t
  misc_feature (110)..(110): n is a, c, g, or t
  misc_feature (247)..(247): n is a, c, g, or t
  misc_feature (251)..(251): n is a, c, g, or t
  misc_feature (285)..(285): n is a, c, g, or t
  misc_feature (368)..(368): n is a, c, g, or t
  misc_feature (371)..(371): n is a, c, g, or t
  misc_feature (378)..(378): n is a, c, g, or t
  misc_feature (465)..(465): n is a, c, g, or t
  misc_feature (481)..(481): n is a, c, g, or t
  misc_feature (486)..(486): n is a, c, g, or t
  misc_feature (529)..(529): n is a, c, g, or t
  misc_feature (549)..(549): n is a, c, g, or t
  misc_feature (552)..(552): n is a, c, g, or t
  misc_feature (565)..(565): n is a, c, g, or t
  misc_feature (601)..(601): n is a, c, g, or t
tctcggtttgtggtgctttggtgtggcggcccttgtntcctttacactggggggttccatgttctctccaatcggggttttggntttgggcttttcctctcttgtgtttnttgttttctgggttctcggtgtcggtggcctttggttcctggggttgcgccttgtgggggtgtggggcggcgtggtggggctcctgctcttcttctgggttggggccggcctcggcggggtggtctgggactttgcntgtntggggctggtgctgttggcccctggggcctgggnccttgtcggggttcgcttcttccgtgttttgctctggctgggctgctttcttccttctggtcttcactctgaagatgaagcanacncagaggnaaaccagggttgtgatgctagctccccagactgctcccaggacaccaccagccctgccttctggtttccaatgcacaaggagactcngagagatttgccgggngcccngaggatgctgagcacggcaggtgaaatctccttcttctgcagnccctacttgaggcagctccnggnccccggtattggngatgggggtggcgttcagggcggggaagcctgggancagctcaggtgtgcaggggggttgcgtc

SEQ ID NO: 628297 - DNA, 160 bp, Homo sapiens
gcacactacaggtcacacctggcagggatgtcggaaactctactctaaacctctgactttctagactaggaagctgcttgagtggcttttcaaatttacatccagctagttaatgccaacgccaagaagaaaacaccctggatcctaggtttcccttaaa

SEQ ID NO: 628298 - DNA, 181 bp, Homo sapiens
cattataagcaggaacatttaaagagcatttgatcttacttatactcggtggaccgaaagccctatagctagacaatacgcggaaaatagtaccatcatcatgttattataaaaaaatttaagtgcagaagtaaaaaaccaaggaagctacatgtaataacagtaacatacaaacaccact

SEQ ID NO: 628299 - DNA, 675 bp, Homo sapiens
gatggcggtcatgagtttgtggcggacgggtttcggttactgcggtggctgctctgtctggccggccccttggcagtcgcgtcggagttggggggcattcctcactcgtggcttttccgaaggctgctggggtaattcaattattctccaggcatccctgattcgtactacagttggtagacccatgaggaaaaggatctattattggcatcgagatcctgtctagaatttctagtgcacaggctgttccctatgacaggttattgatgagttctacattgtcattgatcggggattgccacgtcgcaatttgtccataactcatggtgacatgtattcagtctggtcaaagctagaactagtcagaaattccagaaggctatgtcccagaaccactgcggagatatgcataatgcatcccatatcatgatggattgcccagtagatttcgtactgatagtcctgaaatagatatatgaaagatcaatggccgtccttcagattggagttgagaaggctgaattgacgggtaaaggagctggaagtgcgaaaattgatgcatgtgagaggagatggagcctggtattactagtgagagcactgacaaggaattattgatgcattctccgaaagaatgcctgacattaaagcattttgttcttcagatacaaagat

SEQ ID NO: 628300 - DNA, 354 bp, Homo sapiens
cgggcacggcccagtggaacaacagatgcggtagcaggctctggaccctgcaggctcgatgaacatctacctggtgctagatggatcacacagcatagaagccagcagcttaacaggtgccacatatggtctagtgacagatgccccataccccacaatttgcatcgggtctgaagcagacaggattaaggcagactgattcacgaagcacttgaatgatagcaattctgaagaccacaagctgaagtacggggctaacaccaagaaggccctacaggcagtgttcagcatgacgagctggccagatgacgttccttatgaatgttggccgtgcccggcatgtcatcattctcg

SEQ ID NO: 628301 - DNA, 205 bp, Homo sapiens
gcagagggggccgcaaagtggggcatgagaagtctgagatggaagaggccctgacagccattacagaggaattgaccgcttccatgagggacgagaagaaagaagcagcagaacaaatggaagaggaacccgcagctgaagaagacgaggtcgctgccaaaaagtctgcagagaaagcaactgcacctgacgttaaagaagagga

SEQ ID NO: 628302 - DNA, 196 bp, Homo sapiens
atccacattctatcacaggtgatgtatggtcagacttaacgagccccaattgtcaaacacttggatcaggtcataagcctgtttccttgtgctagcaggaccctgtacagcatttatcaagctctagtacctgtaatagcttttgtgatgacttctaggctgaataatactcagaggggatccgtctagcagtcga

SEQ ID NO: 628303 - DNA, 337 bp, Homo sapiens
tggcttccagcactttgggaggcagggcaggattgcttgaggcgaggagttcaagaccagcctgggtaacatattgacaccccgtctctacaaaaaatatttttaaaaaagaataagcagaccagcctggccaacacggtgaaacctcgtctttactaaaaatacaaaaaaagatttagccgggcggtagtggtgcacacctgtaatcccagctactcggaaactgaggtaggagaattgcctgagcctggggaggtgaaggttgtggtgagcggagatcgcgccactgcatcagagtgagacactttctgaaaataataataataagcaattagaa

SEQ ID NO: 628304 - DNA, 343 bp, Homo sapiens
tgagcttatcgttgaacaaacgaacctttaatagcggctgcaccatcggcgatgtcctgcatccaacatcgacggtcgtaaacccttattgttagagtattggactctacagttatgattgcgctgttatcctctagggtaacttgttccgttggtcaatttattggatcaattgagtatattaattcgctttgactggtgaagtcttaccatgtactgctcggaggttgggttccgctccgaggtcgtcccaagcgaaatttcaatgcatgtttcgttagtttaggacctgtgggattgtgatgtacctgaatgcattaataaattaaagctccatagggtc

SEQ ID NO: 628305 - DNA, 241 bp, Homo sapiens
aaaaaaggggggggcccccccccccccccccccttttgggggcccccaaggtggggggggggggccttttttgggggggggtttggggggaggaaacccccttgggggtgcccccccccccccccccccccgggggggtttttttttgggggggcccccccccccccccccccccgcccaaaaacattttttttttttttttttttgggggccaataaccccccccgggggtttcccccca

SEQ ID NO: 628306 - DNA, 119 bp, Homo sapiens
cttggaacgaacatgagagatagtgcaggaaaggggcctcggaaacgtgatctctaacagttaccgtgatttgatgctcgtcaccctatgcactaccatgagcgtatgacgcatgcttg

SEQ ID NO: 628307 - DNA, 713 bp, Homo sapiens
  misc_feature (500)..(500): n is a, c, g, or t
  misc_feature (530)..(530): n is a, c, g, or t
  misc_feature (536)..(536): n is a, c, g, or t
  misc_feature (558)..(558): n is a, c, g, or t
gtgggaggggtaggtgagcgtcgcgaggcagcgtgagcttctgagtgaacgcggtgcttttgggaacgcgggacgggcgacctgtggcgccaggagcgggccgaggcgcggggcgcggtgccgtctggatgggaagttacggtttacagcgaagtccacccagcgtttccgaggtgaaggcgccgcgccaggccgggcgggcggctggtgatgggcaagccgggtgtaccaagtccaggatgcacatgaggagcgtttgtagccgtcactgaatcacctcatgactagcggggcaggcctctaattcaccgcaggatttccgatctcactctgttgcccaggctggagtgcagtggcacaatcacagctgaccacaaccttgacctcccaaggctcaggtgatcctcctgcctcagcccccaagtagctgggacctacagacagggcctcactctattgcccaggctagagtgccgtggcaggatctcagctcactgcanctccactcctggctcaagcgatcctcccanctcagnctcctgagtagctgcgactatnggagtgtgccaccatgcctggcttaattttcatacttttgtagagatggggattcaacattgtttcccaggccatctgaaagcaaatcctgttcagatgcaggcgaaggttctggtgagccaggctctaccttaccgtccttacgacttttgagg

SEQ ID NO: 628308 - DNA, 620 bp, Homo sapiens
  misc_feature (20)..(20): n is a, c, g, or t
ccaaacactggcattcacanctttaaaaaaagatccaaggaactattcataatgatgaaattccaactacatacaaggaggagaaaataagaacccagtcataacagaggaattctataggagtctgcatcaattcattcttaaggttgcctactctctgttatgtgaattagcgtctgtgtttcacccattgtctgtgtttagtccttgttcaccactagggcaaggaattcttaactaggcctctgtttaccaacttctctttctcctcctttccctcttattcctccttctcctcttccttcttatataatgctagtatattctcaaaattgcaaagctgtgagaatattaaaataatcatggctaatgttccaataatgaggtctttgtgcatttagttccgcatatgatggttttttttttacattaaagagtatatgtgtcttaatgcagtcagattgtaaaaaacaaaaacaaagaaactaagaatcttactaaaaatcgataatgtcagttatctgttttgtccaatattggtagtacttttttgcctcttatgattcctctagcagataaataaaagaaacttttgccatccatgtgttctgtgttaaaaa

SEQ ID NO: 628309 - DNA, 628 bp, Homo sapiens
  misc_feature (20)..(20): n is a, c, g, or t
  misc_feature (591)..(591): n is a, c, g, or t
ccaaacactggcattcacanctttaaaaaaagatccaaggaactattcataatgatgaaattccaactacatacaaggaggagaaaataagaacccagtcataacagaggaattctataggagtctgcatcaattcattcttaaggttgcctactctctgttatgtgaattagcgtctgtgtttcacccattgtctgtgtttagtccttgttcaccactagggcaaggaattcttaactaggcctctgtttaccaacttctctttctcctcctttccctcttattcctccttctcctcttccttcttatataatgctagtatattctcaaaattgcaaagctgtgagaatattaaaataatcatggctaatgttccaataatgaggtctttgtgcatttagttccgcatatgatggttttttttttacattaaagagtatatgtgtcttaatgcagtcagattgtaaaaaacaaaaacaaagaaactaagaatcttactaaaaatcgataatgtcagttatctgttttgtccaatattggtagtacttttttgcctcttatgattcctctagcagataaataaaagaaggnagaggagaaggaggaataaggtcgacccggtccggaa

SEQ ID NO: 628310 - DNA, 328 bp, Homo sapiens
cccctggcctttttggtcccgggggacccggtggaggaaaaaatggccccggtggaactggtagggggaataggtggggcccccattccggtgggctttttggtaaaggcccttttggaatttggactttaaaaggggggggttccgcccgggggggggaaggtgggggtgggctagaaacaaaggtggaggggattttggcttttgaagaaggggaaattggggcccttgggggggaggggaaaaccccttgggttaatggacggggggggggggaaactcctggaattgaaaaaaagggctttttcccctttccttcccaaaatta

SEQ ID NO: 628311 - DNA, 573 bp, Homo sapiens
  misc_feature (6)..(6): n is a, c, g, or t
  misc_feature (46)..(46): n is a, c, g, or t
  misc_feature (573)..(573): n is a, c, g, or t
aaacgntaattagaacaacattttttctatcttttttcaacactgnatttttgggagatcgaatttaggactgacctttattgcacccctgagcgcggggaaagaatgggctttaaattttttgaacatttgtccccaaattcttgttgaccaaacatgcagggtatctatcaaggtgtgagggcaaatcttacggaagggaacatttcgcccaaatgcaaaacactcaacattcctgaactggttggcccggggcataggggaaaaccatttacttggaggagcttagaggcatatgaaaaggttctttgaatcccccatcacagtgtgagaggagagtataaaacacgggcgcggttacttcactgagatgtttcccatagcctaggcccttgacaagacagacaaatttttttactcacgcacctgcttatcttgaacagagcaattaccctgttgcacagagtatctgtgtacgaactatgggtaagtcttctataaaaaaaaagtagaacatgggatttactttggcactagggacataataaatttttgtccacccacaagtgaacn

SEQ ID NO: 628312 - DNA, 1223 bp, Homo sapiens
  misc_feature (672)..(672): n is a, c, g, or t
gacgtgggctcggcgcgatggagtggaggagatgcgtactgacgccaatatccgtgctgaatatggaacaggctccagccctcggaaggttcctggttgcagcctccggcaatttgtctgcgaactgaacctgctgtcgcgatcagatggctctgcttccttcctgcaacggtgacacctcatgtgcctgagtcgggtgtgtacgtggtccggtgccgagtgtgaaggtcagtcacaaggagatttatcaacaaggccacactcgaacgtgatcctgaggtccgacatgattgcggtcctagtccttggattgtttgctacgaagaaagtagcccgtgtgagtcgagcgtggtagtcaggtaagcatcagttggcgcagagctgtggtgcgctgcctgggcgactacggtgtagcaactcgctcgcgtgatccgtcccatacaacacggttgggatgtcgtagcctaggcgttgtgtacaaggccgagtgacccggtctactgcatcgcattggaccctggtatggtactggagagtgccccgtccttgccaatgtgtcctacttgggtaggatgcaaggattgctggctccagttgcggggcttcttcgttcctgatggaggtgtccgccatggcgcccctgggaactttccttgcaattgaggcaacccnccttcagctagacattgggattaccccttaaccattgcccacaaagtccacacgtacaaaacaggggacgtggcccccggagtcaaggttcccattggatcgcgtctttgctcgcttggtgaagcgaagtctgtttgggcaaaaccgtgaataggtcttagccttgaattggttccgaagtccaacccccaaagggtgaagacctacttggatcgtgcccaatgcaaccaaacctttgcacaggttctttcgcgaggccaaaggtatgaccgcgtaggggtcattttgccgcggactcccacaatgagggcctcccgccattttcaggatcaaaaagctagacgggttcttttccccggatgtttgcattagccccgggcggaacacaatcggccttggccaaggacagcaggcctgatttaaccctgtccccaaagaaggccgctggaagggggcccaatcggcccttgtgcgtgtgcccacaggggggggcctcggttgccccccgatttttggcgcgttgcccaatcccgaaggtttcaacacgccct

SEQ ID NO: 628313 - DNA, 1584 bp, Homo sapiens
  misc_feature (1192)..(1192): n is a, c, g, or t
ttttaatggggcttgggtgagggaggtagggggtagttggtgtttaatattttaagtggggtgatgaggaatagggtaaggagtatgggggtaattatgggtggggccaatacggtagtattatagttgggggcatttccgggaataggcctgaaaaatgtgttggtgggagaaagaaatgtataaattataccgccagatagaatattgatagtgagaaattgggattgtgggcggatagggttgggctcataggggtgtacgcctgtgagaaaatagggaggaaactcaggtagaattgaacgcctctccatatgtgatgtggcaaatatacaggcctcctatattgtgaatatggaccatatacatgtgtgagacatgtgggacgtctcacaaacgtgtgatatacacagtgtgtgaagtgtgtaatgtacacgcgcatgtgtccaaacatgtggtattgagcattttgtgtgcgtaatatcaccaatatgcgccccaagtccacatgcgcgcacacacatacccgagtgtggggaaacaaacgagacacaagagatatttggaatactcctataaagagagggcactcacaagagaggcacacttgcggcgcacgccaaggaaatcaatattacctcacattatatttggggcgttctccccgggtgtgggaaatgttgtttgtggcgcgagaaaaggttcacaaggctgattaacaacatataccctgatgtgtgggaaaacccgcaaccgccgcagttagaggggagcgaggaacatattagcagccgacacaagatagaaaacactactacaagactgggcggacaataaacacgacggttgtgaagggggtcgtgggaaaaccaaaacaatataaggatggcgacccaccagaagaggaagcgatgacatctaccacacaagcgggagacctcaccaacaaaatatcatcccaccagactaacacagggatgggtggacacaaccacacaattactacttataggttggcggggcgaggatggtggcgccactaccaacaaagcagcgcggaacagagatcaaaaaaaaccgacccacttaatataagagggagaataaaacgacccaccccaacaaatgtgtgtggaacagacttattaccttccacaatattaagagactcttccaaagaggcaacccacanatgtacacaccaccattgatagataggtgtgtattttaccccacaacaaggtagttggtgggggctcctcatccataatatgagagtgattgactaccccccgggaggagagagaataacgaaaacaacaaggagttataaaccaccaaactcatcaacgggggggcgacaacgcacatcatcataactattacccgcggatagaagcaactccacgtagggtgactaggcagcaaaaatagacagagcaaccaattatcatatatcacaccactactatccagcgaggagtaatgcacccacccgggaagaaagagaatagtccgacgaaacaacaataaaggggagtgagaatcaggcggcgcacaacaaaacacaccaaaagagggggg

SEQ ID NO: 628314 - DNA, 780 bp, Homo sapiens
gaacgaagggaattttgcttcagcctctttggcgggacaaggaagggatttcagtcaccctggaaggggccaatttcgggctgagatcaacatcttgctgtgtgagcaacccgtggtaccagcaagtcccagctgctgcatgtacgtgtacaaccatcgtcccctatggggccagtaccgacgtctgggaagggctccagtgcagttggctctcccttgcgtacgtcttgaaagaccctgagacaaggcagctggtcctgcagacaggtgcccttgtcctgagtgacaacggcatctgctgctatcgatgagttcgacaagatgactgaaagtacaagatcggtattgcatgaagtcatggcacagcactactctgtccatcgcaataggactgggatcatctgtcagctcaatgcgcgcacctctagtcctgagtctagccatgcattaatcccattgagatctcaagtggagactcctcatgagaaatcaagcattgaaacacatccaggtgcctcatagctttattgatcaaggtttgatttgatcttcctcatgctggaccctcaggacgaagcctactgacaggcgtctggctcaccacctggtcgcactgtactaccagagcgaggagcacggcagaggaggagctcctggacattggctgcgtgctaaaggacgtacattgcctacgcgcacagctaccatcatgctcgcggataagtgcaggaagccagccaggctctcatcgaggctttatgtagacatgacgacacactg

SEQ ID NO: 628315 - DNA, 1258 bp, Homo sapiens
  misc_feature (478)..(478): n is a, c, g, or t
  misc_feature (901)..(901): n is a, c, g, or t
cgcggcgggagcatgttcctggctcctgagctggatgcctgtggccgatgtgcttcctgcgtgtgcctgctgggtgcgtgctgtgtgcctgtggggctgctcctgcgctgccttgctcccggtggcttgtgcatgtgagtgtcctgtgggccctgatgtgtgcatggtgcctgccatccctgatgtctgctgcctgcactggtctggtgtgcccaggtgccttgctgcctgctgcttggcatgcgctacgccttgtgttcttcgagtgccctgcttgcgtgcagagcgagtgaggagccagcatggggagcccgactgtgggccgtctgcctgagtgactggggctggacgatggccgatggcaggaggattcaatccatgtcttgctagaatgcgaagccagaagttgaggcatttattgacacaggattgattggccaaggacaggacgggctagaagtttagattttttggcatngaaccggcctcgttccgctcttcggcacttaatcgagaactttgaatagaccagaggaaatgtgcccattcaacgtttaacagcctatagttgcacttttcgacgtgggcccaaaacttataaggcatttttaattacccgggcgcgtccagcgctttgaaaaacatttgccttggaacaaagcttttttttagaagtgcgcaaccaagatagaggttaagcctttcctttgggaagcgcggtgccattgaaagccatcggaggtgaccaaattgccaattacactttggaaaacgtttacccctaagaaggcttgggccaaggtattcttagttgacttggcgtgcatgaaaccaggaacgagcggaactttttggcctaagtatgccttaggcgactaattgcaggatttcgttgcaattntttcagagcgttccttaaggcagggcagaaccacagactttggaccaacggcagcacccaacgcgacgattacgccaggcaagaacgcatttacttgttcaggctcggaacggacggaaaacgcgccaaataagcccaagctttcattctttggcggccaattgttgccgtttaggacggcccttgttgtctcgcttacctatcgtggttcttcccagagcagcccgtccacaaggccaccaacagcgatgttattgcaaaaaagcttcttgcgagaattctgagagaaattacaaggtgcaagaacaccaaaagaccaattgtgcctgcataagtggaacctggggtaatagcatg

SEQ ID NO: 628316 - DNA, 399 bp, Homo sapiens
cgcttggcgctttcggttgcccaggctggtgtgcaatggcacaatctcagctcactgcaacctccacctcctgggttaaattctcctgcctgagcttcccgagtagctgggataaaaggcacacgccaccatgcctggctaatttttgtatttttagtagaagtggggtttcaccatgttggccaggctgctttcgaactcctgacctcaggtgatctgcctgcctcggcctcccaaagtgctgggattacaggcataagccattgcacccggcctctgtactccgcttttaattattttgggtatatatccagaagtggaattgctagatcatatggtaattctatgtttacttttttccatagcaactcgaaagcaccaagcggggtaccgagctcg

SEQ ID NO: 628317 - DNA, 185 bp, Homo sapiens
tgtgtcttccccggggttatgtataaatatagagagatgaggccttctctcccctgctctcccttccgctccgtgctgctctcccttccgctccgtgctgctcgccgcggtcccagctcctctttccacatgagggcgaagggaaggggggatgaacaagtcatcaccgaattgcaatcgtcgac

SEQ ID NO: 628318 - DNA, 161 bp, Homo sapiens
acaaggcatattctgacttcttgcaattcaaataagatggaggttcctacagagatctgattacctaaagccccatgcctgataagcattgatgtggaaagacacacacagacttggggcagagacgacagctgcacagtcatgggccatcgggaacgggg

SEQ ID NO: 628319 - DNA, 2862 bp, Homo sapiens
  misc_feature (1198)..(1198): n is a, c, g, or t
  misc_feature (1854)..(1854): n is a, c, g, or t
aaaacattcagagacagaaggtggatagacaaatctccaccttcagactggtaggctcctccagaagccatcagacaggaagatgtgaaaatccccagcactcatcccagaatcactaagtggcacctgtcctgggccaaagtcccaggacagacctcattgttcctctgtgggaatacctccccaggagggcatcctggatttcccccttgcaacccaggtcagaagtttcatcgtcaaggttgtttcatcttttttttcctgtctaacagctctgactaccacccaaccttgaggcacagtgaagacatcggtggccactccaataacagcaggtcacagctgctcttctggaggtgtcctacaggtgaaaagcccagcgacccagtcaggatttaagtttacctcaaaaatggaagattttaacatggagagtgacagctttgaagatttctggaaaggtgaagatcttagtaattacagttacagctctaccctgcccccttttctactagatgccgccccatgtgaaccagaatccctggaaatcaacaagtattttgtggtcattatctatgccctggtattcctgctgagcctgctgggaaactccctcgtgatgctggtcatcttatacagcagggtcggccgctccgtcactgatgtctacctgctgaacctagccttggccgacctactctttgccctgaccttgcccatctgggccgcctccaaggtgaatggctggatttttggcacattcctgtgcaaggtggtctcactcctgaaggaagtcaacttctatagtggcatcctgctactggcctgcatcagtgtggaccgttacctggccattgtccatgccacacgcacactgacccagaagcgctacttggtcaaattcatatgtctcagcatctggggtctgtccttgctcctggccctgcctgtcttacttttccgaaggaccgtctactcatccaatgttagcccagcctgctatgaggacatgggcaacaatacagcaaactggcggatgctgttacggatcctgccccagtcctttggcttcatcgtgccactgctgatcatgctgttctgctacggattcaccctgcgtacgctgtttaaggcccacatggggcagaagcaccgggccatgcgggtcatctttgctgtcgtcctcatcttcctgctntgctggctgccctacaacctggtcctgctggcagacaccctcatgaggacccaggtgatccaggagacctgtgagcgccgcaatcacatcgaccgggctctggatgccaccgagattctgggcatccttcacagctgcctcaaccccctcatctacgccttcattggccagaagtttcgccatggactcctcaagattctagctatacatggcttgatcagcaaggactccctgcccaaagacagcaggccttcctttgttggctcttcttcagggcacacttccactactctctaagacctcctgcctaagtgcagccccgtggggttcctcccttctcttcacagtcacattccaagcctcatgtccactggttcttcttggtctcagtgtcaatgcagcccccattgtggtcacaggaagtagaggaggccacgttcttactagtttcccttgcatggtttagaaagcttgccctggtgcctcaccccttgccataattactatgtcatttgctggagctctgcccatcctgcccctgagcccatggcactctatgttctaagaagtgaaaatctacactccagtgagacagctctgcatactcattaggatggctagtatcaaaagaaagaaaatcaggctggccaacgggntgaaaccctgtctctactaaaaatacaaaaaaaaaaaaaaattagccgggcgtggtggtgagtgcctgtaatcacagctacttgggaggctgagatgggagaatcacttgaacccgggagcagaggttgcagtgagccgagattgtgcccctgccatccagcctgagcgacagtgagactctgtctcagtccatgaagatgtagaggagaaactggaactctcgagcgttgctgggggggattgtaaaatggtgtgaccactgcagaagacagtatggcagctttcctcaaaacttcagacatagaattaacacatgatcctgcaattccacttataggaattgacccacaagaaatgaaagcagggacttgaacccatatttgtacaccaatattcatagcagcttattcacaagacccaaaaggcagaagcaacccaaatgttcatcaatgaatgaatgaatggctaagcaaaatgtgatatgtacctaacgaagtatccttcagcctgaaagaggaatgaagtactcatacatgttacaacacggacgaaccttgaaaactttatgctaagtgaaataagccagacatcaacagataaatagtttatgattccacctacatgaggtactgagagtgaacaaatttacagagacagaaagcagaacagtgattaccagggactgaggggaggggagcatgggaagtgacggtttaatgggcacagggtttatgtttaggatgttgaaaaagttctgcagataaacagtagtgatagttgtaccgcaatgtgacttaatgccactaaattgacacttaaaaatggtttaaatggtcaattttgttatgtatattttatatcaatttaaaaaaaaacctgagccccaaaaggtattttaatcaccaaggctgattaaaccaaggctagaaccacctgcctatattttttgttaaatgatttcattcaatatcttttttttaataaaccatttttacttgggtgtttat

SEQ ID NO: 628320 - DNA, 306 bp, Homo sapiens
ctaggggcctgctctgtcgcccatgctggagtgcagtggcacaaacacagcggactgcagccttgacctcccaggctcatgcaaccctcccacctcggcctctcaagaaactgggaccacagcccccacctaggaactgactcagagcaagaagacagctccgactccctgtgatttcatccctgaccaatcagctcttctagctcactggcttcccccaacccacgaagttgtccttaaaaactctgctcccgactgctgggagagactgatttgagtaataaacaactggcctcgttggcctca

SEQ ID NO: 628321 - DNA, 888 bp, Homo sapiens
  misc_feature (664)..(664): n is a, c, g, or t
  misc_feature (696)..(696): n is a, c, g, or t
gaaaaaaaaactaatttccttcccaatattaggacttagaaaagctctaggtcccgcaattggaatttagcctaggggaatcaaaatagtaggagcataactctgggtttccttttcaaaatcccacacctcatccttcctgcgaccgcatgttaccaacattggtagttccaaggacaggtgcgtgtccatcccggtgtggcaacatcctgtaaaacaagtgctcagctctaggggaatgaaggctgttggctggctgatactgaaatagaccttttctctacagacatccctcctaccaacgcagggacttcactgaagatgctatttcaccaaaatctgcaattgtaaactgaaggacatcgcatgttaaaatgtggggaccatggtcaggtcatcatgtgattgtccatatagtccctgtcttctttcctgcaacaacggacactttctggttgtttcacaagcaaggcagtttttggattataccagactagactccacaggtgtaaacgtcctaacttgtgggggcaactgtgccagaagatagaagagagtaccgctgacggatgtgttcaatatctccagcagagggagtgtttcagataacgtggctctcggacatacttgactccaactcttgctatttaacaattattagtgngccaacttaaaattgtcagtgcgcgtgccttnttgggaacaccagtgggccttgtgagagaataaataccggcctatatgcccagtggttggagccggaagtggttccataaaaaaccccccgcgattgccgaggggggtcaacaaacgggagagttacatacacagacgcccggggggtcacacacgcacaacctgacaggcgctaccatatatagtggcaga

SEQ ID NO: 628322 - DNA, 3242 bp, Homo sapiens
  misc_feature (1)..(1): n is a, c, g, or t
  misc_feature (1578)..(1578): n is a, c, g, or t
  misc_feature (2234)..(2234): n is a, c, g, or t
naatttgcgttccttgggagaagccccagctctgtctgcagtggcgtaccaggggggaacaaggatcccttctctaagacccttcacaataccagaggctgcctgcctattgggtagaggtgcaaactttcccccactctgcccagcacagcaattgtctctgcaataggaaacttcccaccagtgaaaagatctgggactcaagccctgccattcagattcttttgttccacagggtattcccttgatgtgatgttcttccccttcctctaggaatgggacttcctggaagccagactacagtgctcttctgggtctagccacccagtgggcctaccagactctgggctggtgctagggaatgtctgcaagggatccagtggtgttacctgtcttcaagactcccagcagtgaataccagcaccatctctgacagaagtgggaggggagtgatgcaaactctgcaagattccttggttgtagatagacttagagtattgactttctcaaatgctggttataattatagtgaacttatcacgtggacagacgcaggacttctggttagccagggtgttgtaagcagtggtgatagctgagaatatgcagccgttttctccttcctgggtacagtgctattctgcctagagagctctgactaccacccaaccttgaggcacagtgaagacatcggtggccactccaataacagcaggtcacagctgctcttctggaggtgtcctacaggtgaaaagcccagcgacccagtcaggatttaagtttacctcaaaaatggaagattttaacatggagagtgacagctttgaagatttctggaaaggtgaagatcttagtaattacagttacagctctaccctgcccccttttctactagatgccgccccatgtgaaccagaatccctggaaatcaacaagtattttgtggtcattatctatgccctggtattcctgctgagcctgctgggaaactccctcgtgatgctggtcatcttatacagcagggtcggccgctccgtcactgatgtctacctgctgaacctagccttggccgacctactctttgccctgaccttgcccatctgggccgcctccaaggtgaatggctggatttttggcacattcctgtgcaaggtggtctcactcctgaaggaagtcaacttctatagtggcatcctgctactggcctgcatcagtgtggaccgttacctggccattgtccatgccacacgcacactgacccagaagcgctacttggtcaaattcatatgtctcagcatctggggtctgtccttgctcctggccctgcctgtcttacttttccgaaggaccgtctactcatccaatgttagcccagcctgctatgaggacatgggcaacaatacagcaaactggcggatgctgttacggatcctgccccagtcctttggcttcatcgtgccactgctgatcatgctgttctgctacggattcaccctgcgtacgctgtttaaggcccacatggggcagaagcaccgggccatgcgggtcatctttgctgtcgtcctcatcttcctgctntgctggctgccctacaacctggtcctgctggcagacaccctcatgaggacccaggtgatccaggagacctgtgagcgccgcaatcacatcgaccgggctctggatgccaccgagattctgggcatccttcacagctgcctcaaccccctcatctacgccttcattggccagaagtttcgccatggactcctcaagattctagctatacatggcttgatcagcaaggactccctgcccaaagacagcaggccttcctttgttggctcttcttcagggcacacttccactactctctaagacctcctgcctaagtgcagccccgtggggttcctcccttctcttcacagtcacattccaagcctcatgtccactggttcttcttggtctcagtgtcaatgcagcccccattgtggtcacaggaagtagaggaggccacgttcttactagtttcccttgcatggtttagaaagcttgccctggtgcctcaccccttgccataattactatgtcatttgctggagctctgcccatcctgcccctgagcccatggcactctatgttctaagaagtgaaaatctacactccagtgagacagctctgcatactcattaggatggctagtatcaaaagaaagaaaatcaggctggccaacgggntgaaaccctgtctctactaaaaatacaaaaaaaaaaaaaaattagccgggcgtggtggtgagtgcctgtaatcacagctacttgggaggctgagatgggagaatcacttgaacccgggagcagaggttgcagtgagccgagattgtgcccctgccatccagcctgagcgacagtgagactctgtctcagtccatgaagatgtagaggagaaactggaactctcgagcgttgctgggggggattgtaaaatggtgtgaccactgcagaagacagtatggcagctttcctcaaaacttcagacatagaattaacacatgatcctgcaattccacttataggaattgacccacaagaaatgaaagcagggacttgaacccatatttgtacaccaatattcatagcagcttattcacaagacccaaaaggcagaagcaacccaaatgttcatcaatgaatgaatgaatggctaagcaaaatgtgatatgtacctaacgaagtatccttcagcctgaaagaggaatgaagtactcatacatgttacaacacggacgaaccttgaaaactttatgctaagtgaaataagccagacatcaacagataaatagtttatgattccacctacatgaggtactgagagtgaacaaatttacagagacagaaagcagaacagtgattaccagggactgaggggaggggagcatgggaagtgacggtttaatgggcacagggtttatgtttaggatgttgaaaaagttctgcagataaacagtagtgatagttgtaccgcaatgtgacttaatgccactaaattgacacttaaaaatggtttaaatggtcaattttgttatgtatattttatatcaatttaaaaaaaaacctgagccccaaaaggtattttaatcaccaaggctgattaaaccaaggctagaaccacctgcctatattttttgttaaatgatttcattcaatatcttttttttaataaaccatttttacttgggtgtttat

SEQ ID NO: 628323 - DNA, 619 bp, Homo sapiens
agcgggcgacgcgtttccgggggcgggggggtgggggtggggagggggcggtcaggccggcggggtggggcggtggagaggcgggagagctctgtcccggctgctcccacagcccggcggctgccgcaaacccgcgcgtgcgcagtagcggccacctgctggtacctgggccggtctgggatccccgggatgcccaggaaagaatggcagttctccgctgtgtggagtctctcaccgggcctagacctagaaggcaggaatcccaggccggtcagcccggtggagggggcggggcggagacacgcccctccgtagccagccaggtgtttccccgcgaaagagaggcacgcctggccgaagcaaccgacccgtcccaaccccgcgtctagagctcctccagcagagcccggtattcttcctcgctgaggggtgcttccagcgaggcggctcttccgaggactccagctcccccggggtctccgtttctgggaaagggttagacggcagataaactgtttcacgttagacctgtaacccaaggagatgtgtatagagctgagatgaagaaattccgtaaaatattcagatatatatgcaaatgaaggtgactgtagaaaag

SEQ ID NO: 628324 - DNA, 2667 bp, Homo sapiens
  misc_feature (1003)..(1003): n is a, c, g, or t
  misc_feature (1659)..(1659): n is a, c, g, or t
ggggaggtgaggaagtggagagagcagctgtggtggctgaagggtgctaggacagagggagcatgataaagccatagctctgactaccacccaaccttgaggcacagtgaagacatcggtggccactccaataacagcaggtcacagctgctcttctggaggtgtcctacaggtgaaaagcccagcgacccagtcaggatttaagtttacctcaaaaatggaagattttaacatggagagtgacagctttgaagatttctggaaaggtgaagatcttagtaattacagttacagctctaccctgcccccttttctactagatgccgccccatgtgaaccagaatccctggaaatcaacaagtattttgtggtcattatctatgccctggtattcctgctgagcctgctgggaaactccctcgtgatgctggtcatcttatacagcagggtcggccgctccgtcactgatgtctacctgctgaacctagccttggccgacctactctttgccctgaccttgcccatctgggccgcctccaaggtgaatggctggatttttggcacattcctgtgcaaggtggtctcactcctgaaggaagtcaacttctatagtggcatcctgctactggcctgcatcagtgtggaccgttacctggccattgtccatgccacacgcacactgacccagaagcgctacttggtcaaattcatatgtctcagcatctggggtctgtccttgctcctggccctgcctgtcttacttttccgaaggaccgtctactcatccaatgttagcccagcctgctatgaggacatgggcaacaatacagcaaactggcggatgctgttacggatcctgccccagtcctttggcttcatcgtgccactgctgatcatgctgttctgctacggattcaccctgcgtacgctgtttaaggcccacatggggcagaagcaccgggccatgcgggtcatctttgctgtcgtcctcatcttcctgctntgctggctgccctacaacctggtcctgctggcagacaccctcatgaggacccaggtgatccaggagacctgtgagcgccgcaatcacatcgaccgggctctggatgccaccgagattctgggcatccttcacagctgcctcaaccccctcatctacgccttcattggccagaagtttcgccatggactcctcaagattctagctatacatggcttgatcagcaaggactccctgcccaaagacagcaggccttcctttgttggctcttcttcagggcacacttccactactctctaagacctcctgcctaagtgcagccccgtggggttcctcccttctcttcacagtcacattccaagcctcatgtccactggttcttcttggtctcagtgtcaatgcagcccccattgtggtcacaggaagtagaggaggccacgttcttactagtttcccttgcatggtttagaaagcttgccctggtgcctcaccccttgccataattactatgtcatttgctggagctctgcccatcctgcccctgagcccatggcactctatgttctaagaagtgaaaatctacactccagtgagacagctctgcatactcattaggatggctagtatcaaaagaaagaaaatcaggctggccaacgggntgaaaccctgtctctactaaaaatacaaaaaaaaaaaaaaattagccgggcgtggtggtgagtgcctgtaatcacagctacttgggaggctgagatgggagaatcacttgaacccgggagcagaggttgcagtgagccgagattgtgcccctgccatccagcctgagcgacagtgagactctgtctcagtccatgaagatgtagaggagaaactggaactctcgagcgttgctgggggggattgtaaaatggtgtgaccactgcagaagacagtatggcagctttcctcaaaacttcagacatagaattaacacatgatcctgcaattccacttataggaattgacccacaagaaatgaaagcagggacttgaacccatatttgtacaccaatattcatagcagcttattcacaagacccaaaaggcagaagcaacccaaatgttcatcaatgaatgaatgaatggctaagcaaaatgtgatatgtacctaacgaagtatccttcagcctgaaagaggaatgaagtactcatacatgttacaacacggacgaaccttgaaaactttatgctaagtgaaataagccagacatcaacagataaatagtttatgattccacctacatgaggtactgagagtgaacaaatttacagagacagaaagcagaacagtgattaccagggactgaggggaggggagcatgggaagtgacggtttaatgggcacagggtttatgtttaggatgttgaaaaagttctgcagataaacagtagtgatagttgtaccgcaatgtgacttaatgccactaaattgacacttaaaaatggtttaaatggtcaattttgttatgtatattttatatcaatttaaaaaaaaacctgagccccaaaaggtattttaatcaccaaggctgattaaaccaaggctagaaccacctgcctatattttttgttaaatgatttcattcaatatcttttttttaataaaccatttttacttgggtgtttat

SEQ ID NO: 628325 - DNA, 2642 bp, Homo sapiens
  misc_feature (978)..(978): n is a, c, g, or t
  misc_feature (1634)..(1634): n is a, c, g, or t
aaaacattcagagacagaaggtggatagacaaatctccaccttcagactgagctctgactaccacccaaccttgaggcacagtgaagacatcggtggccactccaataacagcaggtcacagctgctcttctggaggtgtcctacaggtgaaaagcccagcgacccagtcaggatttaagtttacctcaaaaatggaagattttaacatggagagtgacagctttgaagatttctggaaaggtgaagatcttagtaattacagttacagctctaccctgcccccttttctactagatgccgccccatgtgaaccagaatccctggaaatcaacaagtattttgtggtcattatctatgccctggtattcctgctgagcctgctgggaaactccctcgtgatgctggtcatcttatacagcagggtcggccgctccgtcactgatgtctacctgctgaacctagccttggccgacctactctttgccctgaccttgcccatctgggccgcctccaaggtgaatggctggatttttggcacattcctgtgcaaggtggtctcactcctgaaggaagtcaacttctatagtggcatcctgctactggcctgcatcagtgtggaccgttacctggccattgtccatgccacacgcacactgacccagaagcgctacttggtcaaattcatatgtctcagcatctggggtctgtccttgctcctggccctgcctgtcttacttttccgaaggaccgtctactcatccaatgttagcccagcctgctatgaggacatgggcaacaatacagcaaactggcggatgctgttacggatcctgccccagtcctttggcttcatcgtgccactgctgatcatgctgttctgctacggattcaccctgcgtacgctgtttaaggcccacatggggcagaagcaccgggccatgcgggtcatctttgctgtcgtcctcatcttcctgctntgctggctgccctacaacctggtcctgctggcagacaccctcatgaggacccaggtgatccaggagacctgtgagcgccgcaatcacatcgaccgggctctggatgccaccgagattctgggcatccttcacagctgcctcaaccccctcatctacgccttcattggccagaagtttcgccatggactcctcaagattctagctatacatggcttgatcagcaaggactccctgcccaaagacagcaggccttcctttgttggctcttcttcagggcacacttccactactctctaagacctcctgcctaagtgcagccccgtggggttcctcccttctcttcacagtcacattccaagcctcatgtccactggttcttcttggtctcagtgtcaatgcagcccccattgtggtcacaggaagtagaggaggccacgttcttactagtttcccttgcatggtttagaaagcttgccctggtgcctcaccccttgccataattactatgtcatttgctggagctctgcccatcctgcccctgagcccatggcactctatgttctaagaagtgaaaatctacactccagtgagacagctctgcatactcattaggatggctagtatcaaaagaaagaaaatcaggctggccaacgggntgaaaccctgtctctactaaaaatacaaaaaaaaaaaaaaattagccgggcgtggtggtgagtgcctgtaatcacagctacttgggaggctgagatgggagaatcacttgaacccgggagcagaggttgcagtgagccgagattgtgcccctgccatccagcctgagcgacagtgagactctgtctcagtccatgaagatgtagaggagaaactggaactctcgagcgttgctgggggggattgtaaaatggtgtgaccactgcagaagacagtatggcagctttcctcaaaacttcagacatagaattaacacatgatcctgcaattccacttataggaattgacccacaagaaatgaaagcagggacttgaacccatatttgtacaccaatattcatagcagcttattcacaagacccaaaaggcagaagcaacccaaatgttcatcaatgaatgaatgaatggctaagcaaaatgtgatatgtacctaacgaagtatccttcagcctgaaagaggaatgaagtactcatacatgttacaacacggacgaaccttgaaaactttatgctaagtgaaataagccagacatcaacagataaatagtttatgattccacctacatgaggtactgagagtgaacaaatttacagagacagaaagcagaacagtgattaccagggactgaggggaggggagcatgggaagtgacggtttaatgggcacagggtttatgtttaggatgttgaaaaagttctgcagataaacagtagtgatagttgtaccgcaatgtgacttaatgccactaaattgacacttaaaaatggtttaaatggtcaattttgttatgtatattttatatcaatttaaaaaaaaacctgagccccaaaaggtattttaatcaccaaggctgattaaaccaaggctagaaccacctgcctatattttttgttaaatgatttcattcaatatcttttttttaataaaccatttttacttgggtgtttat

SEQ ID NO: 628326 - DNA, 298 bp, Homo sapiens
cccccctggttttttaaaaggaggggggggcgggggccctttttttccccccccggtttttggggggggaaaaaaaaaaaaaaagcggggggggcccccccttttttttttttttttcccctttccaaaaaaaaggggcccccgtttttgggggaaatttttcccccgcccccccaaaaaaaaaaccccccggttttttttcccccgggcgggttccgggggcccgggggttttttttttccccccccccgtttggggtttttccccaaaagggtccccggttgtggggcccccccca

SEQ ID NO: 628327 - DNA, 2655 bp, Homo sapiens
  misc_feature (991)..(991): n is a, c, g, or t
  misc_feature (1647)..(1647): n is a, c, g, or t
atgtaccatttatcaccaaatttatctcataacctaagagctaccacttacaaatttgaagggaaaaattactacattgtaatactcaagccaacacaaagaatcctatcccagtttcttgagtggatgggcaagaatatggggaatttattatgcagtaaccttcatctctcttctacagtcaggatttaagtttacctcaaaaatggaagattttaacatggagagtgacagctttgaagatttctggaaaggtgaagatcttagtaattacagttacagctctaccctgcccccttttctactagatgccgccccatgtgaaccagaatccctggaaatcaacaagtattttgtggtcattatctatgccctggtattcctgctgagcctgctgggaaactccctcgtgatgctggtcatcttatacagcagggtcggccgctccgtcactgatgtctacctgctgaacctagccttggccgacctactctttgccctgaccttgcccatctgggccgcctccaaggtgaatggctggatttttggcacattcctgtgcaaggtggtctcactcctgaaggaagtcaacttctatagtggcatcctgctactggcctgcatcagtgtggaccgttacctggccattgtccatgccacacgcacactgacccagaagcgctacttggtcaaattcatatgtctcagcatctggggtctgtccttgctcctggccctgcctgtcttacttttccgaaggaccgtctactcatccaatgttagcccagcctgctatgaggacatgggcaacaatacagcaaactggcggatgctgttacggatcctgccccagtcctttggcttcatcgtgccactgctgatcatgctgttctgctacggattcaccctgcgtacgctgtttaaggcccacatggggcagaagcaccgggccatgcgggtcatctttgctgtcgtcctcatcttcctgctntgctggctgccctacaacctggtcctgctggcagacaccctcatgaggacccaggtgatccaggagacctgtgagcgccgcaatcacatcgaccgggctctggatgccaccgagattctgggcatccttcacagctgcctcaaccccctcatctacgccttcattggccagaagtttcgccatggactcctcaagattctagctatacatggcttgatcagcaaggactccctgcccaaagacagcaggccttcctttgttggctcttcttcagggcacacttccactactctctaagacctcctgcctaagtgcagccccgtggggttcctcccttctcttcacagtcacattccaagcctcatgtccactggttcttcttggtctcagtgtcaatgcagcccccattgtggtcacaggaagtagaggaggccacgttcttactagtttcccttgcatggtttagaaagcttgccctggtgcctcaccccttgccataattactatgtcatttgctggagctctgcccatcctgcccctgagcccatggcactctatgttctaagaagtgaaaatctacactccagtgagacagctctgcatactcattaggatggctagtatcaaaagaaagaaaatcaggctggccaacgggntgaaaccctgtctctactaaaaatacaaaaaaaaaaaaaaattagccgggcgtggtggtgagtgcctgtaatcacagctacttgggaggctgagatgggagaatcacttgaacccgggagcagaggttgcagtgagccgagattgtgcccctgccatccagcctgagcgacagtgagactctgtctcagtccatgaagatgtagaggagaaactggaactctcgagcgttgctgggggggattgtaaaatggtgtgaccactgcagaagacagtatggcagctttcctcaaaacttcagacatagaattaacacatgatcctgcaattccacttataggaattgacccacaagaaatgaaagcagggacttgaacccatatttgtacaccaatattcatagcagcttattcacaagacccaaaaggcagaagcaacccaaatgttcatcaatgaatgaatgaatggctaagcaaaatgtgatatgtacctaacgaagtatccttcagcctgaaagaggaatgaagtactcatacatgttacaacacggacgaaccttgaaaactttatgctaagtgaaataagccagacatcaacagataaatagtttatgattccacctacatgaggtactgagagtgaacaaatttacagagacagaaagcagaacagtgattaccagggactgaggggaggggagcatgggaagtgacggtttaatgggcacagggtttatgtttaggatgttgaaaaagttctgcagataaacagtagtgatagttgtaccgcaatgtgacttaatgccactaaattgacacttaaaaatggtttaaatggtcaattttgttatgtatattttatatcaatttaaaaaaaaacctgagccccaaaaggtattttaatcaccaaggctgattaaaccaaggctagaaccacctgcctatattttttgttaaatgatttcattcaatatcttttttttaataaaccatttttacttgggtgtttat

SEQ ID NO: 628328 - DNA, 2628 bp, Homo sapiens
  misc_feature (964)..(964): n is a, c, g, or t
  misc_feature (1620)..(1620): n is a, c, g, or t
gacctggttctccttgctgagttctctaccttctgtcctgacttgcatgctctccctctggaacctgaagctgacccataatgcctgggagcatgagctcacccatacacctccagcccacccccagcacagctgagcactggattatccacagtcaggatttaagtttacctcaaaaatggaagattttaacatggagagtgacagctttgaagatttctggaaaggtgaagatcttagtaattacagttacagctctaccctgcccccttttctactagatgccgccccatgtgaaccagaatccctggaaatcaacaagtattttgtggtcattatctatgccctggtattcctgctgagcctgctgggaaactccctcgtgatgctggtcatcttatacagcagggtcggccgctccgtcactgatgtctacctgctgaacctagccttggccgacctactctttgccctgaccttgcccatctgggccgcctccaaggtgaatggctggatttttggcacattcctgtgcaaggtggtctcactcctgaaggaagtcaacttctatagtggcatcctgctactggcctgcatcagtgtggaccgttacctggccattgtccatgccacacgcacactgacccagaagcgctacttggtcaaattcatatgtctcagcatctggggtctgtccttgctcctggccctgcctgtcttacttttccgaaggaccgtctactcatccaatgttagcccagcctgctatgaggacatgggcaacaatacagcaaactggcggatgctgttacggatcctgccccagtcctttggcttcatcgtgccactgctgatcatgctgttctgctacggattcaccctgcgtacgctgtttaaggcccacatggggcagaagcaccgggccatgcgggtcatctttgctgtcgtcctcatcttcctgctntgctggctgccctacaacctggtcctgctggcagacaccctcatgaggacccaggtgatccaggagacctgtgagcgccgcaatcacatcgaccgggctctggatgccaccgagattctgggcatccttcacagctgcctcaaccccctcatctacgccttcattggccagaagtttcgccatggactcctcaagattctagctatacatggcttgatcagcaaggactccctgcccaaagacagcaggccttcctttgttggctcttcttcagggcacacttccactactctctaagacctcctgcctaagtgcagccccgtggggttcctcccttctcttcacagtcacattccaagcctcatgtccactggttcttcttggtctcagtgtcaatgcagcccccattgtggtcacaggaagtagaggaggccacgttcttactagtttcccttgcatggtttagaaagcttgccctggtgcctcaccccttgccataattactatgtcatttgctggagctctgcccatcctgcccctgagcccatggcactctatgttctaagaagtgaaaatctacactccagtgagacagctctgcatactcattaggatggctagtatcaaaagaaagaaaatcaggctggccaacgggntgaaaccctgtctctactaaaaatacaaaaaaaaaaaaaaattagccgggcgtggtggtgagtgcctgtaatcacagctacttgggaggctgagatgggagaatcacttgaacccgggagcagaggttgcagtgagccgagattgtgcccctgccatccagcctgagcgacagtgagactctgtctcagtccatgaagatgtagaggagaaactggaactctcgagcgttgctgggggggattgtaaaatggtgtgaccactgcagaagacagtatggcagctttcctcaaaacttcagacatagaattaacacatgatcctgcaattccacttataggaattgacccacaagaaatgaaagcagggacttgaacccatatttgtacaccaatattcatagcagcttattcacaagacccaaaaggcagaagcaacccaaatgttcatcaatgaatgaatgaatggctaagcaaaatgtgatatgtacctaacgaagtatccttcagcctgaaagaggaatgaagtactcatacatgttacaacacggacgaaccttgaaaactttatgctaagtgaaataagccagacatcaacagataaatagtttatgattccacctacatgaggtactgagagtgaacaaatttacagagacagaaagcagaacagtgattaccagggactgaggggaggggagcatgggaagtgacggtttaatgggcacagggtttatgtttaggatgttgaaaaagttctgcagataaacagtagtgatagttgtaccgcaatgtgacttaatgccactaaattgacacttaaaaatggtttaaatggtcaattttgttatgtatattttatatcaatttaaaaaaaaacctgagccccaaaaggtattttaatcaccaaggctgattaaaccaaggctagaaccacctgcctatattttttgttaaatgatttcattcaatatcttttttttaataaaccatttttacttgggtgtttat

SEQ ID NO: 628329 - DNA, 1210 bp, Homo sapiens
cacccatttgctgtgagtgacgacaccacgtcctcatctccactgaatttatattcgttggctgacgggagtgcggggaaacaagacaataaagtcggctaaacagtacctaactaagtacaaacaagctctggacctgagtctacacgatctgtgcactgaactcgccgcagacaacactgaaccaactgcagccacactgcagcgtacgcacctacgtgcaggcgcggagtgacgtacgacttctcacgcccacgcagagcactgacgggcactacgccgtcatccacaggcaggctgcacactgtgcacttgaagaccgtgagccactgaggcagctctgagatgaacagctactattccaggcagaggaaacagcaggtgcaaaggcctgaagtcatgcatcagctcagctttcgtgtaggaaaacactctgacctcagctggcttaacaccaaataatcgttcataatctcatgatgtctgtgggatcagaggatccaggctgagccctacgccatgtgcctgtacggtgataggacaggctagcagaggataatcccagcccactgacaggcaataaacccaatcggcactcagagtgggcaagagtgcgcctaggtccaaccagagatccaggcacgcgatgtgccactgtggcgaaacagcggtcaccacgcagacggaccatccacagatcaaactaacacgcccttacaccaatatatcagactacctacttgctccctacctgaaaaccaagaaacacatgacccgagcactaacaggggcatgcaacagagacggaatccacaactcacatggatagccgaccgccgacgccaaccatgaaacagcaagacacaacccatcatccaaccacctcacacaagctcacggcgaaaccacatgagagcacacacacacacaagagggctacaaccacaaaaagagagcaacaacacataccaacaccacaagcacagcatcaaaccacgcaaatcaccccctcacacaacccccatcacaacgccaaccacacactgaccacagcggcgaacaacacgagaacacacgacacaccccaggcgccaccgccggcctaacgaaccaacaaccacagcgcaacacaacacacccaacaaacaaaaaacggcacaaacagacgacagccacaaaagaacaaaaaaacaacacacgcaggaacagt

SEQ ID NO: 628330 - DNA, 383 bp, Homo sapiens
tctacataaacgcttaatgtgtcactcatttaacccttaccagccaatcttgaacgttggacattcttctccccactatatatggataggaaactgaggcacagagtggttgaggaatgtgcccaagatcacaccactaggaagcaacgagccagggtgtacctactacaaaggctcccttgagaggtggtttccaaggacgggcccacgcacaggtacacagagagcctcagcatgcccagtgttctgcaaagcagccgggagtaagacgaagaaggctcagaattttcctgcattttccctgttccttgcccccggaagctgtgcctgaatataggcctttcactaggtagagtggtacactcagcccctcatcttacagt

SEQ ID NO: 628331 - DNA, 799 bp, Homo sapiens
  misc_feature (1)..(1): n is a, c, g, or t
  misc_feature (685)..(685): n is a, c, g, or t
  misc_feature (716)..(716): n is a, c, g, or t
  misc_feature (718)..(718): n is a, c, g, or t
  misc_feature (725)..(725): n is a, c, g, or t
  misc_feature (729)..(730): n is a, c, g, or t
  misc_feature (765)..(765): n is a, c, g, or t
naatttgcgttccttgggagaagccccagctctgtctgcagtggcgtaccaggggggaacaaggatcccttctctaagacccttcacaataccagaggctgcctgcctattgggtagaggtgcaaactttcccccactctgcccagcacagcaattgtctctgcaataggaaacttcccaccagtgaaaagatctgggactcaagccctgccattcagattcttttgttccacagggtattcccttgatgtgatgttcttccccttcctctaggaatgggacttcctggaagccagactacagtgctcttctgggtctagccacccagtgggcctaccagactctgggctggtgctagggaatgtctgcaagggatccagtggtgttacctgtcttcaagactcccagcagtgaataccagcaccatctctgacagaagtgggaggggagtgatgcaaactctgcaagattccttggttgtagatagacttagagtattgactttctcaaatgctggttataattatagtgaacttatcacgtggacagacgcaggacttctggttagccagggtgttgtaagcagtggtgatagctgagaatatgcagccgttttctccttcctgggtacagtgctattctgcctagaggtgagtttttgcctgtctcacagagtaggctgcancctgccacttctttcaaaagttctgtgatcngntcagctntccnntcagttccctgctgtcgccccaaacttttttctgncttggcgggagtgactttgtgggatgtggcagag

SEQ ID NO: 628332 - DNA, 1382 bp, Homo sapiens
taaatgtccagttccctttaaaaacccccatctccctgtgaaagggcaggtgtgcaggcagcttaggttgagtggcaaaaaatgtgtttcactttgaaaattctttgcccgtgattgtgaaggctttgtgcccacatgtgcgtggaagggcccccttcccagagaaaagttacttctcgaacccacggcgttctgtgggctcctccttcgcgctgtgccagggtatctccagtattctccgcacagtgtgtttatatgaccctcgataagttcacaccgtgtcacaatctcgtggaacttcaggcgagaaagggacaagctctctcgtgggtctctccgagaaagacccccaaacatctacacagaaaatatgggactgtctgagcttatatgtgtgtgggtttcccaagaaagaaggtatgagatccacttgaggcaaacaagtgcatttctatccctccagtcttggtccacatgtccgcgctgggagaacctatttccccagtgtgagaatgacaaaggatgtgcgcgactctctccattgagaaaggtgtctcttgcgaatgtgagagttttctccttacacggggagaaaccgcgagaataatctcctggagatgtaaccccacccagtgtggggaccccatcgcgcctgctcctctatatatttcacaaagtgttggctcccccccaaaaggaaactatttcattggggccaatggggcgccccacacacaagcacagactgtcgtgttgtgttccccctcccattttgggagggattgtttaaccttgtgcggcccgccttataaaattttgcacattatcccaagacacaaccacaaagggggaacctctctagggggggcccactggttgtatgcccagaacacggggtgttcccctttgggctctcttggggggtctttccagggcaaggctcatggcggccttgtgtttctcccccttttttcctatccctatttcttgccctgcccctcacacggggaagccctgggtgtcgccagggcccggcctcttattgatatcctctcgccgtcccgttatcgcgcgctcaggtcctgtgggggactcatttgagggcgtttctttcttttcccccggtttgtaaaccccccttctctcgttttccccggcgggaccgtcttgaccccctttacataaacgagaactggggcatcctctttgccacaccactttttttaacgcactttccacaccggtgggccaccattatctatctcaagcagcaaatttgtaccttactggtccccaagatactaggcccacaaaattgtagggcccttgataaacacgccataggttagaaaccccaactgctgtggtcactggtcacaccc

SEQ ID NO: 628333 - DNA, 410 bp, Homo sapiens
ttgcaagtaagtaagtttcttcaaagaagacctatatacaaaacctctccaatagacccaagggttgcgctggccggtggaaggcagccatctacagtgaggaccagcggggtgcattgacgtgcagcctacacaagggagcgtggttcctagtctgcagcggtaccctggtgaatgagcgcactgtggtggtggctgcccactgtgttactgacctgggggagggtcaccaatgatcaagacagcagacctgaaagtagtaggggggaaaattctaccgggatgatgaccgggatgagaagaccatccagagcctacagatttctgctatcattctgcatcccaactaatgaccccatcctgcttgattgctgacatcgccatcctgaagctcctagacaagccacggt

SEQ ID NO: 628334 - DNA, 110 bp, Homo sapiens
cgacatggtggtggtgggttttttggtttgtatttgggttttgtttttgttttagttttgtccattcagccactctatatctttgactggagggtgggtcagaacataag

SEQ ID NO: 628335 - DNA, 241 bp, Homo sapiens
caggtcaacatcacattctggatagagtgtagaaaagaggcgggcttcctaaatcctgacatgaaggcaagattctcgtaacagcctttccctatctgcacactggggaaggataaagttacaacgattccaggggcactcagccttacttgggtaccgtatttgtttgcgggtagggaacattcccttcctgcttgggtatcatggatccacagatgccatacctcaagatggtgagtta

SEQ ID NO: 628336 - DNA, 687 bp, Homo sapiens
gggggccaacaatcaacattcttaaagaaaagaattttcaatccagaattttatatccagccaaactaagctccatgagtgaaggagaaataaaatcttttacagacaagcaaatgctgacagatttgtcaccaccaggcctgccttacaagaggtcctgaaggaagcactaaatggaaaggaaaaactggtaccagccactgcaaaaacataccaaatgtaaagaccatcgacactatgaagaaatgcatcaactaatgggcaaaataaccagctagcatcataatgacaggatcaaattcacacataacaatattaaccttaaatgtaaatgggctaaatgccccaattaaaagatacagactggcagatggataaagagtcaatatccatcggtgtgctgtatttaggagacccatctcatgtgcgaacacatacataggcttaaaataaagggatggagaaatatttaccaagccaatggaaagccaaaagaaaaaagacaaaaaaaacaggggggggggtcacaaacccgaagctccgggtaaacccggttttcaccgcacaaagaaaaaagcaacacaaaaaaaactggtgggcgcggccgccacggaaaaaattaaacccaaacatgggcgggggcccaaatcatatacaacgcgccgaggagcctaaaacacgggccga

SEQ ID NO: 628337 - DNA, 87 bp, Homo sapiens
ctagaagattcagcaaagtacttttgtgctcttggggaccttctagtggtccttccgattaggatcagaggtcccgataaactcatc

SEQ ID NO: 628338 - DNA, 572 bp, Homo sapiens
  misc_feature (53)..(53): n is a, c, g, or t
  misc_feature (122)..(122): n is a, c, g, or t
  misc_feature (219)..(219): n is a, c, g, or t
  misc_feature (283)..(283): n is a, c, g, or t
  misc_feature (292)..(292): n is a, c, g, or t
  misc_feature (355)..(355): n is a, c, g, or t
  misc_feature (371)..(371): n is a, c, g, or t
  misc_feature (428)..(428): n is a, c, g, or t
  misc_feature (440)..(440): n is a, c, g, or t
  misc_feature (453)..(453): n is a, c, g, or t
  misc_feature (467)..(467): n is a, c, g, or t
  misc_feature (488)..(488): n is a, c, g, or t
  misc_feature (510)..(510): n is a, c, g, or t
  misc_feature (567)..(567): n is a, c, g, or t
  misc_feature (571)..(571): n is a, c, g, or t
aacaaatagactaacagactctgctagcaaagaagacaagtaaaatctaaaantgtaaggctggtcgtcaaagtttgggaactgtagaagcacaaagtaggagctctaccccccagtagtgnaagtaaagtcaaagaggagtaggtgaagtctagagaaccccttattcaaaggagcaggggctctggtcggtgtgtagttaaaatacttttcagaganttccacagaaagtataacttcttcacaatgtccagcagagagaacatggcaaagaaagctggtnagaacaggnagtctcagctgtagggagacgttgttttggttctcctgagtctggttaggcgtctcagaggtngcctctgtctcctctnttgcagccgcctgtctcctcctccaagtagttccttgtgatgaggcgtgtcccagtntgctgaactgcntcctgtctctgtnggagcaaaggtgcntctgactggagcctcttcggntcctccagtgcttcttcctccntagccctgtggctgccagttctgacaagccacaacacagtccaagtcttccactccncccng

SEQ ID NO: 628339 - DNA, 149 bp, Homo sapiens
tagagtatcactgcagctctcgatgcccaggctggtctcaaactcctgatctcaagtgatccgcccgacttcgcctcccatagtgctgggattacagacatgagccaccgcactcggtcctgtgaattccatttttaacgagaatacca

SEQ ID NO: 628340 - DNA, 273 bp, Homo sapiens
gactctacaggatcccagtcgacgaactctcctgtgttgtgttagatgaagtatacacaggaatccattttgttatgtactaagaaaaattcttttgcctttggatgctgttaatctataaccttaccctcagacccatgctctctgaaacatgtgctgtgtccactcagggttaaatggattaagggcggtgcaagatgtgcattatgttaaacatgatgcttgaatggctaagaccatgctctgttagagagtcatcactcattccctaaa

SEQ ID NO: 628341 - DNA, 522 bp, Homo sapiens
cacgcacgtgccataaggctggtcttcaaactaaagtcaagaccggcccttccttttctaagcgcccccattataggtcaagtcaactttaaatgcccagctgttgtccccgcccccctgagtcgtttatttagagcccagaaacagctagtgggccaggcaaaacaaaaacgtgtccggccatgacaagtaaagttcttctaatacccagtatggtttcgcaggcggtgtattaaaagggacctaataaatcgttgagaatccccccatgtcagagtttggttggacacctaagtctggcgtgccagcggcaatagtagaatgccttaagtgtgaaagcaaaaaaggttttcctaaaaaagcactggcattttgggaatcctgtaaacatttgttccaggtaccaagtgtcgctggacaaaaggaaagctaaaggggagagggcaaaagtccctgtattattccggccccccgttttttcggctatattgacaaaaaacccaccgccaaagatggaaaaac

SEQ ID NO: 628342 - DNA, 188 bp, Homo sapiens
tcgcgcagcatcggccagcccttcggatcgtggtagcgcaggaacgccttgtgcaggcggcgctgctcctcgctcttgacgatggtcacgccgtcgctcttgtaggtgaccttgcgcagcgggttcttgcccgagtggtacatggccgtggcggtggccatcggcgacgggtagaacgcctgcgcctg

SEQ ID NO: 628343 - DNA, 332 bp, Homo sapiens
ggaccggtttaagaatctgagattttggccaggcagggtggctcacgcctgtaatcccagcacttgggaggccgaggcgggtggatcacaaggtcaggagttcaagacccacctggctaatatggtgaaaccctgtctctactaaaaatacaaaaattagccgggcgtggtggtgcagcacctgtagtggcagctacctgggattacaggtgtgcaccaccatgcccgactaattttttttttttggatgtttggtagagatgggatttggccatgtggctcaggcgggtatctatttcttctggaatgaatttgggtgtcaggggagaaga

SEQ ID NO: 628344 - DNA, 119 bp, Homo sapiens
ttcactttctacactctcagcagtctgattcttatcaagccagttgataatttcattacacttgtccagaatcttctgtttgtcctcatctgttagtgtagaaatttgaacgggtacct

SEQ ID NO: 628345 - DNA, 257 bp, Homo sapiens
tttttttccaaatcaatacctcttttattgcatcatttaaatatcataagtaggtcttaagtgtcatctggcatctcctttctgtagccaggtaacctcttagatcttctcatcagcctgctgaacagttccttttttcagagacatagatccatccaaaaatttcctgatatcctgttttactgttgtggcttctgaatcaaagcgctgaatttaaacagctaatctacttccttaaggattaatcatcttctggg

SEQ ID NO: 628346 - DNA, 138 bp, Homo sapiens
gggaaccttttgggggccccccgggggctggacctattcaaggaggccccgttccccccccccttttgtttttggggccctgctcccctttgggggggggggggggggttttaattttttttatggaaaaatttgcca

SEQ ID NO: 628347 - DNA, 191 bp, Homo sapiens
aaatctacataaattatgctgagatgtcttcaacttaaagcttttttttgagacagaatctcactcggtcactcaagctgaagtagtgcagtggcataatcacagctcactggagcctcaacctcccaggcacaagcaatcctcccacttcagcctccacagtatatgggactatagataggcatgtgcca

SEQ ID NO: 628348 - DNA, 941 bp, Homo sapiens
gctctctctctctctctctctctctctctctctctctctgtctaacactccatgtgaccaagtcagtatcagccaaacagtgaacactttggcctgcccgtcctctccaacctggcgacctgatctggctacgcaacggggcccccgaaattgcctcggcctcctgccagtgctaccactgggactgttgtggtggtgcacccaacagctgggggacttccaatgctaggtcactaagaggagggcttccagcagctggtagccagctactgcccagaggtggtggaggacggggtggcatgaacaaacagatgagggtggcagtgtacccgtacattatacagcacatcgacgtgtgatgccaccagactgtgtggcaaggccatgctgtggtgcagacaggtcctactgtgaagtgagttcgctgtgtgattgtgcacgctctttgttgctggacgtgctgctcccagtcttatatgacttgactctaaaggacacggaacatcatgaaagtctatcactgaaacagagggaatgtagcacagcaatagcacacaaaggacctgcctgtggtgctgcccactgagacccgccaactcaacggcctaggcccctaagaacccggtcgattaagcgacggggagccaggtcatggtcaagcaggcccgcggggtgccgagtcttcagtgagtcagagaatatggccactcagcatcatgacagaacgcgcagggatccccagtgtgcccccggcccggtccgcctgctccggagaaccggaaactgcgggttcaaacctcacacacaggacgcgccggtaccgggaggaagacgaaacggcacggagacccacacgaacagcactaacgaacaacctctccgcttaacccgtgcagcgcaactcaccacaacggaccagccaacacacctggcacagtcac

SEQ ID NO: 628349 - DNA, 92 bp, Homo sapiens
cttgaatttttgtttttggaaaaaaaaggttttttttctttggtggaaacccccggttaccctggttggtaccctgataccgggtgtttcca

SEQ ID NO: 628350 - DNA, 257 bp, Homo sapiens
ccggcacttcctgtacccttaggagtttgtttgtttgttttgagacagagttatcagtgcaacctggccctgatagtcacgtaggttcttttctgttttccctaagcgttggctgggttgagaaataaagagacagagtacaaaagagagaaattttaaagctgggtgtcctggggagacatcacatgtaggtaggttccgtgatgccccacaagccgcaaaaccagcaagtttttattagggattttcaaaaggta

SEQ ID NO: 628351 - DNA, 125 bp, Homo sapiens
ccccccaaaaaagggggggggggggttggggggttaaaggccccccctttttttcccttggggtccggcccctttttggggggtcccccccccctttttttccaggggcctttttttttttttca

SEQ ID NO: 628352 - DNA, 280 bp, Homo sapiens
cagggcccccttaatgcaggttggaatgttatccctggggtgggcttggaccccccctgctttttttttttccggcccctccccaactttcactgtaatttatggacccggcccgccggggtgttgggtgtatgtcctggcccttttttcacaattgtttgggtgtgggagggggtggtttttccctgaaaaggggggtaccccaaaagcttttttgatgttcaatcaatcagtccctgtgtcccaaacatattcaataaacccagattgggccccccca

SEQ ID NO: 628353 - DNA, 82 bp, Homo sapiens
cgggactcagccatgtatcgctgtgccactttcatcggggcacagccccagcattttggtgatgggactcgactctccatcc

SEQ ID NO: 628354 - DNA, 726 bp, Homo sapiens
gaacttccatgatatggaaatggaacggagatatggatagagaaagattgaagaattaatggaagaaaaatatgactttggaaatggcacagaaacacaagtatggatgaatcaatacatcttggctgggaactggcacagatatcccgaactagtgaactttccgaagcccccccgaaatccctgggccctgaggtgaatgagttgacatcaagtagattattgaagctagagatggaaaatccaagtttgaccaaaaccgttgaagagcttcggactactgtggattctgtagaaggccatgcttcccaaatccctgaaaatgggaaaagaaaatccaaggctccagttaaaaggttgagattctttgaaaatgagattgttccaagaaaacgccaagtctttccagaattgtccagaatttaagccaggatcttaatgaaggagaaagctccagcttgaaaaacaccaatagaacaccctgagagaaaattcagagagcaccagattaagatactggacaccaggaaaatggacatctgaatccaaaccagtgtcttccttaaggcagcggtccccagataagtgccagaagccagagtgaaagaccattgaaaaagaaacaccaaaattctttcatgaatctatccaagaaaccagtagccagctaagcccagattgaatttgaaaaaagaccaaatttaaaaagaattgggaccattatta

SEQ ID NO: 628355 - DNA, 392 bp, Homo sapiens
  misc_feature (65)..(65): n is a, c, g, or t
cgctcggacccttgatgtagctctccaagcctccatattacattttgtgtgttctcctgcctcancctcccaagtagctaggattacaggcatgcgccactaggtctggctaatttttttgtatttttagtagagacggggtttcaccatgttggccaggctgatctcgaactcctgaacttgagtgatccgcccacctcagcctcccaacatgctggcattacaggtgtgagccatcacaccctgccccaagtgggatttatcccaggaatgcaaggttggttcaacatatgaaaatcagtcaatgtaacatatcatattagcagaataaaggacaaaagctacatcactgtctcaatagatgcagaaaaagcatttgacaaaatccaaca

SEQ ID NO: 628356 - DNA, 245 bp, Homo sapiens
  misc_feature (219)..(219): n is a, c, g, or t
  misc_feature (233)..(234): n is a, c, g, or t
gtaattcgacatgtggaaatctttcgtaaggaactaggaatgaggacaattatttatgtataggggtgttctttactgtacagagagaaagttggccatgtgccatgcccttagtagtagggaaatagttatgttttactggaaagccatcaaaaatcatctttgaaagacttttaattgtaataggaaaaagttcagcttcagacaaggaagagcctnacagcacatctggnnagagagggagt

SEQ ID NO: 628357 - DNA, 1185 bp, Homo sapiens
  misc_feature (197)..(197): n is a, c, g, or t
cagaagtgctgcaggcgctgaccgacgattccggatctcagttgccacgcgcccccgacgaccgcccgacgtgcattcccgacttccgttttggttccaagtccaatatggcaactctaaaggatcagctgacttatataatcttctaaaggaagaacagacgccgcgcgcagcaatacagattacagttgttgggngttggctggctgcttcggcgatggcactgttgccgtatccaagtcatctgtgaatggaagggacattggtgcgaggatcgaactatgctcttgttagatggtcatgcgacagaccgagattgacagggatgagatgagtggatcatccgaagcgatggcaagcacttttccttagaacaccaaagattgtctcctggacagaagagctcataaatgtagagctgcatagactcctaagactggctcattatcacggctggggcaacgtcaagcgaagagggagaaagccgtcttaatttaggtccagcgtaacgtgaacatcgtttaaagttcatcattcctaatgttgtaacataccaggccgaacgtgcaagtagcttatggtttcaaatccagtggatatcttgacctacgtgggcttggaacgataagtggtactcccaaaaaccgtgtaattggaagtggttgcaatctggattcaggcccgattccgttacctgatggcggaccacggctgggagttcaccacttacgctgctcttgggttgggtccttggggcgaaccgtggaggatttcccgtgttccctgttttggcactgcgctcgacatcgtccccggcccactctccaccctctgccgcccgcttcgcgctcctcacggctcgccccgtgcaccacgtccctgccgtcgtcccacagccccacacgcagcaccaacccccagggcacccacccggggcgactgaccacgtggcaagccttgggccgcgaccgcactggaaccccacacccggcgccccccgctccccgcgcacacggctaacgacccaccggacccacccaaccccgcaccaggatacccaataaatccgacgtagaacagctagtcgacgatgaaaagcgagcgcgcgacgagcgacactgcagcaccacagcaaccaacgccctcccaaccccaacaccacctgatacactaatgaacacgccc

SEQ ID NO: 628358 - DNA, 515 bp, Homo sapiens
  misc_feature (77)..(77): n is a, c, g, or t
ggctgacctagagtttcccgaaaagctcttttctttcttcctatcctactaaggtctgagggccttaggtgtagatnttggtgcagtgaataatacaccgtggttgtagagagttctaagaaaacattgtttgttttaagttggcctgttgagcttggcaagcctttttctaggaccagcctgactttggtggctctcagaatggagagcaagtgtggggtcctgagtcccacccaagtgacccccaacctggaaacgtgtgcttctgcttcagagggttcctgcagtagacacaaagcccttcatccattcattcatttaacaagtactgtgtcgttgggggctgagcctttgcagatcctgggctaagtaccaggggtgcagcactgaacaaaatgcatgaaccttcgcctcccaacatctcagagctggatgtgttgtgttcaaaatggtattttatcagagcagcttaatggtccacagaaggagtgcaggcccccacaaataaattttgt

SEQ ID NO: 628359 - DNA, 257 bp, Homo sapiens
ctataagtgactctttatgatctaactcctgcctgcctttcctattgcttgagtactaagttacagcgacactagtctcctttaatttgcttgaattcccccagcattttcccacccctgggctttcgaacattctgtaacctctgtttacagagtgttcttctgtgatctttacgacgtatatttcaagtatttaaagatctagcttacagccatctgtggattctcaattctgtttcaagagatggagtcttgct

SEQ ID NO: 628360 - DNA, 895 bp, Homo sapiens
gatgaagtccaccgccgaggaaaatccgggtgctatgtagtccatgcgtcaaccccatccgtgttctgtctgccatttggctccgtcgtaggggcagatggctcttgcggccagcgctcttcctttgagcttggttgctgctcgactatgggtccctgggtacctgctagagccatttgcgggctcttggcgtgttgggaggtgcctggatgcggtcataggggttcctgcatttgcacggcaagttgttccagggtttcagagtcgtcagggttgctgcgtttcaacacagtcgccattacatgggcatgtgcgtcgtctaacgctcctattcttattgagtgtagaccctctgtaagcatcagagactgacagtgcctgaaaggcataacgaggtccttgagcgatctttgtcccatgagtcatatgtcgtgtgaccccacctcacgaaaattggttccccagatatttttcattgtggctcctgtcctaaatacattgagcgtggtttgagatgtgactatgctatgtttggttgtgtggacactgtgtgcatagctctgcgtgatgtgtttgttggctggccttggtgggtcgctttgcgttccagggatattggctaaggagccagcgaagtactgcactcgaccatggagctgctcgggttggacagactctgaattatgtgttgagcgttgatcgttcccatgcattataccaccgcagatctattccgtagctgttagcttcatggacgaagaatcctcatctaaacccatatttgctcgtcagaaatccttagacatctctttgagagctctaccgctgcaggtttccccttatgcggtgtacattgtttttcccttgtgtccgcgtcccaatgacataacgcgga

SEQ ID NO: 628361 - DNA, 1381 bp, Homo sapiens
  misc_feature (193)..(193): n is a, c, g, or t
gcgcaggggatcttcgggaagctctttcacccccgcttctgccgggctgtaactgcaatggagcaggttgagatgaactcagtcagatggccccacggcccgctcctttcttagcagcccactaatgctccagaaccctcaggagaagagccaggcctacccccgccgccgccggcctggctgctacgcatancgtcagaaccccgaggccatcgcagccgcagctatgtacaccttcctgcccgacaacttctcacctgccaagcccaagccttccaaagagctgaagccgctgctgggctccgcggttctggggctgctgcttgtgctggccgcggtggtggcctggtgctactacagcgtctccctacgcaaggcggagcgacttcgcgcggagctgctggacctgaaagctggcggcttctccatccgcaatcagaagggagagcaggtcttccgcctggccttccgctccggcgcgctggaccttgactcctgcagccgcgatggcgccctgctgggctgctcgctcacggccgacgggctgccgctgcacttcttcatccagactgtgcggcccaaggacacggtcatgtgctaccgcgtgcgctgggaggaggcagcgccgggccgggccgtggagcacgccatgttcttgggcgacgcggcggcccactggtatggtggcgccgagatgaggacgcaacactggcccatccgcctggatggccagcaggagccccagccgttcgtcaccagcgatgtctactcctccgacgccgcgtttgggggcatcctcgagcgctactggctatcttcgcgcgcggccgccatcaaagtcaatgactcagtgcccttccacctgggctggaacagcacggagcgctcgctgcggcttcaggcgcgctaccacgacacgccctacaagccacccgccggccgcgccgcagcgccagagctgagctaccgagtgtgcgtgggctcagacgtcacctccatccacaagtacatggtgcgtcgctacttcaacaagccgtcaagggtgccagcacccgaggccttccgagaccccatttggtccacatgggcgctgtacgggcgcgccgtggaccaggacaaggtgctgcgttttgcccaacagatccgcctgcaccacttcaacagcagccacctggaaatcgacgacatgtacacacctgcttatggcgacttcgacttcgatgaggtcaaattccccaacgccagcgacatgttccgccgcctgcgcgacgccggcttccgcgtcacgctctgggtgcacccttttgtcaactacaactcgtcgcgcttcggcgagggcgtggagcgcgagctgttcgtgcgcgaacccacgggccggtta

SEQ ID NO: 628362 - DNA, 1348 bp, Homo sapiens
  misc_feature (193)..(193): n is a, c, g, or t
gcgcaggggatcttcgggaagctctttcacccccgcttctgccgggctgtaactgcaatggagcaggttgagatgaactcagtcagatggccccacggcccgctcctttcttagcagcccactaatgctccagaaccctcaggagaagagccaggcctacccccgccgccgccggcctggctgctacgcatancgtcagaaccccgaggccatcgcagccgcagctatgtacaccttcctgcccgacaacttctcacctgccaagcccaagccttccaaagagctgaagccgctgctggccgcggtggtggcctggtgctactacagcgtctccctacgcaaggcggagcgacttcgcgcggagctgctggacctgaaagctggcggcttctccatccgcaatcagaagggagagcaggtcttccgcctggccttccgctccggcgcgctggaccttgactcctgcagccgcgatggcgccctgctgggctgctcgctcacggccgacgggctgccgctgcacttcttcatccagactgtgcggcccaaggacacggtcatgtgctaccgcgtgcgctgggaggaggcagcgccgggccgggccgtggagcacgccatgttcttgggcgacgcggcggcccactggtatggtggcgccgagatgaggacgcaacactggcccatccgcctggatggccagcaggagccccagccgttcgtcaccagcgatgtctactcctccgacgccgcgtttgggggcatcctcgagcgctactggctatcttcgcgcgcggccgccatcaaagtcaatgactcagtgcccttccacctgggctggaacagcacggagcgctcgctgcggcttcaggcgcgctaccacgacacgccctacaagccacccgccggccgcgccgcagcgccagagctgagctaccgagtgtgcgtgggctcagacgtcacctccatccacaagtacatggtgcgtcgctacttcaacaagccgtcaagggtgccagcacccgaggccttccgagaccccatttggtccacatgggcgctgtacgggcgcgccgtggaccaggacaaggtgctgcgttttgcccaacagatccgcctgcaccacttcaacagcagccacctggaaatcgacgacatgtacacacctgcttatggcgacttcgacttcgatgaggtcaaattccccaacgccagcgacatgttccgccgcctgcgcgacgccggcttccgcgtcacgctctgggtgcacccttttgtcaactacaactcgtcgcgcttcggcgagggcgtggagcgcgagctgttcgtgcgcgaacccacgggccggtta

SEQ ID NO: 628363 - DNA, 1246 bp, Homo sapiens
  misc_feature (193)..(193): n is a, c, g, or t
gcgcaggggatcttcgggaagctctttcacccccgcttctgccgggctgtaactgcaatggagcaggttgagatgaactcagtcagatggccccacggcccgctcctttcttagcagcccactaatgctccagaaccctcaggagaagagccaggcctacccccgccgccgccggcctggctgctacgcatancgtcagaaccccgaggccatcgcagccgcagctatgtacaccttcctgcccgacaacttctcacctgccaagcccaagccttccaaagagctgaagccgctgctgggctccgcggttctggggctgctgcttgtgctggccgcggtggtggcctggtgctactacagcgtctccctacgcaaggcggagcgacttcgcgcggagctgctggacctgaaagctggcggcttctccatccgcaatcagaagggagagcaggtcttccgcctggccttccgctccggcgcgctggaccttgactcctgcagccgcgatggcgccctgctgggctgctcgctcacggcccactggtatggtggcgccgagatgaggacgcaacactggcccatccgcctggatggccagcaggagccccagccgttcgtcaccagcgatgtctactcctccgacgccgcgtttgggggcatcctcgagcgctactggctatcttcgcgcgcggccgccatcaaagtcaatgactcagtgcccttccacctgggctggaacagcacggagcgctcgctgcggcttcaggcgcgctaccacgacacgccctacaagccacccgccggccgcgccgcagcgccagagctgagctaccgagtgtgcgtgggctcagacgtcacctccatccacaagtacatggtgcgtcgctacttcaacaagccgtcaagggtgccagcacccgaggccttccgagaccccatttggtccacatgggcgctgtacgggcgcgccgtggaccaggacaaggtgctgcgttttgcccaacagatccgcctgcaccacttcaacagcagccacctggaaatcgacgacatgtacacacctgcttatggcgacttcgacttcgatgaggtcaaattccccaacgccagcgacatgttccgccgcctgcgcgacgccggcttccgcgtcacgctctgggtgcacccttttgtcaactacaactcgtcgcgcttcggcgagggcgtggagcgcgagctgttcgtgcgcgaacccacgggccggtta

SEQ ID NO: 628364 - DNA, 112 bp, Homo sapiens
agtcggtacctcttcttctccatatacagcagcaaccacagctccagagacacagatcaaggagaacaggccagcaatgatgcccacgatggggggataacacgttcgcgag

SEQ ID NO: 628365 - DNA, 305 bp, Homo sapiens
ggggaaagggcccccccctgggggtttttttgaaaggggggtttaacccccgtttttaacccgtttgggaaattgttgcagggggaaaaataattttttaaaacccggggggattcccaggtttttgaatccgcctttaaaaaaataaataattttcccctgtttaattgggggggaggggggggccccgcatatttttttagggggaagctttgcccccaaaaatttttaaaaagcttttttttccccggtttttttgtttttttttattgttttggggaaaaaaaatgtaaggggccccccca

SEQ ID NO: 628366 - DNA, 376 bp, Homo sapiens
  misc_feature (264)..(264): n is a, c, g, or t
  misc_feature (295)..(295): n is a, c, g, or t
taagttgagaactttcaccttttcatttaaaaggaagcactttgtggcttctctttggcatatccgaatcaccagcatcactactcctgctctctggggccactgttaagcaaagtgaggactacttgggcacaggcactgtgatgctgggatagttgatctgatcaccaagacggctactaagtcactagcagggtgggtggcttatacagcgtggatgtgctggaccaagggatgactcacatccccggccggctggagccnaccaggcgaggagatttcattcacgttactnagaagggcacacccatttgagacttaaaattctttatttctgggaattttcccattttaatatttttggaactgtcagttg

SEQ ID NO: 628367 - DNA, 712 bp, Homo sapiens
gagtccgggagcgcagttgggccgggcgctccgacctccgctttcccaccgcccgcagtgaagcacatcccgcagccgggcggactccgatcgccgcagttgccctctggcgccatgtcgcagaagcggagcgcccgggattgcaggaggagagcctgcaggggctcctgggtagaactgcacttcagcaataagtgggaacgggggcagcgttccagcctccggttttctatttatacatggagaccatggaaacaaataactgtggacgcacaagaattgagtctggaccggagtagctccaagagctctcactgtggacagcccacctcgctcgaagaacccaaagataccaaagagcttctgaaacagatacccatagcatgtggaggagaaaaacagctcaaagtcgtgaggaagatgatattcgaaagacaggaaagaaacgtgtgaaagcatctgtgaaagaaaaaacttcagatggggatatagggatggctcaagtcgcgcggaaaaattatctcccccccaaggggagttcctctttaaacacccgaaagcgcaggccaaccctcagctatgaggaacaccgagcgtcatgacgacaggggggcattattctcttgcagaatttctgagagtttccttccatctcttgggtctctcattgtgtggcatcgggagtggggctctatatgtggagggggtttgc

SEQ ID NO: 628368 - DNA, 743 bp, Homo sapiens
atatcatgtacaggaacccgagatctgagcaggagtacccttagccgatgtctctaacctcgcctttcataactaaagtcgagactacagtaaaacgttactaagcgagtgtgtttgtcgaccatggatctcaatcgatggtctgacgtgcaaaagcagatacagcatatgatggctttcatatgaacaagaagccactgagaaagcagaagaaatagatgtgaagggagaagaagagttgaaaaagtagagaagtggttcggattgtgcgaaaccaaagactaagagattgatggaatattatgagaagaaagagaaggcagattgagcggagcagtaagaagtaatccagatgttcaatggtgatgaatcaagcgagatcaaagaccgtctgagcaagagatgaccttatcagagatctactaaatgaagaataacagagactcagaacaggtaggtgaaagataggaccaggtaccaagtgcttgctggatggagtggttctcacaggggtagggtaacagttgttggaagcgagcgaaatgattgtacgtaaggagtgaaaaaagattttggggtcttggtaaagggttgagtgaagaaggcaagttcgtgatgtaccaatatgttgtagcagaaaagatgtgatgtgcggaattgagcagcgagtacttaccatgactgaaagacgatagatggtggagttgagatctgtgatgggggatagaaacaatatgggttaa

SEQ ID NO: 628369 - DNA, 260 bp, Homo sapiens
accgagtctgcgccacggcaactcagcctgggtgacagagcgagactccaactgaaaaaaaaaaaaaaattttggtttatcctgtgggcaagaaattttttcaaattttaggtccggtcttgccccacacagagacatttcagtcaatatgggatcacttatacaagggtggccccatatttttataatagagccgggcacaggggttcacatctgtacccccagcactttggggggccaggggggccagatcacttgag

SEQ ID NO: 628370 - DNA, 714 bp, Homo sapiens
ctattctttctctcccccccccaaggagaacagaaaaacagttatcctccactccccctccactcttttcttcctctctccctccctcttcctcttttcttcctcctccactttcaccccccgtctttctccccccctctcctcccccctctctgtttttctctctcttctctctttttcttccctcctgctctctttcttttcctctctcctctcctctttccctctcccgctgtctgggctcctcccctcctctcctctcctccttttttttatgttgcgtggtgtgtgttttctctcttttctcaatcgcagtttgttctgttatccatctccgccgccgccccctcccctctttgttttttgttttttgttcttctgggcgctgcgcgccctcctctctcgcgcgcgtttttgtgttgttgtgtgtttttttctgcttttttgtgtttgtgtcgcctctccctctctctccccgcgccctctccacccctctctctctctctcttgtttttgtgcccccctcctcctccgccccctcccctctctcgcgcgtgttcttctccacacccgcgctgttgtgttatttttttcggtttttttttttttttttttatccacccccctcctctctctcccctcctctcctcttaagaaaaaagagagagagagagttgtgttttttctttcccctcctctctcctctctcacaca

SEQ ID NO: 628371 - DNA, 541 bp, Homo sapiens
gcgacacgctcccacttcagattggtagagtctaggggctcagaatctggcatcttcacaaatacaaaggaatccagttctcatcaccctgggatagctgaattcccttcccgtggtaaatcttcaagttacagcaaacaatttactagtagcacgagttacaacagaggagactccacatttgaaagcaagagctataaaatggcagatgaggccggaagtgaagccgatcatgaaggaacacatagcaccaagagaggccatgctaaatctcgccctgtcagaggtatccacacttctcctttggggaagccttccctgtccccctagactaagttaaatatttctgcacagtgttcccatggccccttgcatttccttcttaactctctgttacacgtcattgaaactacacttttttggtctgtttttgtgctagactgtaagttccttgggggcagggcctttgtctgtctcatctctgtattcccaaatgcctaacagtacagagccatgactcaataaatacatgttaaatgga

SEQ ID NO: 628372 - DNA, 4363 bp, Homo sapiens
agggcaatcctttctttcagctggaagtgctcctcaggagccagccccacccttagaaaagatgttttccatgaggatcgtctgcctggtcctaagtgtggtgggcacagcatggactgcagatagtggtgaaggtgactttctagctgaaggaggaggcgtgcgtggcccaagggttgtggaaagacatcaatctgcctgcaaagattcagactggcccttctgctctgatgaagactggaactacaaatgcccttctggctgcaggatgaaagggttgattgatgaagtcaatcaagattttacaaacagaataaataagctcaaaaattcactatttgaatatcagaagaacaataaggattctcattcgttgaccactaatataatggaaattttgagaggcgatttttcctcagccaataaccgtgataatacctacaaccgagtgtcagaggatctgagaagcagaattgaagtcctgaagcgcaaagtcatagaaaaagtacagcatatccagcttctgcagaaaaatgttagagctcagttggttgatatgaaacgactggaggtggacattgatattaagatccgatcttgtcgagggtcatgcagtagggctttagctcgtgaagtagatctgaaggactatgaagatcagcagaagcaacttgaacaggtcattgccaaagacttacttccctctagagataggcaacacttaccactgataaaaatgaaaccagttccagacttggttcccggaaattttaagagccagcttcagaaggtacccccagagtggaaggcattaacagacatgccgcagatgagaatggagttagagagacctggtggaaatgagattactcgaggaggctccacctcttatggaaccggatcagagacggaaagccccaggaaccctagcagtgctggaagctggaactctgggagctctggacctggaagtactggaaaccgaaaccctgggagctctgggactggagggactgcaacctggaaacctgggagctctggacctggaagtactggaagctggaactctgggagctctggaactggaagtactggaaaccaaaaccctgggagccctagacctggtagtaccggaacctggaatcctggcagctctgaacgcggaagtgctgggcactggacctctgagagctctgtatctggtagtactggacaatggcactctgaatctggaagttttaggccagatagcccaggctctgggaacgcgaggcctaacaacccagactggggcacatttgaagaggtgtcaggaaatgtaagtccagggacaaggagagagtaccacacagaaaaactggtcacttctaaaggagataaagagctcaggactggtaaagagaaggtcacctctggtagcacaaccaccacgcgtcgttcatgctctaaaaccgttactaagactgttattggtcctgatggtcacaaagaagttaccaaagaagtggtgacctccgaagatggttctgactgtcccgaggcaatggatttaggcacattgtctggcataggtactctggatgggttccgccataggcaccctgatgaagctgccttcttcgacactgcctcaactggaaaaacattcccaggtttcttctcacctatgttaggagagtttgtcagtgagactgagtctaggggctcagaatctggcatcttcacaaatacaaaggaatccagttctcatcaccctgggatagctgaattcccttcccgtggtaaatcttcaagttacagcaaacaatttactagtagcacgagttacaacagaggagactccacatttgaaagcaagagctataaaatggcagatgaggccggaagtgaagccgatcatgaaggaacacatagcaccaagagaggccatgctaaatctcgccctgtcagaggtatccacacttctcctttggggaagccttccctgtccccctagactaagttaaatatttctgcacagtgttcccatggccccttgcatttccttcttaactctctgttacacgtcattgaaactacacttttttggtctgtttttgtgctagactgtaagttccttgggggcagggcctttgtctgtctcatctctgtattcccaaatgcctaacagtacagagccatgactcaataaatacatgttaaatggatgaatgaattcctctgaaactctatttgagcttatttagtcaaattctttcactattcaaagtgtgtgctattagaattgtcacccaactgattaatcacatttttagtatgtgtctcagttgacatttaggtcaggctaaatacaagttgtgttagtattaagtgatgcttagctacctgtactggttacttgctattagtttgtgcaagtaaaattccaaatacatttgaggaaaatcccctttgcaatttgtaggtataaataaccgcttatttgcataagttctatcccactgtaagtgcatcctttccctatggagggaaggaaaggaggaagaaagaaaggaagggaaagaaacagtatttgccttatttaatctgagccgtgcctatctttgtaaagttaaatgagaataacttcttccaaccagcttaattttttttttagactgtgatgatgtcctccaaacacatccttcaggtacccaaagtggcattttcaatatcaagctaccgggatccagtaagattttttctgtttattgcgatcaagagaccagtttgggaggatggcttttgatccagcaaagaatggatggatcactgaattttaaccggacctggcaagactacaagagaggtttcggcagcctgaatgacgagggggaaggagaattctggctaggcaatgactacctccacttactaacccaaaggggctctgttcttagggttgaattagaggactgggctgggaatgaagcttatgcagaatatcacttccgggtaggctctgaggctgaaggctatgccctccaagtctcctcctatgaaggcactgcgggtgatgctctgattgagggttccgtagaggaaggggcagagtacacctctcacaacaacatgcagttcagcacctttgacagggatgcagaccagtgggaagagaactgtgcagaagtctatgggggaggctggtggtataataactgccaagcagccaatctcaatggaatctactaccctgggggctcctatgacccaaggaataacagtccttatgagattgagaatggagtggtctgggtttcctttagaggggcagattattccctcagggctgttcgcatgaaaattaggccccttgtgacccaataggctgaagaagtgggaatgggagcactctgtcttctttgctagagaagtggagagaaaatacaaaaggtaaagcagttgagattctctacaacctaaaaaattcctaggtgctattttcttatcctttgtactgtagctaaatgtacctgagacatattagtctttgaaaaataaagttatgtaaggttttttttatctttaaatagctctgtgggttttaacatttttataaagatataccaagggccattcagtacatcaggaaagtggcagacagaagcttctctctgcaaccttgaagactattggtttgagaacttctcttcccataccacccaaaatcataatgccattggaaagcaaaaagttgttttatccatttgatttgaattgttttaagccaatattttaaggtaaaactcactgaatctaaccatagctgacctttgtagtagaatttacaacttataattacaatgcacaatttataattacaatatgtatttatgtcttttgctatggagcaaatccaggaaggcaagagaaacattctttcctaaatataaatgaaaatctatcctttaaactcttccactagacgttgtaatgcacacttatttttttcccaaggagtaaccaatttctttctaaaacacatttaaaattttaaaactatttatgaatattaaaaaaagacataattcacacattaataaacaatctcccaagtattgatttaacttcatttttctaataatcataaactatattctgtgacatgctaattattattaaatgtaagtcgttagttcgaaagcctctcactaagtatgatctatgctatattcaaaattcaacccatttactttggtcaatatttgatctaagttgcatctttaatcctggtggtcttgccttctgatttttaatttgtatccttttctattaagatatatttgtcattttctcttgaatatgtattaaaatatcccaagca

SEQ ID NO: 628373 - DNA, 2207 bp, Homo sapiens
agggcaatcctttctttcagctggaagtgctcctcaggagccagccccacccttagaaaagatgttttccatgaggatcgtctgcctggtcctaagtgtggtgggcacagcatggactgcagatagtggtgaaggtgactttctagctgaaggaggaggcgtgcgtggcccaagggttgtggaaagacatcaatctgcctgcaaagattcagactggcccttctgctctgatgaagactggaactacaaatgcccttctggctgcaggatgaaagggttgattgatgaagtcaatcaagattttacaaacagaataaataagctcaaaaattcactatttgaatatcagaagaacaataaggattctcattcgttgaccactaatataatggaaattttgagaggcgatttttcctcagccaataaccgtgataatacctacaaccgagtgtcagaggatctgagaagcagaattgaagtcctgaagcgcaaagtcatagaaaaagtacagcatatccagcttctgcagaaaaatgttagagctcagttggttgatatgaaacgactggaggtggacattgatattaagatccgatcttgtcgagggtcatgcagtagggctttagctcgtgaagtagatctgaaggactatgaagatcagcagaagcaacttgaacaggtcattgccaaagacttacttccctctagagataggcaacacttaccactgataaaaatgaaaccagttccagacttggttcccggaaattttaagagccagcttcagaaggtacccccagagtggaaggcattaacagacatgccgcagatgagaatggagttagagagacctggtggaaatgagattactcgaggaggctccacctcttatggaaccggatcagagacggaaagccccaggaaccctagcagtgctggaagctggaactctgggagctctggacctggaagtactggaaaccgaaaccctgggagctctgggactggagggactgcaacctggaaacctgggagctctggacctggaagtactggaagctggaactctgggagctctggaactggaagtactggaaaccaaaaccctgggagccctagacctggtagtaccggaacctggaatcctggcagctctgaacgcggaagtgctgggcactggacctctgagagctctgtatctggtagtactggacaatggcactctgaatctggaagttttaggccagatagcccaggctctgggaacgcgaggcctaacaacccagactggggcacatttgaagaggtgtcaggaaatgtaagtccagggacaaggagagagtaccacacagaaaaactggtcacttctaaaggagataaagagctcaggactggtaaagagaaggtcacctctggtagcacaaccaccacgcgtcgttcatgctctaaaaccgttactaagactgttattggtcctgatggtcacaaagaagttaccaaagaagtggtgacctccgaagatggttctgactgtcccgaggcaatggatttaggcacattgtctggcataggtactctggatgggttccgccataggcaccctgatgaagctgccttcttcgacactgcctcaactggaaaaacattcccaggtttcttctcacctatgttaggagagtttgtcagtgagactgagtctaggggctcagaatctggcatcttcacaaatacaaaggaatccagttctcatcaccctgggatagctgaattcccttcccgtggtaaatcttcaagttacagcaaacaatttactagtagcacgagttacaacagaggagactccacatttgaaagcaagagctataaaatggcagatgaggccggaagtgaagccgatcatgaaggaacacatagcaccaagagaggccatgctaaatctcgccctgtcagaggtatccacacttctcctttggggaagccttccctgtccccctagactaagttaaatatttctgcacagtgttcccatggccccttgcatttccttcttaactctctgttacacgtcattgaaactacacttttttggtctgtttttgtgctagactgtaagttccttgggggcagggcctttgtctgtctcatctctgtattcccaaatgcctaacagtacagagccatgactcaataaatacatgttaaatgga

SEQ ID NO: 628374 - DNA, 3673 bp, Homo sapiens
tgggcaatcctttctttcagctggagtgctcctcaggccaagccccacccttagaaaagatgttttccatgaggatcgtctgcctggtcctaagtgtggtgggcacagcatggactgcagatagtggtgaaggtgactttctagctgaaggaggaggcgtgcgtggcccaagggttgtggaaagacatcaatctgcctgcaaagattcagactggcccttctgctctgatgaagactggaactacaaatgcccttctggctgcaggatgaaagggttgattgatgaagtcaatcaagattttacaaacagaataaataagcttcaaaaatttcactattttgaatatccaggaagaacattaagggttcttcattcgtttgaccactaattttaatgggaatttttgaggaggcgattttttccctcagcccaataacccgtgataataccctacaacccgagtgtcagaggatctgagaagcagaattgaagtcctgaagcgcaaagtcatagaaaaagtacagcatatccagcttctgcagaaaaatgttagagctcagttggttgatatgaaacgactggaggtggacattgatattaagatccgatcttgtcgagggtcatgcagtagggctttagctcgtgaagtagatctgaaggactatgaagatcagcagaagcaacttgaacaggtcattgccaaagacttacttccctctagagataggcaacacttaccactgataaaaatgaaaccagttccagacttggttcccggaaattttaagagccagcttcagaaggtacccccagagtggaaggcattaacagacatgccgcagatgagaatggagttagagagacctggtggaaatgagattactcgaggaggctccacctcttatggaaccggatcagagacggaaagccccaggaaccctagcagtgctggaagctggaactctgggagctctggacctggaagtactggaaaccgaaaccctgggagctctgggactggagggactgcaacctggaaacctgggagctctggacctggaagtactggaagctggaactctgggagctctggaactggaagtactggaaaccaaaaccctgggagccctagacctggtagtaccggaacctggaatcctggcagctctgaacgcggaagtgctgggcactggacctctgagagctctgtatctggtagtactggacaatggcactctgaatctggaagttttaggccagatagcccaggctctgggaacgcgaggcctaacaacccagactggggcacatttgaagaggtgtcaggaaatgtaagtccagggacaaggagagagtaccacacagaaaaactggtcacttctaaaggagataaagagctcaggactggtaaagagaaggtcacctctggtagcacaaccaccacgcgtcgttcatgctctaaaaccgttactaagactgttattggtcctgatggtcacaaagaagttaccaaagaagtggtgacctccgaagatggttctgactgtcccgaggcaatggatttaggcacattgtctggcataggtactctggatgggttccgccataggcaccctgatgaagctgccttcttcgacactgcctcaactggaaaaacattcccaggtttcttctcacctatgttaggagagtttgtcagtgagactgagtctaggggctcagaatctggcatcttcacaaatacaaaggaatccagttctcatcaccctgggatagctgaattcccttcccgtggtaaatcttcaagttacagcaaacaatttactagtagcacgagttacaacagaggagactccacatttgaaagcaagagctataaaatggcagatgaggccggaagtgaagccgatcatgaaggaacacatagcaccaagagaggccatgctaaatctcgccctgtcagagactgtgatgatgtcctccaaacacatccttcaggtacccaaagtggcattttcaatatcaagctaccgggatccagtaagattttttctgtttattgcgatcaagagaccagtttgggaggatggcttttgatccagcaaagaatggatggatcactgaattttaaccggacctggcaagactacaagagaggtttcggcagcctgaatgacgagggggaaggagaattctggctaggcaatgactacctccacttactaacccaaaggggctctgttcttagggttgaattagaggactgggctgggaatgaagcttatgcagaatatcacttccgggtaggctctgaggctgaaggctatgccctccaagtctcctcctatgaaggcactgcgggtgatgctctgattgagggttccgtagaggaaggggcagagtacacctctcacaacaacatgcagttcagcacctttgacagggatgcagaccagtgggaagagaactgtgcagaagtctatgggggaggctggtggtataataactgccaagcagccaatctcaatggaatctactaccctgggggctcctatgacccaaggaataacagtccttatgagattgagaatggagtggtctgggtttcctttagaggggcagattattccctcagggctgttcgcatgaaaattaggccccttgtgacccaataggctgaagaagtgggaatgggagcactctgtcttctttgctagagaagtggagagaaaatacaaaaggtaaagcagttgagattctctacaacctaaaaaattcctaggtgctattttcttatcctttgtactgtagctaaatgtacctgagacatattagtctttgaaaaataaagttatgtaaggttttttttatctttaaatagctctgtgggttttaacatttttataaagatataccaagggccattcagtacatcaggaaagtggcagacagaagcttctctctgcaaccttgaagactattggtttgagaacttctcttcccataccacccaaaatcataatgccattggaaagcaaaaagttgttttatccatttgatttgaattgttttaagccaatattttaaggtaaaactcactgaatctaaccatagctgacctttgtagtagaatttacaacttataattacaatgcacaatttataattacaatatgtatttatgtcttttgctatggagcaaatccaggaaggcaagagaaacattctttcctaaatataaatgaaaatctatcctttaaactcttccactagacgttgtaatgcacacttatttttttcccaaggagtaaccaatttctttctaaaacacatttaaaattttaaaactatttatgaatattaaaaaaagacataattcacacattaataaacaatctcccaagtattgatttaacttcatttttctaataatcataaactatattctgtgacatgctaattattattaaatgtaagtcgttagttcgaaagcctctcactaagtatgatctatgctatattcaaaattcaacccatttactttggtcaatatttgatctaagttgcatctttaatcctggtggtcttgccttctgatttttaatttgtatccttttctattaagatatatttgtcattttctcttgaatatgtattaaaatatcccaagca

SEQ ID NO: 628375 - DNA, 506 bp, Homo sapiens
  misc_feature (21)..(21): n is a, c, g, or t
  misc_feature (50)..(50): n is a, c, g, or t
  misc_feature (56)..(56): n is a, c, g, or t
  misc_feature (68)..(68): n is a, c, g, or t
  misc_feature (99)..(99): n is a, c, g, or t
  misc_feature (126)..(126): n is a, c, g, or t
  misc_feature (174)..(174): n is a, c, g, or t
  misc_feature (179)..(179): n is a, c, g, or t
aaactttaatgttcggggtcngtatgttgtggtggaaatggtgaaggggnataaanaaattcaacaanagggaaaacaggtaatgaccaatggattaangccaaaagctcggaaaattaaaccctnaactaaaaggggaaacaaaaaagtgggaagctcccaaccggggtgggnggccngctcctaagaactaaggggatcccccggggctgcagggaagagaggccatgctaaatctcgccctgtcagaggtatccacacttctcctttggggaagccttccctgtccccctagactaagttaaatatttctgcacagtgttcccatggccccttgcatttccttcttaactctctgttacacgtcattgaaactacacttttttggtctgtttttgtgctagactgtaagttccttgggggcagggcctttgtctgtctcatctctgtattcccaaatgcctaacagtacagagccatgactcaataaatacatgttaaatgga

SEQ ID NO: 628376 - DNA, 334 bp, Homo sapiens
tactatgctttatcggtcaatctgataagagcacgcattccaccacaaaggttcaaatcaacatttacttcgtctaaaaaccatacatatatgagaaagtgaagatatacttcttaaagaaaaaattaacttacgatgatcggataaaatctcagggaccatatactactatgcggccaccagaggctggcttgatcgctctgaagtaccaccacttgaaagctcctattcttagaaactaagtataaccacattgacatggttgaccgattaaaaaccgcagtcagctaattacactcactctcatcattcaccttagcagggtaccgagctc

SEQ ID NO: 628377 - DNA, 646 bp, Homo sapiens
ggtattaattcttccaatccatagcctggaatgtttttccatttgtttttgtcacctatgatttctttcggcagtgttttgcagttctccttgtagagacctttcatgtccttgggaagatgtactcctagatacttttctgtggcaatggtgaaggagattacattcttgatttcgttctcagcttacattggtgtacagatatactactgatttttctacattgattttgtatcctgaaactttactgaagttgtttatcaggtctaggagacttttggtggagtctttaagggttttctaggtatagcatcatattgccagagaagagagatactctgactaccttttttcctacttggaagccatttattccattctcttgcctgactgctttggctaggacttccagtactatgttgaataggagtggcaagagtgggcaaccttatcttcttccagttcttaaggggaatgcttctagcttttgcctgttcagtatgatgttggctgtgggtttgtcatagatgactcattgtgctagactgtaagttccttgggggcagggcctttgtctgtctcatctctgtattcccaaatgcctaacagtacagagccatgactcaataaatacatgttaaatgga

SEQ ID NO: 628378 - DNA, 132 bp, Homo sapiens
gcgtcgttatgactacacccggctcaagcccaagctgacccaggaattcctcaacaccgtcaacccgaccggcgcctataccgtcgatggcaaagacaagacctggaaccgcgtaacacccggctcaccaat

SEQ ID NO: 628379 - DNA, 190 bp, Homo sapiens
ctacgaatttgcacatacctgaatttctgccgttccttgcgtcctgacgacattctgactactcgtacctgcggcagcttttccggaatctgtgccatcgcccggcttcttctatgactacgtgttcgactggaacatgctcaaatttggtgccagccgggccgccgattacgccgatgcggggggtacg

SEQ ID NO: 628380 - DNA, 4697 bp, Homo sapiens
agggcaatcctttctttcagctggaagtgctcctcaggagccagccccacccttagaaaagatgttttccatgaggatcgtctgcctggtcctaagtgtggtgggcacagcatggactgcagatagtggtgaaggtgactttctagctgaaggaggaggcgtgcgtggcccaagggttgtggaaagacatcaatctgcctgcaaagattcagactggcccttctgctctgatgaagactggaactacaaatgcccttctggctgcaggatgaaagggttgattgatgaagtcaatcaagattttacaaacagaataaataagctcaaaaattcactatttgaatatcagaagaacaataaggattctcattcgttgaccactaatataatggaaattttgagaggcgatttttcctcagccaataaccgtgataatacctacaaccgagtgtcagaggatctgagaagcagaattgaagtcctgaagcgcaaagtcatagaaaaagtacagcatatccagcttctgcagaaaaatgttagagctcagttggttgatatgaaacgactggaggtggacattgatattaagatccgatcttgtcgagggtcatgcagtagggctttagctcgtgaagtagatctgaaggactatgaagatcagcagaagcaacttgaacaggtcattgccaaagacttacttccctctagagataggcaacacttaccactgataaaaatgaaaccagttccagacttggttcccggaaattttaagagccagcttcagaaggtacccccagagtggaaggcattaacagacatgccgcagatgagaatggagttagagagacctggtggaaatgagattactcgaggaggctccacctcttatggaaccggatcagagacggaaagccccaggaaccctagcagtgctggaagctggaactctgggagctctggacctggaagtactggaaaccgaaaccctgggagctctgggactggagggactgcaacctggaaacctgggagctctggacctggaagtactggaagctggaactctgggagctctggaactggaagtactggaaaccaaaaccctgggagccctagacctggtagtaccggaacctggaatcctggcagctctgaacgcggaagtgctgggcactggacctctgagagctctgtatctggtagtactggacaatggcactctgaatctggaagttttaggccagatagcccaggctctgggaacgcgaggcctaacaacccagactggggcacatttgaagaggtgtcaggaaatgtaagtccagggacaaggagagagtaccacacagaaaaactggtcacttctaaaggagataaagagctcaggactggtaaagagaaggtcacctctggtagcacaaccaccacgcgtcgttcatgctctaaaaccgttactaagactgttattggtcctgatggtcacaaagaagttaccaaagaagtggtgacctccgaagatggttctgactgtcccgaggcaatggatttaggcacattgtctggcataggtactctggatgggttccgccataggcaccctgatgaagctgccttcttcgacactgcctcaactggaaaaacattcccaggtttcttctcacctatgttaggagagtttgtcagtgagactgagtctaggggctcagaatctggcatcttcacaaatacaaaggaatccagttctcatcaccctgggatagctgaattcccttcccgtggtaaatcttcaagttacagcaaacaatttactagtagcacgagttacaacagaggagactccacatttgaaagcaagagctataaaatggcagatgaggccggaagtgaagccgatcatgaaggaacacatagcaccaagagaggccatgctaaatctcgccctgtcagaggtatccacacttctcctttggggaagccttccctgtccccctagactaagttaaatatttctgcacagtgttcccatggccccttgcatttccttcttaactctctgttacacgtcattgaaactacacttttttggtctgtttttgtgctagactgtaagttccttgggggcagggcctttgtctgtctcatctctgtattcccaaatgcctaacagtacagagccatgactcaataaatacatgttaaatggatgaatgaattcctctgaaactctatttgagcttatttagtcaaattctttcactattcaaagtgtgtgctattagaattgtcacccaactgattaatcacatttttagtatgtgtctcagttgacatttaggtcaggctaaatacaagttgtgttagtattaagtgatgcttagctacctgtactggttacttgctattagtttgtgcaagtaaaattccaaatacatttgaggaaaatcccctttgcaatttgtaggtataaataaccgcttatttgcataagttctatcccactgtaagtgcatcctttccctatggagggaaggaaaggaggaagaaagaaaggaagggaaagaaacagtatttgccttatttaatctgagccgtgcctatctttgtaaagttaaatgagaataacttcttccaaccagcttaattttttttttagactgtgatgatgtcctccaaacacatccttcaggtacccaaagtggcattttcaatatcaagctaccgggatccagtaagattttttctgtttattgcgatcaagagaccagtttgggaggatggcttttgatccagcaaagaatggatggatcactgaattttaaccggacctggcaagactacaagagaggtttcggcagcctgaatgacgagggggaaggagaattctggctaggcaatgactacctccacttactaacccaaaggggctctgttcttagggttgaattagaggactgggctgggaatgaagcttatgcagaatatcacttccgggtaggctctgaggctgaaggctatgccctccaagtctcctcctatgaaggcactgcgggtgatgctctgattgagggttccgtagaggaaggggcagagtacacctctcacaacaacatgcagttcagcacctttgacagggatgcagaccagtgggaagagaactgtgcagaagtctatgggggaggctggtggtataataactgccaagcagccaatctcaatggaatctactaccctgggggctcctatgacccaaggaataacagtccttatgagattgagaatggagtggtctgggtttcctttagaggggcagattattccctcagggctgttcgcatgaaaattaggccccttgtgacccaataggctgaagaagtgggaatgggagcactctgtcttctttgctagagaagtggagagaaaatacaaaaggtaaagcagttgagattctctacaacctaaaaaattcctaggtgctattttcttatcctttgtactgtagctaaatgtacctgagacatattagtctttgaaaaataaagttatgtaaggttttttttatctttaaatagctctgtgggttttaacatttttataaagatataccaagggccattcagtacatcaggaaagtggcagacagaagcttctctctgcaaccttgaagactattggtttgagaacttctcttcccataccacccaaaatcataatgccattggaaagcaaaaagttgttttatccatttgatttgaattgttttaagccaatattttaaggtaaaactcactgaatctaaccatagctgacctttgtagtagaatttacaacttataattacaatgcacaatttataattacaatatgtatttatgtcttttgctatggagcaaatccaggaaggcaagagaaacattctttcctaaatataaatgaaaatctatcctttaaactcttccactagacgttgtaatgcacacttatttttttcccaaggagtaaccaatttctttctaaaacacatttaaaattttaaaactatttatgaatattaaaaaaagacataattcacacattaataaacaatctcccaagtattgatttaacttcatttttctaataatcataaactatattctgtgacatgctaattattattaaatgtaagtcgttagttcgaaagcctctcactaagtatgatctatgctatattcaaaattcaacccatttactttggtcaatatttgatctaagttgcatctttaatcctggtggtcttgccttctgatttttaatttgtatccttttctattaagatatatttgtcattttctcttgaatatgtattaaaatatcccaagcaaaaaaaaaaaaaaaaaaaaaaaaaaaaaaaaaaaaaaaaaaaaaaaaaaaaaaaaaaaacaaaaagcaacaagagtagagcggcagcagagaggcacaaggaaggtgtcgagcacccccggggggggcgaggggacaccaagggaggggagaggtggacacaagggtgcacaaaaagaaacatccggacaaaaacaatggggagagactctaccaaaaaaaaacacgcgcgggggaacacaaagagtgagagagaacagccacagaagagctctcgagggaacaacagggagccacataagagatgaagaggacggcctgaaaaagagtcgcgg

SEQ ID NO: 628381 - DNA, 281 bp, Homo sapiens
cccccccccccccctttttttccggggggggagggggggttccaaaccgtttgttttccttggcccctttaggtttgggggaaaaaacggggttttatacccccagccctggtacccccctccagggagaaggggaatgttttggggccccccttggtttttttttttggggggggccggttttaggtttttgttttttaaacccgggctttttttgggggaccccctgcccccaaatttttccccgaatttttggccccccttaaaaaggtttttgggga

SEQ ID NO: 628382 - DNA, 289 bp, Homo sapiens
gccccggggcccccctttttttttggggggggggacccccccccggggggggtggttttcccccccccggggggggtgccccctttttttttccccccccccccgggggggggggggggtttttggggggggtttttttttggggccccgggccctgggggggccccccccacccccttttttttttttttgggggggggggggggcccccccggggtttttccccccccccccccggggggggggggggggtttgggcccaaaaaaaaaaacccctttttttttttga

SEQ ID NO: 628383 - DNA, 497 bp, Homo sapiens
tcacagaatataaaaacagccagtcatggtactcgtaaatgtaatcccagcattttgggaggctaaagtaggaggatcacttgaggccaggagtttgagaccagcatggtgcaacatagtgagaccccacctctacaaaaaaaaaaaaaaaaaaaaaggcggacctggggggcacttttttgtgtccctagggatccaaagggcgggggcaagaggtctcctttaaccccaagaaattcagggctaacagaagagctatgattggtcccattgcactcagcccttcggtgagagatgtgagcatttcctctcaaaaatttaaaaccaaaccaaaaaacaatctttttttcaggggctgtacaaaatggggccaccggctgtgaatttgggcccagaagcatatagtgggtctacccccattaaaataaccaacaaatggggcccgggtgtgggggtcacacacttgtattccccaccatttggggggcccagggggg

SEQ ID NO: 628384 - DNA, 170 bp, Homo sapiens
acgctgcacgagcggtcacagtgattcatctgcctcacactcccgagtagcgtgggattacagtcacccctcctcactatgcctgggtcaaatttttatattttatgtagagacggggtttcaccatacttgtggcaggctgggtctggaactcctgtacctcaggttga

SEQ ID NO: 628385 - DNA, 4355 bp, Homo sapiens
agggcaatcctttctttcagctggaagtgctcctcaggagccagccccacccttagaaaagatgttttccatgaggatcgtctgcctggtcctaagtgtggtgggcacagcatggactgcagatagtggtgaaggtgactttctagctgaaggaggaggcgtgcgtggcccaagggttgtggaaagacatcaatctgcctgcaaagattcagactggcccttctgctctgatgaagactggaactacaaatgcccttctggctgcaggatgaaagggttgattgatgaagtcaatcaagattttacaaacagaataaataagctcaaaaattcactatttgaatatcagaagaacaataaggattctcattcgttgaccactaatataatggaaattttgagaggcgatttttcctcagccaataaccgtgataatacctacaaccgagtgtcagaggatctgagaagcagaattgaagtcctgaagcgcaaagtcatagaaaaagtacagcatatccagcttctgcagaaaaatgttagagctcagttggttgatatgaaacgactggaggtggacattgatattaagatccgatcttgtcgagggtcatgcagtagggctttagctcgtgaagtagatctgaaggactatgaagatcagcagaagcaacttgaacaggtcattgccaaagacttacttccctctagagataggcaacacttaccactgataaaaatgaaaccagttccagacttggttcccggaaattttaagagccagcttcagaaggtacccccagagtggaaggcattaacagacatgccgcagatgagaatggagttagagagacctggtggaaatgagattactcgaggaggctccacctcttatggaaccggatcagagacggaaagccccaggaaccctagcagtgctggaagctggaactctgggagctctggacctggaagtactggaaaccgaaaccctgggagctctgggactggagggactgcaacctggaaacctgggagctctggacctggaagtactggaagctggaactctgggagctctggaactggaagtactggaaaccaaaaccctgggagccctagacctggtagtaccggaacctggaatcctggcagctctgaacgcggaagtgctgggcactggacctctgagagctctgtatctggtagtactggacaatggcactctgaatctggaagttttaggccagatagcccaggctctgggaacgcgaggcctaacaacccagactggggcacatttgaagaggtgtcaggaaatgtaagtccagggacaaggagagagtaccacacagaaaaactggtcacttctaaaggagataaagagctcaggactggtaaagagaaggtcacctctggtagcacaaccaccacgcgtcgttcatgctctaaaaccgttactaagactgttattggtcctgatggtcacaaagaagttaccaaagaagtggtgacctccgaagatggttctgactgtcccgaggcaatggatttaggcacattgtctggcataggtactctggatgggttccgccataggcaccctgatgaagctgccttcttcgacactgcctcaactggaaaaacattcccaggtttcttctcacctatgttaggagagtttgtcagtgagactgagtctaggggctcagaatctggcatcttcacaaatacaaaggaatccagttctcatcaccctgggatagctgaattcccttcccgtggtaaatcttcaagttacagcaaacaatttactagtagcacgagttacaacagaggagactccacatttgaaagcaagagctataaaatggcagatgaggccggaagtgaagccgatcatgaaggaacacatagcaccaagagaggccatgctaaatctcgccctgtcagaggtatccacacttctcctttggggaagccttccctgtccccctagactaagttaaatatttctgcacagtgttcccatggccccttgcatttccttcttaactctctgttacacgtcattgaaactacacttttttggtctgtttttgtgctagactgtaagttccttgggggcagggcctttgtctgtctcatctctgtattcccaaatgcctaacagtacagagccatgactcaataaatacatgttaaatggatgaatgaattcctctgaaactctatttgagcttatttagtcaaattctttcactattcaaagtgtgtgctattagaattgtcacccaactgattaatcacatttttagtatgtgtctcagttgacatttaggtcaggctaaatacaagttgtgttagtattaagtgatgcttagctacctgtactggttacttgctattagtttgtgcaagtaaaattccaaatacatttgaggaaaatcccctttgcaatttgtaggtataaataaccgcttatttgcataagttctatcccactgtaagtgcatcctttccctatggagggaaggaaaggaggaagaaagaaaggaagggaaagaaacagtatttgccttatttaatctgagccgtgcctatctttgtaaagttaaatgagaataacttcttccaaccagcttaattttttttttagactgtgatgatgtcctccaaacacatccttcaggtacccaaagtggcattttcaatatcaagctaccgggatccagtaagattttttctgtttattgcgatcaagagaccagtttgggaggatggcttttgatccagcaaagaatggatggatcactgaattttaaccggacctggcaagactacaagagaggtttcggcagcctgaatgacgagggggaaggagaattctggctaggcaatgactacctccacttactaacccaaaggggctctgttcttagggttgaattagaggactgggctgggaatgaagcttatgcagaatatcacttccgggtaggctctgaggctgaaggctatgccctccaagtctcctcctatgaaggcactgcgggtgatgctctgattgagggttccgtagaggaaggggcagagtacacctctcacaacaacatgcagttcagcacctttgacagggatgcagaccagtgggaagagaactgtgcagaagtctatgggggaggctggtggtataataactgccaagcagccaatctcaatggaatctactaccctgggggctcctatgacccaaggaataacagtccttatgagattgagaatggagtggtctgggtttcctttagaggggcagattattccctcagggctgttcgcatgaaaattaggccccttgtgacccaataggctgaagaagtgggaatgggagcactctgtcttctttgctagagaagtggagagaaaatacaaaaggtaaagcagttgagattctctacaacctaaaaaattcctaggtgctattttcttatcctttgtactgtagctaaatgtacctgagacatattagtctttgaaaaataaagttatgtaaggttttttttatctttaaatagctctgtgggttttaacatttttataaagatataccaagggccattcagtacatcaggaaagtggcagacagaagcttctctctgcaaccttgaagactattggtttgagaacttctcttcccataccacccaaaatcataatgccattggaaagcaaaaagttgttttatccatttgatttgaattgttttaagccaatattttaaggtaaaactcactgaatctaaccatagctgacctttgtagtagaatttacaacttataattacaatgcacaatttataattacaatatgtatttatgtcttttgctatggagcaaatccaggaaggcaagagaaacattctttcctaaatataaatgaaaatctatcctttaaactcttccactagacgttgtaatgcacacttatttttttcccaaggagtaaccaatttctttctaaaacacatttaaaattttaaaactatttatgaatattaaaaaaagacataattcacacattaataaacaatctcccaagtattgatttaacttcatttttctaataatcataaactatattctgtgacatgctaattattattaaatgtaagtcgttagttcgaaagcctctcactaagtatgatctatgctatattcaaaattcaacccatttactttggtcaatatttgatctaagttgcatctttaatcctggtggtcttgccttctgatttttaatttgtatccttttctattaagatatatttgccattctccctgaatttttgtttaatttcg

SEQ ID NO: 628386 - DNA, 365 bp, Homo sapiens
ttttttttttttgagacgtgtctccatctgttgcccatgcagatccaccactgcagatccgctagagtgcagtggcatgatctcagcacactgcagcctccacctcccgggttcaaaccattctgcctcagcctcccgagtagctgggattacaggcgcccaccaccatgcccggctaatttttttttttgtatttttagtaaagatagggtttcactgtgttaaccaggctggtcccgaactcctgaccttaggggatccaccagccttggcctcccaaagtgctgggattacaggcgtgacgaccgcacccagccaaattctgggcatttctctcaggcaaaagcacatacccatcacactta

SEQ ID NO: 628387 - DNA, 4643 bp, Homo sapiens
agggcaatcctttctttcagctggaagtgctcctcaggagccagccccacccttagaaaagatgttttccatgaggatcgtctgcctggtcctaagtgtggtgggcacagcatggactgcagatagtggtgaaggtgactttctagctgaaggaggaggcgtgcgtggcccaagggttgtggaaagacatcaatctgcctgcaaagattcagactggcccttctgctctgatgaagactggaactacaaatgcccttctggctgcaggatgaaagggttgattgatgaagtcaatcaagattttacaaacagaataaataagctcaaaaattcactatttgaatatcagaagaacaataaggattctcattcgttgaccactaatataatggaaattttgagaggcgatttttcctcagccaataaccgtgataatacctacaaccgagtgtcagaggatctgagaagcagaattgaagtcctgaagcgcaaagtcatagaaaaagtacagcatatccagcttctgcagaaaaatgttagagctcagttggttgatatgaaacgactggaggtggacattgatattaagatccgatcttgtcgagggtcatgcagtagggctttagctcgtgaagtagatctgaaggactatgaagatcagcagaagcaacttgaacaggtcattgccaaagacttacttccctctagagataggcaacacttaccactgataaaaatgaaaccagttccagacttggttcccggaaattttaagagccagcttcagaaggtacccccagagtggaaggcattaacagacatgccgcagatgagaatggagttagagagacctggtggaaatgagattactcgaggaggctccacctcttatggaaccggatcagagacggaaagccccaggaaccctagcagtgctggaagctggaactctgggagctctggacctggaagtactggaaaccgaaaccctgggagctctgggactggagggactgcaacctggaaacctgggagctctggacctggaagtactggaagctggaactctgggagctctggaactggaagtactggaaaccaaaaccctgggagccctagacctggtagtaccggaacctggaatcctggcagctctgaacgcggaagtgctgggcactggacctctgagagctctgtatctggtagtactggacaatggcactctgaatctggaagttttaggccagatagcccaggctctgggaacgcgaggcctaacaacccagactggggcacatttgaagaggtgtcaggaaatgtaagtccagggacaaggagagagtaccacacagaaaaactggtcacttctaaaggagataaagagctcaggactggtaaagagaaggtcacctctggtagcacaaccaccacgcgtcgttcatgctctaaaaccgttactaagactgttattggtcctgatggtcacaaagaagttaccaaagaagtggtgacctccgaagatggttctgactgtcccgaggcaatggatttaggcacattgtctggcataggtactctggatgggttccgccataggcaccctgatgaagctgccttcttcgacactgcctcaactggaaaaacattcccaggtttcttctcacctatgttaggagagtttgtcagtgagactgagtctaggggctcagaatctggcatcttcacaaatacaaaggaatccagttctcatcaccctgggatagctgaattcccttcccgtggtaaatcttcaagttacagcaaacaatttactagtagcacgagttacaacagaggagactccacatttgaaagcaagagctataaaatggcagatgaggccggaagtgaagccgatcatgaaggaacacatagcaccaagagaggccatgctaaatctcgccctgtcagaggtatccacacttctcctttggggaagccttccctgtccccctagactaagttaaatatttctgcacagtgttcccatggccccttgcatttccttcttaactctctgttacacgtcattgaaactacacttttttggtctgtttttgtgctagactgtaagttccttgggggcagggcctttgtctgtctcatctctgtattcccaaatgcctaacagtacagagccatgactcaataaatacatgttaaatggatgaatgaattcctctgaaactctatttgagcttatttagtcaaattctttcactattcaaagtgtgtgctattagaattgtcacccaactgattaatcacatttttagtatgtgtctcagttgacatttaggtcaggctaaatacaagttgtgttagtattaagtgatgcttagctacctgtactggttacttgctattagtttgtgcaagtaaaattccaaatacatttgaggatcccactgtaagtgcatcctttccctatggagggaaggaaaggaggaagaaagaaaggaagggaaagaaacagtatttgccttatttaatctgagccgtgcctatctttgtaaagttaaatgagaataacttcttccaaccagcttaattttttttttagactgtgatgatgtcctccaaacacatccttcaggtacccaaagtggcattttcaatatcaagctaccgggatccagtaagattttttctgtttattgcgatcaagagaccagtttgggaggatggcttttgatccagcaaagaatggatggatcactgaattttaaccggacctggcaagactacaagagaggtttcggcagcctgaatgacgagggggaaggagaattctggctaggcaatgactacctccacttactaacccaaaggggctctgttcttagggttgaattagaggactgggctgggaatgaagcttatgcagaatatcacttccgggtaggctctgaggctgaaggctatgccctccaagtctcctcctatgaaggcactgcgggtgatgctctgattgagggttccgtagaggaaggggcagagtacacctctcacaacaacatgcagttcagcacctttgacagggatgcagaccagtgggaagagaactgtgcagaagtctatgggggaggctggtggtataataactgccaagcagccaatctcaatggaatctactaccctgggggctcctatgacccaaggaataacagtccttatgagattgagaatggagtggtctgggtttcctttagaggggcagattattccctcagggctgttcgcatgaaaattaggccccttgtgacccaataggctgaagaagtgggaatgggagcactctgtcttctttgctagagaagtggagagaaaatacaaaaggtaaagcagttgagattctctacaacctaaaaaattcctaggtgctattttcttatcctttgtactgtagctaaatgtacctgagacatattagtctttgaaaaataaagttatgtaaggttttttttatctttaaatagctctgtgggttttaacatttttataaagatataccaagggccattcagtacatcaggaaagtggcagacagaagcttctctctgcaaccttgaagactattggtttgagaacttctcttcccataccacccaaaatcataatgccattggaaagcaaaaagttgttttatccatttgatttgaattgttttaagccaatattttaaggtaaaactcactgaatctaaccatagctgacctttgtagtagaatttacaacttataattacaatgcacaatttataattacaatatgtatttatgtcttttgctatggagcaaatccaggaaggcaagagaaacattctttcctaaatataaatgaaaatctatcctttaaactcttccactagacgttgtaatgcacacttatttttttcccaaggagtaaccaatttctttctaaaacacatttaaaattttaaaactatttatgaatattaaaaaaagacataattcacacattaataaacaatctcccaagtattgatttaacttcatttttctaataatcataaactatattctgtgacatgctaattattattaaatgtaagtcgttagttcgaaagcctctcactaagtatgatctatgctatattcaaaattcaacccatttactttggtcaatatttgatctaagttgcatctttaatcctggtggtcttgccttctgatttttaatttgtatccttttctattaagatatatttgtcattttctcttgaatatgtattaaaatatcccaagcaaaaaaaaaaaaaaaaaaaaaaaaaaaaaaaaaaaaaaaaaaaaaaaaaaaaaaaaaaaacaaaaagcaacaagagtagagcggcagcagagaggcacaaggaaggtgtcgagcacccccggggggggcgaggggacaccaagggaggggagaggtggacacaagggtgcacaaaaagaaacatccggacaaaaacaatggggagagactctaccaaaaaaaaacacgcgcgggggaacacaaagagtgagagagaacagccacagaagagctctcgagggaacaacagggagccacataagagatgaagaggacggcctgaaaaagagtcgcgg

SEQ ID NO: 628388 - DNA, 425 bp, Homo sapiens
  misc_feature (272)..(272): n is a, c, g, or t
ctacggcaggtgtactggaaaacaggaagtgtagggggggggtttctcctaagccaaaaccttcgggggccacacagttcactatctctattaataggagcattactattcaattatctggctattccagaaagctacgggttagaaaagaagaaggtattggtttcaggtacctcaaagaaaatctatttatttggaacaacgagatatatcaatggaatcctgcaggagagtaaataccctcccggtcaagaacagaggactcactagtncgggtttactccttcaacctcttttttctttggagaagcggaatctgggctcgggtcacccgagggcgggagttgcagggggtgctagtgtcgggctcagtgggaacctttcaccttccgaggtccaaggtgatcctcggggcttcagcaatc

SEQ ID NO: 628389 - DNA, 107 bp, Homo sapiens
cttctcatctgctgtcatacaccttcctgcatagtctactcaaatcttttgctctttttaattaggttgtttactttttttaatagagatggggtcttgctatgttg

SEQ ID NO: 628390 - DNA, 119 bp, Homo sapiens
gcttccgttgcatgtggtgcatcattatattagtttacatactttccaacaaggaaatcttcaacgcttaagaactaccccgccaacacttttttttttccttggccttctatggttgt

SEQ ID NO: 628391 - DNA, 4640 bp, Homo sapiens
agggcaatcctttctttcagctggaagtgctcctcaggagccagccccacccttagaaaagatgttttccatgaggatcgtctgcctggtcctaagtgtggtgggcacagcatggactgcagatagtggtgaaggtgactttctagctgaaggaggaggcgtgcgtggcccaagggttgtggaaagacatcaatctgcctgcaaagattcagactggcccttctgctctgatgaagactggaactacaaatgcccttctggctgcaggatgaaagggttgattgatgaagtcaatcaagattttacaaacagaataaataagctcaaaaattcactatttgaatatcagaagaacaataaggattctcattcgttgaccactaatataatggaaattttgagaggcgatttttcctcagccaataaccgtgataatacctacaaccgagtgtcagaggatctgagaagcagaattgaagtcctgaagcgcaaagtcatagaaaaagtacagcatatccagcttctgcagaaaaatgttagagctcagttggttgatatgaaacgactggaggtggacattgatattaagatccgatcttgtcgagggtcatgcagtagggctttagctcgtgaagtagatctgaaggactatgaagatcagcagaagcaacttgaacaggtcattgccaaagacttacttccctctagagataggcaacacttaccactgataaaaatgaaaccagttccagacttggttcccggaaattttaagagccagcttcagaaggtacccccagagtggaaggcattaacagacatgccgcagatgagaatggagttagagagacctggtggaaatgagattactcgaggaggctccacctcttatggaaccggatcagagacggaaagccccaggaaccctagcagtgctggaagctggaactctgggagctctggacctggaagtactggaaaccgaaaccctgggagctctgggactggagggactgcaacctggaaacctgggagctctggacctggaagtactggaagctggaactctgggagctctggaactggaagtactggaaaccaaaaccctgggagccctagacctggtagtaccggaacctggaatcctggcagctctgaacgcggaagtgctgggcactggacctctgagagctctgtatctggtagtactggacaatggcactctgaatctggaagttttaggccagatagcccaggctctgggaacgcgaggcctaacaacccagactggggcacatttgaagaggtgtcaggaaatgtaagtccagggacaaggagagagtaccacacagaaaaactggtcacttctaaaggagataaagagctcaggactggtaaagagaaggtcacctctggtagcacaaccaccacgcgtcgttcatgctctaaaaccgttactaagactgttattggtcctgatggtcacaaagaagttaccaaagaagtggtgacctccgaagatggttctgactgtcccgaggcaatggatttaggcacattgtctggcataggtactctggatgggttccgccataggcaccctgatgaagctgccttcttcgacactgcctcaactggaaaaacattcccaggtttcttctcacctatgttaggagagtttgtcagtgagactgagtctaggggctcagaatctggcatcttcacaaatacaaaggaatccagttctcatcaccctgggatagctgaattcccttcccgtggtaaatcttcaagttacagcaaacaatttactagtagcacgagttacaacagaggagactccacatttgaaagcaagagctataaaatggcagatgaggccggaagtgaagccgatcatgaaggaacacatagcaccaagagaggccatgctaaatctcgccctgtcagaggtatccacacttctcctttggggaagccttccctgtccccctagactaagttaaatatttctgcacagtgttcccatggccccttgcatttccttcttaactctctgttacacgtcattgaaactacacttttttggtctgtttttgtgctagactgtaagttccttgggggcagggcctttgtctgtctcatctctgtattcccaaatgcctaacagtacagagccatgactcaataaatacatgttaaatggatgaatgaattcctctgaaactctatttgagcttatttagtcaaattctttcactattcaaagtgtgtgctattagaattgtcacccaactgattaatcacatttttagtatgtgtctcagttgacatttaggtcaggctaaatacaagttgtgttagtattaagtgatgcttagctacctgtactggttacttgctattagtttgtgcaagtaaaattccaaatacatttgaggaaaatcccctttgcaatttgtaggtataaataaccgcttatttgcataagttctatcccactgtaagtgcatcctttccctatggagggaaggaaaggaggaagaaagaaaggaagggaaagaaacagtatttgccttatttaatctgagccgtgcctatctttgtaaagttaaatgagaataacttcttccaaccagcttaattttttttttagactgtgatgatgtcctccaaacacatccttcaggtacccaaagtggcattttcaatatcaagctaccgggatccagtaagattttttctgtttattgcgatcaagagaccagtttgggaggatggcttttgatccagcaaagaatggatggatcactgaattttaaccggacctggcaagactacaagagaggtttcggcagcctgaatgacgagggggaaggagaattctggctaggcaatgactacctccacttactaacccaaaggggctctgttcttagggttgaattagaggactgggctgggaatgaagcttatgcagaatatcacttccgggtaggctctgaggctgaaggctatgccctccaagtctcctcctatgaaggcactgcgggtgatgctctgattgagggttccgtagaggaaggggcagagtacacctctcacaacaacatgcagttcagcacctttgacagggatgcagaccagtgggaagagaactgtgcagaagtctatgggggaggctggtggtataataactgccaagcagccaatctcaatggaatctactaccctgggggctcctatgacccaaggaataacagtccttatgagattgagaatggagtggtctgggtttcctttagaggggcagattattccctcagggctgttcgcatgaaaattaggccccttgtgacccaataggctgaagaagtgggaatgggagcactctgtcttctttgctagagaagtggagagaaaatacaaaaggtaaagcagttgagattctctacaacctaaaaaattcctaggtgctattttcttatcctttgtactgtagctaaatgtacctgagacatattagtctttgaaaaataaagttatgtaaggttttttttatctttaaatagctctgtgggttttaacatttttataaagatataccaagggccattcagtacatcaggaaagtggcagacagaagcttctctctgcaaccttgaagactattggtttgagaacttctcttcccataccaccctttaagccaatattttaaggtaaaactcactgaatctaaccatagctgacctttgtagtagaatttacaacttataattacaatgcacaatttataattacaatatgtatttatgtcttttgctatggagcaaatccaggaaggcaagagaaacattctttcctaaatataaatgaaaatctatcctttaaactcttccactagacgttgtaatgcacacttatttttttcccaaggagtaaccaatttctttctaaaacacatttaaaattttaaaactatttatgaatattaaaaaaagacataattcacacattaataaacaatctcccaagtattgatttaacttcatttttctaataatcataaactatattctgtgacatgctaattattattaaatgtaagtcgttagttcgaaagcctctcactaagtatgatctatgctatattcaaaattcaacccatttactttggtcaatatttgatctaagttgcatctttaatcctggtggtcttgccttctgatttttaatttgtatccttttctattaagatatatttgtcattttctcttgaatatgtattaaaatatcccaagcaaaaaaaaaaaaaaaaaaaaaaaaaaaaaaaaaaaaaaaaaaaaaaaaaaaaaaaaaaaacaaaaagcaacaagagtagagcggcagcagagaggcacaaggaaggtgtcgagcacccccggggggggcgaggggacaccaagggaggggagaggtggacacaagggtgcacaaaaagaaacatccggacaaaaacaatggggagagactctaccaaaaaaaaacacgcgcgggggaacacaaagagtgagagagaacagccacagaagagctctcgagggaacaacagggagccacataagagatgaagaggacggcctgaaaaagagtcgcgg

SEQ ID NO: 628392 - DNA, 6501 bp, Homo sapiens
tcctgctatacccacagtggtggtcatctcttctgatcttcacagccaatcagctcccaaggcccctgacctcagctcagcttttgtagatccttatgacaccatcctttaagactggaatcctagggcaggctgttttattcccgcctcctgaggcctttctgaggatctgtggcttgtctctgtcctgagggtgaagatggatgacagatgctacccagtaatctttccagatgagcggaatttccgccccttcacttccgactctctggctgcaattgagaagcggattgccatccaaaaggagaaaaagaagtctaaagaccagacaggagaagtaccccagcctcggcctcagcttgacctaaaggcctccaggaagttgcccaagctctatggcgacattcctcgtgagctcataggaaagcctctggaagacttggacccattctaccgaaatcataagacatttatggtgttaaacagaaagaggacaatctaccgcttcagtgccaagcatgccttgttcatttttgggcctttcaattcaatcagaagtttagccattagagtctcagtccattcattgttcagcatgttcattatcggcaccgttatcatcaactgcgtgttcatggctacagggcctgctaaaaacagcaacagtaacaatactgacattgcagagtgtgtcttcactgggatttatatttttgaagctttgattaaaatattggcaagaggtttcattctggatgagttttctttccttcgagatccatggaactggctggactccattgtcattggaatagcgattgtgtcatatattccaggaatcaccatcaaactattgcccctgcgtaccttccgtgtgttcagagctttgaaagcaatttcagtagtttcacgtctgaaggtcatcgtgggggccttgctacgctctgtgaagaagctggtcaacgtgattatcctcaccttcttttgcctcagcatctttgccctggtaggtcagcagctcttcatgggaagtctgaacctgaaatgcatctcgagggactgtaaaaatatcagtaacccggaagcttatgaccattgctttgaaaagaaagaaaattcacctgaattcaaaatgtgtggcatctggatgggtaacagtgcctgttccatacaatatgaatgtaagcacaccaaaattaatcctgactataattatacgaattttgacaactttggctggtcttttcttgccatgttccggctgatgacccaagattcctgggagaagctttatcaacagaccctgcgtactactgggctctactcagtcttcttcttcattgtggtcattttcctgggctccttctacctgattaacttaaccctggctgttgttaccatggcatatgaggagcagaacaagaatgtagctgcagagatagaggccaaggaaaagatgtttcaggaagcccagcagctgttaaaggaggaaaaggaggctctggttgccatgggaattgacagaagttcacttacttcccttgaaacatcatattttaccccaaaaaagagaaagctctttggtaataagaaaaggaagtccttctttttgagagagtctgggaaagaccagcctcctgggtcagattctgatgaagattgccaaaaaaagccacagctcctagagcaaaccaaacgactgtcccagaatctatcactggaccactttgatgagcatggagatcctctccaaaggcagagagcactgagtgccgtcagcatcctcaccatcaccatgaaggaacaagaaaaatcacaagagccttgtctcccttgcggagaaaacctggcatccaagtacctcgtgtggaactgttgcccccagtggctgtgcgttaagaaggtcctgagaactgtgatgactgacccgtttactgagctggccatcaccatctgcatcatcatcaacactgtcttcttggccatggagcatcacaagatggaggccagttttgagaagatgttgaatatagggaatttggttttcactagcatttttatagcagaaatgtgcctaaaaatcattgcgctcgatccctaccactactttcgccgaggctggaacatttttgacagcattgttgctcttctgagttttgcagatgtaatgaactgtgtacttcaaaagagaagctggccattcttgcgttccttcagggtgctcagggtcttcaagttagccaaatcctggccaactttgaacacactaattaagataatcggcaactctgtcggagcccttggaaacctgactgtggtcctggtcattgtgatctttattttctcagtagttggcatgcagctttttggccgtagcttcaattcccaaaagagtccaaaactctgtaacccgacaggcccgacagtctcatgtttacggcactggcacatgggggatttctggcactccttcctagtggtattccgcatcctctgcggggaatggatcgaaaatatgtgggaatgtatgcaagaagcgaatgcatcatcatcattgtgtgttattgtcttcatattgatcacggtgataggaaaacttgtggtgctcaacctcttcattgccttactgctcaattcctttagcaatgaggaaagaaatggaaacttagaaggagaggccaggaaaactaaagtccagttagcactggatcgattccgccgggctttttgttttgtgagacacactcttgagcatttctgtcacaagtggtgcaggaagcaaaacttaccacagcaaaaagaggtggcaggaggctgtgctgcacaaagcaaagacatcattcccctggtcatggagatgaaaaggggctcagagacccaggaggagcttggtatactaacctctgtaccaaagaccctgggcgtcaggcatgattggacttggttggcaccacttgcggaggaggaagatgacgttgaattttctggtgaagataatgcacagcgcatcacacaacctgagcctgaacaacaggcctatgagctccatcaggagaacaagaagcccacgagccagagagttcaaagtgtggaaattgacatgttctctgaagatgagcctcatctgaccatacaggatccccgaaagaagtctgatgttaccagtatactatcagaatgtagcaccattgatcttcaggatggctttggatggttacctgagatggttcccaaaaagcaaccagagagatgtttgcccaaaggctttggttgctgctttccatgctgtagcgtggacaagagaaagcctccctgggtcatttggtggaacctgcggaaaacctgctaccaaatagtgaaacacagctggtttgagagctttattatctttgtgattctgctgagcagtggggcactgatatttgaagatgttcaccttgagaaccaacccaaaatccaagaattactaaattgtactgacattatttttacacatatttttatcctggagatggtactaaaatgggtagccttcggatttggaaagtatttcaccagtgcctggtgctgccttgatttcatcattgtgattgtctctgtgaccaccctcattaacttaatggaattgaagtccttccggactctacgagcactgaggcctcttcgtgcgctgtcccagtttgaaggaatgaaggtggtggtcaatgctctcataggtgccatacctgccattctgaatgttttgcttgtctgcctcattttctggctcgtattttgtattctgggagtatacttcttttctggaaaatttgggaaatgcattaatggaacagactcagttataaattataccatcattacaaataaaagtcaatgtgaaagtggcaatttctcttggatcaaccagaaagtcaactttgacaatgtgggaaatgcttacctcgctctgctgcaagtggcaacatttaagggctggatggatattatatatgcagctgttgattccacagagaaagaacaacagccagagtttgagagcaattcactcggttacatttacttcgtagtctttatcatctttggctcattcttcactctgaatctcttcattggcgttatcattgacaacttcaaccaacagcagaaaaagttaggtggccaagacatttttatgacagaagaacagaagaaatactataatgcaatgaaaaaattaggatccaaaaaacctcaaaaacccattccacggcctctgaacaaatgtcaaggtctcgtgttcgacatagtcacaagccagatctttgacatcatcatcataagtctcattatcctaaacatgattagcatgatggctgaatcatacaaccaacccaaagccatgaaatccatccttgaccatctcaactgggtctttgtggtcatctttacgttagaatgtctcatcaaaatctttgctttgaggcaatactacttcaccaatggctggaatttatttgactgtgtggtcgtgcttctttccattgttagtacaatgatttctaccttggaaaatcaggagcacattcctttccctccgacgctcttcagaattgtccgcttggctcggattggccgaatcctgaggcttgtccgggctgcacgaggaatcaggactctcctctttgctctgatgatgtcgcttccttctctgttcaacattggtcttctactctttctgattatgtttatctatgccattctgggtatgaactggttttccaaagtgaatccagagtctggaatcgatgacatattcaacttcaagacttttgccagcagcatgctctgtctcttccagataagcacatcagcaggttgggattccctgctcagccccatgctgcgatcaaaagaatcatgtaactcttcctcagaaaactgccacctccctggcatagccacatcctactttgtcagttacattatcatctcctttctcattgttgtcaacatgtacattgctgtgattttagagaacttcaatacagccactgaagaaagtgaggaccctttgggtgaagatgactttgacatattttatgaagtgtgggaaaagtttgacccagaagcaacacaatttatcaaatattctgccctttctgactttgctgatgccttgcctgagcctttgcgtgtcgcaaagccaaataaatatcaatttctagtaatggacttgcccatggtgagtgaagatcgcctccactgcatggatattcttttcgccttcaccgctagggtactcggtggctctgatggcctagatagtatgaaagcaatgatggaagagaagttcatggaagccaatcctctcaagaagttgtatgaacccatagtcaccaccaccaagagaaaggaagaggaaagaggtgctgctattattcaaaaggcctttcgaaagtacatgatgaaggtgaccaagggtgaccaaggtgaccaaaatgacttggaaaacgggcctcattcaccactccagactctttgcaatggagacttgtctagctttggggtggccaagggcaaggtccactgtgactgagccctcacctccacgcctacctcatagcttcacagccttgccctcagcctctgagctccaggggtcagcagcttagtgtatcaacagggagtggattcaccaaattagccattccattttcttttctggctaaataaatgatatttcaatttcattttaaatgatacttacagagatataagataaggctacttgacaaccagcggtactattttaataaggaagaagacaccaggaaggactgtaaaaggacattccaattttaggattggaatagttcaagccgggcgcagtggctcatgcctggaatcccagcactttgagaggccaaggcaggtggatcacgaggtcaagagatcgagaccatcctggccaaccatgatgaaactccgtctctactaaaatacaaaaattagctgggcatggttgcgtgcgcctgtagtcccagctacttgggaggctgaggcaggagaatcgcttaaacctgggagacggaggttgcagtgagccaagatcgtgtcactgcactccagcctggtgacagagtgagactctgtttcaaaaaagaaaagaaaagaaacatggttcaaattatatctaaacaaaaaagaataagaaacaaaaaacacattaaaattttaagttgtattttctatgtttctagatacatcatttttgtttgatattttcctgatgcaagtatgtggtttatcacatgtagctcttttgcatgctaaatgaaaattcaagacttgccaataaatgaatagcttattgcagacattttttaccaacattaattattttgggtttgtttaaaacctagaggcacaatcttgacttgtcaattactaccctttcacaagctaccatctcagatatatatatatatataaattcaataaagctttctgtttgtgttccat

SEQ ID NO: 628393 - DNA, 5728 bp, Homo sapiens
  misc_feature (5632)..(5632): n is a, c, g, or t
tcctgctatacccacagtggtggtcatctcttctgatcttcacagccaatcagctcccaaggcccctgacctcagctcagcttttgtagatccttatgacaccatcctttaagactggaatcctagggcaggctgttttattcccgcctcctgaggcctttctgaggatctgtggcttgtctctgtcctgagggtgaagatggatgacagatgctacccagtaatctttccagatgagcggaatttccgccccttcacttccgactctctggctgcaattgagaagcggattgccatccaaaaggagaaaaagaagtctaaagaccagacaggagaagtaccccagcctcggcctcagcttgacctaaaggcctccaggaagttgcccaagctctatggcgacattcctcgtgagctcataggaaagcctctggaagacttggacccattctaccgaaatcataagacatttatggtgttaaacagaaagaggacaatctaccgcttcagtgccaagcatgccttgttcatttttgggcctttcaattcaatcagaagtttagccattagagtctcagtccattcattgttcagcatgttcattatcggcaccgttatcatcaactgcgtgttcatggctacagggcctgctaaaaacagcaacagtaacaatactgacattgcagagtgtgtcttcactgggatttatatttttgaagctttgattaaaatattggcaagaggtttcattctggatgagttttctttccttcgagatccatggaactggctggactccattgtcattggaatagcgattgtgtcatatattccaggaatcaccatcaaactattgcccctgcgtaccttccgtgtgttcagagctttgaaagcaatttcagtagtttcacgtctgaaggtcatcgtgggggccttgctacgctctgtgaagaagctggtcaacgtgattatcctcaccttcttttgcctcagcatctttgccctggtaggtcagcagctcttcatgggaagtctgaacctgaaatgcatctcgagggactgtaaaaatatcagtaacccggaagcttatgaccattgctttgaaaagaaagaaaattcacctgaattcaaaatgtgtggcatctggatgggtaacagtgcctgttccatacaatatgaatgtaagcacaccaaaattaatcctgactataattatacgaattttgacaactttggctggtcttttcttgccatgttccggctgatgacccaagattcctgggagaagctttatcaacagaccctgcgtactactgggctctactcagtcttcttcttcattgtggtcattttcctgggctccttctacctgattaacttaaccctggctgttgttaccatggcatatgaggagcagaacaagaatgtagctgcagagatagaggccaaggaaaagatgtttcaggaagcccagcagctgttaaaggaggaaaaggaggctctggttgccatgggaattgacagaagttcacttacttcccttgaaacatcatattttaccccaaaaaagagaaagctctttggtaataagaaaaggaagtccttctttttgagagagtctgggaaagaccagcctcctgggtcagattctgatgaagattgccaaaaaaagccacagctcctagagcaaaccaaacgactgtcccagaatctatcactggaccactttgatgagcatggagatcctctccaaaggcagagagcactgagtgccgtcagcatcctcaccatcaccatgaaggaacaagaaaaatcacaagagccttgtctcccttgcggagaaaacctggcatccaagtacctcgtgtggaactgttgcccccagtggctgtgcgttaagaaggtcctgagaactgtgatgactgacccgtttactgagctggccatcaccatctgcatcatcatcaacactgtcttcttggccatggagcatcacaagatggaggccagttttgagaagatgttgaatatagggaatttggttttcactagcatttttatagcagaaatgtgcctaaaaatcattgcgctcgatccctaccactactttcgccgaggctggaacatttttgacagcattgttgctcttctgagttttgcagatgtaatgaactgtgtacttcaaaagagaagctggccattcttgcgttccttcagggtgctcagggtcttcaagttagccaaatcctggccaactttgaacacactaattaagataatcggcaactctgtcggagcccttggaaacctgactgtggtcctggtcattgtgatctttattttctcagtagttggcatgcagctttttggccgtagcttcaattcccaaaagagtccaaaactctgtaacccgacaggcccgacagtctcatgtttacggcactggcacatgggggatttctggcactccttcctagtggtattccgcatcctctgcggggaatggatcgaaaatatgtgggaatgtatgcaagaagcgaatgcatcatcatcattgtgtgttattgtcttcatattgatcacggtgataggaaaacttgtggtgctcaacctcttcattgccttactgctcaattcctttagcaatgaggaaagaaatggaaacttagaaggagaggccaggaaaactaaagtccagttagcactggatcgattccgccgggctttttgttttgtgagacacactcttgagcatttctgtcacaagtggtgcaggaagcaaaacttaccacagcaaaaagaggtggcaggaggctgtgctgcacaaagcaaagacatcattcccctggtcatggagatgaaaaggggctcagagacccaggaggagcttggtatactaacctctgtaccaaagaccctgggcgtcaggcatgattggacttggttggcaccacttgcggaggaggaagatgacgttgaattttctggtgaagataatgcacagcgcatcacacaacctgagcctgaacaacaggcctatgagctccatcaggagaacaagaagcccacgagccagagagttcaaagtgtggaaattgacatgttctctgaagatgagcctcatctgaccatacaggatccccgaaagaagtctgatgttaccagtatactatcagaatgtagcaccattgatcttcaggatggctttggatggttacctgagatggttcccaaaaagcaaccagagagatgtttgcccaaaggctttggttgctgctttccatgctgtagcgtggacaagagaaagcctccctgggtcatttggtggaacctgcggaaaacctgctaccaaatagtgaaacacagctggtttgagagctttattatctttgtgattctgctgagcagtggggcactgatatttgaagatgttcaccttgagaaccaacccaaaatccaagaattactaaattgtactgacattatttttacacatatttttatcctggagatggtactaaaatgggtagccttcggatttggaaagtatttcaccagtgcctggtgctgccttgatttcatcattgtgattgtctctgtgaccaccctcattaacttaatggaattgaagtccttccggactctacgagcactgaggcctcttcgtgcgctgtcccagtttgaaggaatgaaggtggtggtcaatgctctcataggtgccatacctgccattctgaatgttttgcttgtctgcctcattttctggctcgtattttgtattctgggagtatacttcttttctggaaaatttgggaaatgcattaatggaacagactcagttataaattataccatcattacaaataaaagtcaatgtgaaagtggcaatttctcttggatcaaccagaaagtcaactttgacaatgtgggaaatgcttacctcgctctgctgcaagtggcaacatttaagggctggatggatattatatatgcagctgttgattccacagagaaagaacaacagccagagtttgagagcaattcactcggttacatttacttcgtagtctttatcatctttggctcattcttcactctgaatctcttcattggcgttatcattgacaacttcaaccaacagcagaaaaagttaggtggccaagacatttttatgacagaagaacagaagaaatactataatgcaatgaaaaaattaggatccaaaaaacctcaaaaacccattccacggcctctgaacaaatgtcaaggtctcgtgttcgacatagtcacaagccagatctttgacatcatcatcataagtctcattatcctaaacatgattagcatgatggctgaatcatacaaccaacccaaagccatgaaatccatccttgaccatctcaactgggtctttgtggtcatctttacgttagaatgtctcatcaaaatctttgctttgaggcaatactacttcaccaatggctggaatttatttgactgtgtggtcgtgcttctttccattgttagtaagtaaaatcagcagtcagagggactttaagaaccagaagtaagtttgtaaatcttatcattttttgaagtttgttcaaactatccacaaagcagaaaactgggccaagtgtactttctgaaagaatagacaggggtactaatgccattctctactgggaagttgctaggagatagagagtaatttctgttcccttaactcactacacaactgaaatagagttcaataatcatgcagctaatgtattcaatggaaatagacaaaattaaaatgactcagaagtttttgtggtggtaacctgatttattcagataattgagtcaaagttctacctttcctgcgcaactataagctctatgagcattttttagttttaaggatttactgcccatgttttttcctttgttcaaaatccacatgggtgccagatcacaattattgtgcccctgtggcactgctgtgccccctttcaacccctatacaaggccccatggcccactctagattgggctttcaagagtatatcattcagacaatcaaagctttttttctattctatatcccatgttaacttaaaccacagtgtgaactgtgcttgtctcagattctttgaccccgcttaccaaccagcctcattctctaatcagtatatttttcctaatcacacgcagggttaactaaaaggcttataaaagaatacaaaagaaaggaggttattaccatactccttcgttataaaacacacatacacacatcaactttaaaattaaattcttcatggctaagccataagtgcttactctgggtttttgaagtctggttttaattaaactgttaacttgacattttataattatgtaaaactgtccaggagcccttctcatagttcaaaacacaatgaagacaaagaaaactgattttccaaatggaagcttttttgcgatctcagaaagaatgcatcaaacagatatattggatcaagatattttggttcctaatgctactgcagcattgcagatgtttcagagaacaacaacaaatatgctacagttcatagtgtgttctggtttctaagctatgatgttaatgtagataaagcttatnaatagattcttccatgagtttacagttaagtagacctttaatttttattattcaattccaatcacaagtcttggtgaaattgacagcaggaaaaaa

SEQ ID NO: 628394 - DNA, 6332 bp, Homo sapiens
atctgctcaagccaggaatctcgggtgaagatggatgacagatgctacccagtaatctttccagatgagcggaatttccgccccttcacttccgactctctggctgcaattgagaagcggattgccatccaaaaggagaaaaagaagtctaaagaccagacaggagaagtaccccagcctcggcctcagcttgacctaaaggcctccaggaagttgcccaagctctatggcgacattcctcgtgagctcataggaaagcctctggaagacttggacccattctaccgaaatcataagacatttatggtgttaaacagaaagaggacaatctaccgcttcagtgccaagcatgccttgttcatttttgggcctttcaattcaatcagaagtttagccattagagtctcagtccattcattgttcagcatgttcattatcggcaccgttatcatcaactgcgtgttcatggctacagggcctgctaaaaacagcaacagtaacaatactgacattgcagagtgtgtcttcactgggatttatatttttgaagctttgattaaaatattggcaagaggtttcattctggatgagttttctttccttcgagatccatggaactggctggactccattgtcattggaatagcgattgtgtcatatattccaggaatcaccatcaaactattgcccctgcgtaccttccgtgtgttcagagctttgaaagcaatttcagtagtttcacgtctgaaggtcatcgtgggggccttgctacgctctgtgaagaagctggtcaacgtgattatcctcaccttcttttgcctcagcatctttgccctggtaggtcagcagctcttcatgggaagtctgaacctgaaatgcatctcgagggactgtaaaaatatcagtaacccggaagcttatgaccattgctttgaaaagaaagaaaattcacctgaattcaaaatgtgtggcatctggatgggtaacagtgcctgttccatacaatatgaatgtaagcacaccaaaattaatcctgactataattatacgaattttgacaactttggctggtcttttcttgccatgttccggctgatgacccaagattcctgggagaagctttatcaacagaccctgcgtactactgggctctactcagtcttcttcttcattgtggtcattttcctgggctccttctacctgattaacttaaccctggctgttgttaccatggcatatgaggagcagaacaagaatgtagctgcagagatagaggccaaggaaaagatgtttcaggaagcccagcagctgttaaaggaggaaaaggaggctctggttgccatgggaattgacagaagttcacttacttcccttgaaacatcatattttaccccaaaaaagagaaagctctttggtaataagaaaaggaagtccttctttttgagagagtctgggaaagaccagcctcctgggtcagattctgatgaagattgccaaaaaaagccacagctcctagagcaaaccaaacgactgtcccagaatctatcactggaccactttgatgagcatggagatcctctccaaaggcagagagcactgagtgccgtcagcatcctcaccatcaccatgaaggaacaagaaaaatcacaagagccttgtctcccttgcggagaaaacctggcatccaagtacctcgtgtggaactgttgcccccagtggctgtgcgttaagaaggtcctgagaactgtgatgactgacccgtttactgagctggccatcaccatctgcatcatcatcaacactgtcttcttggccatggagcatcacaagatggaggccagttttgagaagatgttgaatatagggaatttggttttcactagcatttttatagcagaaatgtgcctaaaaatcattgcgctcgatccctaccactactttcgccgaggctggaacatttttgacagcattgttgctcttctgagttttgcagatgtaatgaactgtgtacttcaaaagagaagctggccattcttgcgttccttcagggtgctcagggtcttcaagttagccaaatcctggccaactttgaacacactaattaagataatcggcaactctgtcggagcccttggaaacctgactgtggtcctggtcattgtgatctttattttctcagtagttggcatgcagctttttggccgtagcttcaattcccaaaagagtccaaaactctgtaacccgacaggcccgacagtctcatgtttacggcactggcacatgggggatttctggcactccttcctagtggtattccgcatcctctgcggggaatggatcgaaaatatgtgggaatgtatgcaagaagcgaatgcatcatcatcattgtgtgttattgtcttcatattgatcacggtgataggaaaacttgtggtgctcaacctcttcattgccttactgctcaattcctttagcaatgaggaaagaaatggaaacttagaaggagaggccaggaaaactaaagtccagttagcactggatcgattccgccgggctttttgttttgtgagacacactcttgagcatttctgtcacaagtggtgcaggaagcaaaacttaccacagcaaaaagaggtggcaggaggctgtgctgcacaaagcaaagacatcattcccctggtcatggagatgaaaaggggctcagagacccaggaggagcttggtatactaacctctgtaccaaagaccctgggcgtcaggcatgattggacttggttggcaccacttgcggaggaggaagatgacgttgaattttctggtgaagataatgcacagcgcatcacacaacctgagcctgaacaacaggcctatgagctccatcaggagaacaagaagcccacgagccagagagttcaaagtgtggaaattgacatgttctctgaagatgagcctcatctgaccatacaggatccccgaaagaagtctgatgttaccagtatactatcagaatgtagcaccattgatcttcaggatggctttggatggttacctgagatggttcccaaaaagcaaccagagagatgtttgcccaaaggctttggttgctgctttccatgctgtagcgtggacaagagaaagcctccctgggtcatttggtggaacctgcggaaaacctgctaccaaatagtgaaacacagctggtttgagagctttattatctttgtgattctgctgagcagtggggcactgatatttgaagatgttcaccttgagaaccaacccaaaatccaagaattactaaattgtactgacattatttttacacatatttttatcctggagatggtactaaaatgggtagccttcggatttggaaagtatttcaccagtgcctggtgctgccttgatttcatcattgtgattgtctctgtgaccaccctcattaacttaatggaattgaagtccttccggactctacgagcactgaggcctcttcgtgcgctgtcccagtttgaaggaatgaaggtggtggtcaatgctctcataggtgccatacctgccattctgaatgttttgcttgtctgcctcattttctggctcgtattttgtattctgggagtatacttcttttctggaaaatttgggaaatgcattaatggaacagactcagttataaattataccatcattacaaataaaagtcaatgtgaaagtggcaatttctcttggatcaaccagaaagtcaactttgacaatgtgggaaatgcttacctcgctctgctgcaagtggcaacatttaagggctggatggatattatatatgcagctgttgattccacagagaaagaacaacagccagagtttgagagcaattcactcggttacatttacttcgtagtctttatcatctttggctcattcttcactctgaatctcttcattggcgttatcattgacaacttcaaccaacagcagaaaaagttaggtggccaagacatttttatgacagaagaacagaagaaatactataatgcaatgaaaaaattaggatccaaaaaacctcaaaaacccattccacggcctctgaacaaatgtcaaggtctcgtgttcgacatagtcacaagccagatctttgacatcatcatcataagtctcattatcctaaacatgattagcatgatggctgaatcatacaaccaacccaaagccatgaaatccatccttgaccatctcaactgggtctttgtggtcatctttacgttagaatgtctcatcaaaatctttgctttgaggcaatactacttcaccaatggctggaatttatttgactgtgtggtcgtgcttctttccattgttagtacaatgatttctaccttggaaaatcaggagcacattcctttccctccgacgctcttcagaattgtccgcttggctcggattggccgaatcctgaggcttgtccgggctgcacgaggaatcaggactctcctctttgctctgatgatgtcgcttccttctctgttcaacattggtcttctactctttctgattatgtttatctatgccattctgggtatgaactggttttccaaagtgaatccagagtctggaatcgatgacatattcaacttcaagacttttgccagcagcatgctctgtctcttccagataagcacatcagcaggttgggattccctgctcagccccatgctgcgatcaaaagaatcatgtaactcttcctcagaaaactgccacctccctggcatagccacatcctactttgtcagttacattatcatctcctttctcattgttgtcaacatgtacattgctgtgattttagagaacttcaatacagccactgaagaaagtgaggaccctttgggtgaagatgactttgacatattttatgaagtgtgggaaaagtttgacccagaagcaacacaatttatcaaatattctgccctttctgactttgctgatgccttgcctgagcctttgcgtgtcgcaaagccaaataaatatcaatttctagtaatggacttgcccatggtgagtgaagatcgcctccactgcatggatattcttttcgccttcaccgctagggtactcggtggctctgatggcctagatagtatgaaagcaatgatggaagagaagttcatggaagccaatcctctcaagaagttgtatgaacccatagtcaccaccaccaagagaaaggaagaggaaagaggtgctgctattattcaaaaggcctttcgaaagtacatgatgaaggtgaccaagggtgaccaaggtgaccaaaatgacttggaaaacgggcctcattcaccactccagactctttgcaatggagacttgtctagctttggggtggccaagggcaaggtccactgtgactgagccctcacctccacgcctacctcatagcttcacagccttgccctcagcctctgagctccaggggtcagcagcttagtgtatcaacagggagtggattcaccaaattagccattccattttcttttctggctaaataaatgatatttcaatttcattttaaatgatacttacagagatataagataaggctacttgacaaccagcggtactattttaataaggaagaagacaccaggaaggactgtaaaaggacattccaattttaggattggaatagttcaagccgggcgcagtggctcatgcctggaatcccagcactttgagaggccaaggcaggtggatcacgaggtcaagagatcgagaccatcctggccaaccatgatgaaactccgtctctactaaaatacaaaaattagctgggcatggttgcgtgcgcctgtagtcccagctacttgggaggctgaggcaggagaatcgcttaaacctgggagacggaggttgcagtgagccaagatcgtgtcactgcactccagcctggtgacagagtgagactctgtttcaaaaaagaaaagaaaagaaacatggttcaaattatatctaaacaaaaaagaataagaaacaaaaaacacattaaaattttaagttgtattttctatgtttctagatacatcatttttgtttgatattttcctgatgcaagtatgtggtttatcacatgtagctcttttgcatgctaaatgaaaattcaagacttgccaataaatgaatagcttattgcagacattttttaccaacattaattattttgggtttgtttaaaacctagaggcacaatcttgacttgtcaattactaccctttcacaagctaccatctcagatatatatatatatataaattcaataaagctttctgtttgtgttccat

SEQ ID NO: 628395 - DNA, 314 bp, Homo sapiens
gagaagccacagtgaagtccaggcgcggtggctcacgcctgtaatctcagaactttgggaggctgaggtggccagatcacttgaggtcaggagtttgaggccagctggccaacacggtgaaaccccatctctactaaaaatacaaaaatcagccgggcatggtggcacgtgcctgtagtcccagctacttgggaggctgaggcaggagaatcgcttgaacccaggaggcggagatgcaggagcccagatcacgccaggcaacagagtgagactgtatcccaaaaaaaaaacaacaaaagaaacaacaagacaaa

SEQ ID NO: 628396 - DNA, 4707 bp, Homo sapiens
  misc_feature (4611)..(4611): n is a, c, g, or t
tcctgctatacccacagtggtggtcatctcttctgatcttcacagccaatcagctcccaaggcccctgacctcagctcagcttttgtagatccttatgacaccatcctttaagactggaatcctagggcaggctgttttattcccgcctcctgaggcctttctgaggatctgtggcttgtctctgtcctgagggtgaagatggatgacagatgctacccagtaatctttccagatgagcggaatttccgccccttcacttccgactctctggctgcaattgagaagcggattgccatccaaaaggagaaaaagaagtctaaagaccagacaggagaagtaccccagcctcggcctcagcttgacctaaaggcctccaggaagttgcccaagctctatggcgacattcctcgtgagctcataggaaagcctctggaagacttggacccattctaccgaaatcataagacatttatggtgttaaacagaaagaggacaatctaccgcttcagtgccaagcatgccttgttcatttttgggcctttcaattcaatcagaagtttagccattagagtctcagtccattcattgttcagcatgttcattatcggcaccgttatcatcaactgcgtgttcatggctacagggcctgctaaaaacagctagagcaaaccaaacgactgtcccagaatctatcactggaccactttgatgagcatggagatcctctccaaaggcagagagcactgagtgccgtcagcatcctcaccatcaccatgaaggaacaagaaaaatcacaagagccttgtctcccttgcggagaaaacctggcatccaagtacctcgtgtggaactgttgcccccagtggctgtgcgttaagaaggtcctgagaactgtgatgactgacccgtttactgagctggccatcaccatctgcatcatcatcaacactgtcttcttggccatggagcatcacaagatggaggccagttttgagaagatgttgaatatagggaatttggttttcactagcatttttatagcagaaatgtgcctaaaaatcattgcgctcgatccctaccactactttcgccgaggctggaacatttttgacagcattgttgctcttctgagttttgcagatgtaatgaactgtgtacttcaaaagagaagctggccattcttgcgttccttcagggtgctcagggtcttcaagttagccaaatcctggccaactttgaacacactaattaagataatcggcaactctgtcggagcccttggaaacctgactgtggtcctggtcattgtgatctttattttctcagtagttggcatgcagctttttggccgtagcttcaattcccaaaagagtccaaaactctgtaacccgacaggcccgacagtctcatgtttacggcactggcacatgggggatttctggcactccttcctagtggtattccgcatcctctgcggggaatggatcgaaaatatgtgggaatgtatgcaagaagcgaatgcatcatcatcattgtgtgttattgtcttcatattgatcacggtgataggaaaacttgtggtgctcaacctcttcattgccttactgctcaattcctttagcaatgaggaaagaaatggaaacttagaaggagaggccaggaaaactaaagtccagttagcactggatcgattccgccgggctttttgttttgtgagacacactcttgagcatttctgtcacaagtggtgcaggaagcaaaacttaccacagcaaaaagaggtggcaggaggctgtgctgcacaaagcaaagacatcattcccctggtcatggagatgaaaaggggctcagagacccaggaggagcttggtatactaacctctgtaccaaagaccctgggcgtcaggcatgattggacttggttggcaccacttgcggaggaggaagatgacgttgaattttctggtgaagataatgcacagcgcatcacacaacctgagcctgaacaacaggcctatgagctccatcaggagaacaagaagcccacgagccagagagttcaaagtgtggaaattgacatgttctctgaagatgagcctcatctgaccatacaggatccccgaaagaagtctgatgttaccagtatactatcagaatgtagcaccattgatcttcaggatggctttggatggttacctgagatggttcccaaaaagcaaccagagagatgtttgcccaaaggctttggttgctgctttccatgctgtagcgtggacaagagaaagcctccctgggtcatttggtggaacctgcggaaaacctgctaccaaatagtgaaacacagctggtttgagagctttattatctttgtgattctgctgagcagtggggcactgatatttgaagatgttcaccttgagaaccaacccaaaatccaagaattactaaattgtactgacattatttttacacatatttttatcctggagatggtactaaaatgggtagccttcggatttggaaagtatttcaccagtgcctggtgctgccttgatttcatcattgtgattgtctctgtgaccaccctcattaacttaatggaattgaagtccttccggactctacgagcactgaggcctcttcgtgcgctgtcccagtttgaaggaatgaaggtggtggtcaatgctctcataggtgccatacctgccattctgaatgttttgcttgtctgcctcattttctggctcgtattttgtattctgggagtatacttcttttctggaaaatttgggaaatgcattaatggaacagactcagttataaattataccatcattacaaataaaagtcaatgtgaaagtggcaatttctcttggatcaaccagaaagtcaactttgacaatgtgggaaatgcttacctcgctctgctgcaagtggcaacatttaagggctggatggatattatatatgcagctgttgattccacagagaaagaacaacagccagagtttgagagcaattcactcggttacatttacttcgtagtctttatcatctttggctcattcttcactctgaatctcttcattggcgttatcattgacaacttcaaccaacagcagaaaaagttaggtggccaagacatttttatgacagaagaacagaagaaatactataatgcaatgaaaaaattaggatccaaaaaacctcaaaaacccattccacggcctctgaacaaatgtcaaggtctcgtgttcgacatagtcacaagccagatctttgacatcatcatcataagtctcattatcctaaacatgattagcatgatggctgaatcatacaaccaacccaaagccatgaaatccatccttgaccatctcaactgggtctttgtggtcatctttacgttagaatgtctcatcaaaatctttgctttgaggcaatactacttcaccaatggctggaatttatttgactgtgtggtcgtgcttctttccattgttagtaagtaaaatcagcagtcagagggactttaagaaccagaagtaagtttgtaaatcttatcattttttgaagtttgttcaaactatccacaaagcagaaaactgggccaagtgtactttctgaaagaatagacaggggtactaatgccattctctactgggaagttgctaggagatagagagtaatttctgttcccttaactcactacacaactgaaatagagttcaataatcatgcagctaatgtattcaatggaaatagacaaaattaaaatgactcagaagtttttgtggtggtaacctgatttattcagataattgagtcaaagttctacctttcctgcgcaactataagctctatgagcattttttagttttaaggatttactgcccatgttttttcctttgttcaaaatccacatgggtgccagatcacaattattgtgcccctgtggcactgctgtgccccctttcaacccctatacaaggccccatggcccactctagattgggctttcaagagtatatcattcagacaatcaaagctttttttctattctatatcccatgttaacttaaaccacagtgtgaactgtgcttgtctcagattctttgaccccgcttaccaaccagcctcattctctaatcagtatatttttcctaatcacacgcagggttaactaaaaggcttataaaagaatacaaaagaaaggaggttattaccatactccttcgttataaaacacacatacacacatcaactttaaaattaaattcttcatggctaagccataagtgcttactctgggtttttgaagtctggttttaattaaactgttaacttgacattttataattatgtaaaactgtccaggagcccttctcatagttcaaaacacaatgaagacaaagaaaactgattttccaaatggaagcttttttgcgatctcagaaagaatgcatcaaacagatatattggatcaagatattttggttcctaatgctactgcagcattgcagatgtttcagagaacaacaacaaatatgctacagttcatagtgtgttctggtttctaagctatgatgttaatgtagataaagcttatnaatagattcttccatgagtttacagttaagtagacctttaatttttattattcaattccaatcacaagtcttggtgaaattgacagcaggaaaaaa

SEQ ID NO: 628397 - DNA, 205 bp, Homo sapiens
tatgctgttggtcgtctcacaggatcccccttcatggggcctggtgttcagctggtcgagagctcaggccactgatcacgtaattacagtgcaaaatccatccctggatgtaggcggtcatgctgtatgccttatgaagtgatcttgcttgggcttcatggaatgtggttggtctcttgcctttcagctagaaatgaatagatca

SEQ ID NO: 628398 - DNA, 300 bp, Homo sapiens
  misc_feature (26)..(26): n is a, c, g, or t
  misc_feature (63)..(63): n is a, c, g, or t
  misc_feature (82)..(82): n is a, c, g, or t
  misc_feature (84)..(84): n is a, c, g, or t
  misc_feature (88)..(88): n is a, c, g, or t
  misc_feature (98)..(98): n is a, c, g, or t
  misc_feature (106)..(106): n is a, c, g, or t
  misc_feature (109)..(109): n is a, c, g, or t
  misc_feature (130)..(130): n is a, c, g, or t
  misc_feature (132)..(132): n is a, c, g, or t
  misc_feature (142)..(144): n is a, c, g, or t
  misc_feature (147)..(148): n is a, c, g, or t
  misc_feature (156)..(156): n is a, c, g, or t
  misc_feature (158)..(158): n is a, c, g, or t
  misc_feature (160)..(160): n is a, c, g, or t
  misc_feature (170)..(170): n is a, c, g, or t
  misc_feature (173)..(176): n is a, c, g, or t
  misc_feature (178)..(178): n is a, c, g, or t
  misc_feature (183)..(183): n is a, c, g, or t
  misc_feature (186)..(186): n is a, c, g, or t
  misc_feature (189)..(189): n is a, c, g, or t
  misc_feature (268)..(268): n is a, c, g, or t
  misc_feature (278)..(278): n is a, c, g, or t
  misc_feature (286)..(286): n is a, c, g, or t
  misc_feature (290)..(290): n is a, c, g, or t
  misc_feature (294)..(294): n is a, c, g, or t
  misc_feature (296)..(299): n is a, c, g, or t
ttatcacaggttaagcatgcagttanaaagtagttagaaatttctgaagggtgttagagtcanaaaaaaaaaaaaaggtgantnttanacatatattntctagganttnatggggacactactgttcaananggccatgggnnnatnngtgggcantnanagactgccgngannnntnatttncgnccnctgtaagtgaagctgggtgcagaatgcaaagcctctaaaaggagaggatacaaagtcaggtgagtaggggccattggcnatgctcaganccagccanactncaancnnnna

SEQ ID NO: 628399 - DNA, 639 bp, Homo sapiens
ctggattcctttaatttttttaaaatatattttttttttttatataattatttttaatttttaaaaattataattaaaatcacaagaaaaaaaaatttaattgatatcaccacaataaaatcagattttcaaaagaaaaagtaaaaaacaccactcccgttctctcaaattcacaaggggaacgggttctaggattgaaattaaaaaatcaaaaacctcctatataagaaaaaatatttctcacacccgcaaagaatgagcccctgccaataaaccaaaaaaaaccctgtgtttataaaaaaaaaaattaacagcccccccaaaaagggacccatttcgagtacccaaaaaaaagcctcccttcttaaaaaaaaaaaaacatacacacccaacatccctaattatgcataagctccatcaaaatactcccaccacgacaaagtgtccaaccatcaacatactaccccaacttctccttctggcgtcctctttacaaccaaaaacccccaaaaataactcaaagggaaacccccttacacttcaaactagcggatcctccaaaaaacaacaccctccaattcacttctctatttatcatcaaaccctcctgaagttcaccacccgggtctcctttcttcc

SEQ ID NO: 628400 - DNA, 1988 bp, Homo sapiens
  misc_feature (1254)..(1254): n is a, c, g, or t
attgagtggtgtatttgctttattcgagtgtgtttgtgtatggaggtgctgacatgtggttggtcttgttggttgttcgtttgtaatgtgtattgtgagatatgtggctagtaatattgtagtgtgagcggttgtgagtgtttgtgtggtgtggttgtgaagtttcgttgtagttgtcatgagaaggggttgcggcgatatataggtttatgagatgtatttctgtcttagtgtgtctgagttgatttggtgcactatgatagtgatgtattcggtcagagtagggagaggttattagtagcttgagcggcgtcttattatggcagagttctgtgtctgttctagccgtctcactttcacttgtctgcctgttcttggttggtctgtttgggtgctttgtcttctctttggttgtgtgtgggtggtgcgtgggcgtttgttgatttgagtgatgttattgagcttgttgtcttctgctgctgttgcctgctgtacactcttcctgcttttcgcattccttgtgttatgttttgtttcgctttatgttttcctcttatttttgctgttgtttcgtcttttaggttttaggtgcgtgtggtgtttagcaggctctgtgtagttgtgattcgtccgtctcttcttgttgtcctgtgcatacttgtctgcctctgtgtcgtgttcatcgtctcgtctcccgatcgtgtcgttcgcgtaccggttgcggcgctcttctatgcgtagctcttgctattgcttatgctgattcttatagcttgttcactttcatgttttatccgtgtttgctctgctcgctcttgtacttcccgtgccatcgacacatccatcgcccgatccctccccatccgcacctcgccttcgccaagtgtcatttagattcagtcgactgtgacggtgctatgtgactgtgtatgtcgtgggttagttgtgtctgtgtgttgtgtgtatacggcattaatagtattcaatgtgttagtatttgtgagtaattttgtagtgtgttgtgatggtatggtcagtctggttgtatgtgagtagtcttgtgtgatttggggagagcgataatgtcaagtgtaaacagaaaagaaaaaagaaaatccacaggggatatgtgcggtatgtgttgtctcagtgtgttccccctcctctcgcccctggcgccgtgcggaccacatgtgtgtcctggccagatggcccccccgggttgtttgttggcacccgttgcaagttctgaangcagagatttccgggatttcgggcccacctttaggtcttaacgaccctaccggctactaaggctttttcacatcacgggtcgtctccggccagatgggcagatcaccagtagcaatggaaagtacatgtggaacccttagacttataggtgagccagcatcttagagagaggttaatcacactatagaggcataagtggtgatccggtgttcagagtggtgctaaatgtgttaaactgtgtgtttataccccggtttgccagtcattgggtgttagcttgagatggttaaagggtggtttggggagggacttcgttgtaatgggtttgctgtaaaaaatgtttcccactcccctgaaatgttgctgaaaagcactggtgctggtaacacgttccaccatccgctggctgctcatttcttgcctactttactctccccctggagcacggttagcgttgaaggtggtatgggaaagcctgcatgcctcggtccatttcttttgtttcttctccttccccctccccctacctccttcccctcactcctcccctcccttcggctcgctccacctcttttgttccagtatgtgtaacttggtagagctaatttgtactactggatatctgactggaacccccagataccagaatctgtattgttctttactgaaaccccgcctgggattaaccagttctaacctttaatataaaccaacccttaatttaaaatgcccca

SEQ ID NO: 628401 - DNA, 376 bp, Homo sapiens
  misc_feature (32)..(32): n is a, c, g, or t
tcgcatcatgatgaatcagatggaacatgatnactaactaagaccagactttatcagatatctttagttcactaatgtccttatctgttccagtgtcctatccaggatcccatatgatatttagttttcttctctccctccgtaggttcctcctggctgtaagtactcagatcattttggatttgatgatcttgacagttaagaggagtgccagtcaagcattatttggactgtccctcagatgggatttctttctcaacgaacctagcctgaggttctgcttctagaggatggccgtcgcggcaaactgactcattcgctgcgtcataccaactatcatatcatatcatactaccgacatgactttcatcgctgc

SEQ ID NO: 628402 - DNA, 197 bp, Homo sapiens
gtccttgctgatgatgaatgctttctgagtggttactgaaaagaggaacctgcccttctgcaagccctgtgccttcctcgtaccatagcagaggaatgtatgcgtgccgagtttagcaactgcagttcttcttgtgtagcactgggctgcttctccacaacctgcgagagtccctggtttgcctgtatattcttgga

SEQ ID NO: 628403 - DNA, 116 bp, Homo sapiens
ctagcctggtcctattctgcatgactcccagactccttctgcttctcaggctctattccgacaccctccaacatggaggaaacgcaacagagaggggctggagcagcagagagggg

SEQ ID NO: 628404 - DNA, 197 bp, Homo sapiens
acacgtagcacttttataaaacacaatcctcaaaagctcacataatgtagcacatcttacaggcacagacattctatattagcaccgtctaattgtcacagctatataaaaacagacccttggccgggcgcagtgggctcacgcctgtacatcccaaaactttgggtgcactgaggcgggtggatcacaaggtcagg

SEQ ID NO: 628405 - DNA, 308 bp, Homo sapiens
cacccatccttccctcttttacgaagaacttgtcaacagcattgtctaataaaatcaactattccactagctccttatgagggacgacaaaaaactcctgtgcacattccctttcattttcttcacggggggtaatcacatagcacagggtgcaacacattttcagttccatctcactatttaaaacaccccatgtgctgcctcttgttcctttggcgagagccccgtaatttctgggcacaaaccactcgtgatactgtttctgaaggggggacatctccaccctccgaatatgttccactttatca

SEQ ID NO: 628406 - DNA, 335 bp, Homo sapiens
tcacttaacgaagcaggctggaaagtttggccggcagagctgccctccggtgtcgcgctgcctacaggatcagatacagtcagttgtgcagtcatggattagtcccattccttgtaaatgctctctctaaggtagattttaagacacaaaaggaagctgtgtgggacgtgaactagaatacccttggtggacacagttgaacagattgtgtaccttgtacactgtggcataatagaaccgttgatgaacctctataatagcaaagataacaagattatactggtaatcctggatgccatatcaaaaatctaacaggatgaagagaaaaataagtg

SEQ ID NO: 628407 - DNA, 983 bp, Homo sapiens
  misc_feature (932)..(932): n is a, c, g, or t
gactcacgtgaaaataagcgtgccgcaccacgggatgtactagcagctgcttggataatctcctccgggagccctttcaagtacggattcccagatgttgagcacacatttactccacattgtgcttaatcacaagggcgtatcttgtccccacgcgccttgttaaagttccccgccgccgtcttctaatagcgtgtggagccggctgctacaaagagaatcctatcaaggccggtcctcaaaccaggaaaaaagaaagtgcgccctctctataaaacgtccaaccaaacacgccgtcggtgcgttcgtcccagcggcccgaccgttggggcgccccaccagcccccccctggtcagaaaaggcggtgcataaaaaccccctcaggcaccccacctcggctgggagaaagcacggcgggccccccaacaacttctcgagccccacgaaatgcgcccccgaagtgttaaaacctagaaaaagaggggttccctgttccactccatcaaggcgaatacaacgatgtgggccgacacatctttccacaacactaagcctaaatagagtccatggacgatcaagatcccacagcactgcattttggggacgaccggcgagctcactccgtgtgtcatgacggcgataagaggccactcatgcttttgaggccgaggcaagcttctcacgccatactatgttgaagggcgaccgaagaatagcaacaggtgtgaaaaggccgtggtagccacaaacaagccctcggtactcaccgccacgcccagaccacaccatacatcttttttatgcggagactcaaggactttttgcggggagatacaatgcgatagtgcaccgcagtttttctaatatggttgaaatacaggaagtgtacgacatcaataactggcgagttcttttgtgtggcctcttaaantataaacaagaataaaacctgtttttttaaccagtgccgacatagacacac

SEQ ID NO: 628408 - DNA, 643 bp, Homo sapiens
  misc_feature (593)..(593): n is a, c, g, or t
tgggaaaaagggtctcactgtcgcccaggctggagtgcagtggcgtgatctcagttcactgctgctttccctcctgggctcaagcagttctcccacctcagcctctcaaataacagggactataatctgtgcagaccatgccgagctaattttatttttggtagagatgagctctcactatgtccacccaggttcgtctcaaactcctgaaccctagtaattctcctatctcagcctcccaaagtgctagggttacagactaatgagccactgtgcctgtctagacttgtacttctcaactgcccatttctcccgtgtctgctcccagtggcgccacctcataaaaaacacagaagtgcttcccaattttattcatctttccaagccgtgtagctctgggtatactccacgtgctgtgcaagtcagaagcttgattctcatccatgggagtgctttttctccacgtttcacatctcactcatcaccaagtcatgtgggtgtaaatttctgattaacccttgaattaccgtcttctcatcctctgtacaaaagcctcaagtgagggtcaaattcaacattatcctgatctaganagcccccattctcaatccacccttttccaagttgattgccaaggaaatta

SEQ ID NO: 628409 - DNA, 156 bp, Homo sapiens
ggtttccccccccccccccaaaaaccggggggggccaaaaattttttttttttcccccgggggaaaaaagggggaaatttccccccttcccccaaggtggttttttaaaagttaaaagggggattttttttggaaaaaaaggggggccctttggga

SEQ ID NO: 628410 - DNA, 858 bp, Homo sapiens
agtccttatcctttatactctgttcttgggtttgtattcgtcttgttttataccaggcaaattgcttagtagcaaagggaccaaactgaaaaggtgacaatctctaacttctaaaagcagacacccatcggatgctcattagaggttcaatgcaagatgccattcttggtggcctctgcacccaaattgcatctggcaaagaactagggtctcattcagaatgtccaacaggaaattcttaagagcttaaattcagactttgtgtctcattaactgccgtgaacacacttcaaaaccacaccagcattccttggcaggacggctcactggaactacccagtgtctgcatgagaccctatatctagcttcaccggttctcggacggtctaacacacactggatgatacacctaggaatgaaacatcacaatgcaacgtagacggaacctctccaaatcaggccagttgggttatcctggcattggcactctggtgtgaaaccataggtcttaacactctggagcagacacattgctgtggactatgtccaggcgacaccttacagcatatgagcttcaccaggcataccagcatgaaggaccacgaacttgctacaccaatagcaacacaacatcccaaacaaagactagaatcaccgcaagtgcgcccagaactagaggcgaacaaatcgaacgataccagactcgcaagctgggaaaacaaatcacccataacacaaaaccacaaaaacacaagatgaacaaactaaaacatctaaactacgtaaaccaatcaacacatggagacaacaacgaaaataccacgaaactaaaagaaacataagacaataacataaaac

SEQ ID NO: 628411 - DNA, 1042 bp, Homo sapiens
ccggagccagagctgtccccatcacgtgagggatctgaggccagggcaggcccccttgctcctgccccaccaggctcccattccacccccggcccgtcccagagcagcccacacagagccgcccgtgagagcatggagatgcgcatctgtgctgcggaagtgctgggctcccctcgcaaggcccggcggcgcggccctcaagcctctggtgctcctctctggacgcggcgctgacccggggagctggaggtggtgcacgcatggcgtgtgcatggagatgaacgagctcctgaggcctatgcccgaacgagggaaggtgcatcactggcttgctcaacggccatctgcggcgccgacttacgtctatcgtggatttcctcactcaccgctgggtgccgaattgtaaactcccccgaggacgcctcgggctggtcatcccttgcactgtgcgcgagtcgtgcctcggacacatgtcatctgcacttggcgcctggtgctgcgccgggcgctgccactctttcgccgccacgctcagcgacggcggccaccgcttcgagtagttgcgacccttaccgcggagggttattgctgtctgcgccgacctatctggcactacctcgagtcagagtctggggctgtgctcaagcggggcccagtgtaccctctctgggactacgcgcgagctcggggggccagcctggccgtccgcgaggggacttggtccccgtgcctgcggaatggccgggcccgtgggaaaacttctgctgttggccgtctcttcccaggccgcggagggcatagatgccgccggaactcacttgggctgtccccaggaggttaccccaaggatagagttccccgaatcggcggtcttcggcccgaaagggctactgctcacaacgtccctgtgggctacgactgcaccgtggagtttgcggcaattctctgcgcggcgagggcccctagcaccctcagacgggatgagaactcaagatcggctcaccaacccggaggcaatatttgtagctaaataagtataggc

SEQ ID NO: 628412 - DNA, 133 bp, Homo sapiens
gtcacgtgaaagatgcacatggcacagcttgccactcgactttccaacattttgttattggcagggcagaaaccatggattgctcttccccgaggaaagggtatcgagctcaccattgctgtaagagagagac

SEQ ID NO: 628413 - DNA, 153 bp, Homo sapiens
gccccaacttaagtttagaaattacagccacccctcaggcgcaggaccaggtgcagggtcgactctttctggatgtagtattcagaaagagtggagcctgcactagccgggcttgaagtggctctgctgggtcggtggggcgctgcctgtgtt

SEQ ID NO: 628414 - DNA, 156 bp, Homo sapiens
atacccagaaaaagccagcaaatagtagcctagctctaccctgatgagcatctagtctactcaggaccacctcagcctgaaatctagaaactctctcagcatacaggcactgcaacttaaaatccaattcaaagtcaatgctcaacaagcagccta

SEQ ID NO: 628415 - DNA, 511 bp, Homo sapiens
  misc_feature (1)..(1): n is a, c, g, or t
nccccactcgtccacggttggctagtctgttatgttaaggctttctgggaagttatctcactctgcgcaggagtgaaacatgaaggggttttctgaggacctgttttggtgggcccgtttgggcagaggactgtgtttatgcagggcaaatcccagaaagataagaggaagctagagaaacttaatgtacctgaattcttcatggtgtatttgcaaactaacttaacatagattcttttgactatggtaagtttgaatctctccttgccaaacaacattataagtttagttttcttcttcctcttgcagccggtacagaaaggtgtaagtggtggctgaaaattgaggaagcttcatctgaccaatgtgggtgctggtttcttgtgaaatgtgtccctaagcctccttctccttgcaggcagccacccacccaggtgtctaagataggacatgctcctttctttctctaatcccatcctgaggttgccggcaaagccaaccgtggactagt

SEQ ID NO: 628416 - DNA, 374 bp, Homo sapiens
gagccagtgtagctatggaattatcttaggaactcaagcttctaaaactatccatgtagtcaaatctaggggaaaaagcaaataaaaatagtagggccaggcacagtggctcatgcctgtagtcccagcacttagggaggccaaggcagggggattgcttgaccaggagtttaagaccagcttgagaaacacagggataccctgtctctacaaaaataaaaaaaagttggctagatgtggtggcacgtgcctgtggtcccggctacttgggaggctgaggtgggaggatctcgggcccaggaggtcgaggctgcagtgagtcgtggtcatgctgccgcactccagcctgcacaacagagtgagaccctatctga

SEQ ID NO: 628417 - DNA, 520 bp, Homo sapiens
tctatcaggatcccctgcccgcgtgctgaactatgtcgcagatgtagcgaaggctattcgtttgaatagtccatataacggtaagtacaaggaccttgccccgcacgaagtcgggcttgatgtgatgcagcttgccaactcgctgcactgtcttggccgtttgggggatgctatcaagaacgcagacaacagcaaaattgtagatgcgtgtgatgcgttgatgagctactacgccatgtttaccgaaggggggcggggcgaggggatgaagggcgacccgaaagcctcctttgatcggcattgccacatttgcaatcctcaacaagcaatttctgtctttgccggaattcgcgataaggctttggctaaatgtctggagaagcgagcatgaggaggggggtgagagccaaaaggcgaatgacccccaccgaatttgaggccgttcggccgtttctgaatatctctgatgaacgcatcaaggccgcaagagcggcccttgacgaaggtcatacgtttcaat

SEQ ID NO: 628418 - DNA, 923 bp, Homo sapiens
ggtgtcgccccacccgggtttggtgcgggcgcggcccgccccagttgtggggcggctggggtggtatgggcccctgcggcccccctggttgttgcgttgtgtgggcgccgcagcccgcggtttggcatgggcggccctacgccctgggccgtgttctctgctcgcgagccgagatcgtgttgtcctttgccaggcgcaacatgtggtagcgacgccccgtgtctgggctttggcgccggggtgcgtgggtctggcgcgccgtccttgctagtgtggttgcacaaacgccgcggttggggcgccacctggctgtgggggtggaataggcccctgcgcgtcgatagagttgttcggtggtgagatgtgactctgtgctcgccgacgcgaggcgggcctcccgagaactcctcatagggcccgcgcggggtgcgcccactcgttcggatgccgtctgtgctggggggcgtctcgacagcctcgggccttgttctgtgccgcagggcggtcccgccatccatgccgctgccagcgctggtatgtgttcctgcgtgacatccgtccgccggtaatgtgcggtttctcctcttccgcgacagcgcccgcctccgcggagctacccttcggtgcgtgacggccctccccggcgcgtcgcactgtggcttgcgccgggtcgacccgtgtggacaccccgttctggggtgacgagaactcggagtgcccgtctgtccaggaacttcctctctgcacttattgctttactggttattgagaataattctttctttctggtgtgccccggaccacttttctcgcggtccccatttcttctttctaacattttggggtgtatttccagtacgcagcaggtcttctgcttcttaggacgtcacaaacaaaagaaccatcaactggcccaaaaaaca

SEQ ID NO: 628419 - DNA, 211 bp, Homo sapiens
gaccagtccacactgataaggagttcctagcagggcttccttgatgggtaccaagggacaactctgccccatagcaaagaatgctcaagtccagaggggggcccatggctgtttttggaattttgggagaggttgggattcatttacaagactttagggctcttatgtaacatcacatgatttggagaaattagacacaatctcttatttt

SEQ ID NO: 628420 - DNA, 129 bp, Homo sapiens
catagcacatgaaagcggtggggattaacttagccaggctgccacgccagcacacgataacaaggtccgcggtgagatgaagaaagacgctgtgtatgactgcgcactccgcagagtcacatgcacgaa

SEQ ID NO: 628421 - DNA, 393 bp, Homo sapiens
tttgtataaagtcgtctggtgtaataccgtgtccattaaagtgatggggcagaaaagccaggtggggaagagagaattccataagaattccataggtctggagcccaggggtggctgaggtagcagtagaggtgggaactcaggcctgctttctctccctacttactccttccctccctcactccctccttttctccctcattggttcatccatgcaggcgagggccctagtgccagcccctcctgtcccgacatggggagagccctggggaggggcaggcagagtggaggccactccagccaggaagggctgcagtgtggcgggggctgtggtctgaggctggatcctttccgagcctctccacccacgtgggcctgcagcctttgtcgcgg

SEQ ID NO: 628422 - DNA, 938 bp, Homo sapiens
tctggcaaacaagtaaacctttaatttaaaacccaaaaatattcagcagggggccacaactatccaggttctcattaaaatcacttaaaacctaggtacaaaagcaccactgattaatggctctaaaaaaagcgtgcttgaaaatattcaaatatgcacagtaaaaacaccacaagttagtgcacgggataaacatttaaaagcagggtgcagggaatgtctgaatcattcttacacacgagcttccaatattaaacggatattaatttaactgtgaggatgatgtaaatttccaaaaagcatgactatgagacgataaaatgtccatccttatatattccggttatgccaactagttagagtcctaaaaaattagcttttaccaaaatatctgggtaaaaatagctttcaaaagttggtcccaagagatacataaaatcacccccaattttccatgacaatcacattccccctccgtatcctacagatcagtttcggggccgtgtgaaacacgacgcggaaacacaacacttattcgcttcttacggaactactaaatagcaagggaatttccccaccaacacacacgttttgaacattggttcctcttttgttcacagctttcggagaacctatttccacttccggtggaaaacacggcggaattattacccacccttgttgcccttatgggtctcgcgtttacccccaaaagcttcctgcccgactcttaaaacaactgactcagcatagaacagtcaattcacatcacaacaaacaaaagggccgcgctaatacatcagggaccacgacaccattttagacgtcccaaggtaataagagccgcgctacacgacaaccaccgtgtggccctggttgatgaacccaaccgaattagtgggctcgctgataacaaacgcgcggcttacagacaatag

SEQ ID NO: 628423 - DNA, 354 bp, Homo sapiens
  misc_feature (55)..(55): n is a, c, g, or t
  misc_feature (294)..(294): n is a, c, g, or t
  misc_feature (297)..(297): n is a, c, g, or t
  misc_feature (319)..(319): n is a, c, g, or t
  misc_feature (336)..(336): n is a, c, g, or t
  misc_feature (338)..(338): n is a, c, g, or t
  misc_feature (341)..(341): n is a, c, g, or t
  misc_feature (349)..(349): n is a, c, g, or t
atgccagcccagagcccgtatgtggggcatacgctgtgtttcaaaaccatttttngaaaatctgttgaaaattgtttaagtatgtcagaaaacacaccaagcgtcaatggttcctgcttcatggccccactgagcacagggctagtggcctcttcttaactttttggtcctgcgctgccacccactgcagtatccgcatacccaagcctcactagttgtgacaactaactcagtcacaaccactggcttagtaattctgtgaaggcgaaagtaagacaaagtcaaatctgagantcngaggcacagaatacaggagagnttgggacaagactgtgnangtnaagtagtnaggtg

SEQ ID NO: 628424 - DNA, 314 bp, Homo sapiens
tggtgctctgagctccgtccagtgtctcctactccgtagagtaagctgcaagtgtgaatacagtgtgagcactggcgcataatcatgatttaaagcaataatattctcagaatgaaagagtaatataatttaaatggccatgcattaaggccactttgttgaatgacccatgcactggagataagacccctggcaatgctggagagaaactaggctgattttgtcactctgtgcctgccttctaacgctgaagatcattctgtgattcagtaataacagtgttttttcttagaataactaaaaatgcttcagta

SEQ ID NO: 628425 - DNA, 115 bp, Homo sapiens
cagcagtttcgccacccggaggtagttattaagcactctacctgctttcatccacctcgatatctgccacatagttctcaaacactgtgagcacatacacctctgggaactggtc

SEQ ID NO: 628426 - DNA, 234 bp, Homo sapiens
cgggacaggtagctgtgcaaacaagtagctgctagaactgtctgatttctgatgctggagcatgtggtgagacctcagtgtgaccagtgaagaaaacagcctgtacacacaaaacgaaagatcatggagttcaggatcaaattttggttctgaacaaaaaaacttctggcatcatacacaaatttggttcagccaaagactcagaacacaacgagaagtatgaggatacctgtt

SEQ ID NO: 628427 - DNA, 575 bp, Homo sapiens
tggataaatatattagcaaataaatatatttcttaacatagtgcctgattcaagcgtctgtctggttcagatataaatacccatgtgggtacctaggtgctagtctccccactaactgagggaaaaaggttcccaggtggggtcctctgcccactttgccaccacattcacattccaaatgggataatgcctgaggggccaagagtggtcaggctgccctggggtgaatgtcaccctgatgaggcccatcagctcttgtccactcagtgaggccagacttgtgctctaatccactctcctgtgggtccctggcctgtatggcttatactggggagctgggcctttgggctgtccaaaaccaaagggtacactttgcttttccctttgttggccccaaatttccatccttgttctaagaaaaaaactttttccaaaaaaaaaaactttttgttggcccccgctcaactggaaatttttgcctctttctacccttaattcccatcctttcctcttgccccagaataaaggcccagcagaaaaattcctccttttttaacctctttgggaattttggg

SEQ ID NO: 628428 - DNA, 229 bp, Homo sapiens
ctaaagatctgacattgcaggagaagcccaatttttgttgacctcattacacagaaacgaggggcgcgtctataaagagccttgcatcaattaagactgaatgcatttacagccgagcaagccaaccgcttacacctcggagcagggtacagcccactgtgttcagtccaaagacataagataagataggagactgagacctatgtctggtacttgccaaccctggcag

SEQ ID NO: 628429 - DNA, 263 bp, Homo sapiens
aatgtctgccctctacatggaccttccagaatcttctgcaatgtgatcatgctctgagatgatggcagaaaggaggcattgggtggattaaggcaggctggctgggctctttttccagccagctttaggaggctgatcgaacccagcttttaatgtaatatttaggcagtctgatttcatcaatgccacactcagatcctgacctatgaaggtcttccttttgaagatatcattattggaagtgctgcaggagttgcttcgtc

SEQ ID NO: 628430 - DNA, 100 bp, Homo sapiens
cggtccatacaagcataaactattacatgcatacaactattcacatgccatcaactattacatgcataaactattgacttgtgtgttactctgtgtgagt

SEQ ID NO: 628431 - DNA, 250 bp, Homo sapiens
ctctagtatggtgagaattgtccacccatttgtgtgtgtgcttgtgcacgcacacacacacacagaggtgagaaaaagaatgcgtaggggtgcgtagtaaaatgtacttatggtcgcaatttttttttttggatacagggtctcgttgtgtggccccaggttgaattgcagtggcactgatcacagtacagcttcgtgtgaagtgcacacgccaccagtgccaagcatattccttttttttttttttttt

SEQ ID NO: 628432 - DNA, 165 bp, Homo sapiens
  misc_feature (85)..(85): n is a, c, g, or t
  misc_feature (150)..(150): n is a, c, g, or t
ctgcgtgagaagccatgagcagcaaagtctctgcggacaccctgtacgaggcgatgcgggaagtcctgcactggaaccagcgcanccgcaagttcctggagacggtggagttgcagatcagcttgaagaactatgatccccagaaggatnaaaacttctcgaaca

SEQ ID NO: 628433 - DNA, 492 bp, Homo sapiens
gtttctatttttttgtaacaccctgaaaactttaattcggcacaccggaatgggggaaccacgtttgcaaactgcctgggtgaggcgcctcttacgaacccaaaggggagccttgatgaaaagggccataaagctctccagatgaagcagaaagcctggaaagatgacccaaaacgcgcgttaagccttttgaagccgggggctacaaaaaatggtgggcctgacatgccactggaaaaggtgaacgccgacttgcaccattagggcgcttgggggcgggtacaagcgatacccacaaaaactgtaataaggcggccaaaagattactcggttgcggttacatggccacacactatggcgagctcatgcgataccaatggcctgagctagaaaagcagatgtgtcaatgcgtgggacctccatgtgatagattagggcgaagcgggttcaccttcaggggcatgaacattaggggcaaagggccttgctctg

SEQ ID NO: 628434 - DNA, 121 bp, Homo sapiens
aggactcatccccttcaagcagtatgctggcacatacgtcctctttgtcactgtggccagctactgaggcctgatgggccagtcacattgaactgcaatgcactcacaggaagcagcttgc

SEQ ID NO: 628435 - DNA, 176 bp, Homo sapiens
ctgggccggctagagcggctaccactgcctaccacctcccatttcatgttcaacaatacactgtactcttatacttttatgcctttatgcatgattttttgccagtggggaatgagacctgactacttgcttggtgaagtgattcattctggaagactcagctcagacactgcctc

SEQ ID NO: 628436 - DNA, 423 bp, Homo sapiens
tggattcaagtgttagtagctgggattacaaaagcatgtggccccacgcccagctaagttttgtatttttagtagacatggggtttcaccatgttgcccaggctggtcttgacctcccgacctcaagtgatctgcctgccccgacctcccaaagtgctgggattacaggcttgagccaccgtgccaggcctgttttgtttgtttttgtagagagatggggtttcgccatgttgcccaggctaatctcaaattcctgagctaaagcgatctgcccacctcggcctccgaaagtgctaggattacagatgtgaaccactgtgcctgggcctgtttgtttgtttgtttaaaacatttctccattcattcattccaggtcccagagcaaattttttttgttttgggagcctgttgacaatggctatg

SEQ ID NO: 628437 - DNA, 328 bp, Homo sapiens
cccccccccccttttcccaaaggggggggggggggggggggggggggggtttttttacccggccttttttttttacccccccgtttccctgggggccccccccccccgtttttttcccccttttaaaaccccgggggggttcccccccccgggttttttcttggggcggggggggggtttcatttttccccgggggcccccttttcccctttggccctttttgggggcccctttaacccgtttttttccaaaaaccgggggggggcggggcggggttttccggggttttttgggcccccggggccgttttttccccccttttttgtta

SEQ ID NO: 628438 - DNA, 325 bp, Homo sapiens
atggtgacatgtcgcacgtctctgatgagggagcctttctgaatctgcatcagccacagcagcttcttggctctcatggctttgcggcatttgtgccaggagacccaggtgcattttgttataccttctagggcaaagactggtaacatatggctccactcttaaggcaggtaacgggatcgcctataccaccaaaaacacctggaagaggcatcaggaatatgaagaggaacgagaagaggagatacaagaccctcatggctgatggctgggagcttcaccaggagatgagtctggggaggacatcaagccttccaccttataa

SEQ ID NO: 628439 - DNA, 661 bp, Homo sapiens
ggagaagctttgttcaggacagcggtggatcgacttcttgaagtgtgccctgcacgccggtcctggcgagcatgcgagctcccggggtgtgcgggagccccactcctccgtggtgtgttccatttgcttcccacatctggatggagctgacgatgccatgcgctcctcccagcaccagtccagggtactggcgatggcagtgatgcctggtcaatggctaccatggtgcaaaatgtccggacagctgtactggcaagactgtcatagatgccatgttggcgtcctgtgccatgctcatggtgtcttgatcttttacggtgaccaacctgagatcgtgtcccagagcatggtccgacggaactgcccctccttgtgactcgagggtgttactgacagtgcctcactggtcggtgtgcatcatgcgcatggaactggcgaagtgtgcgcacgttctatgctcactcgggtggaaggacccgaggtacaatccatggcaccagagtccaggggcatgcacacccagatgtgcacacacaggaacagcactgaggaagtgggcgctggaaagcgcagtgcaccgtagaggggagcttggaaccatccaaggcaataccctcaacagttgcacggccagccgtagctgtccctagatgcgccgtac

SEQ ID NO: 628440 - DNA, 559 bp, Homo sapiens
tagggggcagcgatatgaacccgggaggcagagctgcagtgagccgagatcacaccactgcactccagccggggcaacagagcgagactccatctcaaaaaaaaaacaaaaaacaaaaaacaaaaacaagaaaaggtgcagccactctagaaaacagccgggcagttcctcagaaacttacacatagaattaccatatgacccagcaatccaacacctaggtatataccctaaaaaccggaaaacagggacacaaatacttctaccggtatttcatagtagcacttaacaatagccaaaaggagggaaacaacctaaaggtccaccaaatgatgaacggataaacaaaaggtaaacgtagcctagccatacaaggaaatattactgggccataaaagggaatgaagttaagccaacaggggtgggcagggaactgtagtctcagctactcaggaggctgaggcgagaagatggctggagccggggaggtcaaggctgcagtgagcggtgatttacaccatggcactccagccggggtaccagagtgagactctgtctca

SEQ ID NO: 628441 - DNA, 368 bp, Homo sapiens
tcataaaagggagccaggtacttccagagagtacacccagctgcccttttcgcacccaggtagtgcatttcatccccggccatggagtaactgctccagaagaagctaccgggagaagtggagaactatcaacagctacagaaggacttaagtaaatccatgtcggggaggcagaaacttgaagcacaactaacagaaaatagtatcgtgaaagaggaactggccctcgtggattgaatacaacgtggtctttaaacttctgggtccggtgctagtcaaacaggagctgggggaggctcgggccacagtaggagaagaggctggactatatcacagctgaaattaagcgatacgaatcccagcttcgg

SEQ ID NO: 628442 - DNA, 338 bp, Homo sapiens
cagacaggagaacagagcacaccagcgcgagctacagagaacgtcgtccactctgtgaccaggacgcgctggcgcccacgtcgtaccggcagatcgtggccaacgcgggacacggacaggcgtcccagagccggcgccgcctcgtaccgccgctctcacgacacgaagaagtagatttagtcgtcgtcgagggttctcgctctccgtggatccaaaagtaacttgacgatacttgtggctcatttgagccagcgggagttctgtgtggctctagttcggagtacttggactgattgccgctagggcgtgcagacaagatggtaacagtcgtcgtccgc

SEQ ID NO: 628443 - DNA, 139 bp, Homo sapiens
gccccctctatccctccaaccacctcatgttcctccttgtgcatcttctggctttggggaaggaagtgttgagtgaaggtggtgagaagtgtggttttctgcgtagagcgaagggccgctgtggtgcccacttgcttag

SEQ ID NO: 628444 - DNA, 223 bp, Homo sapiens
acatcgtcaaaagatacaatcaaaaagttttagagcaggaatgaaaggaagcaaagtacacttggaagagggtcaagtgggcaacataagagacccaagtgccctgttcagccttgggctatggggttttatacatttggcatggttccggggtttgtgtttttcttcccttaattttccccttggagcaggctgtctgcatgcacaagtgacctgcccagca

SEQ ID NO: 628445 - DNA, 159 bp, Homo sapiens
ggaggtaccatgtgtgaaccctgtgccagtgcagtatcataaagagagggagttatagaaagagtgaagcgcaatcagcatgaaaagtcttggatggaccaccagcgtgaactgtgtgatccattactacacctcgtaaagcttgacacacacgtggag

SEQ ID NO: 628446 - DNA, 1094 bp, Homo sapiens
  misc_feature (717)..(717): n is a, c, g, or t
  misc_feature (719)..(719): n is a, c, g, or t
  misc_feature (824)..(824): n is a, c, g, or t
  misc_feature (859)..(859): n is a, c, g, or t
  misc_feature (861)..(861): n is a, c, g, or t
  misc_feature (873)..(873): n is a, c, g, or t
  misc_feature (886)..(886): n is a, c, g, or t
  misc_feature (899)..(899): n is a, c, g, or t
  misc_feature (917)..(917): n is a, c, g, or t
  misc_feature (966)..(966): n is a, c, g, or t
  misc_feature (972)..(972): n is a, c, g, or t
  misc_feature (1051)..(1051): n is a, c, g, or t
agcctcgccttgattggatggcaaacagtgccctgtatctccgtgggactgcttgtgccatatttgtccactgtgatctctcctcttggctgtacagaaataacagcaaggcaatatgaacccaatagatagtagtccgggcgatatgtcgcgctccaggaagcacacacggcaatagagatgtctttctcggcaagctcggatgcaaaaggccgtagtatcttacctccagtggataaccaacggaagaatggatccagcgtaactctagaagaacccaaggaattctaaaagggagtctgtcgtctagaatttatcggacccctgtgcttgctcttagaagaagcgtacactgtcttcatggtggccgatttggactgatggaggatttgtaggacttgagacgatggcggccttagtttacaacacttttaattaatggttacacgaacataaggactatactctctgttgtcaacacttaagtgacttaggtctcgtcggggtacacggggggggaaacgctcttgaaacttcgttgtcttactaagagaggtctaaacactcggtaccagctatgctaacgaaccgacatagcgcggcacggaagagcgacgtttgagtacactatggcgaggcgcaagggacgtctactaaggtcgcaagttggttggctaggacacaacctctcgcagttaaaagacatggactagtagncntgtgaaggagccgacatagggcgcttttacgtctctttgcaactgtacatagtcatgagacgacggtagtgactggcaacttgtcacttacagatgctctcgttncacgagatacaatacctaaggtaacgagaactgangnacatatgcgacncgtcggtgagatnacgcgcgggaagnaagctcacaaggggcagngtaccgaaaaagagctcaacataacatctcgtactatcaagcgaagagncgttanaatacgccaagcggttgtatagctaatgacgacaggaataggacgcggctcggtgactaacgtgtatgcaatgcgtttntcactccagttgatgatagctctgcgtaattggctcattacaa

SEQ ID NO: 628447 - DNA, 146 bp, Homo sapiens
actctagaggtatccccttccaggctttattgaggcagtttcccacattaggggaaatcgcagagtgtcagcacatcccgggttgcaactgcgataagtctcgccccgggaaaaccaccttcgtgtcctgcaatcgacgcctggaa

SEQ ID NO: 628448 - DNA, 1564 bp, Homo sapiens
  misc_feature (787)..(787): n is a, c, g, or t
  misc_feature (1290)..(1290): n is a, c, g, or t
tgtgcgtttgccagagtgtgtgctgtgtgtcagtgttttgattttgctatgttggcgctttttgtgtttttgcgcgtcgtggtgtcagtcgtctgttttctccttgtgtttccccgatcggttgttgtgtggttgtgtcgtctttcgtttctctccttgcggtatagcttttttgccggtttggcggttgggttttctcgcgggggcctgtgtgtgtgccgggctgttgtgctgttgtggaggcgataggcgggtttggctgcccttttttttttgttcgcgccgatctctttggtgaggacgcgtgatgatgggcgtgttttgttatagtgctcagctctttgtcatccactgtgttccttgttcctcttagcggtttgtccatccggggaggttgttttctcggcggtggtgcgttttgtgggggtgtctatagattatccccgcaccaaggtagatcctggtgggtgtatttataaggtgagttataaaggtgtgtgttcgtgggggggggctgtggggaagggtgtgacagagagttttttttgctgggattaaaactaacggccccacgggggatttataaaaatcccaacgtggcacaattgttcttttgcccgtttcacaaaaagttatgacccgaatgtggcccggccacaacttgtcccacgaagccaccgggggtggggtgaaaaaggaggtagttagtgcccgcccccccctagagtactccggctctgtttggacacgggtgcctcttagattgttcgtcttcctggtttaagancccgcttatgggtgataacctcttgtgtccactcatagggtgtttcacgctctctcttgtttataggtggtatacttagagagatccccccgcgaaaactctattagtagttattaattgcgcccctcggccgcttaaatagattggttctctgtgagacctgtagaacacactctggggtgtttctcacgcaaagaagagattttcctctatggctatctccctcaagagagatgtgtagcccacgcttctctggtgttacacatggggcacaacacactgggaatataatggggccttctgtgtggaggaatttttagaaaaaattttttgttatgcgggcctcggttaacccacgcaaagatgccccacaattgagatgggtttaaatgtgtgttgtctgtgcgtttcacaaagaattataggtgattaagaaaattataatattggtataaggagagggcccacctcttctcttccactcggttaaaataactctcggnggtgggagaggggaggaataagggagaacctctctttcttataaaagatgtagaaaatataattatactcggctattttaaaaatttcttgagtcacttgagaatgtgagagcccctctaaacactgagatttgagagaagctgtaaccaagtataggcacgagttaattttcccgtcttacacttttttttttgtctttggggagaaaaaattggtaggtgtctaattactgtttacttcattgttatattgccagtaaaagtttttaaacca

SEQ ID NO: 628449 - DNA, 1035 bp, Homo sapiens
aagcggggtattgtgttgaccgaccgccccaagttgtgttgttaacaattttttattgtgtctcgcgcgggcccccccggttatttttgtgtgggcccgtctcaacacacggagggtggttgagatctccccgccgcgccccctctttgttggtgggcccccccatcgtcgctggggtgggagcgcgtggttatcccccctcgcagagagctctttgtagtgaggggtcctttatggtgagacccccccccctctcggggagagaaacaaatataagtgggagagccctccctgtctgtctacacacacaacacaaatatttgtttttttaagaatatattataccccaacgcgcgtttgtgggcccctgcgccacacacacgtggggcactcacacgcgcgctgcgcgtagaaatacttctcatggcacactctcttggggagaggaccacagcagcgtgtgcggcgggaagtttcacacgcagcgtgtctcacagcgagagtgtttcgagagaccccactctctctcgcggctcaaacacacacgcgcggagaaacacccacgctgtttgtcttgtcgtctcagataatagtgtcacacacaaattagtatgggccgcagcgccactatgcgtgtggacagcgcgtccctctcctctggcgtgtctccgcgctatatctctcgcggagagagtctctagaggccacagagagaataatagggcctgtgtacacctcgcggagagagtgtgagagctctccccactctggagaccccagagagtttgcaccccctcgcacactcccaccctgggcggagcacagaagccataatcaattttttccacaaaaaaaaaaaaattaagccacggggtggtataacgtgcgcctgttatagtccacgctaataccacaggaaggagaggttgagaggctgttatagtgagaccctgattgcccaccctgcccccccgtttgggggaccagaaccagaccctgtttcccgagttaattaattatttttacctttaaaaa

SEQ ID NO: 628450 - DNA, 1120 bp, Homo sapiens
ttttaaatgacaggaggattagcacaggaaggccttaccaagaaggtaatttattttttagagacaggtctcactccagcctgggtgacagagcgagagtctgtctccaaaaaaaaaaagaaaaaaaaaagcagccccagccaactgccaggaagcgttgagaggtgtgggaacggcacgtggttcgagccccaggaggttgcaaggtttgcagtgagcgagtgaatcaggcccacagtaccccagcccgtgggctgacagaggtgagaacctgtgctctcaaaaaaacaacaaaaaaaaaaaagaaaaaagaaaaaatatttaccagcgcgtttctatttacagattgttgtgtgagagaaacaatctcgtgggtttctcccattttctcgccccataataaaagagtgtgtttatgtcggcgcgagacattctattcaaaaaagcgctctttttattattgtgtgggcgttatttctactatatagaggtatcttctcctcctttatagacaaactatatatagtggtgagaaaaattgtgggggaatatgtggggaaaatatattagaatcccccactgtatgtgtttacatttgttgctcataaatttctgtggagaagatggtgggggaacagcctcctaacaatatatttatttacaaaaatatctccccgcgggggggagcctatctatacaaaaaagataactgacatatggtctttatataacaggaggtggccaaactacattatgcttgcctttggaaaaaactttgtggggaggggttaggaaacgtgttattttcccctctttttattagagggacagagacaccacaagagaatttctctcaacacaagtggcacccactttttgtagaaagactatctcacgcccctattttttctatctctgtgttgataaacaccaacaaagattctctcagggagcgcaagtttaacaccacactttataacagcgggggggaggggggcacaaacattgttcttgacaatagcggtggaggtaagaccaaattttggggtgaaaacaacgtcgagagagctgcctaataaacatttctctcccattacatgggcagtcagtgcagaactgc

SEQ ID NO: 628451 - DNA, 408 bp, Homo sapiens
tagggcacacagctcctgcatacggagaggctgagattataccaggtgcgacttaggacgcggcatggtctggtccagcgagggctggctgtccccggaagccaggtctgttcgtgtgtagtcacggctcttgtcatagtagtacttgacgttgagtgctggtgagcttggaaaagtcgatgcgcagcgtgcagcaggcgttgtagatgtactgcccgtccttttacagattggaggtgctgggcgctcaccgggtccgcatactgcagcagggcctggaactggttgtacttggtgacggtgatgatcttcaaaactgtgccgaacttggagaaaatctggtgcagcacatccagggtcacaggttagaagacgatctccacgatgatactcctctctgcgtatgga

SEQ ID NO: 628452 - DNA, 705 bp, Homo sapiens
ctcttgccacatggaatggtggagtacggaagggtggaaagggttcggtaggtaaaccctgcaagatgcttctaacacacgtgctgttctcccatctcacgtatgacgactctcccacaggtaaccaaaaccacatttctctctgcttagggaattcaagatcatatctaacttcgaattccaggggtaatgacacggcttctattctccaaagtccagctgtctctcagggcactaatctccctctttcagctcccactcacaattccattttgaaattctacaacctgtagattaactggtaaaattaaccatattcaaccaaaattgtataacccagcaagaatggaagaatgggtaaagtctacagtccatttctagaactggtcatgagaactcatgtctatcgatgatggacttccgatctggctgccccggaccctccaccctctccgcctctgacaccctcacttagccggccctacctgctctcccccgcctctactattggactggcagtcccaggacaaactccaggaatccccccatgtccatctctactcctgccctcttctgacgtagcagcaatcatatcttcccttgatagggttcatcattctagatactccgatgacttcttcatactgagcctgaagtgccctggtggctgctcagctccagctcactcgcatacctctacgtcta

SEQ ID NO: 628453 - DNA, 482 bp, Homo sapiens
agcacgctcgcaagtacaggtagggttaccaactaactagaatgaatcctttcgattcatagtaatctgccacgccttccttccccatggcgttagattataactatttatctcggttttcatcacattcctgtaagaggtggaactttgaagaattcactggtcgttttgtatcacaggtacaactagagcgtacacttaacttttcaactgttctatcatctcgtcatagcttgttcctctctgttcaaaattatgtgaattatccactttataaaaaacagctgcccggaatttcctggcattggtgaagtggcagatggctaatgagcaggcgtttcttcatttttctttgcaagtttgttctatatgctcgtatggcctgaatgcttttactgcttcctcagttctttccatcctccttctaaaggcaaaacacagaacaaccaccaaaagaaaaagggaagcattggatattgttt

SEQ ID NO: 628454 - DNA, 1495 bp, Homo sapiens
  misc_feature (1085)..(1085): n is a, c, g, or t
  misc_feature (1456)..(1456): n is a, c, g, or t
gtctgcaaaccatttattcctgtcccaggtggggaggggcagggactccaggtgtggccgtgagggcacagggccttacgttgtaccacattgaagccgttggcttggcttggaaagccttcctctgtggtggtgcgcagcccgttacagctctccccgaactcaaggggggcaacccaaggcgggtattggtggtggaaacacgagaactctccccacaccttctccagatcggagcaacgttcctttaagtgaagatgaagtggcctctccctctcttcacaggtttcctacccgaaaagcaactcgtgacagagaggtcctcgcggcttcggattcccgtagccgtgttaacaaggtggccaacaaggcgccgaagtgcgaaagacccctcacagagttccttcgaattgtggtagaggcgccctgcccgccatcaacggttcacccaacctctccatttatgtgtcctcacaagagtgcacccgtaaaacatctcagggggttttcacagatctcgcctatatgtgggccccaggaacagtggcgtgtatacgcccccgaaacgagactcctctcgaacccgccccggagacaaggtatcctccccgaatctgtgtataagtctgcgacaatgtggggccccccaatatagcgcccccccccgcgtgcgtcgacacaaggagcacagtgtactcacgtgcaccatctacaacccttgtgtggaaacagcccgctgaggcaactataagcacttctcactaaaacaactccggcgaacagcgcgggcacccgaccttctctctagacaggtactaactcccccccttacgaaacgagtggaggcccccaccacgaagcctctatatacgcccagtatcaccccacagacggcattctcccgtgtgtgtaaccaacaacaggtgtggagctcccccccataaaataacgactgagcagatttccgcctaactcaccacattacaaggcccataagtcgcacacctgtggagaccggggctcccgagctctttaacaccaacacccggtcttccagtgctgcaacctgtcggtgcggcaaaacncaccaccgtgcatctaaagccccacttatcgccgcggaaacccctacttcgtgtacgaacaacgctagacaccgccctttataaccaatttatcctagtgagagatcgttggtactgacacaccacatataaatgtttgcgcggcaacactaacacaaaccaataaacccccaattaacaggcaacgcgcaatattttctacaaacaaagccactccattacaccgcggtgctcacaccgactagttaacaccacatagtcttactcacacgcacatgccactatacaacaggctcgcgtattaaaacacacaactgccgctggcctaatacttgtcgaagtggagccgactctatgaaacaacagacatntcgggcgcatccacccgtggagcagcaacgtatcagctt

SEQ ID NO: 628455 - DNA, 179 bp, Homo sapiens
gcccgggccgatgaagagaaagaggaaggctaacaggattgtgtgtattgccaagggttgggctctaatttttgtctttcttttctctctttccttctttctttctttctttctttctttctttctttctttctttctttctttccttcttccttttccttccttctttctctttcttt

SEQ ID NO: 628456 - DNA, 331 bp, Homo sapiens
  misc_feature (64)..(64): n is a, c, g, or t
  misc_feature (156)..(156): n is a, c, g, or t
  misc_feature (165)..(165): n is a, c, g, or t
caacacaccctcaccaccttcttgaaaatataaagtgatgggacagggtgcggtggctcaagtntgtaatcctagtgctttgggaggctgaggcagatggttcacttgagaccaggagtttgagaccagtgtggtgaacatggtgaaacccttctntactaaaantacaaaaactagccaggtgtggtggcacatgcctataatctgtaatcccagcgacttgagtggctgaggcatgagaattgcttgaacccgggaggcagatgttatagtgagctgagatcatgccacagcactccagcctgggatacagagtgagactcttgtttcc

SEQ ID NO: 628457 - DNA, 120 bp, Homo sapiens
tgcaccatttcctcctcatctagctcttcatgacttctggacagtctaacttccatcccaaggctccactctatagccctatactccatgtacatctactactattactaccccaaacta

SEQ ID NO: 628458 - DNA, 117 bp, Homo sapiens
agcggagggggcggccccaggcggggcggggctgaaggcctggggtgatccgagccccgcctgctccgctggaggtctggagccggccttatcaggaagtggatgaaaagcccggga

SEQ ID NO: 628459 - DNA, 743 bp, Homo sapiens
cccgttttaatcaacacctgtgatgaaaatttccataaaacccctaatatctcaagcctgttccttcacttttccacggggtggagaaagggggggcagtaactctgttattctggtgaacccaaaaattttgccaatgggccctgcttctacctttgtacgtaaaagacgtgggtttagggcatttgtctatccttaaaggccaatacccccaataattgtccttataaatagtcggtcttctccccacaagtttgacccttcggcacatgtcctctaaagggcgtctgccacagtttgattcttgctcattataccctcaaaccataggcaggagaaatttttgactttgatcggagcactgagagccttttggtgaatcttatggtagccaaccacatgcctttccggcaaaggtatatcctgaaccctggtatttacgaaggacaagcgtttgtgcacaagttcttttatctcgccatgagccaagaatgttttagcactttcacataataagatcgattccgcgcttcaagacccctcacgaaatgttcttgacctgcttgaaggtcttaaggcccatctttgtaaagcgttccttgatgaccattaaaagctcaacccccagttttggggtccctttgggccccccctacctgggggtaaaataaacggtttcaaagttgggaaataaaaaaagaaataaaactttgaaataatgaataaaagtttgtcactgacaa

SEQ ID NO: 628460 - DNA, 878 bp, Homo sapiens
ttggcgcgcactctcttggataaatatgcgtgttagaaatagtatggcgcccacccgcgttgtttatggagagatgtattagggctttattctcctcccccgcgtggtttctcacgagagcggccctctaaagagggggattataaacagagtttctgttctccttacccggacgcgccccccacggtgtttatctcacgcgcgagatatatgaagagaggagagagatgatagataagagataggtgctacgcggtcttttgtccccgcctctctggccagcccacactgacgtccacacacacactgttagaggagggctttttccccactcgcgagagagagtttgggtgagacgatcaggtgcgcttcgcaccctctgtgccaccaccgccttggcgagagtctagtcttcttctctctctctagactctcctcttcgtctcgggtgtttgtatctcgtgttgagaaaattggcccctacctcctctccacgccccttatctggggttttctcttgtgaagagtggcccctcactctccttctccacgtgtttcgctctttctgaatcctctgctgctttcgtgtgtgctgtgctagtgtgtgtgtgtgtgtttccctactgactactggccacgctggcccactaattttcccccccgagagaagcttgtggtcccaccatgcatcgaagaatgaatttcccagatatttgcccatggaaacggagccgaggctatgcccagagtgatttagtagtgcacatttcagagccattatctactgccagtaattaacttggaaatatcagccataaaacaaaaataaaaaattatactcgagcattacgtcggtcgagaagagtattccttctcca

SEQ ID NO: 628461 - DNA, 117 bp, Homo sapiens
gcatggctttatagagaacttttcttacctaatgtcttttaaaaaccacgtgtctccctttgtacttaggtgaattctaaatctttacttcactttcaaactacagggcatcgactt

SEQ ID NO: 628462 - DNA, 164 bp, Homo sapiens
tgatgaaacgtgcttgtcctacacaaagacaaatggatcttctattcccagagaaccagggacaccaaaacctccctcttcagaatggaggtagacagataacaaattgagacggggcttgatgtgtcacatgacaatcgtgaaattaataattaggggctcac

SEQ ID NO: 628463 - DNA, 322 bp, Homo sapiens
ggttcgttagtctcaacgattaaagtcctacgtgtatctgagttcagatcggagcaatccaggtcggtttctatctattataaatttctcccagtacagaaaggaccagagaactgggatcgacctcacaaacgcgtctcagagatcattaatgatatatatcttaacctaattaactacataatatatccagccctagaacaggacacattagggtgccagataccggtaattgcctcatatttaaacctttattaccagagtgttcaactgcctctccctaatagcatgtatcataattaacattctaagcctaaatcga

SEQ ID NO: 628464 - DNA, 766 bp, Homo sapiens
ctaaagaccacttccaacgcttaaccgtgtcaacgctattccctctgcactagaccattttcccgccccgtaccaatctttatccttcccgcctttgatccttccggacccggcaaagggttttatccccgccccccccctccgctttgtccctctgtaccccagtcaacttgtgtcaagttcaaagagccaattggtcagccttcaatcacaagggtcttggatcacaacacgagatttccaaatgatgcggtgacccccgtaaaatattttcggttgcggggtatagctctgtttaaataagggtcaatctcggacttttcttattttgacggcccaggtcccaggaatattaccgtcttctgcagactctagttaaatcttatcccatctccgacatcctgattattaccattattcatcctccgagattctcagtacctctcccaactctccccagagattatatggaatcccccttcaaaattctcagaatatattccacaggacttaacgacttttaacaacactaaccccatcaccacgcccctgtaccaggcaccttcagtgcaccacgttcatagcctgcagcaacacgattggttcagactatatgaaccacgactctacaccttcctgaagtgaaatgaaccacgaattcgcataactgacccacgtgaacttctattggcacttcacttatcaaccactttctctatattcgcgaaaacacggtctccacttatcccggtggaaacccatttcc

SEQ ID NO: 628465 - DNA, 753 bp, Homo sapiens
caaaagactggcagcattttgcttctgccatagagatctgtggaacttggaacttgagaaagatgatttaggcatccggtggaagaaatttttaaatagcaaggcattcaagatgtgacttgggtgtgttaaaagcattcagttttctgtattcacaaagatatggtttggaatcagaacttatgcttaaaagggaagcagagcataaaaatttagaaaatttgcaggctgatgatgcaatagaaaagaaaaacccattttctgaggagaaattcaagcctgctgcagaaatttgcgtaaataatgaggagaaaaatgttaatcaccaagaaaatgcagaaaatgtctccagggtatcgcagagagatttgcagcagcccctcccatcacaggcctagaggcctaggaggaaaaaatggtttcgtgggctgggcccatggcctcgctgctctgtgcagcctagggacttggtgctctgtgtcccagccactctagctgtggctaaaagaggacaaggtacagctcaggctgtggcttcagagggtggaagccccaagccttggcagcttccatgtggtgttgagcttgtgggtgcacagaagttaggaattgaggttggaaaacctctgcctagtttcagaagaagtatggaagcacctggatgtccaggcagaagtttgccgtagggggtagggtcctcatggagaacctctgctagggctgtgtgaaagagcaatgtggggtggggtcccc

SEQ ID NO: 628466 - DNA, 398 bp, Homo sapiens
gccgctctggcgctgctccgcaaagagatgaatttgcagtggtgtgctgcttctttcaaaggatgtgtaaattcttttggcttgcctgacatgttcctgtggtggtccttggagcaaaagtccatgatacagctggtcatgccacagatagtgaagaagaataaaactgtgaaaaataaaggatgtatttagaatgccacattctgctgaaaatcaaactgacagacactagggcaggccctgagttaaggtggatacaaaggaacccaaggcatgcctctcccagcaccagacttctgaacaggctgggagagtgaggcataaacacatgaaattttaataccagacagacatagataagtataaaacataagataataaaaaacagggtaatggca

SEQ ID NO: 628467 - DNA, 354 bp, Homo sapiens
  misc_feature (169)..(169): n is a, c, g, or t
gtgtcagttgtggagacggtgggaaaccggggttcgtgagagtccgggacggtcgacgatccggatcttcctgtgtcaccggttaacggtttccatctccagagatttctggtgttggtcaaaaatctcaccctgtcacaccgagcttggtcttggtcactgatagcanacactgggactcagttcccgtcatctgtctgggagactcccagatgggtcgtcgatgggaatctgaggggctctggtccccagaggaaaatctcggattgtgtgactatgagactgccccagtcgaccacctgacctcgacctcggttgtcatcttgatcgaaacgtttggagtcttttccgtgg

SEQ ID NO: 628468 - DNA, 163 bp, Homo sapiens
aaacaccgttgatgggagagcacagggacatctagtcgtggatatttctacacagagatcatgtgatctacaaagcctaaagtattatgccatctggctccttagagagaatatttgcccactcctgagccaggaactttaccttgcaccaggtaacttttgg

SEQ ID NO: 628469 - DNA, 777 bp, Homo sapiens
tttttattttttttttgggagacagagtcttgcacggtcgcccaggctggagtgcacagggcacaatctcggctcacggcaacctccgcctgaagggagattttcaaagcaatcattgcctctatcataggtagtcttccaatggtaatactgggcaccaagcaagagaaccgagtctaaattaaaatctaccctcaaaatggtacatcacagctggatggtgcacagcaggaaggacgatgtcacaaaaatggcaacagatctggttcctatggcacattccacctttcccacgtactggcttggcagcccagaatacaccaaaacatctttttatagagtggtcgtggtctttaaagaaggagcttactacactagtgccacacacattacgacacgacactagcacaccacgacgacttacaccctactacgacgacacgacaacaacacaaacctctcaaagacgcgggggttattacttcaaaggagacttggtggtggtaatcagaaggtcacacccccatcagcgttgggccacaagaaacattcaataaagtggggtccaactaattcaaggggcaaacatgtaagcacccccaaacatgacatgtgctacacccaggggcagacgaaacgacactcatagcggggggcaagggcgctcggggcacaactacgtgggagcactggagacaacctgcacatagtcgcaatataattgtgggcagaaccatcaacttccctcccaaaggtgttgggggcccaagcaaacat

SEQ ID NO: 628470 - DNA, 274 bp, Homo sapiens
aacgtcggccgtcctcagtgctcctttctctgggctgtgtcacagcagcactcagaagacataacagcgtgcaaccttgtcccagaaaaacaggtaagattggctaaactcgagattcttcaatatttaactttgtcatgaatggaagcctcataacattcagacaagataagatccagcatcgccctgagctcttctggttggtgattggcttgcgctcctggggcacggcgtgtggtaacacatgctgcgcgctcgggaccgtggcccggtt

SEQ ID NO: 628471 - DNA, 117 bp, Homo sapiens
cacatttcagttcacatctgttatcatggaacttaaaataaccgtcatgctctggagagagatgttccatgtcagtccgtagcacatctgataccaggtgaaaaagtgatataactc

SEQ ID NO: 628472 - DNA, 163 bp, Homo sapiens
gattcggacgaggggtaaagtgctagtggggagttttagccaggatgagccaggagaaggaaaaacaaggagttaattaaagacaagcagccgggccaggccttaaccaggcctggccttcttgcttaaccagtagttaaaatcaactcttaactttgagact

SEQ ID NO: 628473 - DNA, 322 bp, Homo sapiens
accccgggggggtttcttccttttttttttttggccaaaagcccttttaaaaggggccaaccaaggggttccctcccccccccccaaattgggcctggttttttttttccggggagggggggggccccccccccccccccccccccctttttttttcccgccggggccccccaaaagggggttttttgggggggggcccctttttgaaaggggggccaaggggggtgtttggggcccccttttttttttttttgtttagggggggggttttttgtttccccccccccctttttaatttcctttaccggtcctttttttttga

SEQ ID NO: 628474 - DNA, 233 bp, Homo sapiens
aagaggctgaagcaggagaatcgcttgaacctcggaggcggaggttgcaatgagccgagatcgtgccactgcactgcagcctgggcaacgaagcaagactctgtctcaaaaaaaaaaaaaaaattcgaaaagaggcccttccagttttattttgctaaaagtagttttaacggggcccgtggggttttttaaacacggatgttgggttttattagactaaacctagcttttaa

SEQ ID NO: 628475 - DNA, 148 bp, Homo sapiens
ccatttttcccccccccagggcctgagcacgccctcatttgttttggtcaatgaagctcaaggaagcattgccctttggcttccgctttaagttttgtatgttgatatgtatcccatgttttctaccaataaagggctatttccctgc

SEQ ID NO: 628476 - DNA, 464 bp, Homo sapiens
atctgcctgactcggcctcccaaagtgatgggattacacgcatgagccaccgcacccggcccagatgaaaggaggttagaagatataaatgaggccaattggattggctactcctagcctgggggaaatgatgcagggagttagagagtgttcctgggaaacccctctcacctgacaatttggtacttgttagtgattctttgaccctcatttctttcctgaagggtctcttgacgcccagactccattaggggtggccagtggatgaaagtatttgagctcgccagaaccatgtaagcaatctggccagttgtttttttttcttttttttgtggcttgcattgtggcatctgctgggagatgctaattacagcaattaagtaaaatgaggatgtaatattgcttagcaacccagttacctaatatgtaattttactaatttggctgaatctgtgtgctgtaac

SEQ ID NO: 628477 - DNA, 511 bp, Homo sapiens
agagaaacgaagattctgatatacataagtgaatctaaataaaaattcacaaggggtggctgaaatcctgtcaactttcaggccaactagcaatataatatccgcagttataatgcataaacaattcgaaattagagtttatgatggaaatgtcaacaagtcataactactacacattactactgatgggttccactatacttcaacctggcacagcagatgtgcacatctgatagacagactgcttagaacattagagctatcagagctataaatcaaggaatacataaatatgaacatagcaatgccaaagcgattagagctgttaaagacaaagtgaataagcatgtgcatgtaaaccacatctgatagttctctctgtgagccactttccacggagtttataaagctagtggttttataattcttttaaaaagtaaaatttttctacactgctgcatgcagtaatttcattgtacattctcaactacaatgcaatcttcaaaccctc

SEQ ID NO: 628478 - DNA, 1062 bp, Homo sapiens
ggagatctctggatccatgaccatccttttccttttaagagcatggcatcgtctttggtcgcaatgacctctgcaacttttcctaagtcatgaggatgaacgtcttcagagattcagggtcaatccctcttctccaaacactgcaccaccagtagccatagccagtatcttaaagctggttctttctattgtcaccaaaccctggagccttgcatgcacaaccagaagaccaacctttagcccgttattcagaagacgagtgtacatttagacggcatactccatcagcatcttcagcgattatgaccaaaggcttaccgggagccatggcagaatacacaaaggagccggtcacaatggcactgcatactagcagcatgggctacagacacgccaacggaaacataggcatccatggaatgccacaattactgaacataagaacgtattacagtcaagcatggaaaaatatagacacagaaacagcaacctatcatggcagtgcatctacatcagctcaaatggcaccgatgccaggatagaccacaacccacagaagggcgatgaaccaccctacctggccgactcacacagtagcgtcggaaagaccgcaaatccgacgcggaccagcagaacaaacaaaacggagagaacacagcacccaacacggccccacacatccaccacgaagggccacaaccgaacaaaaagcgacggacaaggacggagaccaacgcacaacggaccaaccacggcgcggcaatccccagcagccaaaagagaagaccacagcgcgtacacttgaacacaaagcacacaagtataaaggactcgaagacaagcgctggcacgaagacacgccagcacacaacaacacacaaaacacacagccacagcagcacacccccagcaacacaccaagcacaacaacgcacaaccagacacataagacatatcacccatcagccaagaaaccaccacaaagacccaacaacagcacacaagaacccgaaacccacggaccagaccacacgaccaccacgcaggatagagaagcaaaca

SEQ ID NO: 628479 - DNA, 1035 bp, Homo sapiens
  misc_feature (53)..(53): n is a, c, g, or t
  misc_feature (67)..(67): n is a, c, g, or t
  misc_feature (70)..(70): n is a, c, g, or t
  misc_feature (72)..(73): n is a, c, g, or t
  misc_feature (78)..(78): n is a, c, g, or t
  misc_feature (80)..(81): n is a, c, g, or t
  misc_feature (113)..(113): n is a, c, g, or t
  misc_feature (123)..(123): n is a, c, g, or t
  misc_feature (127)..(127): n is a, c, g, or t
  misc_feature (130)..(130): n is a, c, g, or t
  misc_feature (132)..(132): n is a, c, g, or t
  misc_feature (137)..(138): n is a, c, g, or t
  misc_feature (140)..(142): n is a, c, g, or t
  misc_feature (148)..(148): n is a, c, g, or t
  misc_feature (160)..(160): n is a, c, g, or t
  misc_feature (162)..(162): n is a, c, g, or t
  misc_feature (164)..(165): n is a, c, g, or t
  misc_feature (169)..(170): n is a, c, g, or t
  misc_feature (173)..(173): n is a, c, g, or t
  misc_feature (181)..(181): n is a, c, g, or t
  misc_feature (183)..(183): n is a, c, g, or t
  misc_feature (187)..(189): n is a, c, g, or t
  misc_feature (191)..(191): n is a, c, g, or t
  misc_feature (202)..(203): n is a, c, g, or t
  misc_feature (207)..(207): n is a, c, g, or t
  misc_feature (209)..(210): n is a, c, g, or t
  misc_feature (212)..(213): n is a, c, g, or t
  misc_feature (227)..(227): n is a, c, g, or t
  misc_feature (231)..(231): n is a, c, g, or t
  misc_feature (237)..(237): n is a, c, g, or t
  misc_feature (241)..(241): n is a, c, g, or t
  misc_feature (247)..(247): n is a, c, g, or t
  misc_feature (258)..(258): n is a, c, g, or t
  misc_feature (260)..(261): n is a, c, g, or t
  misc_feature (278)..(278): n is a, c, g, or t
  misc_feature (280)..(280): n is a, c, g, or t
  misc_feature (286)..(286): n is a, c, g, or t
  misc_feature (289)..(289): n is a, c, g, or t
  misc_feature (304)..(304): n is a, c, g, or t
  misc_feature (307)..(307): n is a, c, g, or t
  misc_feature (309)..(310): n is a, c, g, or t
  misc_feature (312)..(312): n is a, c, g, or t
  misc_feature (316)..(316): n is a, c, g, or t
  misc_feature (336)..(337): n is a, c, g, or t
  misc_feature (341)..(341): n is a, c, g, or t
  misc_feature (361)..(361): n is a, c, g, or t
  misc_feature (369)..(369): n is a, c, g, or t
  misc_feature (374)..(374): n is a, c, g, or t
  misc_feature (408)..(409): n is a, c, g, or t
  misc_feature (413)..(414): n is a, c, g, or t
  misc_feature (418)..(418): n is a, c, g, or t
  misc_feature (428)..(428): n is a, c, g, or t
  misc_feature (430)..(430): n is a, c, g, or t
  misc_feature (442)..(442): n is a, c, g, or t
  misc_feature (451)..(451): n is a, c, g, or t
  misc_feature (453)..(453): n is a, c, g, or t
  misc_feature (455)..(455): n is a, c, g, or t
  misc_feature (457)..(457): n is a, c, g, or t
  misc_feature (464)..(464): n is a, c, g, or t
  misc_feature (468)..(468): n is a, c, g, or t
  misc_feature (485)..(486): n is a, c, g, or t
  misc_feature (490)..(490): n is a, c, g, or t
  misc_feature (496)..(496): n is a, c, g, or t
  misc_feature (500)..(500): n is a, c, g, or t
  misc_feature (502)..(502): n is a, c, g, or t
  misc_feature (506)..(507): n is a, c, g, or t
  misc_feature (509)..(509): n is a, c, g, or t
  misc_feature (518)..(518): n is a, c, g, or t
  misc_feature (522)..(522): n is a, c, g, or t
  misc_feature (534)..(534): n is a, c, g, or t
  misc_feature (558)..(558): n is a, c, g, or t
  misc_feature (702)..(703): n is a, c, g, or t
  misc_feature (708)..(710): n is a, c, g, or t
  misc_feature (714)..(714): n is a, c, g, or t
  misc_feature (725)..(725): n is a, c, g, or t
  misc_feature (750)..(750): n is a, c, g, or t
  misc_feature (752)..(753): n is a, c, g, or t
  misc_feature (779)..(779): n is a, c, g, or t
  misc_feature (853)..(853): n is a, c, g, or t
  misc_feature (880)..(880): n is a, c, g, or t
  misc_feature (955)..(955): n is a, c, g, or t
  misc_feature (965)..(965): n is a, c, g, or t
  misc_feature (990)..(990): n is a, c, g, or t
gggggggaggggggggggaggggggggggggggggcggggggggggggggganggggaggggggagncgngnncccgngnngcgcgcccgcccggggccgcagacagcgcgcnaggcccagcngagnggngnggggnngnnncccgcncggggggggggngngnngagnngcngggggggngngggnnngngacccccgcanncagngnngnnggaccggggggggngggngggcgngggngggcangggcaggaggngnngggggcgggggggggcngngggggnggngaggggagggggggnggnannanccangaacaaggggggaggggggnnaganaagagggcggggggggaagnaagaagangaggnagaggggggggcacagggggggggaggccaaggnnaggnngaanagggggggcngnggagagggggtnagcgacagngngngnaagaggngggnagagggcagagaggggnngggngagggngagngngggnngngagggcagngcangggggagattgngaggggggaggggccgggggaggngggggggcccagggtggacaagctggtggagaagatcctgcactgtagctgccaggcctgcggcaaggagcctagtcacgaggggctgagcgtctatgtgcagggcgaggacgggccgggatcccagcccggcacccaccctcnnccccnnncccncccccatcctngcgggcagacccctgaacccgaggngnncctggggcccccacacagaggaaganggggctgaggactgaggccccccaactcttcctcccctctcatccccctgtggaatgttgggtctcactctctnggggaagtcaggggagaagctgaagcnccctttggcactggatggacttggcttcaaatcggacttgaatgctgcccggttgccatggagatctgaaggggnggggttagancaagctgcacaatttatatattcanagtggggggaggaacaaagtcttcaggctcttttttgggggggtg

SEQ ID NO: 628480 - DNA, 613 bp, Homo sapiens
ccacatccagaatttgttgaatgcttatatgttaacttcgactttgatggggctcagacaaagctgagggaatgtgaatcagtgcttgtgaatgacttcttcttggtggcttgtcttgaggatttcattgaaaatgcccgtctcttcatatttgagactttctgtcgcatccaccagtgtatcagcattaacatgttggcagataaattgaacatgactccagaagaagctgaaaggtggattgtaaatttgattagaaatgcaagactggatgccaagattgattctaaattaggtcatgtggttatgggtaacaatgcagtctcaccctatcagcaagtgattgaaaagaccaaaagcctttcctttagaacccagatgttggccctggaattttaatactcccccttttcagaatagcaggtcaaaggctccgacccgggcaagtctagattctggcttcgtttgaagaaccataaagaaaatatgaaaaaagcaactatcaaagaaagatgaaataatagatctattatataaagcggtcactcacacttttggaatcaacatatcaggtataaattttgaagaattggaatacctctgattcatttta

SEQ ID NO: 628481 - DNA, 244 bp, Homo sapiens
aacataccttacacacaaaacattctactacatttgatccatcatcttgacagacttgctaaccacaaggaataaaaagtaggcctcatcatacggtcaggtaatagatccacaacatacaatcacaccccatacctagttagtcattctcagctgtgtcatgcgtcacggcataaggcttagagaagaccccaatcttagggcaactgctcagaaatctagccccaggtacaacagacattat

SEQ ID NO: 628482 - DNA, 130 bp, Homo sapiens
ggtcataacagaactgccttacaggactgacttgatgagaagccagtgagtcacatgtccttatatttcccttgccgagggagagcagtgtctctatgggctcctctttgccctgtaacctctcaagtaa

SEQ ID NO: 628483 - DNA, 789 bp, Homo sapiens
gttcagtcacatctgaataaatcagttgagagactgcttatagcatcatctgcaccatgtgtggcatccgggcgctgtatggccgtcgatgattgccttatcttgctgcagctgtactggcaggtgtctatgaaggattgcggcagcaaggagtgtccatgatgacattcgcgcttgtgagactgtcaataggatacagccgaacttgctgaatttggaattgcactcggcttgagcggctagtgtagaccctgctggtgtggaactgcgagccaaataacgcatgtgaagcaacaagtatccgtatagagtgagctctgtaacaataggttgaagatcatatagaacataaagaaagatgcgacacgagcaatttgtgaaattgtgaatacgcagagccaaaagtggatggttgagataagtcctatcatacttggatagacgaaaggaggaagttgagcaaagcaagtatgaactgttggcacatggcgaggacaagcgagtagaagacagaacgagagaccaactgcgcaaatacagaaaaagagataccgaggagataaacgagacacaaaaggaaatcaagaagaacacgcgaaacaacccaaaagacaagccacaaaaggaaaaaagacaagcaagaggaaaacaaaagcaaagcagcggacaaaaacaaaagtacgaaggcgaaacgacaagatcaacaaaaaaaagagaagaaacaaaaacaaccggagaaaagaaaaaaagaaaagaagaaaagaggaagaaaggaacaggagacagaac

SEQ ID NO: 628484 - DNA, 105 bp, Homo sapiens
gtaactactgactatcaaacagcagacacccactacctaccacctatatgacgctaggggctaggcatagccctacaagcgaccactatagtacacaggctcata

SEQ ID NO: 628485 - DNA, 666 bp, Homo sapiens
  misc_feature (181)..(181): n is a, c, g, or t
  misc_feature (420)..(420): n is a, c, g, or t
  misc_feature (442)..(442): n is a, c, g, or t
  misc_feature (452)..(452): n is a, c, g, or t
atatatatatatatatagtcaagagcgcagaaagacaagatactccatgatctcgcttatatattaagaatgctgaaaaagtcaaactcatagcagaggaaagtagacatgagtggttacctagtaggagtggcgagccgaggacacaggtaatggtggagtgtagttggatcagaagggntacgaaaggtttcacaattggacagagaggcagtcaagtttggtgacactttaatggccacagctatttgcacatatatatgttaatcaatatatcgatagttggcatattcttcaacaattcgtctagagacagagtacactttgcgacatacttcctggagccagagaagaaatcggttagtgtagactggtaggatggggcttatcgtatgagattcaagtcccaataattgtcanttacccagtctaatgggccatntacaatgatntatccagaaagacgacatggttatatggtcactaaatggactcaaaggtcggtgaatacaaacgtgtgtatggtgtacactctcatccagagtcagtatatcaaagcgaacattgaaaagaaccgatagtttaagagacaataagatagaatatacaagagacatcggggcgagagggccacgaggatacgcctggttctgaccgcttctcgtt

SEQ ID NO: 628486 - DNA, 1218 bp, Homo sapiens
tcgtcctccgtgtgggtctctatgaccctctgtgagacagaacgtctgttggtcgtagtgtttgaccccctgaagatggtgtttggggacggactccatatttgtaggttgtttacataccccggctgttgtttttgaggcgcgcggagttgtggaagaggctgtgttttaaccaccccccctttctgaggaggtgccgccgcctccttttgtttgtcgggcaccccctccgcggttggacccgccccccctgcagagggttggggaaggtccgttttttttctccttgggtttgcccagagttcaaacaacatgtcgtggcgcaccatggggaacctgatttagaagaggggaaaaccttccgggaaagcccccgagatactggacacaaatggaatttcttggtttttggggggaaaacccccagaatatctggacccagatggatttctaaatgtggacttgtgacctggtggagggttttcccctagtgacacgtagttttatagaaggtgtacccacaggttttaaagttattttagagaaattaccagtgtatactagatgtgtaagaatattggcgtgtttataccccaatatgagcgttttcccgtccccgccaccgtgtttgtccctcttgggaagacccctcgcctgactgcttttctcctggttctccgagtcatatcttcgtgcccttagagctcgcccctcttcggtggtcccactaagagggccttcttctggatgcccctttctgaaagagaacccacctgcttttttacccatggccccccaccccccacccccgccccacttgagaccacgggttctccacactatgtggccccacggctgggttctccaagactttctggccctctaagtgagtgctccctcgttccctggcctccccaaggtgctgggattaccacggtgtgagccacctgcaccccacgcccacctttttttttaacttctgaagtgatttccacggtcaataatgtgtgtgtaacctgcactcctatgagaagagcacccaatattgctgttccactgttctccacctttcacttttcccctacacaatgaaaagccatttttgagactgaatctgttgctattttataaggttatttcgtgggagaaactgaggctaaaggagttagccatctcttatttttgtatccaaaataaaggttattttgaaattaaata

SEQ ID NO: 628487 - DNA, 470 bp, Homo sapiens
  misc_feature (21)..(21): n is a, c, g, or t
  misc_feature (93)..(93): n is a, c, g, or t
agtgaaaaaatagactatggnattaacgcccctgtcgtgtgacattttctgactatggaaatgatattagacaaaaagcaacttaagtggttnttcttatttgagttcaaaatgggtcataacgcagcagagataacttgaaacatgaacagcgcatttggcccaggaactactaacgaacatacagggcagctgtgattcaagaagttttgcaaagcagactagagccttgaatatgaggaacacagtggccagccattggatgcttcacttcttgaagcatcttgacagctttttgcaggtgaaatgcttccacaccagcaggatgcagaaaaatgctttccaagagtttgttgaatccagaagcatggatgtttatgctgcaggaataaacaaatttatttctcgttggcaaaaaagtgttgattgtaatggttcctattttgattaataaagatgtgtttgagcct

SEQ ID NO: 628488 - DNA, 446 bp, Homo sapiens
cgggcagcagttcatcactccgttccaacgtctcatcgccgttccaagatctcatggctcgtgccaacatctcatttctccttccaacatctcatgacttcttccaacatctcatcgccttccaacatctcatgtctccttccaacatctcatcgctccttccaacatctcatccccccttccaacatctcatcactccttccaacatctcatcgccttcccacatctcatgtctccatccaacatctcattgcccccttccaccatctcatggcaccttccaaaatctcatcactccttccaacatctcctcactccttccaacatctcatgcaccttccaacatctcattgcaccttccaacatctcatgactccattccaacatctcattcctccaaccaaaaactcataactccttctaacatcatcatagctccttccaaa

SEQ ID NO: 628489 - DNA, 164 bp, Homo sapiens
gtcagcaaaccaacatggcatgtatacctatgtaacaaacctgcacattgtcacatgtaccctagaacttaaagtatatatatatatatatatatatatagggcgctcaataaaggatgttaagaagaaaaaaagtaggcgtgagaggagacgcatgggatatg

SEQ ID NO: 628490 - DNA, 331 bp, Homo sapiens
  misc_feature (1)..(1): n is a, c, g, or t
  misc_feature (194)..(194): n is a, c, g, or t
  misc_feature (231)..(231): n is a, c, g, or t
  misc_feature (261)..(261): n is a, c, g, or t
  misc_feature (298)..(298): n is a, c, g, or t
ntttttttcaaagaagaaatacaaatttatttcaaagaagatatacaaatggccaaaaagcacatgaaaaggtgctcaacatcattagccactggggaaatgcaaatcaaaaccacattgaaataccacttcgtacccaacaggatgactaaaataaaagagtcacaaatgctcataaagatgtgggaaacagnccaagtgtgggtgggcttcacacctgttaatcccagncattttggggagggccgagggtgaggcagnttcaccttaaggttcagggagtttcaaggaccaggcntgggcccaacacagccaaaacccccttctctta

SEQ ID NO: 628491 - DNA, 749 bp, Homo sapiens
gctgcccgactgtagtgtcatgcgactggacgtggctcgacataagagactcgaccgcgtcgacaatccagcgaacagccgtattagacgattcacccaccatctgtgcaggcaagactatgagagtaccatacactcatacatatctacagacgtactctgtccactatggtacaagaacgcatatctccgcaacacacgaaacaggtacatacaacagcatgacttggcaaataagctatcatgaaacatcacccaacacagaacatggtaccatgaaacgacgcacacatgaacccaggagatatatcaagacgaacgtgccagaaaaatccccatcagtggatgaatgcccgaacaaatgcggcaacacacgaacgaaggatgataacacaaagattccccattacatgtgacccaccaaccattaacaaggggcaatcaccacgacacatgagcgcaaactgtaggcaacagcagataagactttggacacagtatgtaaaccatgataactactccctgattcaacaactcacttcctcggcacacactgggagcatgtcacagtctatcaccccttaatataacattcacaagatataacaaaccacaataacccacttaccagaacaccatcataaatatgaaccgcacaggggagttgtacccccatggatcatatcatcaaagggagagaaaacctaatagaactcagcaagaggaaaaatcactcagcacgatcacat

SEQ ID NO: 628492 - DNA, 153 bp, Homo sapiens
gaccaattgctccaaagcttgatctctgagcctggaacaaagggctttgtttgtcaggtgaaagccttactgcagccctagagccagcccaaagagctcccggtaagatgctctgcttgaaaccctactatcctggagaagctgtgaccggcg

SEQ ID NO: 628493 - DNA, 710 bp, Homo sapiens
  misc_feature (1)..(1): n is a, c, g, or t
  misc_feature (74)..(74): n is a, c, g, or t
  misc_feature (93)..(93): n is a, c, g, or t
  misc_feature (98)..(98): n is a, c, g, or t
  misc_feature (128)..(128): n is a, c, g, or t
  misc_feature (130)..(130): n is a, c, g, or t
  misc_feature (135)..(135): n is a, c, g, or t
  misc_feature (142)..(142): n is a, c, g, or t
  misc_feature (146)..(146): n is a, c, g, or t
  misc_feature (159)..(159): n is a, c, g, or t
  misc_feature (165)..(166): n is a, c, g, or t
  misc_feature (168)..(168): n is a, c, g, or t
  misc_feature (200)..(200): n is a, c, g, or t
  misc_feature (207)..(207): n is a, c, g, or t
  misc_feature (251)..(251): n is a, c, g, or t
  misc_feature (254)..(254): n is a, c, g, or t
  misc_feature (262)..(264): n is a, c, g, or t
  misc_feature (267)..(267): n is a, c, g, or t
  misc_feature (269)..(269): n is a, c, g, or t
  misc_feature (274)..(274): n is a, c, g, or t
  misc_feature (276)..(276): n is a, c, g, or t
  misc_feature (283)..(283): n is a, c, g, or t
  misc_feature (286)..(286): n is a, c, g, or t
  misc_feature (289)..(290): n is a, c, g, or t
  misc_feature (296)..(297): n is a, c, g, or t
  misc_feature (299)..(300): n is a, c, g, or t
  misc_feature (302)..(304): n is a, c, g, or t
  misc_feature (307)..(308): n is a, c, g, or t
  misc_feature (311)..(312): n is a, c, g, or t
  misc_feature (321)..(322): n is a, c, g, or t
  misc_feature (326)..(330): n is a, c, g, or t
  misc_feature (333)..(333): n is a, c, g, or t
  misc_feature (336)..(336): n is a, c, g, or t
  misc_feature (358)..(358): n is a, c, g, or t
  misc_feature (364)..(364): n is a, c, g, or t
  misc_feature (369)..(369): n is a, c, g, or t
  misc_feature (385)..(385): n is a, c, g, or t
  misc_feature (388)..(388): n is a, c, g, or t
  misc_feature (395)..(395): n is a, c, g, or t
  misc_feature (414)..(414): n is a, c, g, or t
  misc_feature (425)..(427): n is a, c, g, or t
  misc_feature (429)..(430): n is a, c, g, or t
  misc_feature (438)..(438): n is a, c, g, or t
  misc_feature (444)..(444): n is a, c, g, or t
  misc_feature (448)..(448): n is a, c, g, or t
  misc_feature (461)..(461): n is a, c, g, or t
  misc_feature (470)..(471): n is a, c, g, or t
  misc_feature (480)..(480): n is a, c, g, or t
  misc_feature (486)..(487): n is a, c, g, or t
  misc_feature (489)..(489): n is a, c, g, or t
  misc_feature (499)..(499): n is a, c, g, or t
  misc_feature (511)..(511): n is a, c, g, or t
  misc_feature (516)..(516): n is a, c, g, or t
  misc_feature (530)..(530): n is a, c, g, or t
  misc_feature (567)..(567): n is a, c, g, or t
  misc_feature (621)..(622): n is a, c, g, or t
  misc_feature (644)..(644): n is a, c, g, or t
  misc_feature (674)..(674): n is a, c, g, or t
nacacgggtaaatatcttgacagaaagtaaacaaaacagcatttaggactaaaaaattattcttatatctttantctcttcctctggacaagnaacanggcccaactacatacacctaaaccagaaangncgtangaatganaaanaaaaggcctattncccatnncncgcattgcagcttcttgctccatatattcttncttttanatcaaagcagacaacaaaaacaacactaaggcatagatcttgtnggngtttgacnnngangngatancncctcatngcnttnnactaanngnntnnnggnnatnnggggaaagnnattnnnnnggncangatatagggcaccatgcctggncagagnccttnatagaaaacctaaggnctngggcccncgttgagtcaacaaaagcnttaagcaaggnnngnncaggggcnaaagtnaggngacagactcatgngaccaagannggcaatggncccttnncngcctgcggcnccacaacttcgnggggnaaggacttggtacnggggagacctggccctttatgaggcaggaagtaaagnctgtggattcactgacactgattagcatgctggtccttcccagggtctcactgnnttcctaggatctaggaattttnctgaggcacccccttcctgatctacttcanttacttctgctgagaaccagaaagaggttcagaaac

SEQ ID NO: 628494 - DNA, 948 bp, Homo sapiens
gctccacaatcagtctgttttcttaccattcctatcagaaccgaccacctcccatgacccaccccaagccctgaaccccttcatggacagatcccccacagcctggggcaggaagaggcgtcgagggcgccagaagtggcggcagcagcagccgcagcagccaaagagaggccagagaaagacgaaaaagccgcggcgccgtggattggcgaaacctgggcgtcccggaagagctgtgtccccgtgtttacagctcggtccccgtggtctgaattgtcacaggccatagccccagcgctcataggcccagggcgctgaggtctggtgggggactagccgcacgagggcattgcccccccccaaattgctgcaccgcctgcaaacgcagtcacacaactagcggggtgagtggaacaaggacagggggggccaccaccaagaggaccactataaaccaaccgaagataactcacgctatccgctgtgcagaccaaaaccccgacagcgcgagttccaaccacctttacctaagagagccccccgaagcgccgcacaccactctggacccacaaccccccgcgcaactgggcacagcccgcgccaacacactccacacaccgcgagcgcgccatgcgcgcaacgcggcacccagcatacgaccgcccgacacctcacccatacccaacaaatgacaagtacatgaaactcatctgctctgtcccacacacgcgcccgcacaccaacttccactatactctcagtaccacatcagcgctacccctctccaccacgcgcctcaccgtcacacgagacggcctcgccgcctcccacacacccactacacaagtcgagccaatcccaccaaccaacccctccgacggaacaccagacaagaccgggccgcccccccaactacaagtacgcacccccttccgacagcgccagccc

SEQ ID NO: 628495 - DNA, 247 bp, Homo sapiens
cacctggtgggtgggactacttgttgcggtgatgacggttgcgacctgatgtgacgcacggactcactgccacctgtactccaacctgggtgacccgagtgagatcttgtctcacaaacaacaaagcgagaacgctttatggcatttggctatttagggcccccctatttaaggtttacccccccagtggtaacgcttttaactaacattttcataacaaccacaaaaccggagccgtagattcagg

SEQ ID NO: 628496 - DNA, 802 bp, Homo sapiens
  misc_feature (797)..(797): n is a, c, g, or t
ggacgcgtgggtcgacccacgcgtcgcccacgcgtccgaaaaaaaaaaaaaaaaaaaaaaaaaaaaaaaaaaaaaaaaaaaaaaaaaaaaaaaaaaaaaaaaaacaaaaaaaaaaaaaaaacaaaaaaaacaaaaaaaaaaaaaaaaccagaagagcgagaaagacacaaaaataagaaaaaagaagagggagacaagataaaaacgatgagactgtgtacaagaagagcgagcaggaccaataaggaaaagtcctgtgcatagagagagcagagacagaaggccaggggggcggcgaccagtaacagggaccaccaaccgacgccagaaaaacaatataaaagggggaacaaagggggaagaacgaggaagcagaaatacaactactgaaggattatatagggaggatttgaccctgaggaagacagcaacaacaagggattaaggagcacgcgaatgaaaaagaagatttggtggagttatacactcactatcgcgaaggcaacggagcggacgaacgattgtaagtctcaagaggaaggggagacagacggaaataggaaaaataaagagaaaagacggagcggcacggagaacgtcacggaagaagagagcgagaggaaggtgagcgcaccaacacgacgcggggagtatacagtagtggcaaggtagtggtcaccgccacatatggactaccagacagcaacagaagacaagcgcgcggggacacgaagtcgaagacccgacgcacgaccgatataacacacagggccggcgaccggggacaagcgccgcgnagggc

SEQ ID NO: 628497 - DNA, 1809 bp, Homo sapiens
  misc_feature (550)..(550): n is a, c, g, or t
  misc_feature (882)..(882): n is a, c, g, or t
  misc_feature (1336)..(1336): n is a, c, g, or t
  misc_feature (1598)..(1598): n is a, c, g, or t
tttttgttccttgtttttgagaaaaagtcaggggggccatggggtgggtttgaaaccagtcttgggggggtctcgattccttcctttttgggtcttaaattttaatggttattacgggtttcttcgaatgtggtggtggataggggtggggggcatctccattattagttcactccgagggttaagtgggagggtctctctcataactatataggaacctttcgcgcctctcgaaagcgcgagaggggttttctctcaaaatctcgatgtgaaaaaattatattataaatatattatagcgtggcgtgtgtatagagagaaaatgtgatatgtggagcctatacgagagatgtgtatatagcggtgtgtgttcaacagtggtgagcgtgtgataagtgccatctgcgcgggggatattgctcccgagagagataaaccgtgctgcgggggcggccattctcacgggagatatagggcgcgcccgaggagaacacgtgtttgtgtgtgtggcgacgacaacacgacaaaagtgttctacagatttctatancgccgcgcgagaagttgaggaccatactatttgctgatcatcagctgtgggacacatctgcggggaacatcttatgtgccggcgcgatgataaccaggagcttcttggggcggctctaataagaggcggggttatgataaaccgccccttgttgagaagaacataatcaggggggggaggagaaattctccaaccgggaggacaatttatgaggagcgccgctcttcctattataatatgaggtggtggggcgcaaaaattatacacaaggggctcttccccataatattgtggggacatgacgggggacccccatattatggtggtgtcgncaccaaggtggttaggggaggccctataataaccaaaaggccggtgttttaagattatacgccgcgggtgttcttccggcgggtgtaataacgctcttaacgcgaggaaggtggccttcctaacaaggggttggtaaaattgagacgctctctgggggcgataaaaatatttatcccacatggtgggcccccaagtgcttccgagggggcggcccaccacctattaaaacgcggcgggggtcggcaacaacaggctggacaagaccggctgggttggacaatcttcccccataaaaggggccgcccttcatacaagaaaagtggaccttcttcttgtgcgactgcgaaaggattctctccagtttgtgcaacaattaatatggggggtactccccccgcggggggggcacactttctgtttggctgggcaacgaagctcccaacgggcgttatnaacacaattacccccttttgttggaagaacgacgccccccgcgggttgtgggggcggacaaaatatccgcgcgcagcgttacacattacatatcgggcggcacaaccccagcgggagagggcgcttggtagacaaccacatatattttgtgtccccgcctcggctggggtgtgtggtactacagacagcggctcttatattaaattatcccccacgtcgcgtggtgggttgcgaccgaacatctacttattctgggggggcnggggtggttgggcgtccacactaccgcgcgcatgagtatattattaaagtccactcccttctttgttgggagagtgcggcccccctcccttgtgtgtgtgataattctctactgatgcgtcgtcggctgctgcagcaacgacactaccctcccctctttgttatcatctctcccacacgggtgggggtccgctcttcattacgcaccgggg

SEQ ID NO: 628498 - DNA, 202 bp, Homo sapiens
  misc_feature (38)..(38): n is a, c, g, or t
  misc_feature (77)..(77): n is a, c, g, or t
  misc_feature (162)..(162): n is a, c, g, or t
  misc_feature (169)..(169): n is a, c, g, or t
  misc_feature (180)..(180): n is a, c, g, or t
  misc_feature (185)..(185): n is a, c, g, or t
  misc_feature (199)..(199): n is a, c, g, or t
ggcccttatttccttctttattgcagaagagaatgganaatttgacatcattttggtatagaccaagaccaatcttngttgatcaccttctttatgaaatttaaagtcagattgtgggtttgaaaaagttttttgggggattttttttttttggaaataaantctggcncggccccccantcggncaaaaaagcgaaantct

SEQ ID NO: 628499 - DNA, 304 bp, Homo sapiens
gctgatggtgattgtgtgtctgtagtgcactagaagcataacatataggagctgaggtttgtaatgtctatctcgaataggattggagagagtgggtgctgcttctcggcagagtgtgcccttaacaggagagcaggttgtcaccatgcagcggtacagccctgggtctgagacctgagtctggtccgttcgatagcggaactcatcctacctggacttttgctaataacaactgccatccacccttgatgcatctttccaattctccagtttcaccacagaatcctggggcccgagagatgat

SEQ ID NO: 628500 - DNA, 162 bp, Homo sapiens
ggtggacagtggagagcaacacacaaaactaccgttggtgcatggttaaagaccgtggtgattatatagcatcctgggcatttcacatccatgaagtaggaatgtggctctgcacaaggcgttgcttcttgtgttgcctcttctcctcttctggagagggat

SEQ ID NO: 628501 - DNA, 327 bp, Homo sapiens
ttggcagggaaaggaccgggcaaggtgtacaggggcttgaagactggagggaagacctgggctttgacccatacgaaagggggaaccatggagggctgtacgcaaaacagggatgggccctgactcaggtgctcacaggcgtcctctggctgccgtcggtccaataaatgacatacaattatccgtcatgatcccgatattcagataaggtaactgaggctcagggaggtgaagtgatcaggggtttaactgaaagcagaatccacggacacctgcactgctccctggggtctccctgaatctccaccttgtctctcaacctgagtg

SEQ ID NO: 628502 - DNA, 301 bp, Homo sapiens
acattctgcacgtgcatctggagcttaaagtaaaatttaaaaaaaaaaaaaaaaaagggaaaagaaaagtttctgggaatccagaaagcaggtttatttattttagccactttttacctcaggcagggtagatgcttaacaattggttttcaaatgaatgaaagagagcgggtccctttatggaaaatactggccatctctacctctattttcatctggttaaaaggtattcatctggggttacatattacgggggggtcaccggagctacgaattcggaaatctagggtctatagctggt

SEQ ID NO: 628503 - DNA, 1002 bp, Homo sapiens
  misc_feature (12)..(12): n is a, c, g, or t
  misc_feature (468)..(468): n is a, c, g, or t
  misc_feature (586)..(586): n is a, c, g, or t
gttcttcgtgtngcagattagactatattcacataatctcactcactagctctaaccaaagacagataatagctaaaagagaaaagagttagttaactctatatgtttctaatgaactctttattatcgaccttttgtccacattgttactgagacattttgatgtcttctataaattgtggtgcagacttcccacaaagcttgcgcccttcgctatatatctgtttcaagcgcccgtattctgcccaaatttgtagcatcctttcgcctgtatcaaggttcttcaaccgcacgtcccctagtgggtatcttcaaccccccgctctgggtgatcccaagcctcttttgtaaagttcacgaccactgccatgtgtccgaactttgtgttgcctgtattttctatcacaacccctctgctgcctctcccatgttgtcccaaaagaatttggaactgactcttggtgcgcnaaccataaaagcgcccacccttgttccgttgccgccacaaaatgttgttgatatctgcggtaacccccccgtcttcttgtttaaaagcaacttccaccaggcgagtttgtaagtttcnctcatggcaagggacgcacctgtgttcaccctgcacaccagccatgtagtcgccttctttccattgatccttgtagaacttcgaccccaactttagtcgctgccctctttatgaagtaaactccctctccccagatgttctgtttatcaccacagaatctgcagagatttttccaccactgttccgtcggcataacaagacttactaccaccgaccggttacaacatcttctttgttgtacaatcaaaaaagatgagagtctttttatatcttgatgcaaaataggtccccacaccaaccaaaattgccccaagatcataataatggattatctggactcttgaagtcttaaatatacaaatagcggtcaaaaggggtttcacctcctcctctccaaaaaaaaaaccaaaaaacat

SEQ ID NO: 628504 - DNA, 1115 bp, Homo sapiens
  misc_feature (531)..(531): n is a, c, g, or t
  misc_feature (614)..(614): n is a, c, g, or t
  misc_feature (660)..(660): n is a, c, g, or t
  misc_feature (1115)..(1115): n is a, c, g, or t
gcgaaggtcacaggccttgggccagtggtgggacactggagcaggaagtcggcctgtggccggccatgttcatgagggcgcgtcccttggcacccctgtagccgctatgtttcccacgcccgtggcaggcctgagagattatgtttgcggggggtgctttttttgtagcttctgtgttcgccatatttgaaaggggcagacggccatgttcgtgaacggcgcttcccttggtgcacctgtggccgccatgtttgagcgagcgtctctgaattgggatgcatctgacagcaagtgtggcatccgggctgcagttgccgttgtctgctcacatgtgaattaaaaaaacaatctcagcatatgaaatctctaatcgcgtatgaacttggtggttattcctggtgccgtgtggataactgcagcctcaacaccccagtccacaaaccacgtacggaccaactgaggaaggagtaggggttcttgttgttgcagaaaaccctccctcaacttgctctagaagataccagcattcanacttggagtgggcatcagcagcttggaagacacagcagtgggcccctcttagcaggagtgccccatctcatggctccgacgangaccagagggtgatgctgcgtagggctcacggacattggactctangtcagagatgctcaggtgaaggggggctctgatggtgaggacattcagaattaaccgagattggctgggtaacggggggtcacacctgttaatccaagacttgtggaggaagcgaagcacgtggtcacctgaagttcagctgccacttgtggaacccgtctttatagtgataatttggggggggtgggagagtgtttgtgatcacgaaaacgggggggggtgaaggggacaagttgtcaccgttggaggagagtggttggacaccaagtgtcgcgactcgccctggtggacacgaacatctgtgtctcagaggagaaaaagaacgagacaataatgatgctcgggtgatgaagaggaggccgacaaaaaaagagagggctgcggggggacagctggatgtaagaggtggcgcgcagagtctcttctttcttttgtccttcttttttcgctagtgn

SEQ ID NO: 628505 - DNA, 819 bp, Homo sapiens
  misc_feature (496)..(496): n is a, c, g, or t
  misc_feature (542)..(542): n is a, c, g, or t
  misc_feature (573)..(573): n is a, c, g, or t
  misc_feature (805)..(805): n is a, c, g, or t
cataagttggatacttgaatatctgtttgctttcacctaaagcctgaaagaatggtaactctaatacacttatttattttggtctactgtttcaagagttggattactttccagcataattccttctctttggataaagagttctatgattcatattttgcttcaatatgttcacgtctgtagaagcctgggaagcactacatttttttttaataccacaaaaacagtacttacaataaatagcccatttaatggaggaattgtaatggagattcagaagttatcttgagaattctacaacactatgtgactagtctgctttccttcctaacctgtcgcacagcttaaaaattcaggaaatccctcaagggacaacattatctagtatctgacttagttctctgtaactccattctcatcttgatgacggctacctcaaatccttactgcttagcagccataaccctgttttctgtctctctagccctatgagatngctaaaattactgatgccttctccacttcctagcactggccctgtncctcttcgtgactcttgccctgtgccatgtntctgcgatttcccccagggaagagcagctcagagaatgtcagcttaggccaggcatggtagctcatgcctgtaatcccagcactttgagaggctaaggcgagcagatcacctgaggtcaggagttcgagaccagcctggccaacatggtgaaaccccatctctactaaaaattagccaggcatggggggcgggtgcctgtaatcccagctacttgggaggctgaggcagganaatcgtttaacctg

SEQ ID NO: 628506 - DNA, 948 bp, Homo sapiens
gcgaaggtcacaggccttgggccagtggtgggacactggagcaggaagtcggcctgtggccggccatgttcatgagggcgcgtcccttggcacccctgtagccgctatgtttcccacgcccgtggcaggcctgagagattatgtttgcggggggtgctttttttgtagcttctgtgttcgccatatttgaaaggggcagacggccatgttcgtgaacggcgcttcccttggtgcacctgtggccgccatgtttgagcgaggaccccgtggcaggccaggaccgtttctccggtgctatcccagagcatggcgcatccactcattcactcaagggaaaggcctgaaagtaaaattgtatcaacattaggtttggctaatgttgccattaggcaaacctaattttaatgaagccaggaggttctcgtttgggccttgactggacaggtttgagctagaaaccacttgaagtattgatcatccatctgatcatcaagttttttttttttttggagtgggagtctcactctgttgctcacgctggagttgcagtggcacgatctcagtccctgaacctccacctcccgggttctcctgcctcagccttccaagtagctgggattataagcgtgtggccccatgcctggtaacttttaatatttcggttgagatggggttcaccggtggcaggtgggtctcaactcctgacctcaagtgatccgctgctcggcctcccaagtggctgggattaccggggtgagccgcatcccagcttggtcacccaagtttattgacatctatatgtcccgatgaggagaccctgggtcacgagaaatctgccggatctcgagagcgcagcactgagatgatagaccaattcgagaaacaggttgttgggttttgacacaacaccaatagtccgtccaggtgagcctgttggcccggaacaaa

SEQ ID NO: 628507 - DNA, 655 bp, Homo sapiens
  misc_feature (448)..(448): n is a, c, g, or t
  misc_feature (450)..(451): n is a, c, g, or t
  misc_feature (474)..(474): n is a, c, g, or t
  misc_feature (483)..(483): n is a, c, g, or t
  misc_feature (504)..(504): n is a, c, g, or t
gcgaaggtcacaggccttgggccagtggtgggacactggagcaggaagtcggcctgtggccggccatgttcatgagggcgcgtcccttggcacccctgtagccgctatgtttcccacgcccgtggcaggcctgagagattatgtttgcggggggtgctttttttgtagcttctgtgttcgccatatttgaaaggggcagacggccatgttcgtgaacggcgcttcccttggtgcacctgtggccgccatgtttgagcgaggaccccgtggcaggccaggaccgtttctccggtgctatcccagagcatggcgcatccactcattcactcaagcccaccctctcctatcctctcggtccacccgacttagctgggcaaaaataaccctgtggtaggacagccgtctgctgttggaaagtatcgcagctcctcccgtggtcttgcccccncnngttgcaacattgttgccaagggntccctgggncctttgaatgaacggacacangcggagaaggactgtaggctctgagcctgctagggtgcctgagagactcacaggactacccctggggcagttggaagatgcccagaaacttcagggagccaccagcatggggcagagggtctcttctggagttggtggcatcagaatcagg

SEQ ID NO: 628508 - DNA, 420 bp, Homo sapiens
gcgaaggtcacaggccttgggccagtggtgggacactggagcaggaagtcggcctgtggccggccatgttcatgagggcgcgtcccttggcacccctgtagccgctatgtttcccacgcccgtggcaggcctgagagattatgtttgcggggggtgctttttttgtagcttctgtgttcgccatatttgaaaggggcagacggccatgttcgtgaacggcgcttcccttggtgcacctgtggccgccatgtttgagcgaggtgggcaactatgttcttgaggggggagcaaccatggtcttgaggggctcttcccttgaagcctctttggccaccatgtctgagaggggcagacggccatgtttgtaaggggcgcttctcctggtgcccctgtggccgctatgtatgagatgggcacggc

SEQ ID NO: 628509 - DNA, 627 bp, Homo sapiens
tgcggtagctcacacctgtaatcctagcactttgggaggccgaggcaggcagatcacctgaggtcaggagttcgagaccagcctggccagtgtggtaaaaccctgtctctactaaaaatacaaaaatcagttgggcttggtggcacacatttgtgtaatccctaaggctaccttgggagactgaggcgggagaatttgcttgagacgcgcagggaggcaggaggaggtagctgggatgggattcgactgatttgctgtcctgtcgtgacgtgatatgaatcgaatgtatcgtttggcaaataaagaataacaagttaagaaaggaatgattagggggtgacgcacaaattgcttggctaataaactacctttttgccgtgggctcccgccaccgtttaaaatagagagggggaactctcaccaacgttgacacagagctgggtcctcagaactccatggggcgcaagcctactcatttacaaaataaggacctcccaagaagagcatgcgatttacggcgtgcacacacctgagacgtagcgctcatcccggttgcgattcacagctggaggggctgaccccgtccattgaaatctaccatggccggccctacacatatcactccac

SEQ ID NO: 628510 - DNA, 349 bp, Homo sapiens
ctaagctacgatccagatgcagagccgaaacaagaagtgggctcaggtactgactgcattgcagaaagacagccgggaaatggagaagggaagtccgtccctccgtacactgatggctgcagcggagaattcgcactcgtgcaccaattcagagccccactgccgcgtgccctctctgattgtttcagaactgacacccggtgcagcctgagaagaacagacgctcgtttaatgtttggacttcctaactactggatgttgagcctttaacataaacaaacacaataaacttttaagagaattaaaccaaggccttcagccttaagccagctcacgtggagaggatgag

SEQ ID NO: 628511 - DNA, 488 bp, Homo sapiens
tctctagttgatgactcaacccttcactttcttgcaccagctgcctctgcttcccaacccacatgacagaaaatgcggtcaaatcttcatgagcctttcttccaacaacatcagccactcctggaagttctaaaactctatcactagtatggaccagtggtcactctttggacccgtgtgccttggccacaggagcaggatcatctggaacctggcagcactctctgtagtcacacaggagaagtgagaatttccagaagaattgccgtgctgggcagtcagaaccacagatgcccgtgcccagctccagccctgggggaatgacgaccaaatgttgctagaccttcatacctttcaagagaagttggaagtgctgctttttacatgacatctcctgatgttcaacagttggcaaccgatttagttctcaaaaaccaccatattagccaaacaaaataaatgtgtggtcaaattggcctacagacaaa

SEQ ID NO: 628512 - DNA, 145 bp, Homo sapiens
tcgggccgggtgacggtccgctgaattgggttgacctgggctgagctgggttcggctgggctaggctgacctgggctgggctgagctgagctgagctgtacctcacccgtagctgtacctcacccgtagctgtacctcacccgta

SEQ ID NO: 628513 - DNA, 324 bp, Homo sapiens
ggagatctctggatccatgaccatccttttccttcagctcagcaaacttgcatgcaatggtgagccgtgatggtagatccaatagaggggcatagccgcgaagcacacacgcggctgagatggacgcgagcgaatgacgagcatgaatcagagaactcagctagcggcgcaccagcgttgggacaccgaaagcatgcgtacgcgcgtaacggctgggccacatcgatcgtgtacatctagagccggcgcgcccctttgagtgaacgcatccagaacacccagttgtccctgcaactggaggactcgcacaagaccacggacaaa

SEQ ID NO: 628514 - DNA, 785 bp, Homo sapiens
tctctagttgatgactcaacccttcactttcttgcaccagctgcctctgcttcccaacccacatgacagaaaatgcggtcaaatcttcatgagcctttcttccaacaacatcagccactcctggaagttctaaaactctatcactagtatggaccagtggtcactctttggacccgtgtgccttggccacaggagcaggatcatctggaacctggcagcactctctgtagtcacacaggagaagtgagaatttccagaagaattgccgtgctgggcagtcagaaccacagatgcccgtgccagaagctcaccgccacatctctgccctcagtacatctttatcttgcacgacccaagacagacaagagcaagagagagccacttaagcccacctttcccagctttcttctctctccactttaccccttttgcccctgccataaccagcacccacaggacacacagactatgcacccagatgtccacagtgactgggcagggcatgaaattaacgaagcagggtgaaccccaggcaacagggcctggtggggactgcagtgagctttgtctgcacccttcagaggaagtagctgctgcccagctccagccctgggggaatgacgaccaaatgttgctagaccttcatacctttcaagagaagttggaagtgctgctttttacatgacatctcctgatgttcaacagttggcaaccgatttagttctcaaaaaccaccatattagccaaacaaaataaatgtgtggtcaaattggcctacagacaaa

SEQ ID NO: 628515 - DNA, 298 bp, Homo sapiens
gtgaacatatttttgaaaagaaacaaaattgacaatcctttagccaaactagaaaacagagaaaaagcaaatacaatcagaaatgaaaaaggagacattacaaccaatactgtagaaatcaaaggatcattagtggctattatgaatgagtatatgccaattgattggattatttagaaaaatgagataaattcctagacacatacaacctaccaaaattgaagaaggaggaaattcaaaacctgaacatacccataacaaataccaagatctaaagcataatagaaagaatcctagc

SEQ ID NO: 628516 - DNA, 190 bp, Homo sapiens
cggcgcgctcagcgcaatagcacgcggcagcgactcggtgaaacgcttgtgcgtctggaagcccaccacgcgggcctccggcagttccttgccaccgggttcgaagaacatgatccccggcgggccgaacaggcggaagcgcttgagcagcgcgcgatcgtcggcattgttggcggtcacgttggcctgc

SEQ ID NO: 628517 - DNA, 575 bp, Homo sapiens
ttcgcaaatacagcagctatccaagggacgtgtgtacatatgtaaatgagaatagagacgtgtcaacagatgcattcatttctcttgtgaatgtgtattgtttctattttgcgaaacaaaacaaaacaaaaaaaaaagctgggaactccatcacggggaaaaactagatccggtgggttatagcattggtgagttctccacgtcggtctctctcgctcatgtaatatactcggaccctgagtgggaaaggggttttggttctggtttttattttacctacatgtactatttagcttcagtggtactagtcctggccaccggtgtatttttaggggtggctagggaaataatggaaaagaaagggggatttcagaagaaaatggtaaccaaattcatacttggtataattttggatatcatgatcacaggtgattcacaggtacacacataaacacacccaccagtgcagccggaagtaactcccagagaaaccatcatcgtcttggtacatcgtatgtacaatgcaatcatttcatactttaaagtggtcaaagaaactaattgtgatttctagt

SEQ ID NO: 628518 - DNA, 180 bp, Homo sapiens
atcccccatcatccccttaatcacctgctcgagttgccactcagttctgacttcagggtctgggcatctcccatggcattgaatcctgaagcagctttgccagaccctccttgggttgccatggccatgactctaggccaagatcagagttcagccacccaagcagaagttcttcgaggc

SEQ ID NO: 628519 - DNA, 179 bp, Homo sapiens
ctacccgatcgctttctaatctatcagtgggccacatgtgtgttagatgtattatcctagatctcttttcctgaactctagaagtatgttactggctcttaaaagatttcacaaaaatacgctttgaggagaatcacagcgtttctgtgattagatatctcacaaggcacttacatgca

SEQ ID NO: 628520 - DNA, 1498 bp, Homo sapiens
  misc_feature (1073)..(1073): n is a, c, g, or t
tggaaacggagtttcactccggttggtccaggatggagtgcaagggcgcaatctcggctcaccacaacctcgcgcctcccagggttcaagcgcaattctcctggcgttatagccctcccgagtatgctgggagattacagggccttgcaccaccacggcccgggctaaatttggtattttatatgtaagaagacgggggtttctccatggtgagaggctgggtctcagaactcctggaccctcaggtggatccggcccggtcttcgggcctcccaaatgtgctgggagattacagggcgggagacgccaccggcgcgccgggcctgagaaggtgattctacatctttaggtgaatcacagaaaagggtgcggctcaaatatttcacaaagatgtgggatatggaaagcacattgggtgctaagtttatggagcaagtggcattatggtgagggggagaagattaatttttgggggcacactggttatatttctccaacgggggaaaaaaaaaagtataaggtgaaacacattcccagtgaaaaagaagtgtccccgcggggtcaaccccagagccttttcgtggtgggacggcgcccaaattcagcggggacaacacgtgggggctctacaaaaaacccctttacagaaggcctgggggggggatatactagaagcgcgcacaccacccaagataagggggcgtttaaaactctttaaaagtctcccccaagtgtggcacactgtgggccaacacacacgcagtcaagtcattacaacacggcgcaatcctatggggaaataggaactttaaaaaccccccgggtggccctccaggacatatctcttctattcccttcgggaaaaaaacttacaacggggttttccccattttgtgggggaccaaatatattgttcattgtcccacaagtctcacggagatcttctagatgatcatccaattccataacgagtcttacaaagaaaccgcctgtggtggggggggggtgtgatacaccaccccctgcttattagtcggagatgaagacatgcatattgcaacacgacaatcatnttgttgtgagtagacaagcgggccgcagtgatgatgcacccgggaagaacagcggcacggagagaaacacacctgaacacaggggggggggaacaaacagggggggggcccctcttcgataaaaccacccaaacagcgcccccctgagattggagtgtaaggagaaacaccccccccgcgggtgaaaacccacaccggaggaagcaccacagacggagaaagaccaaaaaaacgcgctccccgaaaaagagagggcgacgcagcgagaacaagagaaggaacgacgaagcaacacaacaccaagaaggagcgcaggaagcacaaccacatgtgagagacaacagaacgagcaagcaacagaaaacgacgacgcaacagaatgaactaaaccacgcgaacggaacaaaagagacaacgatggagaa

SEQ ID NO: 628521 - DNA, 212 bp, Homo sapiens
tgccaaaaggaatcgcactcagcaaggagtgtagaccggtcgacgggggccaagggccaatggcaaccagggtcaccgcgatattgtagcacggttggggggggggaaaagagcaatagaacgggggccgaaggggacgaagggaaaataaccaaggtcttacaacggaatataattggttgcctaaaggaagatccaggtgcagacaagtg

SEQ ID NO: 628522 - DNA, 280 bp, Homo sapiens
aataggaaagacagaaataatgtttcttttcttcttttattattataataatgagttcttgtcttattaatcatcaaagccaatatatgaatttccttttgaatatcattatgaagttaagaagtttctttatgaatattattatgatgttaacatatatctatatctgtatatctatatcaagatatatattttgatctattgctgtcatcttttattacactatttgtttcacgtttggcaaatgatgttaggaaataaacttttttttagaaaaaat

SEQ ID NO: 628523 - DNA, 202 bp, Homo sapiens
ctttaaatggacagccctctcctgttctcctggacggacccgggctctttcccatcctgaggtcgtctcgcattgctcggttctcgttagtccctatcctacgctctccctataaccatcctctggtctcagcttcaatactgcaagctccctgcagtccactcgaatgccaggaggaacacagtctagggcacttaccacg

SEQ ID NO: 628524 - DNA, 131 bp, Homo sapiens
tagaggatccctccgattctattgatcgtccccccgaggagagtctacctttccagaatgcagctccctgaatggagtttggagcggagcatgagatgtggtctcggtgcagagctcccaagctggctccg

SEQ ID NO: 628525 - DNA, 539 bp, Homo sapiens
  misc_feature (15)..(15): n is a, c, g, or t
  misc_feature (51)..(51): n is a, c, g, or t
  misc_feature (121)..(121): n is a, c, g, or t
  misc_feature (243)..(243): n is a, c, g, or t
  misc_feature (275)..(275): n is a, c, g, or t
  misc_feature (476)..(476): n is a, c, g, or t
  misc_feature (509)..(509): n is a, c, g, or t
ggccccggcgagcancaggtggcttcccgctgagccacaacctcacggacntccacgaggcgctggagaccacacaatacctgaactccttctcgcacgtgggcgcaggcgtggtgcaccnatcaatgccatcgtgcgcagccagcgtggcggccccggagcacgcagactgtccttcgtgttcctcacggacggcgtcacgggcaacgacagtctgcacgagtcggcgcactccatgccaanagatacgtggtacccaccgtgctggccttggnagcgacgtggacatggacgtgctcaccacgctcagcctgggtgaccgcgccgccgtgttccacgagaaggactatgacagcctggcgcaacccggcttcttcgaccgcttcatccgctggatctgctaagcgccgccgcccgggccccgcagtcgagggtcgtgagcccaccccgtccatggtgctaagcgggcccgggtnccacacggccagcaccgtgctcactcggacgangccctgggcctgcacctatccagctcctcc

SEQ ID NO: 628526 - DNA, 397 bp, Homo sapiens
tgagatggaatatcgctctgtcacccaggctggagtgcagtggcacgatctcggctcactgtagctccacctcccaggttcaggcaattctcgcgcctcagcctcccaaaatgctgggattatagcctggctaatttttgtatttttagtagagacggggttttactatgttggtgaggctggtctcgaacctcctgacctcagttgatctacctgccttggcctcccaaagtgctgggattacagacgtgagccactgcacctggccgcatatatatattttatttttttaagatgaagtcccaccacgccctacccagggtacctttaggtatcatgtcacgttgagggaagaattcgtttttattctgaattctaccagtttcacgggtaaaat

SEQ ID NO: 628527 - DNA, 535 bp, Homo sapiens
aacttagtcaatctcccaaaatagaaaagaatgagaaaaaacagtaacaaaacttcagttaaagattacaggaaaaaagtacaaagaatgcaagtgggtggttgggtagttttaacttaccagaagatactatcagagcatattaaaaaaaaaacagaagtattacttaggcttaaaaatgaaggaaattctgacataatgctacatgggtgaaccttgaggacattatgctaagtgaaataaggcaatctcaaaaagacaaataagtgctgtatgattatatgagatgcttggagtggtcgaaattatagagacaaagcttccagaggcgaagggaagggagcaatggggagtcagagtttaatggatacagaatttgttttacacaatggaaggagttttggaaacgggtggtggtgatggttacacaatatgaatgtattcggtaccactgaactgtatacttaaaaatggttaacgtggtaaattttgtgttccgtgtattttgccacaataaaaaaataaaacactaaaa

SEQ ID NO: 628528 - DNA, 430 bp, Homo sapiens
  misc_feature (428)..(429): n is a, c, g, or t
cgcaattgtcacagagatatccgccaagtccacgcatactcgtgcgctcccatctattcgcaagttggtcacggtggttccccgctatactttgactggctttcacctgctctttctggtattgtgtctcaattatgtctcactcatgggggtcatttctgtcagtggccagtttgtgcagttccccgctcattgacttattcacatttttttccatatcttatgctacactccgattgcattctgcccgctctccctgtcctcatagtctggtttctcgatatcctaaaggcacgattcggccacctcgttggttctgcagcttcatcgggcttcgagctcatcttctgtatcttagtcctagctttttcctgtgttcacagccctggctaccctggcggctcgtgatggaaacccccttgaggggnnt

SEQ ID NO: 628529 - DNA, 219 bp, Homo sapiens
tggccgagaaccgccattcctaggaggtttatcgagtgacatgttgagtgttctatatctcagtgcagcttatgtcatgaggcaactcctgcaaaggcaatcgtgttagattagggaagttacttacagtatgtgtgttataacctcaaagttgatgtattgtggccctctggcaggttggtttttagcatgcttcatttaagtaaaaactgaagaata

SEQ ID NO: 628530 - DNA, 85 bp, Homo sapiens
attttttcccccccccccccccccccccctgggctttattttggtaatggtggggggggatggataaataaaggggatcttttga

SEQ ID NO: 628531 - DNA, 148 bp, Homo sapiens
tcctttcactaatgtatctcccttcctactgagcatgaggttttaacgtttgtttcaattccccccactttcttgatcagtgattctcaaccatgtaggaattaatgacaccaattctgtatcaccactgcaaccaagaaagtgacag

SEQ ID NO: 628532 - DNA, 456 bp, Homo sapiens
  misc_feature (134)..(134): n is a, c, g, or t
catgttctcatttatttatgggatctaaaaataaaatcaattgacctcatgggcatacagagtagaagaatggttaccagtggctggtaagggtactgacggttgcagggggaggtggggatggttaatgggtncaaaaacaaattagataaaaagaatgatttaatatctgatagcacaattgagtgactataatcaataataacttacttgtatatttttaaatgatctaaagaatgtaattggattatctgtaattcaaaggaaaaatgcttgaggggatggattcctcattctccatgatacacgtatttcacattgcttgcctgtgtcaaaacatctcacataccccgtaaatatttacatgttctatgtacccacaaaattgttacaaaattaattgagacatttttatttaagaacttgagaacttttctaaataaaggtttttccatg

SEQ ID NO: 628533 - DNA, 140 bp, Homo sapiens
tgaatctgattagtggatcacgtatctacttccctgtcgcgtcaattcactatttccccagaagcttggggcagagtgtcctagcaggagatgatgaattctcgtggctctcgtgccttctcagagaaataaatgctttg

SEQ ID NO: 628534 - DNA, 529 bp, Homo sapiens
  misc_feature (359)..(359): n is a, c, g, or t
ctcactgcaagctccatctcccggtttcaagagattatcatgcctcagcctccaagtagctgggactacaggtgtgcaccaccacacccagctaatttttttttttagttgagatgggagtttcaccatgtttggccaggctggtctctaactccgtgacctcaaggtgatccgccgtgccttcagccttcccaaaggtgctgggatttacagggtttgagccaccagtgcctggccaattagtttatttccaatgtgcatctatttaattgtgattcttttcatatttgacaacccttttccaattattctcttgtgcttccaaatgtggaatttatgttttttcccaagtttcccanattgcccaaggttagaccactgggcaaatttattatcaaggttctttggacatcttggaacttcagtatcagaggatggagttcttctctcattggccttgagcaagggcttataaccagagccacattaagaactcagatcatgctccctaattgaggacacttagcaa

SEQ ID NO: 628535 - DNA, 263 bp, Homo sapiens
actggcacaggagaggagaggggcacagcgagtgtgtggcccactttggccccccatcgcctcccaacaggaggtggacctggagctggaagaacaggaactccttattctacttagaggacaggttcaaagtgcagaaatttctcttatacaaatcctcttccctccatgctctgccccttgctgaagaccagccccctgcgcaggatgtccgtgcagctgtggcaagacaaggtcaaggggaagggcgtaaggccaaagca

SEQ ID NO: 628536 - DNA, 336 bp, Homo sapiens
caaggattttaggtattctatggcagaaaatggagatgaacaccaaatagaaggccgggcacagtggctcacgcttgtaatcccaacactttgggagaccaaggtgggtgatcacctgaggtcaggagtttgagaccagcctggccaacttagtgaaaccctgtctctactagaaacacaaaaaattagccaggcgtggtggcaggcgcctgtaatcccagctactcaggaggctgaggcaagagaatcacttgaacccaggaggcggaggttgcagtgagccgagatggcgccactgcattccagcctgggcaacaagaacgaaattccgtctca

SEQ ID NO: 628537 - DNA, 1343 bp, Homo sapiens
ggtactgctgagtgtgcctgtggcctccagtcttgtccctgtgatgtgcctctgagtgaagtggatgcttgatgccctgcctgtgctcccagcctggagcagaaagagacagtgagctgacatgtatgcccttgtgtgcatgccgtgtgctgttgcttgtgcttgtgtgtgctggtgctgacgcgtgtgttggccactgtgtacaagtgcagtgtgcagtctgcctgtgcaccgtgcttggccgtgtacgggtgcttggacttgggccggcctacgagatttgccagacttcctacacttgagtgagtgcttgtgccgcataaccatacattgccctggcaacgaagggctcccattggactctgtaccttgcaatcacattcttcaaccctttgaatttaacatgggttgaacttccctttgcaggccttccgcaagggaagcggactgactttgaggggaagaccgccagaggatcccccagtatgtgtgcacctttctcagaaaataagtgcaacgacggttacgcgcagcatgacaaagcaagcccagtacttgagcagcaaagagcgcgcacacaaggctggccgttgggcatgacactggacaaccttgcgagttgcgaagttacccgttgactagggtgtgacaaacacaacgcatggtacaacgaggataatcacatggcgttgatgtaccccaaggcaatttagcaatagtggccacaaggcctcgaacaagacgatagacacccaaagcagccagaattcacgcaggcagtttggcgcgcttttacgacggctgacattcggggccccactcggtggcccatatatcacacaatcagccgagagaacaggaagacccccagacgacctttttgggcaattagttggcccgattctacctgagtggcgctttcggcatgccacaaagttccaactatgagcaacgacgttagcgatgaatgagttccgtcactggtatgcaacctccggcacactcaagcggccacgactttgtagggttagggccgtcaggttctgatgaagcacgcagggcagtgtgcaacacaagattaaccacaccgcatatggcaccatacgggacaacagccacgaacacctatggcgattaagggataggaggacaacgtggaaaatcatcacgggactaaataaaacccggtaatagcccgtatgaggataacagcaatatgtcgttcagtgctcgtgaaagacgtgggggtacgaccgcctgtggaaactaccctgtgcgcccacccacacagttaccccgattggccataaggcggaccacgaggggagctcattcacacgcag

SEQ ID NO: 628538 - DNA, 1172 bp, Homo sapiens
ggtttgccatgagtataaaattgtccctatgcacgccccatgcatggtgagctgtccgtggggctctctgagtgtcatgcttaggagtgcccagaacgagtattcctcgctagttggtcctgggccagctgctgctgtcgcgtatccgagccctgacggagagcgtcgctgagacgacgtgctctcgttgtggacgcattctctcctcgagagcttgtctcctgtactacgtgtgatgccgtccatcttctgcgcgcactctgggcatggcatggtcctgcgcttgtatgcgagctatcaggaatattcatccccatggacgtgtgtacgaagtaacgttaccctcgacctcattcgagtttttgggttcgatatcgttatcctctatggctatcatcggtcataggtcttgatcgaaaggtggccaacgtcgccatgacatctcgcgaaagcacgaggaggatcccttcaacattacgatcgagccttgcacttgcatgtgttcgtatagaccattgagttcggttgtcccccatgatctcagcgaagatccccaagcgctttacatggtctcgtttacaagcgtataacgggggaccattcgacggtggtaacgaatgcttcaaaagaccatgaaagagtcgccactttgagaaatgttcacctaccaagctttcacggctgccttaaaagcgacttatgacataccatgcgaaggcggacggattttctatgtggctttactccggggttgttgcgcagaggggaacctgtgggttggacccttgtcccaaggaggtcagcacgtgtggttcccaccccgaagttccgagtggtgccatggggtcctcctgtttggcgaaccctgttgcccagcgagggtgcccgtccgtgttgggccttgcacggggtagactccgtcaggggtcatccaaggctgccgaccttctgagtttcccagagggcttcagttagcgccccttttgagagctgttcgtgagaatcgcttcggagggtggccacttgcgcggtagccgtgcgtgagcgtggcactaattctgtcgattgcaagtggtggaactcacgggataaatctgaaacttggaaattctgcgagacccccttttttcacccaaggctcgatttccagaaaccctgttggaaaaccccac

SEQ ID NO: 628539 - DNA, 445 bp, Homo sapiens
aggcgtggcggcgcgggctgcaatcgcaggcattcggcagactgaggcaggagaatcaggcagggaggttgcagtgagccgagatggcagcagtacagtccagcttcggctccgcatgagagggagaccgtggggagacggagacggagacggagacggagacggagacggagacggagagggagactttttaaagaaactgccatttgtattgatataatatggtggaggcccaggttccccacgtggtccccgctgatcttgttactggtctgcagggatgaaattcctggataccctacttggctttctgtctccaccttggaaggggtattgagtgcttaattacagctttgagaggttggaaatctaggctccccacttggcctttgctagaacgggtaggttttaaaccacagtattttcttggtgtttggctggggta

SEQ ID NO: 628540 - DNA, 449 bp, Homo sapiens
  misc_feature (220)..(220): n is a, c, g, or t
aaaggcagaggatgaagctgtcatgttttttttttttccttcaaaagaaaataaattatattttgacatacaatcagagcccatttcaaatacacagtgaagcatttctcatgaattcaagcaatgtgatccgattgccttttagcaatactttttttttttaatccagtcatgactcatgttttatcattatcactgtggatttgatgatgtgaaaganaataatggtgtgtttttttacaagcattataatatccactcacacatactggatttggatggatcagtgctttatcttacacagtcccgaaaaagaagagcacataatgtagccaatgtaataatgctccctcaaatgaatggttcacattccctaaatacatgtggtcagtgaaacatacaagagcagcattgtatgttgaataaaagttgttgttttttttatatca

SEQ ID NO: 628541 - DNA, 444 bp, Homo sapiens
ccgacgtaacgtaaacgaggcgagaaagctgtagaccgagagacgcctagagcgaagttgaacggtggaggggacctgtgtggaccggcttgatctgtgctgcggacacgctgctaccaatgcggtagtttcagcaaggaagtggaggagcggagtagagaacggccctcccagcctgaggggctgcgcaagggttttaggcctcaacggaggatcgggacctgtgggcggggatgctgtgaagcggagaaaggtggccctacccccagtgagcccccatgaaggggggctctctcttgaggggggagttagagaagaaatccaaggctatcattgagggaaatatctccattcttcatgacgtgaaaggaaggcagtccagtgcgtagaggagctgggctcaccctccttgctcttcatctttctacggcttccggcggtccg

SEQ ID NO: 628542 - DNA, 968 bp, Homo sapiens
gactgcgcggcgttgggcgtgcagagtgcgccagatcggcggacgaggggccccgggaggttgctggactgagacatgagcctccaaactggtgtggttgggcatcggtagacacatacgggggacttgggtgtgcgcccacagatggtttggcgcctgacagatgagccaggagcagctcgctaagtccgccaccatggtgaaattgctagtggccagaaatcctgtgcatggtgggcgtgtgcttcttcgatgcgtgctcggctcgcctgctccccgtgaagatcatctgatgacagatttgagaaggcgcatcgctcgaagaaagatcctctctcgtcgtgcaacaccgtttggaggaggggtgtctctggccacgtgcttcaacgctctgctgggccgctgtgagggaacaagctccagaaggtcctgagcctcggccacatcagcaccgactacccgctggccgaaaccatcctcctgctgggcttcttcatgaccagtcattcctggagcagctggatcctgaccttccgcaaggagaagccgtccttcatcgagctggagaccttcaaacgccggagtcggacgtgggcagcagactctggagtatgagagccccgttcatgggtgggcgctgcggggccacgcgctgtacgtggagccccacgggcacggcccagtctgagcgtgcagggcctctcgctgcgccagcccgtgcgcctgctcaggctggccttcgcgctgtcggccactcgggtctttgagggcctggcctggggcctgcaggaggagggggagaaaagtggtgaacctgtacgtgggggtggccgtccacgagacactggtggcgtggccctgggcatcagcatggccggagtgccatgccctgcgggacggcggcaagcttggggtcaccgtgagcggcatgatcccctgggacattcggcctgggctgggcatcgaac

SEQ ID NO: 628543 - DNA, 179 bp, Homo sapiens
catcctacccaggatcatctacatccaagataagatgacaggcacactcgagaaccagttcacctgcccattctgcaaccacgagaaatcctgtgatgtgaaaatggaccgtgcccgcaacacctggagtcatctcttgtaccggtggggtacggaggtgggtaccgacgctcgaactt

SEQ ID NO: 628544 - DNA, 437 bp, Homo sapiens
ggatcgtgtgatagtaaactaatcaggtcaggatcgtgtgatatgtaaactaataaggtcaggttcgtgtgatatgtaaactagtcaggtcaggatcgtgtgatagataaactaatcaggtcagggtcgtgtgatagtaaactattcaggtcagggtcgtgtgatatgaaactagtcaggtcagggtcgtgtgattgtaaccctagtcaggtcaggatcgtgtgattgtaacctagtcaggtcaggatcgtgtgattgtaaccctagtcaggtcagggtcgtgtgcttgtaccctagtcaggtcagggtcgtgtgattgtaacctagtcaggtcagggtcgtgtgattgtacctctatcaggtcagggtcgtgtgattgtaccctagtcaggtcaggatcgtgtgattgtaccctagtcaggtcaggctcgtgtgat

SEQ ID NO: 628545 - DNA, 1576 bp, Homo sapiens
  misc_feature (721)..(721): n is a, c, g, or t
  misc_feature (1304)..(1304): n is a, c, g, or t
tggttaaaaaaaatttttgacaattcaaaaagggggtttcaggatgtggtgtggtgtgattgcaaaagatgtggaagccatgtggggtgtgggggcttgtcaggggtgtgggggcagatagtgtgttttcctttcacccccaccctgtggtgtgttccttctcctgtgaaggacagagggtcacatttccaaagatgtgggaagaagtcttttcttacgggtgtttgtgtttcaatgtgttagggaggagaattgtttatattcttcattcgaggcgagcttcacttatatttgtgtgactcctcaagaggcgattcgcttgcacattcattgtgagcgattctgtgtgcgcattcattctctctcatttcagagaccacaatatgtgttgtattacgccaagcccctctgtgtgtgtgtgcacaaacccgggcctgtgcttctgtgcgccccacccggatgtgcacgggtttagggttctcaagaatctccctcgaggcacatgtgctccatataaatttacaagagcaatgtgttttacacgccggcctctcgaatgtgtctccccatgtgcccttcggggcccaaaatctccgtgtttgtgggtatacgccccaacaaaaaaatcttccgtctcgttgtgaaaaacatttctttttacaactgtgggcgtgtatataccccggagagaacagaggcctcttccttcctctcgctgtgngggggccaatttcccccagcgggtgtgcgtattgtgcgccacaatggtgtgcctgcgggggaaaaacgtcttcccttgggcctccccactattatgtatacgctgtgggggccccaacgcggccaaatgtggcacacccgggtttggccccaagaccttttccaacacaagggattataccacccacaaccctggtggtgtttttgaaaacctcttccaaggggggaccttctctcgacaggaaggcgtgtcaacaagaggaaggccttcccacggggtcgagtccttatcctccggattttggtcaccttcacacgctttttaccagcgcttctccagtctcaacccgtgggtcgttgcaaaccacccacatgtgacgcgggtggctcaacaacttatttcggggttcattcacatttcattccccccggaacagctctcttccatgtggggactcctttggtcattgtaacccttttgtccggggacagcatctggggggacccggagtctcccttctttcgcggcccccaagaggtgatggcccctttggaacacatctctttgaggcccattaggtccncttccgcgtgagggcgggtgatctgcgcgcaacaccaattctcctctgcgaccacaatccccagaccgcattgtttatccctcttgctcacgcatccttcatcacaactacatcagctaaaactaaacgcagacggcgcgcgcctcaaaacatcactccgcggggcgcccgacttcctactccacacagctcttctgtccaaacgcgcccccaatcagcacattattatacaaagacacgccggcgtaactcatcacgcaggacaaactgta

SEQ ID NO: 628546 - DNA, 588 bp, Homo sapiens
ccccccctcttccggggacccggtggttaagaagcctccgcgggacactctacggtagtagttgcacattccgtgaccgatggccccttttcatcatctccgcggcagcgtctttgggttgtatactcgcttactgccgagattataagtgtgtgctccgcccccgcccccgcatgtgcgccccagtgtgacagtgtgcgtctcgcccctgagtgttgaggacggcttctctatggcggcctcctgttcatcgtttcctccgcgcattgcctcttattatctccccccacgaacaggcccactttatttactcgcggcccccctttttcgcacgatcgccatggtgcaccttccttctttgacattaacactattgtgccgcccacgctttttccactggagcaatttcgcacaccggcagaattgtcgcctctcacaactcttcgaagcccccttttttctttccgtcccccctcttgtaaaactcaccactctgcgcatatcttgccaacattaacaactaatatatatctcatacaaaaaagccacctaccaacccaaaaaaaatattccccccccaaaaaaaca

SEQ ID NO: 628547 - DNA, 870 bp, Homo sapiens
ttcccaggggcgcctccgtggcacctttggaggcgtctcctttggggtgtgcacccccccccccggcccttgtgttgcgcccccacacgtgtcttctcggggggggcgcctcccccaacagaaattgcggggggggttctctccttgcttccagacgccgtggtggtcccgcccgtgttggttttgttgcgcacccccccttctccctcccggccgcgcgtgcgattcttttttcgtcaacaagtgtgggttgtgaaagccccccctctcggttggtggcgcggatacgactgtggggagaaacacgtgtcccagcctctgtccccccgtggggttgccccacccgtcgcactcactctcgtgggcgggtggggatcccctttcttgtgggctagaggttgttattctacgacgcacgccctcctccgattagttgtgtcgcccggcagtccccctccctcctcccgcgcggtgggggggagcgactacttcttgcacccccactcgctggataattgtgcgcccgccgtttgttttttatcatatattgtgttctctctttacacaaacacataaacataaattagatttgtgtggtttttctctcatgtattgtttctcgcaccccccctctgagccgcccccgcgatcatatgatttaaataatattatgcaaggagggaagaaatatatattcttcccccccacacacgtgggggccctctcctccccctccatcgataatggctgctggcgtcggtgagaggaaatgaaaaaatcttctcttcttttctcccccctttttttggttttttttttcccctctttttttttttttttttcctcaaaaaagggatttttctcctctta

SEQ ID NO: 628548 - DNA, 815 bp, Homo sapiens
agcgggatggacccgagtgcacgtgtggagaagcggcggcacaagcgcggcgagcgggagacactcccgcgcctccatccatgactctagccctcactcgactctcgcgggccttcgttgtctcgctcagcctccctgcccaggctacggaggccggacttgcggggttgacgtggcccgcagcgtaacgggtgcgtgagacctaacgggcggcgactacgacgggcgttgcactatcgcgtgcgctaagcgaccaggcctcaagcagcgtcggcggacagactgaatacggtccggcatcgacgtctgggcaccatgtgagcacccacaacaatagttatacacagttgaatacatattgaatcacgcgtcatactttccaggtcagctactaatgacagagttctacacaggatgtgcgtggatggttgggcgagctagcagaaacttgccgtatttcaatggatcttgctgtaaggtagcagtatgctgtaagggtggatcattcacagaactcagaaggagacttctacatcatgacactaggatgtctggcaccttaccgacaggctaggacataggaactacacatgttaaactcatgtcttaaacatctgtgagaaagatggtactttagacaagcatttatctgcatgtccagatcacggaatgagtcggcaattgacttctacaggaagttaggctttgcagcattatggacgacaagaagaactactataagaggatagagcccgcaagatgctcatgtgctgcgagaaaaaactcaaagttcgttctggtcagaatgcgactgg

SEQ ID NO: 628549 - DNA, 865 bp, Homo sapiens
  misc_feature (17)..(17): n is a, c, g, or t
  misc_feature (102)..(102): n is a, c, g, or t
  misc_feature (111)..(112): n is a, c, g, or t
  misc_feature (148)..(148): n is a, c, g, or t
  misc_feature (155)..(155): n is a, c, g, or t
  misc_feature (160)..(160): n is a, c, g, or t
  misc_feature (166)..(166): n is a, c, g, or t
  misc_feature (195)..(195): n is a, c, g, or t
  misc_feature (197)..(199): n is a, c, g, or t
  misc_feature (202)..(203): n is a, c, g, or t
  misc_feature (216)..(216): n is a, c, g, or t
  misc_feature (219)..(219): n is a, c, g, or t
  misc_feature (229)..(229): n is a, c, g, or t
  misc_feature (232)..(232): n is a, c, g, or t
  misc_feature (241)..(242): n is a, c, g, or t
  misc_feature (254)..(254): n is a, c, g, or t
  misc_feature (271)..(271): n is a, c, g, or t
  misc_feature (288)..(289): n is a, c, g, or t
  misc_feature (294)..(294): n is a, c, g, or t
  misc_feature (298)..(300): n is a, c, g, or t
  misc_feature (303)..(303): n is a, c, g, or t
  misc_feature (306)..(307): n is a, c, g, or t
  misc_feature (319)..(319): n is a, c, g, or t
  misc_feature (325)..(325): n is a, c, g, or t
  misc_feature (337)..(337): n is a, c, g, or t
  misc_feature (339)..(339): n is a, c, g, or t
  misc_feature (349)..(349): n is a, c, g, or t
  misc_feature (372)..(372): n is a, c, g, or t
  misc_feature (400)..(400): n is a, c, g, or t
  misc_feature (430)..(430): n is a, c, g, or t
  misc_feature (485)..(485): n is a, c, g, or t
  misc_feature (589)..(589): n is a, c, g, or t
attacaaaattatcagnagcagtcttaagcatttcaacaatgctgatagattccactttgctaacacaaacaaggctattataccatgttcgaaaagcaagncttgttccnngacggcctatcattatacatctgcctcactgctcancacccgnttgtnactgtntcttcttccatctcttcttcaccatcatnannnggnnctgatctgggttntcngggaggggtntgngcagagtgnngcaaccccttcngcgtctccacttcagcnagagttgaagcatttgnnatggnattnnngantgnntctacatccccnggaganggcccacctttntntttgtgagtngggaaaccagcacctggattaanagtggggagggggaagaacataactgtnagacctagaccaacagaagttgcttctctnttactttcaaaagcttttgaaagtaattcaaccagtgtagtatcttatctttgtnaacaaactgatacaagaactctctccttcagaaacaccatccagttcatcttcctatatagaaaataggatgtacatggtatcacatgaagactgactactganatatttgctctgctaagctggtagaaatttcttgtgatgtgtggaccattgatgtacatggactataagcactcaaatttaataccacattaatatgtcagagtttttggttaattttgtaggagacgaactgccagacagatcagatcatgtttctgaaggtgaagtagagttaagttggatatccgtgtcttacgttttgcttctcctggcaatatcctttgcaagctgtgcaccccgtttgcccttgaacattttctctgcttcctgacgctc

SEQ ID NO: 628550 - DNA, 1514 bp, Homo sapiens
ggaatggcggtggctgcagcagcagcggctggtggaaaccctaaagtccgagtccggactacgagtgcgtggcctcctaatcctggatcctagtcctgagctgtgtcttgtgtgcagagtgtgacgtgtccctggacgctgatgaccctgaactggctggcgtgcagctggagctgggcgtggagcctgctggtggtgtggccatgtgagctgctgagctgcactgtctgggggcaggcacaccctgtgtggcccctgcaccctgccctgactgcacactgcctgcaggcgattgcctgggatggactgatgctgcgaaccatggcatggcaggcagcgtgaaaccctgaggtggcaccatgactgtggtggcacagatgagaccaggggaacgtgggaaccacagagggtcccgagtgactaggaccttgaggcccgcaggacatccagagggcactcggcatcaggactcaagaggtggcaagcagagcctgcagaaccgaggaagacgtaaacaacagggttgactgcatggctgcgagaggagctgcacccgggccgatgggcgacaaggacagcggccacatgtgacagcggccaatcattcagcgcggaggaggatgagacgggaccgtgggcccgctgaacgccaaggacggcaaggcaaggggcgacagcatagtgactccgcgtacgcaataaggatacggatggagaccggcggagtcacaagcatgcgcaatacagatccaagtggctcataccggaacgacatacggggagaacagcagggcacgcggagtgagaccgcactggagtttggccccgggccccaccttgacattgggcgcaccggcacgacgcatgcccataactggtgccaacgaggacggcaacgatcaggatgaacacggaacagacaggcggacaacggcgtcaccagcaggaaagaggaggacgagcaaggaacacatggcagaggatcccaagagcaccaggcccggcgcgctgaagaacggagcgaagaaccagacgtagagtggggtggcccccagttcaacttcccatcagagagggacgagcaaacgacagaagcagagaccaaggggcaggcagcgcccaacagtgcacgcggcacagcgggacgggaaattgacgaaggaccgggcgaccctcgagcacggacggggaacaattgagaagcgcgcacacagacacactgtgcagagaaactaacgagagcagacgtgaagccaacgaagtagccgcacggagcagcgtgacagagaagagttagagagcagaccagaaaagccatgcggcacgagcaccgaccacaggacacgccaacggagaaggagacaacaagcaccgcgggagagagaaaagacggagtaagacgcgagcgagacgagaggcagagagacaatgaagaaaagaaagagagagacgacagcgacaaccagagacacgaacacagcgaagatagacacacatcgcacgcggacgacgcg

SEQ ID NO: 628551 - DNA, 167 bp, Homo sapiens
  misc_feature (12)..(12): n is a, c, g, or t
  misc_feature (34)..(34): n is a, c, g, or t
  misc_feature (52)..(52): n is a, c, g, or t
  misc_feature (89)..(89): n is a, c, g, or t
  misc_feature (94)..(94): n is a, c, g, or t
  misc_feature (98)..(98): n is a, c, g, or t
  misc_feature (127)..(127): n is a, c, g, or t
  misc_feature (131)..(131): n is a, c, g, or t
  misc_feature (137)..(137): n is a, c, g, or t
  misc_feature (139)..(139): n is a, c, g, or t
  misc_feature (142)..(144): n is a, c, g, or t
  misc_feature (147)..(147): n is a, c, g, or t
  misc_feature (153)..(153): n is a, c, g, or t
  misc_feature (159)..(159): n is a, c, g, or t
ggcttttgaccncccatttttactatttgccaanacctttttctaggaatgngcttttttttggacccatttttatcccttttacattntaaancagngtaagttgtatattactgttttttatggncaangacccncnatnnntcntatggnaatttntttttata

SEQ ID NO: 628552 - DNA, 385 bp, Homo sapiens
ataataagcagaagcataaaatccatccaactagaataactatacctctactactagtactaaattcacacatccgtccttgatcgttctctacttctacccagtataactctactactagtaaccatccacatacaacttacatcgtcagctctgaccgacccgaaggtcagcaggacgcagcagaggcccagcacccacagggccctcaaggcgtgcggccggtagagtactcaagtccccttacgatcgcaggagccgacctccacccccgagccctgattccgatacctcaagcctgcctaccgcgtatctgcggatacccgctatcctctacattcgagctgtgaagccttgaagctgggcactggcccgacacaccaca

SEQ ID NO: 628553 - DNA, 464 bp, Homo sapiens
aagtaattgaagacgttttaaaatctgtttttgatgctaagaacatcgaaaaaattgaaaaacttgaaagaacagagttagcatacgaaattaaaaaacacaaacaaggaatttttgttttagctaacttaaaatctgaggaaagtttaatcgaagaatttgtcagaagagtaaatattctcaaaaaacaagttttaagatttttagttattaatctagattctgaaagaggaatgcacaaaactttcagacctagaaaaaatgataaacacaaatttttctcttctaaaaaaccaacaacttcaacagaagaaggtaaaagttttcaaaaaccatttgtcaaaaaaccttttgttaaaaaatcagaagaaacagattcttcaaaacaaaatgaacaagacaaagtgctaagaaaaccaaaaactgtaaaaccagcaaaagattctaaagtagctcacacagcc

SEQ ID NO: 628554 - DNA, 1187 bp, Homo sapiens
  misc_feature (443)..(443): n is a, c, g, or t
  misc_feature (470)..(470): n is a, c, g, or t
  misc_feature (473)..(473): n is a, c, g, or t
  misc_feature (503)..(503): n is a, c, g, or t
  misc_feature (583)..(583): n is a, c, g, or t
  misc_feature (586)..(586): n is a, c, g, or t
  misc_feature (592)..(592): n is a, c, g, or t
  misc_feature (610)..(610): n is a, c, g, or t
  misc_feature (664)..(664): n is a, c, g, or t
  misc_feature (696)..(696): n is a, c, g, or t
  misc_feature (704)..(704): n is a, c, g, or t
  misc_feature (711)..(711): n is a, c, g, or t
  misc_feature (740)..(740): n is a, c, g, or t
  misc_feature (755)..(755): n is a, c, g, or t
  misc_feature (763)..(765): n is a, c, g, or t
  misc_feature (767)..(767): n is a, c, g, or t
  misc_feature (784)..(784): n is a, c, g, or t
agtgcctcctcctagcaagctatatacctacatagtacagccatggcccccaccgtgatggcctcgtcggccacctccgtcgctcctttccagggctcaagtccaccgccggcctccccgtcagccgccgctccaacggcgctagcctcggcagcgtcagcaacggtggaaggatcaggtgcatgcaggtgtggcccatcgagggcatcaagaagttcgagaccctgtcctacttgccaccgctcagcacggaggccctccttaagcaggtcgactacctgatccgctccaagtgggtgccttgcctcgagttcagcaaggttgggttcatcttccgtgagcacaacgcatcccctgggtactacgatggccggtactggacaatgtggaagctgcctatgttcggatgcaccgacgccacgcaggtgatcaacgaggtggangaggtcaagaaggagtaccctgacgcntangtccgcatcatcggattcgacaacatgcgncaggtgcagtgcgtcagcttcatcgccttcaagccaccgggctgcgaggagtccggcaaggcctaaacagctcactcacnacnggccanatataaagtgccattgcngttttgtcaactctgacattgctttgggttttccttctccatttatctttcttntttgttcctaagaatatgtgtatgtccatgtncatgtacnaacatgntcgagaaagcatgctcgtatgtgaatgcnatcggtggctatgtntatgcacnnncncataatattatacaatntgtcgactatgtattcgggtaattaactaatgagaaacatctttggcaccaaaaaaaaaaaaaaaaaaaaaaaaaaaaaaaaaaaaaaaaaaaaaaacagacaaaacaaaaaaagagaaaaacacaaacaaacagaacgacacagcaacacaacacacacaacaaaaaagggggggggggcccccatagaataaacccccggggggcgccccctttgccgcacgccctgtgtgttacaacgaagggggtcgcacctctatttgtgtgctgcttatacattacacgtggggagggcgcgtataacaaccctgcttctggggtgaaacattcgctcgagcgttgactgtctggtgaggcacccctcttttggtggtgcggtgaaccatagcgggagcacactcat

SEQ ID NO: 628555 - DNA, 194 bp, Homo sapiens
tccatagtcaaagtctctgctccttcagagaacaggacatcttcctggccttaatccattatagcagccgttatgtcatttctgtatttcaggaagactggcaacgaccgttgctttcattcttcctcaaagtatttaccatcagctactgtccgtgaggactcgtgagtccgtgaggagtcgtacagtccgtg

SEQ ID NO: 628556 - DNA, 649 bp, Homo sapiens
cgtcattattgtcttttgattataggccatcctatgggtgtaaagtggtatctcattgtggttttgattggcgtttccctgatggctaatggagtagagcatgtttttgtgtgtatttggccatgtttgtgtgcatttggccatttgtcagttacggagaattatctatatatatcctttgcccagttgttaattgggtcatatgtctttttatggttgagttgtaagagttctttatatattctgaatataagttgtttaacagatacaggagttgcaagtattttctctcatttagtggcttatcttttcattttcttgaggtctgtctctgtcacccaggctggagtgtaatggcataatcagatctcactgcagcctcgaactcctgagctcaaggagccctcccacctaagcttcccaagtaactgggactaactgcatgtgtgcgccactacacccagctactttttgtattttttgtagagacgggatttcaccatgttgcccaggctgttctccaactcctgggctcaagtgatctgcctacctttgccttccaaaatgcgggattataggtgcgacgcaccactcctgcctagtttttattttcggtaggacagagtctcactgtgttgccactcgtgtt

SEQ ID NO: 628557 - DNA, 355 bp, Homo sapiens
attaaatgctcaactccaaaaatacacacctatgaatatgaggtggctcttttcttccaattttttaaaataaagaggccccatacccgttcatttatgtattagaagtctcgtataatccaccaataaaaccgaaatagcctctgtgatcacaccacggagaaacaagatccagagacaaccttagccactgtaaaactggacttgaacactccgatgctctggctaagtcagaatctaaagatttgctaataaggttttattggtttagcctagtccccatggcctttgtctataactgatatgtgggaaccgttcccaacgaaatttcacgaacccttccggaattctggct

SEQ ID NO: 628558 - DNA, 353 bp, Homo sapiens
gatcccccgtaatacaacggcagcttagagcctccctcaattccctcctggcctaccacccctccactctgtgccttaccttgagcgcagtcttgtagtgcattagctgtgaattagctcacttggtgcattatgtcctatattggctatattgaaacctggaattgtggggcaatctattattagctgccttaaagtccgtaacttacccatagccaggactgggggataaggttagatattgtattccggggtttttcgctgctactttccgcgttttctagcacttgtttttggagggtttcctgctcgatccatgttctatttcagtgccgtttttcttcgacgaaagc

SEQ ID NO: 628559 - DNA, 355 bp, Homo sapiens
cctccagtcctgggcagtatgagctactccagcctggtgcaataagagctcattgctgcctgggggaggggtggcgatagggaggaagggctttttttcctgtagagagtggggtttcatcttactatgttgcccaggctggtctcaaacctctggcctcaagggaccctctcaccttcgcctcccaaagtgctgggattacaggcgtgagccattggccctgctagaatgagggcttttttttttttttttttgggaagacaagatctccagctctttttgcgcccgggggggagtaccccacgccgagaattaaagacgttacaaaaagtatgtaaatgtttctcccggggag

SEQ ID NO: 628560 - DNA, 402 bp, Homo sapiens
ctagctgttcagaggtccccgacgggcaggttatacggtacaagggtataattcatcctatgtggttcattgaggcagtatgctacgatttcgcgtagctggattgggttaatccacctcaattgcctgctatgatggataagattgagagagtgaggcgcaggcttacgtcaagtgagggagagatcgggtatctgcttgagatgggggctcagtttttgtccatgtgcagcacgcaagcaggccggcatgtcagaggggtgccttgggtaacctctgggactcagaagtgaacagggggctcatcctagtttcatggctatcagccattatgattattcactgatgagtatggattggcagtcatgggttatggttcattgtccggaacgtatatggttg

SEQ ID NO: 628561 - DNA, 194 bp, Homo sapiens
ctgccgcgtgcccaagacttccccttcctccccaggatcaacggcgacccgggaagtcacgcgcgtggccgggcgttgtggaacgctggaagagtgcacgccagcggtgcatatgacctcttcgtgcagaggccatcatcatgggccattcaacgcctccgggccattcaacgcctccgggccattcgacgcct

SEQ ID NO: 628562 - DNA, 369 bp, Homo sapiens
cacgggattgaatcaagtaaagccacaggttcttctgagtccacttaacacaacagaggttattgtgcgtgtggacaacttcttcaaagcggcacccaggaaaggtgtccctgatcaccacccttgttaagcattcccacgtgctgtcgatcggcacagtttcaaccaaagttgtgtttgaaagattctctattaaagaagcctgtggaatctgttaatcggtgcccattatatccttaagttgtggatattaagctgcccttcgctttaccataggtctaatttatttgccgtgcctccatccaactcagttgttttaaaaaagttcatttctcatcctgtgcattaaaataacaatttgcactgttc

SEQ ID NO: 628563 - DNA, 827 bp, Homo sapiens
ggctgacctgaagacttgtaaacccgtcttgaacccaggactgggctcctggtggggagtgtgatatgaggaggaacacccgtaccactcagtcacagcccatacccgctccccagtcccgctcagtacatggtactcagcgcagcgtgagactcctatgatcgacggatgacacagatcgtgacgcgcaggagcacccgctgcgtacacattccagcgcagctgtctctataccatgtcgtcgtccgccgccttcagcgaaggctgtagtaagcacgacactggaagcaggcgttggtcgacacgcctaccagaggctccacatgatccccgagatagcagctgcaggggagcatctaggcgggagaccgagcaaccaaggggccccgacggagaaggtggccggtcaagcgggaggggctgggcggcctgaccgctgccgtgagcaatgacctggagcagggggctctccgagagactcaaggcgacttcgtccggaggtccgaggggccatcgtattacctggtacgcggaggaggggcgcagtccgcccttttctggcggccgccccggccgtctccgttgtctcgagacgcgtgcctgcgaagcccatgaccgtcgttcatgtcgtcacccctacaaggaaggtacggacggattgagggcccgagcgtgcggcgaggcgcgtcaccacaggcgcctagccttccggagcaccctgtcggggaatacccgtggggcattgccactggtggcccgccaaaagagaggaagactgcgaagggggggaaagggcaaccctcacgaagctgcccggggggacttcc

SEQ ID NO: 628564 - DNA, 149 bp, Homo sapiens
tgatctcctctctcgtcttaaactgagtgcttatcagagtggaaagggagcgtgcattgaatgatcctgctctaggaatggtgctctcgtcacataatgcatatatatcaaagtccaggtcaggagggactgctggttcagcgtaaaga

SEQ ID NO: 628565 - DNA, 245 bp, Homo sapiens
ctaaaaaatcttgccttctaccaactgttgggtttccaacagggttggatttttttttccctttttttaaggggttaagaattttcggccacccaattgcctttaaaaaaaactttttgggaccaagctttttcccccaaaaggggccccccccttgaaaatccccccttttaaaaaaaggggttttttttcaccccccgggggttttttcccccgtataaggggcccccctattttttttggcg

SEQ ID NO: 628566 - DNA, 224 bp, Homo sapiens
gttgactctagagtatcccccaaactgaagaatctcaggactgcttagcttccattatcaataatgccaattccttataataaatctctacagacatgacacactagcgcacgagcagaacacacaccctgaccaagttcatgtctctcatacaatgattcctaagtgcgtttgttccagagatttacactcgtgggattgctatttccccacgttctcatgtc

SEQ ID NO: 628567 - DNA, 164 bp, Homo sapiens
tcggcggctctgtggtgcccgggcactcccgctggcgcccccagtgcgccctgcctctccccccctcgctcggccgtgccggtgtcgtggctccgctgtgtcctctccgccgttcgggcggccgccgtgggcggctcccctgccgtccggcgttcggcgcaccg

SEQ ID NO: 628568 - DNA, 249 bp, Homo sapiens
tgtgtatgtctccaccccaatgtaacgcacccaggacctgatgacagaaatccataggaataacgtcgaatacgtaccaatcgctgcaggcgtggtacgagtgggtgtatgaagggtgcccaggatcggaaagatgttcccccgtctttaattagcagttgccccccgaattcggcaagagctcaacagggggggttgcaacgtgtgtcagtgaccggccgcgaattagtagtagtagtaggcggccgc

SEQ ID NO: 628569 - DNA, 886 bp, Homo sapiens
tagatgtggcttgctttgtggcccttgtgatggatctgtcacgctagctagcgatttctgcggcctggagaaagagcggcgagaggtgttcggcgatctttatacgtcgtggaatccccgagctaacggcatgaggtgcgtgccagagagtctcacccgccattggggtgaagctgttcagcctccccagacgacgatctgggatctagcaatatgggaggcagaagaattgggtaatgaagcagagaaaccacaaaatgttcttgagacttatgggtgcagtgcaacatgaaagaacatactggtcgatcttgttaataaggagatcacagaatcaacatctcacttccgaaacctggggacagaagacaagaaccttaattgacacgaactggcagtctcaatatcagcaaagtatggacagtaacatcatcaggcacgcattatcggcgaccattgtggacttggccttcagtgaaggtagcaagagccatgatggcagcaacggtgatgtggctggagcatgatgctggatgacgatcgatgcattcaccttgactcctggaaagtccagactgattcctggcaagcgattcaagagtcagagaaaggaatgaatcttggtgaataactcccaggctgctgacaaccgtgcttactgtggcacgaatgccagaagacaaaacggatggcaaaggcactactaacacggaccatcggcacaaacccggcggcccaaacaccgaagcgtaagctgataaagacaccccgccccacgcatcccgagttacacacccaccggtccacaaacaagcacaaaacacacgggggcaacggcgcgcccgcgcccaccagacaagaggacacaggcaacccacacacaccg

SEQ ID NO: 628570 - DNA, 398 bp, Homo sapiens
gacctcctggtgggcacgggcagggtgtggcgctgcatggccgatcagaagagctcagaaaagtccacaggaaagctacggcacgctgggaaaccgagactcaccaagtactactctcttattggacccggtataacctgagaacacaccggaagcacttcaaaacaacatgaacatcacaatgagatcacactaagatcgtgatcgtgttcactgctactacaataagatacataacatgaagaggcattgtgcctgggtactgaccaagtcataaattctcctctgaactgggactctccccgattcagctcaggaaccagggctcccccgcaagaccaaaaccacagctgaccctgcaaatccctcccgttctgtccccgtccccgggccgtatc

SEQ ID NO: 628571 - DNA, 430 bp, Homo sapiens
ttctacaccatctctggtcccagcttcctcagacctctcagcttctctttcataggatgataaaagatattctttgggcttttatttatgtactcatttactgagacagagtctcgctctgtcatccaggctagagtgcagtggcgcgatctcggctgactgcaacctctgcctcctgggttcaagtgattctcctgcctcagcctcctaagcagctgggattacaagcgtgagccaccgtacctggcctacagcattattttaaatgtacatgtctgatttcattcagtcttaccacattagctattatctccattgaacaaagtaataaatgtaaaatttaagcccaaagagattgttacattgctggtgagttctcagatctgttctgattccaccacacactactgcctgtgcgtaacttccagct

SEQ ID NO: 628572 - DNA, 533 bp, Homo sapiens
  misc_feature (10)..(10): n is a, c, g, or t
  misc_feature (70)..(70): n is a, c, g, or t
  misc_feature (72)..(72): n is a, c, g, or t
  misc_feature (80)..(80): n is a, c, g, or t
  misc_feature (82)..(83): n is a, c, g, or t
  misc_feature (91)..(91): n is a, c, g, or t
  misc_feature (127)..(127): n is a, c, g, or t
  misc_feature (130)..(130): n is a, c, g, or t
  misc_feature (132)..(132): n is a, c, g, or t
  misc_feature (144)..(147): n is a, c, g, or t
  misc_feature (157)..(157): n is a, c, g, or t
  misc_feature (185)..(187): n is a, c, g, or t
  misc_feature (191)..(191): n is a, c, g, or t
  misc_feature (193)..(196): n is a, c, g, or t
  misc_feature (199)..(199): n is a, c, g, or t
  misc_feature (223)..(223): n is a, c, g, or t
  misc_feature (452)..(452): n is a, c, g, or t
  misc_feature (454)..(457): n is a, c, g, or t
  misc_feature (526)..(526): n is a, c, g, or t
tcaggcatcngctcaggcgaccgctagagtgtgcccccacccactgccatggctccgtgcttgtctgcangngtcctgcntnntttccctnctcctggccggcttcgtctcgcagaggcctgggganaananaagtcgaagatnnnntgccattgtngcataattggcatcagttacgcagtatnnncccncnnnnttntatggggaggagtacatccccttnaatcagtatgctggcaaatacgtcctctttgtcaacgtggccagctactgaggcctgacgggccagtacattgaactgaatgcactacaggaagagcttgcaccattcggtctggtcattctgggctttccctgcaaccaatttggaaaacaggaaccaggagagaactcagagatccttcctaccctcaagtatgtccgaccaggtggaggctttgtccctaatttcnannnntttgagaaaggggatgtcaatggagagaaagaacagaaattctacactttcctaaagaactactgtccncccaact

SEQ ID NO: 628573 - DNA, 841 bp, Homo sapiens
  misc_feature (16)..(16): n is a, c, g, or t
  misc_feature (344)..(344): n is a, c, g, or t
  misc_feature (608)..(608): n is a, c, g, or t
gaagagaagccagtantcggcgagcaacgtggagcatcccgctctggtgccgctgcagccggaagagatggttgagctcatgttcccgctgtggctcctccttctgcccttccttctgtatatggctgcgccccaaatcaggaaaatgctgtccagtggggtgtgtacatcagactgttcagcttcctgggaaagtagttgtggtcacaggagctaatacaggtatcgggaaggagacagccaaagagctggctcagagaggagctcgagtatatttagctgtgccggggatgtggaaaaaggggggaattgggtggccaaagagatccaagaacaggacaggnaaccagcaggtgtggtgtgcgggaaactggacctgtctgatactaagtctaatcgagctttggctaaaggggcttcttagctgaggaaaaagcgacctccaggtttggatcaacaatgcaggagtgatgatgtgtccgtactcgaagacagcagatggtttgggatgcacataggagtcaaccacttggttcacttccttcctaaaaccaatctggctgctaagaagaaacgtaaaggaattcagccccatcagggatagtaanatgtgtctttcctcggcaatcacctgggaaggatccacttccataacctgcagggcgagaaattctacaatgcaggcctggcctacttgtcaacagcgaagctagccgaacatcctcttcacccaggaactggccccggagactaaacaggctctgggcgttacgacgtatatctgtacaccctggcacaagtccaatctgaactggttcgggcactcatctttcatgaagat

SEQ ID NO: 628574 - DNA, 1722 bp, Homo sapiens
tgccagccaagagcccaatttacctgaaagcagccaataacgaagaaaggacctgaaattttaaactgagggacatttcttgtctcctggatatgatcagtcccccgcttgggacgcactttcggctaaagcatcccaaattgggaaaagcaaggggccagcaacgaatggttctttgggcggaattacttttccctttttctttccacagtggaaccttaaccgagcctttataaccctggggaaaacccagggacggacacagccaacacgcctggggtcccaggtttccccctgggggccattaacattggaggtttcttttcaccgggtgaccaaaccaggacaaaccttcgtggaacttccttggtggtttccaacaaggaaaaaaccggctcgccttcaccccagagattggactccaaaaaaaataggcccaattctaccaccttccgctcgaacccaatttggtcacgggcatcacgccaaaaggcttccttcgacatggttttggcccccatataactatggtgcaaccccaaggtggaaccaactttttaaattctcccaaaaaccaagggcagctctcctttccgagggccccaaggccacaaaggtcgtgggaccccaagaggacttttaaaagcataggcctgaaagaccccccggataccacttgggtcacggtgtacacaacacagaggccgttcccaggcgggaacgcaaacaaagacgggccatggataccatagggatatggaggccacgacacaacttgggtgcgacaccaagaggataccacaacccccaagggggggtaaggaaaccaaaccaccattcggcgttgggcgggtgtacctatcccgcagagccgtggaaatgatctgggcaagttccaatacaaggatttccccacagagcccacaaggtggccacaggaaagacacccagagaggacaaaccgattcccattcaccaatagatccgcattgggattccctagagaatacacaaggagttaaaacacccccccaggaaacctttggaggacctaagggacccccgggaggggagacccacagttgggttgttgggaaacaccacaaaatacacacacaaagcaccacccaaaagtgggcgagggaaaggcgttcaacagttcccacagcaggggggcaaacacacaggaaccaataaaaggcgaccaacgcagacggtgaaaaggtattccccccataacgtatccatagtaaagcacgtttaaaacaacgggggtaaatcccccctatacccgcttaccattaaccgccatatggacgaagaagcattgtggacagtcactcaagttgggagaggagcgccccttctcaaccctttttcatggggggcatctgaccacagcctatgccctgtcaaacaccaatgtgatcgaatgtggtgacattaatccacacacactccaagaagttgaccatcacggacaggtgggccccaaccacttatttattgatcccctatcggggcggccgctacacaacagcgggttccatccacaaacacgaacaacactataataccacaacacagcttgtgtaatctgcacaaagcaggggattatcaggatcacgcgcaggaaattatcgacccgaactcgatagatcgatgaggagaagccacacacaaccacaacaattcattcttgtcagcggacatatattgaac

SEQ ID NO: 628575 - DNA, 236 bp, Homo sapiens
agtgaattcgactcgggtactggaggatctctagagtcgacaggctccatctaaacgagatttggagggcagcacggtgctcacgtgtcgacggaacttgtacatgggaggcatgcaccgcagtgtgtgaatacacgtcgaccaggatgcatgtatgcgtgattgggtgagtgagcagggatctctatatattgaaggagcaggtataggggaggtgtgcatggcacgtggtgaat

SEQ ID NO: 628576 - DNA, 295 bp, Homo sapiens
acagactgcgccgggactgtgagtcactcacagctcacgaagatcaaaaggaaaagcatttttgcctcagggtttcccctctttattttcctgtggtttgttttttctttcccttttttgttcctccaaacaaaaacaaaatgcaggccgagcgcggtggctcacgcctgtaatcccagcactttgggaggccgaggcgtgcggatcatgaggtcaggagatcgagaccatcctggctaaacacggtgaacacccgtctctactaaaaatacaaaaaattagctgggtgtggtgg

SEQ ID NO: 628577 - DNA, 454 bp, Homo sapiens
caccatctgaacaatatagctttgctgggaaaaaatagacttggagagggagaattgtacattgaaacgagaagaacttacactcttaacaatttttcaacactctcttccttttaagggaatacttctcaattaagggaccatacattaaattatatccaaacttgagtagttttaatttcttttctgtctgaaatccctgttagaacaatctctaaaactactccatagacacagaacttgagtagatttattggagcgccatctgctggctttgtttttaatggaccaaataggtggtgcctgggacatctttaagaattatcctgtatcttagtgttgcaaaattatgaagctggaagacagtatgaatttgggctatgactggtagtagtatttaaaataatagttttgtgttggcttccagaatggtaatcgaattcctgcagcccgg

SEQ ID NO: 628578 - DNA, 200 bp, Homo sapiens
agaaaacttttgttcaagatctaggttaatagaactgtaaaatgtacctgagactaaaagaagacttgaacagacagccaggcatgcttggttactggtgaggaagagccaacattgtaaagatgtcttttttttccaaatcaatctatcagtttagcgccccttttttaaacataccaccaggtttatttgttatacaa

SEQ ID NO: 628579 - DNA, 648 bp, Homo sapiens
  misc_feature (27)..(27): n is a, c, g, or t
  misc_feature (40)..(40): n is a, c, g, or t
  misc_feature (42)..(42): n is a, c, g, or t
  misc_feature (49)..(49): n is a, c, g, or t
  misc_feature (57)..(57): n is a, c, g, or t
  misc_feature (59)..(59): n is a, c, g, or t
  misc_feature (62)..(62): n is a, c, g, or t
  misc_feature (70)..(70): n is a, c, g, or t
  misc_feature (87)..(87): n is a, c, g, or t
  misc_feature (89)..(89): n is a, c, g, or t
  misc_feature (94)..(94): n is a, c, g, or t
  misc_feature (99)..(99): n is a, c, g, or t
  misc_feature (107)..(107): n is a, c, g, or t
  misc_feature (114)..(114): n is a, c, g, or t
  misc_feature (125)..(125): n is a, c, g, or t
  misc_feature (127)..(127): n is a, c, g, or t
  misc_feature (341)..(341): n is a, c, g, or t
  misc_feature (365)..(365): n is a, c, g, or t
  misc_feature (375)..(375): n is a, c, g, or t
  misc_feature (382)..(382): n is a, c, g, or t
  misc_feature (394)..(394): n is a, c, g, or t
  misc_feature (398)..(398): n is a, c, g, or t
  misc_feature (427)..(427): n is a, c, g, or t
gcacagtaaggcccatctggttggccntttttaagacacnancctgggngctatccntnccnaacgtgtnaccattatcccaaaaananccagntagcnccccgcanacgtggngaacgtgcttnanaatcccctatgatggggaacctttccttctccaaaaaaaaaaaaaaatttttcttcttcccggtattgggaggtctgaacggtaaaaattttttttccctgggggcaaaagggacccaaggatatgattgcgagtggaaaaatagggggccaaaatccgggattggccgtttttcccttttcctttgggggggaatttttaaaataaatgcggngacgtaaagccttaatgccagttnaaatgtttcngtgaacnagtttcaccggntccnctttataataattataaataaacccgttnaatttttttgggcaaagccagcctttgggtttttttaaaacaagtaaatttttttttgatggccactaaaaggggtttggagcctttttttcaaccagtagattcccccccttccctaaacttttttaactgagttgtcccacaagcaaggacatgtttttaatgttgtttgttttttgggctgttcccgtaagtttgctattaaaaaccctttaccttta

SEQ ID NO: 628580 - DNA, 336 bp, Homo sapiens
gagacaaggtctgcatcagaatatggtctcccgcagtgaagtggacatgttgaaacttagtgtctagaattcaagagaacgtacagctcgtccctgtactattatatccagcaagacactaagggcgactaccagaaagcgctgctatacctatagtggtggagatagactgaagcccgacacggcctgagcgtccagaaatggtgctcaccatgcttccagctacacaggtctagaaaaccagcttgcgaataacagtccccgtggccttccctgtgagggtagacgtaagcattacccccaacctcattttagttgcctaagcattgcccgcca

SEQ ID NO: 628581 - DNA, 879 bp, Homo sapiens
ctctgcctcatccccttcccaccaaacccagactctgtgaagtgcagttcttctccacctaggaccgcagcagagcgggggatctccctgccccaacccagttcccaaccattcccttccaacaacaagcagctccaagttgactctggtctgtgggaggtgaggctttcccaaccacggaaagaactactttacactgcaccaaacgaaatggcacataagtcaacaatcaggcagtcacacacttcatctgtctgccaagccccgtctttcctagcctttttctactaacctctctgctggggtcaagggttgtgtggccccgatttacagacaccaggggcttaagcttttagggcaaaccaacccacgtggaaaaactgctgcacgccgcaattatcttctcaatcaccaactccgtgcatggtcagccattctcttcccaatcgtgtgtgggggccttcagaccctcatgttcccagccagtgtcttcccccgaaattattcctgcatcctgggctttcaaacacttaccagacggacttcagtgccaccaggccgtcgtggtctattcatctccaggtgtgcgccgggcattccttcagtcgtggatttccacgggccggtaccaggtcaggggcccctcccccatttacacggacgccgggaggcgttcaattcctactgaaaggcagccatcttcaccctaatggacaatgggctccctcaatgtggtaaatctttgtcgtattccaagttctacaccaccgcgtggttcaagaaactaatcaatctcaaagctttagccctttatgcctctgggcgacaggggagggcccttacctacggatccaacttttacacagacctgagtggagc

SEQ ID NO: 628582 - DNA, 107 bp, Homo sapiens
  misc_feature (1)..(1): n is a, c, g, or t
  misc_feature (73)..(73): n is a, c, g, or t
  misc_feature (104)..(104): n is a, c, g, or t
nttcggcacaggtggaacatgggtgtatcctgcaggtgctcacagtatctccctttgctcaggctctagctantatttctggctcataaggccaaagggagccngaa

SEQ ID NO: 628583 - DNA, 1191 bp, Homo sapiens
agcggtgatcgggggtcaccaggggacgctgagattagcataggctggaactcacgttgaccatgctgtcccgggtggtactctccgtcgtcgatatagcggccccctctctgcaagaatgccgggctcgttcctaggtcgcagggtgatattcgcacggctaaccaaaggtaccttgttgcatactagggtcgatggctacacacgtgtggtctcactgatacgcgatcttcttgcctggaatacaggacgagaagaaggcttgcgttcatgagaacgtgatctccgtggatgagtaattttcatttctcaggctcgtgcctattgattgcgcataaaaagagggtggggatagttgagctaggggacacctgatgatacctcggggaaaccgtgggcggcgttaatcctaggtacggcggttttgagtcccagagaggaacattgaggtactcgtggactttgaaatcgccaaaaaggacctcattttccagcatggcctcctatgtccaagtaggctaatggcttgtaaaacttgagatccgtaatggaggacaatttcatacacaaacagttattgtgtactctcatttttaggtttggccagggaaccttttgaggcgagaggtaagatacccttgcaaacttcgaggcagaacaaaagctattggactcgcgaaatttagagaaactagggccgaatagcgaggcttatcccaatacccagaggcgatcaatttcctaagcaaaatcgtccaaactctcgaattcatcgggggaggcaaaagctaccaaaccaaaacttaagagacgaagcataagtgcttttgccaccgcacaagtccgacccgcgatatatacgcttatatattgggagtttgcttagccacacactggcgaacaatttaaattccaattcgtcgctgaagtaggagggcggattccgcggaccatggttctcaactttaattaaacccctgagcgggaaaagctcgaaccgtggttaaattatcgcaaggtaaatttatttgcccaacgtggcccgttgtcgaccactgcaacacttcgggtcccttggggaacattaaggtctaatgacttattccctttggtcggccctaacaccaccttcggatgtggcaagtcttggaccccggggagaagaacagtgaaaacgcacgagtttgcatg

SEQ ID NO: 628584 - DNA, 110 bp, Homo sapiens
  misc_feature (10)..(10): n is a, c, g, or t
gcctggagtncaagtggcaccatcgctgttcactgcagcctggattccctgggttcaggcaaattctccaacctaagcttccggcttgaagaccaccatgtttggctaat

SEQ ID NO: 628585 - DNA, 354 bp, Homo sapiens
gattggtcaggtagacggctactgtcataatgttatataaccttcatctcctcagctttccccagccaaatctgttgtacattctgcacagtttgtactgcacaaaggacgacaaagaaaagagaaaattgaagtttgagtataggagccaggagttcagtcgtggttccacgaatgattgggagttgtgcctgccagaatataccctgtagaaatagtacatgatgtgtgtataaaatgtagtaccttctagcaaaggcttaacatgtagattgacttgcttaatatttgttataaaggcaaagctagattaagtatcctgaaatgtaactctttcctttgtgtacagtcgac

SEQ ID NO: 628586 - DNA, 429 bp, Homo sapiens
  misc_feature (24)..(24): n is a, c, g, or t
  misc_feature (68)..(68): n is a, c, g, or t
  misc_feature (70)..(70): n is a, c, g, or t
  misc_feature (72)..(72): n is a, c, g, or t
  misc_feature (93)..(93): n is a, c, g, or t
  misc_feature (98)..(98): n is a, c, g, or t
  misc_feature (108)..(108): n is a, c, g, or t
  misc_feature (119)..(119): n is a, c, g, or t
  misc_feature (143)..(143): n is a, c, g, or t
  misc_feature (165)..(165): n is a, c, g, or t
  misc_feature (177)..(177): n is a, c, g, or t
  misc_feature (180)..(180): n is a, c, g, or t
  misc_feature (232)..(232): n is a, c, g, or t
  misc_feature (237)..(237): n is a, c, g, or t
  misc_feature (281)..(281): n is a, c, g, or t
  misc_feature (332)..(332): n is a, c, g, or t
  misc_feature (422)..(422): n is a, c, g, or t
aagttttttgggggtgggtttggnctgttttcgacactaacaccagtttcactgatctgattttttcnanantttgtttttttcttttagttngggtngatgcgacanccatgcgggcnggggtgctggctgtttggtgggcnggggcgtggcgtcggggcgggnggtctttgggtnccngacttttcgggtgtgatccttttcgaactgcatccgttcctcgcattggggntgtgntaccctggccctttcctctttgtgtgtgggtttgtgttcttgcngtttcttgctgggcgtctgggtttcgggttgcttcttcctgctgcttcagngtgttgtggctttcttcatcatctgtgctgcgtccagcttcatcttcactcttaatacccatcaatttcctaaatttgacattttggtcnttgtttc

SEQ ID NO: 628587 - DNA, 1170 bp, Homo sapiens
ggttgctcggaggcacgtgtcagtcccggaagctggcgaggggaaactgctccgtagcgcgcctggggaggaggaaccgccctggtcctttagggtccgggcccggcctgggccatggattcaatgcctgagcccgtgtccgctgtcttctgcttcttcccttgctgctgctgctgctgctgctgctgccggcccggagctgggcccgagccaggcccggcagctagaggagaaccgaatgggttcgcctgcaccaagcaaatgcgaagtgtgtaaatatgtacgctgtggagctgacagtcagcctttgagtgaaaccggcaaggaccaatgaggtgatatggacacgggcctatggccatcctggaacccagaaggcctctggcagtcaaatacaaccaagtcggaccttgcgcgtctaatcgacagtcgactgagaccatttgcacagacgatccttggcattatagcctgacacacatgcagaggaccggacagcaaagtcgacttagcacaatgcgcatgttcacagacacttttgcgcacatttacagcaacctggtaccaccccaggcggtcaagggtcgggtgcatggcacatccccctatgaagctggtgcgcaccgacgcgtcctagcagagcgctggctggacccttcgaagcgaaggccaggcggtgagttgtgacatgcagcgggcaaagaggttcaggcccggacagctagcaccacaaggcaacgggatacacacgggccgcccacccgcgccgcgacgcacggtgaccgcgcaatccacgccggcgccacagcacgcgacgcgtgaagtgaaagccggaccgccacgacgcagggcacggaccagatcgcccacggcggacgaggaaccagcacggggagcccggcgacaggcacgaaaaccccgccagagcaaggagcgcggccgcacgcagacccgggcgacgcacaacggccaaacacggcaaggaagatcggagcgcaaagaacagggccaggagcgagcgggcaagagggaaacacaaacagcaccggaaagagaggcacacgaaaagaggacgacacgcgagcgcgagggcccggaagaccgacagatcgaccgacacccggaacgcaggaggagggagcagggacaagacacaaccgaagaccacac

SEQ ID NO: 628588 - DNA, 157 bp, Homo sapiens
gagctgaggtggagaggcgtcactgtggggagactggggcggctgcctacctgcctcctgtgtggcggcctgggtagctgagtctccgcggtggtctggtggacctgctcgtgggacgagattgaccttgcgatactggacctcttccacaatggta

SEQ ID NO: 628589 - DNA, 482 bp, Homo sapiens
  misc_feature (240)..(240): n is a, c, g, or t
ttgtgcgctacgatgggtacaccagcagaaaagtcgtggaggtggaggttcagggaatccagttagacgtcgggcatggtccaggcctccctggggatcataggcacggatgtggtactgggtgccgctggcttagtttctcaagggcctcctcgatgtacttcagaccattctcctcccgcatggccttggtgctgaagtgggtatggcagccggcaccattccagttcccaggaaggngcttaggatcaagggtggctatcactccaaagtcttcacacacacgatgcaaagatgaaacggggcacccaggatgatctcccaagcggattccttcaaaaggtccaatctgaaattcccagtgggcaggcatgacctcgggattagtccccggaatcttggaccagtccaagatcgtgggtacagccgtggccctttcactccatggaatgctacagagccagaaagatgaattcccggga

SEQ ID NO: 628590 - DNA, 107 bp, Homo sapiens
ctggagcgagatataggaggtgagccgaccaggctcacaccaggaatgacgaggtctgtttgaattctccttcacttcgggcactaatgctggctgtaaatcacctt

SEQ ID NO: 628591 - DNA, 150 bp, Homo sapiens
ccatcctttgggctttggcccttttttcccagggggcccacccctattgggggcctccgggttattttttccctcccccccccccccccccctggggtttaattatggtaatgttgggggggaatgaataaaaaaaggggatttttgcca

SEQ ID NO: 628592 - DNA, 827 bp, Homo sapiens
gggagagcgatagcgggtctgtggctgacagacaagctgggggccacgagactagctgtgggcgccgaccaggcatcacgtccctgctcacggtcgcggctcatctgacaaaatccgtctctgcttccatggaccttacctccgtgcgcgcaagctgaagactacaagtggctactcgaagacgctgtaactcccgctccgatcgtggtggagcgatatgtaagggcgccctacatggagatcatcacatgctcgacgatgctcgactcgcgcaccccgtgggtagtcgtcatggtacgccagacaatcttgaagtccatttctcgggacaactaggctcgcgttaacctggagctggaggagttataatccgcgacgttcaggatattttagggagaacttagcgggaaaaggtgggtgagtgtgaagcgtctgccatgctgtcactggagtgccagtacttgaacaagaagaagcgccctgacgaccctcgcgggacccctcactcccccggtgaagcattgttcagttaaagcggaaacccaagagcgccacgctgcgggcggagctgctgcagaagtccacggagaccgcccagcagttgaagcggagcgccggggtgcccttccacgccaagggccgggggctgctgcggaagatggacacagcacccatcaaaggcatccgaagcaggcgccttcagaagacccacgggcccaggttttaagcccacgggaacgggaacccatcccgcttcaggaggctgtgggaagaacaagtgtgaagtggtggaaatttctgaagcggatattgttggggcgccaaga

SEQ ID NO: 628593 - DNA, 174 bp, Homo sapiens
  misc_feature (68)..(68): n is a, c, g, or t
accgaggtgtggaggcaggactgtctcctagctgaaaagccggctctcgattcttaccatctttgtcncagtaaagggcacgtctggaatgatgatttcgtagctgcaaatctggctgaactgaggggagcagtcggcatccacggcctccacacctctaccgccacaacctct

SEQ ID NO: 628594 - DNA, 110 bp, Homo sapiens
tcagtataagcaaggatcaggggactcccagcagacttcgtgagcctgtatctagaaggatcccatctctccagtacttaaccctggaaatactagctagctgtaggctc

SEQ ID NO: 628595 - DNA, 803 bp, Homo sapiens
tagaaagtgtattttattagtatttttccggtgaacagaagatttgttggatttaaacatttactaagacagtacctattaggaaaaccaaatattgcaaatggtcaattcgattttaatttctcaaaagatactctgttatccagaagattaaaatgcctacattgagtgcttaaaaaaaaaaaaacaattggtgatgatgtgagcagaattggcaagtaagttaagcattttggatcctggtaatcatgggtatcattacaatgaagggatttcacaaattactggccagaggaagtggtttttttaaatttaagaggggaaatataacctataaattgggtttcttccaagcttagctcttaaattgggagactcaaagttaaacatcctcaacagagtttatttataatttgcgaatggtcaattgtgtattcggctactgatctgtgatcaaccattttaactttcatctctaggggatgtttaccatttatatatttgcaaaataaacaattataaaaaaagaacataagagagaatggtacttaattacttgtgtggtttgcaaataaggtcatttccatgtggagtagattataaccttattaatatgataggctaagaaggtggcatgactggcctgtaaatttaagtgggccgtgtggcattcgtaaagagatcctaggattgtctttttggaatcgaacctcaaaaaattgagtgtgcaagcatccagggggcggagaatccactctgagggggtccagctccctttactgtccgctgacggttggcagaat

SEQ ID NO: 628596 - DNA, 244 bp, Homo sapiens
cttacaggtgtttgactgactcggatagtgggaagtctacaccctccaacaatggaaagaaagggctcaagcacggacatcagtgaggacctgggagaaagactttgacctggacatgactgaagaggaagtgcagatggcactttccaaagtggatgcctccggggagctggaagatgttgagtgggaggactgggagtgagggagccagagggagcagctcccccacccatggcatctctcg

SEQ ID NO: 628597 - DNA, 439 bp, Homo sapiens
  misc_feature (54)..(54): n is a, c, g, or t
acaaggcatcagccagcagtgtcagcttctagttcaaccattatatctaatggngagcacagaaccattgggtgttactgaaacagatatatgcaacgctgccgaaagacgaaggaacttgtagggatttcatattaaaatggtactatgatccaaacaccaaaagctgtgcaagattctggtatggaggttgtggtggaaacgaaaacaaatttggatcacagaaagaatgtgaaaaggtttgcgctcctgtgctcgccaaacccggagtcatcagtgtgatgggaacctaagcgtgggtggccaacatcatatacctcttgaagaagaaggagtcagtcatcgccaacttgtctctgtagaagctccgggtgtagattccccgcactgtatcattttatgctttgatttacactcgaactcgcgagggacatcctgc

SEQ ID NO: 628598 - DNA, 308 bp, Homo sapiens
  misc_feature (71)..(71): n is a, c, g, or t
  misc_feature (74)..(74): n is a, c, g, or t
  misc_feature (104)..(104): n is a, c, g, or t
aggttatgggagaagatatcccacaaaaataaaagatgaagttcacccagaggtgaagtgtgttggctccntancccttggtgcgggggggactgtatcctcanaaaaatttgaagacaagtgggtcagaaagatcaaagaccatttctgtgcatttgaaaatcagttccatacagagatacaattcttgggttagtgggttataaaaaacaaaaccacaaatatcttgtactgtgttgggtggccttggttacttcagacaggatccattgctaatcatggagtataaatgattatttatggtttat

SEQ ID NO: 628599 - DNA, 1241 bp, Homo sapiens
  misc_feature (720)..(720): n is a, c, g, or t
  misc_feature (977)..(977): n is a, c, g, or t
  misc_feature (1241)..(1241): n is a, c, g, or t
gtatcccagtgatctgcaaaaaaaaaaaaaaaggacctccttgggtccaatggggattctctggtgggtaaaaaattaattttaaaggggaaatccacaattgggtttggtccattcctaaaggggctagtcttatagaataaatcccataaaatgggttttaatggtccagtatggttatggtcattttctaaagtggcaggcaaatttcaatgggattaggcaggtctcaattgggactcattaggcaggggtttgggtatttttatcataaactgcttaagcttccaatattggggataaaaggtctggtgggcggaaatataggttgccggtattgggcaaattgagatttctctggggtataataagcgctttggggtgaaaaagagaatgtggctataggtaaagagacgctaaggtcttttgtaaagaaggtaatgtgcgcaaacacatttatattcggtaaaattacaagaccctattggggtggtacaatattccattattaaagggggcttttcccattgggatctcttggggagagagacatttattgcctttaaaatgagggtaggtattaccattgagacatctcttggggagtgttatgagagagaggcgctatgtataagaaacaccagaaattttctacagagtaagctctgtaaaaaaaaaacgctctgggtgtattggggttgtaaacacagaggggggaanattctgacaccctaatgggggctgtttctgtaggaagaacaacacacaggggtgtgtgttacccattttctctaactgaaaagagtttcaacaaacgactattgagaagtgtgtggtccacaacgactgtctttagagaacagcggcggtacatacaaatttgggggaacgaggtgagggtgtctcaccgaggagtatacaaggggggtttactcctttaggaaaaattccatataagagggggggggcgcacaaanaagaagaaaaaggcaacaattttatagacagatataaattgtggtagaaagaacaaaagctttttacaagcaattatatgctagttattatcaagaggggatattataagaggaccgagtattctgtcggaagaaaacatattacggttctaggcggggacaattcagggggagtatagacgagtttctggggaaatacggaagacaggaggtcatcttattacaaacccaaaggggtcgggggggaaaagatatattgacgan

SEQ ID NO: 628600 - DNA, 152 bp, Homo sapiens
  misc_feature (135)..(135): n is a, c, g, or t
tcccttggtatacaaagataaacaaggaccatcctactcaagtggacatagcctagaaagcaaagatacctatcctcgcccaccaaaacaggcaagacaatcacatatggatgatgttgctttcaaccaacttcntgtgaactagctttaag

SEQ ID NO: 628601 - DNA, 1001 bp, Homo sapiens
ggcctgttgggtggttggggcggtcagagtgctgagtgccagagaggtagcagcggaactgacagggaggccagtgggcagagctgaccctggagagggatcctgatgtcctagacacatggttttcttctgccctgttccccttttctgccctgggctgtgacccaaagatgaccccagaccttgctcgtttctaccccctgtcactttttggaaactgggcagatgacacattcatgctgttctgtggtgggcctgcatggtcatgttggggacccagctcacatgggcatgcatgcccttcagcaatgggtgcttcttcatccccagtggtttctgaggacagagcagggcacggaaagatgagcaaagtccctggggaaatgtgcttggaccaagaagacatcatcaagtgggggtggagatgcaggtgctgcaaggaaaaagctgagaagcggaacatttggaccctgcaagaaccttggccattgtggctgcaagacacaagacaataatggatctttcctcagccgggatcccatgagatgtgggacagaataccctgatgattcaactcctgctcccattgggaagttacaggcgtggctgaattggaaacctgtacagatctctgagagtacaagagcttgcgaattttctgaacaagatctgaaatgctcttacgatttaatcctcaagtgcttaagagggagacactttgatgcacagacatggtgaatgagtggatccccatcatcccagatagaatgcttggattcctaagacggctttgcctggtagccaaggaatagacacaggggatcataaacggagaggtattcgatcagtaatcatgcatggacaattttggtcaaaaccttgaggtcaacctgaggttgaagctggtgtggcttcgccgccttggggcctaaggtagagatgaatgaaggagcagataggacagatcttattaaatatagatagaaaaagacaaaaaagga

SEQ ID NO: 628602 - DNA, 392 bp, Homo sapiens
gggtccccctggctgccggtctcctggcttctccggtctttcacaaggctcgcgtctagctgtcttcgcagctgctgtatcacctgaaggctctcctgtgattaacctgctgccagctcattactgtgattgtttgtattatttatttctttatggtttgctgtattacggactttcagtttcttactggctgcttggccagagactgctctcagttccttccctcacggacctctcgaaaaggctagcttacaaaatggcagctggcttgcaaccaagtcatgcaagagagggcatgcaagatggaagctatttataacctaatctcagaagtgatgcctcatcactttgccatattctactcattagaagcaagtcagtaagtccagacc

SEQ ID NO: 628603 - DNA, 373 bp, Homo sapiens
accctccgtattacgcaaggcgaattccacactccacccgggaaagaaacgcgggtaattgaggcctgttccgcattgaaaagtttgcggatcaggcaagggcaaaaacgtaaatgaaataatacctaccgcataaagcaacacgatgggcataataatcatgcgtcgggcaggaatttttccatagcgtttgcggtatatcagggcggcaagaggtagagcaatcacggcaataatcagccatatagtgattgcttgaatcagaatgggagtcccccagctgaccatgaaatgcattgttcccctagtgggcgcgtaagtatgagcgacgaccgtccgagcgtccccagtttaccccacagatgaaggagag

SEQ ID NO: 628604 - DNA, 163 bp, Homo sapiens
tcatgcctttcaatgtgcatgcagctcactgattgcatcctctagtttccgcacggtggccaccataagtatgtgcgacgagcctcgtcgaaggccgacttccgttctcatgtcctgtccgggctaccggactctccttcgtcatcctagtcgttgctatttc

SEQ ID NO: 628605 - DNA, 870 bp, Homo sapiens
agctaacaggtataggacacggggactgttattcgcaagctgcgttttccctgctgtagtggatgactggtatagtcattactccccacacccatacactttctatattcagttctgaactcagttgcttggctcgtatccttgctcttgatcatcatcttctctgctatggtgcatccgaaaagtagaatcgattacgctaaccgaaggttagcgtataggtagacatgtactgatcgtaattgtagtagatagaaatctatgtgtttgccctgcgtgtgctgttgacgttgctagttcatcacgactggaattcacatctgacgttgtcgttacgtcttacatttataacaacacccaacaagatgaatagtatgcgtgcatcatggtactgctgctatgtctcctaatggatcctggcgtgtgactgaatggccgttggacactgggtaacattgtagcggattgcgactgccatttgcctaagacctaggtcattgctttaggcagctcgacaaccacgtcgtgtgtttgtgtcatgaaacgggtaggaccgagtaggacatcaatgcgctacggtggtttcggtcgcaccctccactgtttcattgtgagggctgagggatctgaaaattttaggcatcaatgaggaacttcactatgggcgcatagtagtcagaggtaggcactctgtagaatttgacactttcgaccgtttatcgagcgacaacttaaggtgtgagcttagttacaatcacagcagtataagctattagacgggccttaactttagtggtgggccctagcacttgtgaaggaacccacgtaagaaatatgtagtggaggacctaatttagacagtaaaaaccc

SEQ ID NO: 628606 - DNA, 273 bp, Homo sapiens
  misc_feature (3)..(3): n is a, c, g, or t
  misc_feature (10)..(10): n is a, c, g, or t
  misc_feature (14)..(14): n is a, c, g, or t
  misc_feature (36)..(36): n is a, c, g, or t
  misc_feature (40)..(40): n is a, c, g, or t
  misc_feature (69)..(70): n is a, c, g, or t
  misc_feature (104)..(104): n is a, c, g, or t
  misc_feature (124)..(124): n is a, c, g, or t
  misc_feature (151)..(151): n is a, c, g, or t
  misc_feature (155)..(155): n is a, c, g, or t
  misc_feature (157)..(157): n is a, c, g, or t
  misc_feature (165)..(165): n is a, c, g, or t
  misc_feature (172)..(172): n is a, c, g, or t
  misc_feature (175)..(175): n is a, c, g, or t
  misc_feature (203)..(203): n is a, c, g, or t
  misc_feature (206)..(206): n is a, c, g, or t
  misc_feature (214)..(214): n is a, c, g, or t
  misc_feature (227)..(227): n is a, c, g, or t
  misc_feature (242)..(242): n is a, c, g, or t
  misc_feature (254)..(254): n is a, c, g, or t
  misc_feature (261)..(261): n is a, c, g, or t
  misc_feature (265)..(265): n is a, c, g, or t
ccnttggaanatantgttacatttccttgtacaganaagnttggtggctttgttaatgtagctagtaanntttatgactactaagtgaccagttttcggtgccntttattgtgggatgcatgantatgtatttattgtacggaagccctgncctntntatttttntactttnctnaaagtaatggttgatcctgatttacatnatnattaaagncatctttcccaangggcacttcctttanatcatccttccnaaataanaagnattcattt

SEQ ID NO: 628607 - DNA, 1162 bp, Homo sapiens
gctccttcggggaagcgcgtacctggggcggcccgggaggggttggcccgtgcactgtcgctgactgatctggcagtgatcgacaggcgcgaaaactcagctttggcactccgttcgcgtccatctggtcgtgcctgtgcatgacgctcgaatagcatctgtcaggaggtggaagttggggagcttagaggacctcgatggctcccaggggggaccgcgaggaggagcttgaggaagtacagacggtaaggacgtagaggcgcttcgggataggaagagctgaccgtcgtccaagtcaccttctctggcccatagagcctggcctctactctgggccgcatttccttgtctaacggtcgcccagttcggaactgggctgcattctccctggatgctcgaacgtccagataccagggaagatgctccgagccctgcgtctactatggcccaacccccagatgaacggtccaagggcccaactattgacgctcagggagaccggagtagcccggatcgagtgaccagggcccgggaggagggggtccaggagaaggctggaccaacggctgtgctgggtcctggaacaccgaggcctgcgttggaggggggtccaggctggcgtggcagaggccatagtgacgtggcgggggcaactgagtaaactgctgaagagaccgtgatgagctggcatggacgggctggcatagtgggaggctcccgggtccacgggaagactaatagctgagtgaagtgtggacaccgaaaggtcggggccagaggcttggtcggcgacggtctcgggagctcatgtcacggggataccacagtgtgaggccacgtccaggtgtttgtcgggcaaaccatgggtaggttccccacgagagacccgcgtgggcgggggggggacaacaacccaagcgagtgggcgtacatcggccgtggtgtatattcgcaccagcctgggggaggcagcacccccggtggtagtcccaaagggaggagaagggtgcggtagaacaccaagtgcgcagaccacaagagtgcccacaacggagtatagtggggtgctaacaccccaccgcgaaagaaaacgccacggccagcgaagggaagcaaggtaactaaacaacgcaaagggggagaaggacaccacggcccacag

SEQ ID NO: 628608 - DNA, 739 bp, Homo sapiens
agaatcacttcagcccaggagtttgagaccagcctgggcaacacggtgagaccctcatctctacaaaataaaaataattagtcaggtgtggtggtgtgtgtctgcagtcctagctacttgggaggctaaagaaggagggattcttgagtcatggcgagaggatcatttgagcctaagagttcaaggttacagtgagctatgactgcaccactgactccagcctgggcaacagagtgagacctccatctctaaaaataataaaataatccagttaaaaacactgatttctgggccggatgcagtgactcacgcctgtaatcccagcaccttgggaggatgaagcaggcagatcacctgggtcaggagttcgagaccagcctgccaacatggtgaaaccctgtctctactaaaaatacaaaaattagctgggcatggtggcaggcacctgaaatcccagctactcgggaggctgaaggcaggagaatgtgttgaacctgggaggcggaggttgcagtgagctgagatcagacactgactccagccgtggacgacagagcgaggtctgtgtcaaaaaaaagaaaaaaaataaaaagatagcaaatctaatctctataattattttagaagttatcagggtggcgggtgcggtggtcatgccggttatccaggattggggaaggcgagggggtggatccctgggggcggagtcgagaacaagctggcgagtggtgaaacccat

SEQ ID NO: 628609 - DNA, 629 bp, Homo sapiens
  misc_feature (266)..(266): n is a, c, g, or t
  misc_feature (433)..(433): n is a, c, g, or t
caccaggatacttccatcagtgagtttccaaggcaaatgaatcatctttagaattggaagctcaatgtaagcaacaatgaagtaaagaaaacaactgaatttctcttgaaattattttcctttactgacttgtctttattgtctgtgttcacaagaaactagctctgactgcaaaaatgtctgcctgtttctatggccagttcttttctacatgtttaaattcctaattgtgcacacaatcttagtcacaatattttcatgtgcangcaattaaagactcatttaacagcccttcctcttgaagggttttgtcttcatcttgcacaaatcagattcttaggaagatatttgattttgaaccaatgtaaagtacttgtcaattttgtcaaatttcatttatggaccaatttttaaaagggatgtaatggacagncacaaaaagcttaacaacttgttcaaaaccaaacctttcaaattacccatatggaatggggccaaaaaaaatttaaaacttaatttgctgggaccaattgccaaataaaaaccgattggctgggttaaccatccttaaacaccaattttggttaataacaacctttttccttacacggcgaatttaaaaatttggg

SEQ ID NO: 628610 - DNA, 677 bp, Homo sapiens
caaaatcacttcgacagaagccaggagacagtaccatgacgtacctgaacaaaggccagttctatcccatcagcttgaaggaggtgagcagcagtgaacggaatccatcatcccatcagcaaagcttcgacgatgtgagtcactggttgggttattaagcatgaagacaaaagcagagaagatcagctctaaggcagttggaagtactggcactcccggcgagcacaccgcataaacaaagatgcattgacatagctgagctataaagaaaagcttcaacaactaatcaggtaacatcgagggagagtttgcgctataacgccatttgccttcacatgggacatcaagcgatgaagcaaaggttttcatctctgtgaactgcttgaagcacagatgtctcttcccagaagggagtgaaggggttagcctcttaacattcaagttgatacctatagttacaacaaccgagcaacaagcctgtgcaccgggcctactgccagatcaaggtcttctgtgacaagggagctgagcggaaaatcagggatgaagaacgaaagcaaagcaaagaacaagtgtctgctgttaaagtgccactggttccctctcacaagcgaatgggtatcacagttgtcaacccttcattgatctcgatactcaggctgtgctcttcattcctg

SEQ ID NO: 628611 - DNA, 346 bp, Homo sapiens
tgtcggcgcgtgatctgctcatcatttacacaagcagccaagtatatataaactaggcatggcatcccttatgagcgggcgcagtgatataggtttcggtctagattaaaatggcgtagcccacttcttagcaaaggacaactaaaacccttattcccatactaagtattatcgaaaacatcaggctaactcattcaaacaataggcctgggcgtaagcctaaacggtaacattactggcgggcacctactcatgccctaaattggaagcgcaccctagcaatatcaaccattaaccttccctctacacttatcatcttcacaattctaattctactgactatcct

SEQ ID NO: 628612 - DNA, 399 bp, Homo sapiens
ccgacgagttgtccgagttatcgaaacagtaacaacaacaacgtattaaaaaacaacagaagagaactcaaataactctttcgacatgtagtgaggcagagtctaccaagtaccctgaagcagttgggtgccgcgaatcctggtggtgcttcagccaatgatggcagcaaggctggccaccgtggaaggcaagtgactgagggcttcctaactcaagtctctgtcccacaagactactcagttgaccttcagagcagcggagtcacggctagagagaatcctccagaccatctcaggctcgcactacctggcagtctttcaaatgcccttagagcacggtcatcagaacaatctctttgcttttcgttccctaactcggacaactcgtcgggtaccgag

SEQ ID NO: 628613 - DNA, 454 bp, Homo sapiens
ctccgacctcagcctcccgagtagctgggactacccgtgcatgacaccctatctggcccttgttttttgttgttgttgttgttctttcttttttcacgtggtttcgcacttgtcacccaggctggagtgcggtggtgtgttgtcggctcactgcaacctgtctctcgggttggagtgattctcgtgtctcagtcttccgggtggctgggattgcgggcgtgtgccaccacgcctggctgatttttgtatttttagtagggacggggcttcgctatgttggtcaggctggtctcgatttcctgacctcgggtgatctgcccacctcggcctcccaaggtgctgatattgcaggcgtgagccaccacgcccggcccgcatccggctttgatttgtttttcacttgcccgtgggaggatgtacttatctcagatgctagagccgggagccctcccct

SEQ ID NO: 628614 - DNA, 1607 bp, Homo sapiens
cgcactgagctggttaagggccagcgcatgcgatggtcattctgcccgactcagtgcggaactacatgaccaagttcctgagacgacaggtggatgctgcagaagggctttctgaaggaggaggacctcacggagaagaagccctggatggtggcaccatccgatgtacaggagctgggcctgtcagcaccacgactgaaacagtgactccacagaccatcacctgtgggacacaccatcgagatcctccgggagaagggcattcgaacaggacgcccagatggatggactgaggcgaggggataactcctggagaatggtgacagacattgaggaacatgatcatcgatcaccatgacattgcacagggaaggatgcaagacgaatcagaccaaagattggaaaaaagatcaatctacaaagcagatatcaaacagaaatccagcacatcacaggacaacagactggagcaagagacatcatcgacaacattcacatggagactggaaccaccattcgacaacatgagatgagatgcaacaggcagccaggaatcacaaggtaacccaacaagacaaacacggtggaaaggatccacagactccagaccgagacaacagaacttgagaatgatatcagagagagcttggagacaaaccaggaacaaattaggaacaatttggacatagacaacgtgtccgaatggacccgacaacaccaagggcaagacagagggagaacaccaaaacaacaaggttgcaaacagtccgccgggagaaggacaggccagtaagggatacaagagacagacagggaaaaaacggaaggaaacacaggagcagaacacaccataggcacccacaaattagtccaataacatattacgaaatttacgcagatggaagcaccacgatcaaagcacgagcgacaccgcacgccttggaacttgaggattcaaacgatggcaacaattggtggcaacaatcggagagccaacacccacggacaaaatacacacacgattgagcaagccacacatgagcacgaagcaaaagaacgggaccaatttcccaggagatactatacgacccacataccggaaatgaaaaaccacacgattgggcgctttacccatacaaccataggaggccacaatgatgatcaacgaagagagccacatatttgacaggaattgggaaccactcacattgattggcacgtttacagttcatacgagtggtcagaacagtaatcgccgtgccatacaagaggcacatggtatcacaacagccacaatgtcacaacaatactttgggaagaacacgacacaatcgaatcagagcacacacgagcaagcaggaatgagacaaacacgacaaagacacaactagacacgtagatccacaacaagcctggacattaccacaaggagcgcacacacagacagcacacaagacaagtcaacagatcaacagagtgcaacaggaaacagacataccgacgaaaggacctacaagaagactagccaaagggaaaaagaacacgaaacaagcacacacgagagaacgaacgaagtatgcgagaacacaccaaagtcacacaggaag

SEQ ID NO: 628615 - DNA, 255 bp, Homo sapiens
acgatgaacagacccagtcctgaaagacaacaaaatagaaccgcggtcctattccattattcctagctgcggtagtccacggcgggctcggtgcctgcatttgaacgactctaagttttgtcagaagtaaagcgcttcggggccccggcggggacactcatgctgaagaggcagtcgagagggtgcgcgctgagcagggcaaggtggcgtggggacgggctggtgtggtctggcctcgtcaggcggactcgtccc

SEQ ID NO: 628616 - DNA, 903 bp, Homo sapiens
tctcgcggcgcgtagaaagtcgtttgtgtgtgtcccacaccagaatgtcgtaggttctggaagaaccgcttaatttatttggtgcgcacaacatgagaggaccttgtgaatattaacggcgcaattttgcagtggataagaacacacgggcggtgtgtcaaatgctgaatttggcggtcaccgcccccctggatttttattattgtacgagacttgaaaacataaaataatgcggggtgcaccacacccgagcgtcgccaccatgtcggcacttgttgaccgtagcccccagagcgggggtgttggcaacagcggcggagaatgtacaaaaaaagtcggtggtagcggagcacaaaaacttggagaccgcccgcatatgtggaggtgaccactcgggcccgcctcaatggaactccagccctggggtcacctttaaagaagggagggtttccccccgcaccccgagtctttcagggagaaatcttccctcttggtccgccccctcagtaggaatatcaattccctctgcgagcgccctcggcgcccactaaatgttgtttcaatagcccgacgcgcttgtaaggaacgcaggcgtaggttggtgataggtttccttgaaaaagagtccctcctaataaggtgtttcccataattgtttctctcgggacaaccagatgacagcttaatcatcaagaaaactcctgtttctcctatagccccccatattcaaacagggggacgccactaaaatcgagcaaccattcccagtattcaaaaataaacgatagggcggggccctacaaacacagaaggaagaaattttgcttacaggggcaaaaacatcgaggcaccacgtgagggttacccaacaaaaaaacaaaacggtttccccccaacaaaaca

SEQ ID NO: 628617 - DNA, 1281 bp, Homo sapiens
  misc_feature (1)..(1): n is a, c, g, or t
  misc_feature (150)..(150): n is a, c, g, or t
  misc_feature (160)..(160): n is a, c, g, or t
  misc_feature (171)..(171): n is a, c, g, or t
  misc_feature (184)..(184): n is a, c, g, or t
  misc_feature (195)..(195): n is a, c, g, or t
  misc_feature (199)..(200): n is a, c, g, or t
  misc_feature (209)..(209): n is a, c, g, or t
  misc_feature (211)..(211): n is a, c, g, or t
  misc_feature (217)..(217): n is a, c, g, or t
nttttaagagtctcttttttaaaaaaacttaattctctaaaaccgaaatggttcatgcttctttttaaaaatgattgtataaaatgtatggaatggttagcctggtgtggtggtgcacacctgtaatcccagctacttgggagactgagncacgccgaancgctcgcgccngggaggcgggggnggcaatgggcnaggnncgtgcgacngnaccccngcctggggacagagcaagacactgtctctctctctctctccatatatatatgtgtgtgtgtgtgtatatatatatatatgtgtgtggtgtgtgtataccatatatacacatatatacacacacacatacatatacatgtgtatatatataccatcccatatatatgtgggatatatatatatatatatatggatatggttatatatatgggatggtttggttggtcccagcaaagtatatgaaaattaaagttctgtgataatgacaaaggaattgctgttactgtactgcaaatatgctgtgggttctcggtgttcaaactcttctaaggaaggacacacagtagctctctgcttgctgatagatggtttcccagtgtgagatttgttattttgatcagagtattcaaatcagaatttaaatctagtgtttctattttagtttagcttcctgatttatataaatgaaatctcatttataaagtataataaagatgactgtaagacaaaatccaaaaaaaaaaaaaaaaaaaaaaatgaagaaaaaaaagaaacaaaacgataaagaaaacaaacaaaaaaaacaaacaaagaacaacaaataaaagaaaaaaaaaagtggggggggggtagccaacacactcatctcgacgacgggccgcacaacaccacacgcgcaccgcccgcactcgtgccacaacaacaggcgagccaccaaccgccggacgcagaaatacaagaacgaccacacggtggccggctcaccacagacatcacgcacgagcagaacaaaaagcacaaaagaagaaacatacaagagacaaaaacgaacaaacataacgctgcaagaacaaccaaatacacagcacccacccaccatacaacacatatacaaccccccggaagataaacaaaaaaccaacgaggctatataggcgagacacaacacagactagcatcaacgcgcccaaaagagaaccgtctcaagcaaaacaacttgcacacaattactcggcagagatcgaagaaaacacgacacacacaacaccgcacacggacgcaacc

SEQ ID NO: 628618 - DNA, 467 bp, Homo sapiens
taactcgccggcattaggcagatcccagtaatgtcggcagcagatcctgtctggctggcttcgaaaggagctggaaatgcagaatttattcccatgcgtgaaggcgcatctcctctcactggagggttcagaatctgagaaagatacctggcctatgaagagctgcaaggactcaaagtgggctctgaagctcctttggtagacaaaacccaagtagaagcctcgtcacctcggctgaatcctgcagtaacctgtgctgggaagggaacaccactgactcctcctgcgtgtgcgtgcagctctctgcaggtggaggttgagagattgcaggggtctggtgttaaagtgtctggctgaacaacagaagctacagcaagaaaacctccagatttttacccaactgcagaagttgaacaagacattagaaggagggcagcacgtggggatgcattccaaaggaactcaga

SEQ ID NO: 628619 - DNA, 172 bp, Homo sapiens
agcgggggcagaggcagcagcagcgcgcagtccctacggcctgcgcgcgcgctgctcgcccgcccgagaatgagccgggatggtgatataaagaaatgtgcagggcgggagatttcaaggcaggtcgcctcatcctcgacgacgtgcatggctggggcggcagcctcgccga

SEQ ID NO: 628620 - DNA, 154 bp, Homo sapiens
tccaaaggtgccagagggctcagaccctgagtaacaaggagtcagtaatccagcgatacctggtccccacgggacttaaagtgtggccagggagtgtcaaagctctgtcaaagcacacagcataccccgcgaggccgtgccgtattctcatgac

SEQ ID NO: 628621 - DNA, 623 bp, Homo sapiens
accctagctgtggcttctggaatctaacaaaagtatcacaggagggtgtacacgtcctgcgatattgggagtaacatcctctcccacgctggatatgacaaacaattatcacatgggggtgtacaacccctgcgatattcggagtaatatcatcctctacccaactggatattatgaacaatatcacagggggttgtacatcccctgtcatattcagagtaagatcattctctcctcacctgaatattacaaacaataccccagtagggtgtacaccacctgcaatattaggagtattaccttcctctttttgtctgaatattacaaactgtatcacagtggggtgtacactcctgggagtaatatcattctctcccccactggatattgcaaacaaaatcactgagtggtgttcactccttgggatatttggagtaatatcatgctctttctttctggaaattaccaacaatatcacaatatcacaaaggaatgtacaccacccgtgatgctgtcagcaatatcattctccagcccccccaatatggcaaacaaaattacagagggctgcataacccctacaatattaggagtaatatttttcttttcccccataaatatta

SEQ ID NO: 628622 - DNA, 1501 bp, Homo sapiens
tatggctggtgtgaagccgagggcgtactggcgaccctggagtgatgagccctgcccgagtatgatgcctgccgtggagacatgctgaggaagcaaaggagcctgcctgaagctgactatcactgagctctgccggtgacatgttctccaaaatggccacttcacctagacgtggggaactgcacggcaccagatgacagcactcatacagctccttgtgaaacatcattgacataaactcaccatgcttgaaagtcatcgttgcacactgcaaccgcatcattgctcatcacaaccttcagctaggaacttcaacaggacttaaacaccagaaatatcgctatgcactgccagccttatctggatccagcatcaatgtccattgcaagcagcagcgtcagccagctccttgcacccaggccagcttcacaagttggcatgcctcattcaaccaccaaactggcagcccagtccacacccagctgccgccaacgatgcacaaacttatttcttatggcgaccagacgtcttcacataccccccggttggacagattgtctttataaacacctgaatcctagacggccgatgctttcgtcgcacaattctccacacggacattgtgcggcaccaggaccttccagctccctgtatgggggattgtgtcatctcgccttttaggcacaacctcgaactccatctaatcccgacctaacggatgctggctaccgcagagatccaagacgaaatccgtccgacaccctcgcgcaccctcggaggaaaaccacacagcgagtcatctcagaacggcgcaaagacaaactaacagtgatatgtgttctcttcttttctcctttctctattaaaacaccataagcagacaaaaaccaaaacaacaacgcgtgggcagaaacacgcgcagggagggaagccaaatagagcagaagcaaccagagaccgcagaacaccagaaggagaaaacaccccggacaagccagcacccacaagaccagaagggcgacacgagcgacgaaagagagagacgagcgcagcagcgcgaggccgcagacgcggcaagagcgagcaacgcacagggagagagcgagcgagggaacgagaaaagaaagaaaaagaggcgagggagcgaggaagcggcgaaaaggggagagcagaaagagagagcgaaggcgaggcacgcaggaaggcaccggaagaagaagacgaaacaccgcaggaaaggaccgacgaacagggatacaaggcgcagcaagaggcgccaggggcaaggacggccggcggggggcggagcggggagggagcagggacacacaccgagggcaggcggagagaagagacgagacagaagggagagacgggcggcgagctcgcgagcgaccagaacgacggagagggagcagtcggaagggccgacgagcgagggcccgaggggcgacggaaccagaggagcgaagccggagggacggacgagcgaagaggacgg

SEQ ID NO: 628623 - DNA, 107 bp, Homo sapiens
cggcacgaggcgggccgctccccgcccccagcggacgcgcgcgcgacgagacgtggggtggggggggggggcgcgccggcgcccgccgggctccccgggggcggccg

SEQ ID NO: 628624 - DNA, 383 bp, Homo sapiens
attactggcacatgccaccatggccagctaatatttgtatctcttgtaaagacagggactccttgtgtttcctaggcttggcttcagctcccaggctcaagcaatgtgcccaccttggcctcccaaattgctaggattacaggcatgagccacccacccatcctggagggtttatttttgagggaaattgcattgcataggcccagaccataggctctggaatgggaccgtcacaactaaaattttaaaccccccttccctggcatggaaaaaaaaattaccctatgcatttggttccgtctgtatggggaaaaaaaatttttaattaataagcgattggacccgtacccccagcattattgatcgttcttaagattgagcta

SEQ ID NO: 628625 - DNA, 588 bp, Homo sapiens
  misc_feature (402)..(402): n is a, c, g, or t
  misc_feature (552)..(552): n is a, c, g, or t
  misc_feature (572)..(572): n is a, c, g, or t
atcggttgaacctgagagagggatgttgcagtgagccgagattgtgctactgttctccagcctgggcaatagagtgaggctcagtctcaattaaaaaaaaaaaaaaaaaatgcggccgggtccagtggctcacgtctgtggtcccagcactttgggaggccggggcgggcggatcgcttgaggtcaggggttggagaccggcctggcccacatggagagaccccatctctactggaagtgcaaagttagccgggtgtggtggcccaggtctgtagtcccatctactcggggggctgaggcaggagagtcgcttgagcccgggaggcgggggttgcggtgagccgagatcgcaccatcgcactccagcctgggtgcaagagcgaaactctgtctcaaaaaaanaaaggaagtggcatatttggtaaattgataaattaccactgtcaaattatattggtgagtctatatctattgttgtccccagatgttgcctttgcaagaattagtgtaaaattggaaaaaatactcaatgttgaaagctgtcattgttgngatctttatgaaattattgngcccatgtccaagttt

SEQ ID NO: 628626 - DNA, 126 bp, Homo sapiens
tcagctcggtccttttcacaggtgagggaaactgtgccaggttacaaatttattaactctagagaatcctgaaacaaccctgtcttatgtctcctaaaatcggtacaggtcctgcgtttgctggtt

SEQ ID NO: 628627 - DNA, 211 bp, Homo sapiens
  misc_feature (103)..(103): n is a, c, g, or t
gaaatttgtccaattgttcatatgccagccgcccatcttctcccagagacaagagggtttctgaggccacatttctgatttcttcagtatcagattgcgctgngttcccagttttttaatgctttcagtagcctcacggatttttagagccaggcaagctgctttctggagctggcggtttgcctttgttagtgcttcacaggaatagagc

SEQ ID NO: 628628 - DNA, 277 bp, Homo sapiens
gtgggtgacataggatccaatcgcacgacaagagcattgctatcggatcagtcggctgctttgctggcatagcgttcaggtagtgcggccaggtagtaggggcgtcgttgatctcttgggagcgtcagcagcccaggcacgtcgccaggaagaagcactcgagcagaaagcgcgggtcttctcacgccctgggtgtcgagcccagtggctcaggccgtagttggtgaagtcccgcaggatgtccaggcgctcggacgacgagatgtccagtgccgct

SEQ ID NO: 628629 - DNA, 1226 bp, Homo sapiens
ggcgccggtggcgggactctggggaaaattggctgcgtcttcgagtgggaacttatagaaactgctggcaatttcaagaaaccaaaagtggttacaggctggagaggaaaaccaggtcctggagtcgtcaattcaccgagatggggcaattccaagaactaatgacctccgccacttaactcagggacaaccattcatcatgacaactgcaacgtcccgcacgacacacaccgacacgtagcagcacagaggagaccagtgatcactccacgcaggctaccaacacacacgctacaaggcaacgccagaacacatacgtgggccaacagcctggtcttacccaaccgcgaaagggacgaaaaacttcaacgttcacactcagacaacacagcaacgcacacacagggttgcctatctcccttcctggacagcacaactacattcaaggtactgcacattagggatccagtgccaaggtcaaatgctggtatggtggctccaacttgggacctgggcttccaaggggaacccccggggaagacctgtaacccaagtctgactttaggacgatgaggaaagctgggcttaccgtgggtcaggatgcacacaactcctttcccaactaaactggcgcgtgacagggccattttaccccagcgaagattggcactttggcagccagcgcaagacttggccaagaatgtttccttgtgctccaccaggtactccagtgggccaggttcacaatggacctggtcggactcgaactatgttaacgcacgcaaaattcatcagtaagatgagacttcccgttgcgacacctccctgggccttaataaacgggacacatggacagcactgtcctggcgcaagacccaatgcgcaaccgggaacccccctacaggcagcgagaacgagacggcccgaattgggcaaaacgcgtttcacaggccgacttcccgcggactggaaatcgggcgacaacccgggcccttaacacagggtcccggcagaagtgcccacaaggctgccaaaacaaaccccggctaacacgggctgtgaggaaaagcggcccctcaaggcaccgcgtgcgccgtcaagccgaacccagtgagctagcgcactcacaacaggcgcggcccgagcccgaccgccactgcccccccgccgcgatcacgcccccacgggcacctatcgtgctaacgggagcccctccctcgcgaccg

SEQ ID NO: 628630 - DNA, 901 bp, Homo sapiens
  misc_feature (104)..(104): n is a, c, g, or t
  misc_feature (681)..(681): n is a, c, g, or t
ggaggcaatggatgaacagagcgtggagagcattgctgaggttttccgatgtttcatttgtatggagaaattgcgggatgcacgcctgtgtcctcattgctccnaactgtgttgtttcagctgtattaggcgctggctgacagagcagagagctcaatgtcctcattgccgtgctccactccagctacgagaactagtaaattgtcgttgggcagaagaagtaacacaacagcttgatactcttcaactctgcagtctcaccaaacatgaagaaaatgaaaaggacaaatgtgaaaatcaccatgaaaaacttagtgtattttgctggacttgtaagaagtgtatctgccatcagtgtgcactttggggaggaatgcatggcggacatacctttaaacctttggcagaaatttatgagcaacacgtcactaaagtgaatgaagaggtagccaaacttcgtcggcgtctcatggaactgatcagcttagttcaagaagtggaaaggaatgtagaagctgtaagaaatgcaaaagatgagcgtgttcgggaaattaggaatgcagtggagatgatgattgcacggttagacacacagctgaagaataagcttataacactgatgggtcagaagacatctctaacccaagaaacagagcttttggaatccttacttcaggaggnggagcaccagttgcggtcttgtagtaagagtgagttgatatctaagagctcagagatccttatgatgtttcagcaagttcatcggaagcccatggcatcttttgttaccactcctgttccaccagactttaccagtggaattagtgccatcttacgattcagctacttttgttttagagatttcagcactttgcgtcagagagcagatcctgtttacatc

SEQ ID NO: 628631 - DNA, 358 bp, Homo sapiens
  misc_feature (104)..(104): n is a, c, g, or t
ggaggcaatggatgaacagagcgtggagagcattgctgaggttttccgatgtttcatttgtatggagaaattgcgggatgcacgcctgtgtcctcattgctccnaactgtgttgtttcagctgtattaggcgctggctgacagagcagagagctcaatgtcctcattgccgtgctccactccagctacgagaactagtaaattgtcgttgggcagaagaagtaacacaacagcttgatactcttcaactctgcagtctcaccaaacatgaagaaaatgaaaaggacaagtatgtcctcaatttctttgttcaatattgaatggattttgcctttgtattgtttaatgacactaaaaaa

SEQ ID NO: 628632 - DNA, 491 bp, Homo sapiens
tactggatcctataaatttcactaactcaaccataatttttcttccatcctgtatccctctcttctttataagcaattatatccaagctgggcgcgatggctgactttgggaggccgagcactttgggaggccgaggcggttggaccacaaggtcaggagctcaagaccagcctggccagcacggtgaaaccctgtcaccactaaaaatacaaaaaactagccgtgcatggtggcacgcacctgcaatcccagccacccgtgaggctgaggcaggagaatttgcttgagcccgggaggtggaggttgcagtgagtgaggattgcgccacctcactccagcctaggcgacagaatgagactccatctcaaataaataaatacatacatacatacatacatacatacatacatacatacatacataaggctagtatcctgagcaatatgtaggagataaaagggagtgttagaccacgtttttctctctaacc

SEQ ID NO: 628633 - DNA, 833 bp, Homo sapiens
  misc_feature (104)..(104): n is a, c, g, or t
ggaggcaatggatgaacagagcgtggagagcattgctgaggttttccgatgtttcatttgtatggagaaattgcgggatgcacgcctgtgtcctcattgctccnaactgtgttgtttcagctgtattaggcgctggctgacagagcagagagctcaatgtcctcattgccgtgctccactccagctacgagaactagtaaattgtcgttgggcagaagaagtaacacaacagcttgatactcttcaactctgcagtctcaccaaacatgaagaaaatgaaaaggacaaatgtgaaaatcaccatgaaaaacttagtgtattttgctggacttgtaagaagtgtatctgccatcagtgtgcactttggggaggaatgcatggcggacatacctttaaacctttggcagaaatttatgagcaacacgtcactaaagtgaatgaagaggtagccaaacttcgtcggcgtctcatggaactgatcagcttagttcaagaagtggaaaggaatgtagaagctgtaagaaatgcaaaagatgagcgtgttcgggaaattaggaatgcagtggagatgatgattgcacggttagacacacagctgaagaataagcttataacactgatggttgcggtcttgtagtaagagtgagttgatatctaagagctcagagatccttatgatgtttcagcaagttcatcggaagcccatggcatcttttgttaccactcctgttccaccagactttaccagtggaattagtgccatcttacgattcagctacttttgttttagagatttcagcactttgcgtcagagagcagatcctgtttacatc

SEQ ID NO: 628634 - DNA, 809 bp, Homo sapiens
  misc_feature (104)..(104): n is a, c, g, or t
  misc_feature (589)..(589): n is a, c, g, or t
ggaggcaatggatgaacagagcgtggagagcattgctgaggttttccgatgtttcatttgtatggagaaattgcgggatgcacgcctgtgtcctcattgctccnaactgtgttgtttcagctgtattaggcgctggctgacagagcagagagctcaatgtcctcattgccgtgctccactccagctacgagaactagtaaattgtcgttgggcagaagaagtaacacaacagcttgatactcttcaactctgcagtctcaccaaacatgaagaaaatgaaaaggactggcggacatacctttaaacctttggcagaaatttatgagcaacacgtcactaaagtgaatgaagaggtagccaaacttcgtcggcgtctcatggaactgatcagcttagttcaagaagtggaaaggaatgtagaagctgtaagaaatgcaaaagatgagcgtgttcgggaaattaggaatgcagtggagatgatgattgcacggttagacacacagctgaagaataagcttataacactgatgggtcagaagacatctctaacccaagaaacagagcttttggaatccttacttcaggaggnggagcaccagttgcggtcttgtagtaagagtgagttgatatctaagagctcagagatccttatgatgtttcagcaagttcatcggaagcccatggcatcttttgttaccactcctgttccaccagactttaccagtggaattagtgccatcttacgattcagctacttttgttttagagatttcagcactttgcgtcagagagcagatcctgtttacatc

SEQ ID NO: 628635 - DNA, 178 bp, Homo sapiens
tcctgcgtaataggcttccggctgccaggcgtttcactggggtttagtcaggtggggttattttcgttaatgttagtaagggtggggacgcgagattgacctgttagggtgagcaggattattcgagtgctatcggcgcttgtcagggaggtagcgatgcgagtaacagataggccga

SEQ ID NO: 628636 - DNA, 369 bp, Homo sapiens
  misc_feature (227)..(227): n is a, c, g, or t
  misc_feature (309)..(309): n is a, c, g, or t
  misc_feature (329)..(329): n is a, c, g, or t
  misc_feature (335)..(335): n is a, c, g, or t
cacagactccatggataataggtaaacttggggccgggcgcagtggctcacgcctgtaatcccagtattttgggaggccgaggtggaaagatcgcttgagcccaggagttcaagaccagcctgggctacatgacgaaactccatctctatcaaaaatacaaaaaattaactaggtgtggtgctgcacgcctgtggtcccagctattcaggaggctgaggtgggaggntcatttgagcccagaggtagaggctgcagtgagccatgatcatgccactgcactctgggctgggtaacagagtgagatcctntctcaaaaattaattaattnaattanttaaaataaactaggtaaactttggataggcagt

SEQ ID NO: 628637 - DNA, 1122 bp, Homo sapiens
ggagacgttcttcgccgagagtcgtcggggtttcctgcttcaacagtgcattggacggaacccggcgctcgttccccaccccggaccggccgacccatagaccacgccctccgatcaccatctatcaccgcaccctcgtgactgccccaaggcccccgaccgccgctccagcgccgcgcagacaccgcacgccgccgccgcctcatccttagatcgccgccatgacgaccgcgtccacctcgcaggtgcgccacgaactacacaccaggactcagaggccgcatcaaccgccagatcaacctgcagctctacgcctcctacgtaaacctgatccaagtacctcactaccaccgaccgcgaatgacgccgcgccccgacgaccctctgccacagatcacctccatccaccaactctcatgcacgacacggacccactgcccgagacacccgactgaatgctgccagacccacccgacggcgcgccgccacccctccctcccaggacccatcaagcacaccccacaccctgcgactgaccggacagcaccgcgccccgccctggccaacggacgcggcgcacccacctccgggcaaccaccaccgagcaatcacccacacacctgagaaccgccacaaaacccagcgccacccggaccccccacccactgaacccgccccaacccagatcatgaccaccaccctcgacgaccccccctcccccgctgaaacgcacgccgcgctcaaccccccacaccaccaaacattgaagattgcacccacgcatgaccacccacctgaggccccacacggccaagcgccccgacaaatcagggctgggcgggacacaatcccaatccacaaagacaccaacccgggcggcaacccacggcccacgcgacgcgcacaccgcctccgcccacaacaacacatgacgcagacggtccccccgcgaaccgccgggtcaccctacagtataggcgatcccacaaacccaacaccaagcgcccccaaccgccacgaaccccagcaggcaccccccacccctcacccccccaggcaatacggagccagcaaagagacccacacccacccaagcgccagcacaacaaaaagagagaccag

SEQ ID NO: 628638 - DNA, 807 bp, Homo sapiens
ggctggttcgtagtccttgttttaattgtgcacgtagggttctcttgtggtctgccgtcgctgtccggctgccttgtgctgtcgaacatactaaggcgtggtgccacatgcatctcagacagccgacgcagctcgacgcagggccggctggagggtgggcgttcgcgtgtcggagggcgccgcgcggtgcaggcgggcgggcgcctgatgggtgtgaaacgagtgctggtggtgctggctgggtcatgcgctgctggccggtgcctggcctggggaatgtcgatgcctgacgctgatgcctgctgctccgggggtcgtggagtgagctgaagcagtgccaaggagatcgatggactgccgagaagtactccttcatggccaccgtcaccaaggcgcccaagaagcaaatccagtttgctgatgacatgcgggagttcaccaaattccccaccaaaactggccgaagatctttgtctcgctcgatctcacagtcctccactgacagctacagttcagctgcatcctacacagatatgctctgatgatgaggtttctccccgagagaagcagcaaaaccaactccaagggcagcagcaatttctgtgtgaaagaacatcaagcaggcagaatttggacgccgggagattgagattgcagagcaagacatttctgctctgatttcactcaggagacgtgctcagggggagaagcccttggctggtgctaaaatagtggggctgtacacacatcacaggcccagacagcggtgtgattgaacacctctgttccctgggggtcagtccggtg

SEQ ID NO: 628639 - DNA, 886 bp, Homo sapiens
ggctcgtggaccgggtgggagagcgagtgggagggatgcttcacgaaagagcaaagaaggaagtgaagtgataccctggcatgctgctcagacacacacctttgtaatcacaagacacgacagtaaggggaggactcctcgcacaacgactgacaggatcaatgcgcgatggtgacaagatcgatcagaccagaagactgctgcggacgggacggaggcctcttgtcgtatgagaatgcattctgatgtgatgcaacaaaacggtaactagtatgcgtgatgaatgttatcaagatagctgtaaattgtgtcagacacttgcgaagaaggcatgagcgacgaagaaggactgcgttaaccttactatggtattgctggggaatacacacattataaggtcgttggtcatacagcaatcgataggatatcacagaaggggacgttggcgccccgaaaatgggttcccgaagaggttgtttggcgacgggtgtctctacgtcgtgactggtccacacatggtatactagtagaggaagcggcgtatgcgcttgatagtcgttcaaaccatatgggcgtgtactgattctaaatccatcgccattgatgcgtaggtgaggtcaaaagtccgactataatttatgggaacccgccgtgggtacgctccaagtactgaaaacgttaaagtataatttgtaacataaatatacttatgagaaggctggggggtattgggaggacatagagtcgacattaaagataacgtgagagtatggcatttatggactacgtattaaacgattttggaaatttgcttggtaatacatcgtgggttgaaactacagggaaatcattcggtgtcttggatggactaggagttcagggatga

SEQ ID NO: 628640 - DNA, 144 bp, Homo sapiens
gcatcaatcatatccagatctctccctcactagacgtaagccttctcctcactctctcaatcttatccagtcatagctggctgcttgtgttggattaaaccaaagccagctacgcaaaatcttagcatactcctcaattaccca

SEQ ID NO: 628641 - DNA, 287 bp, Homo sapiens
  misc_feature (7)..(7): n is a, c, g, or t
aagctcncaacaagagcgaaactctgtctaaaaaaaaaaaaaaagaggggggtgaataactggaggccagggttggaaatcagcccggcccaacagggtgaaccccttatctcaacaaaaattataaaataagccaggcatggaagcgcacgcttgaaatcccatcttctgggaaggctgaggcaggaaaatcgctaaacccgggaagggggaggtaccagtacccgagaatcgcgccaggtgcatcccagcgggggcaaaaaaggcaaaactcgtgtctcacaaag

SEQ ID NO: 628642 - DNA, 324 bp, Homo sapiens
ttcgctggttcataatttgaaacaatatgaaaactgtcctatactcattccaagcaaaagggctactagtgttagttttcttgtccacaagttgattgaattgagtgataaccaacttaattcactcttccctggttctttttatcaaaacgttttcttccttatgcaatcattttgatttaaattctttaaaaacaaaagagaaaaacatgctatcagttactcctttattttttatctgcctcagaatagttgagaaaggttatgttaggaattcctgaaaatggggtcatataagggctttatatcttatgataccgcgaa

SEQ ID NO: 628643 - DNA, 308 bp, Homo sapiens
  misc_feature (77)..(77): n is a, c, g, or t
  misc_feature (196)..(196): n is a, c, g, or t
tggggagagagggtagtgaagatacacagactgacatcaacacttggcggaaatttaacctaacaaaaaacaactcntaacagtctaacagtaatttctctaattcataaaagctctactttttttttttgcttcaaaagcttcttcacaatttattacttgatcatgaaatgatttttctaaacgttaatttttngtgcaaggcattttacccttggctttatgttgcgaagagcttcttgcaattaacttgattttccaaattcttaaacaacgtgctccattcctccattggtgctgagcgggat

SEQ ID NO: 628644 - DNA, 237 bp, Homo sapiens
cggcggcaaaacagggggagagacttcgttccaaggggaggtgcaagtgttcatctgtgcagacccttccccatggcgtgtcctctgcgtctcagggcggtccaggatcgcgacagtgctaaaggcacggcacatgacgggggaatactggccggaacagcatggtaagccatgcccaaggtgccagaaggaccaggagccacgcaggcagcggagaggaacacccagagtgctccc

SEQ ID NO: 628645 - DNA, 955 bp, Homo sapiens
ctgtgtgtgcggctctctattgtgggccgcttttgcccaacacctgtgccgccagttttcccccagtgggggccgccgcattgtacacccggggggacgcgcctcatctacgacggggcgcctctaatcaccaccccacaggctggtccccgaaaaggccgccttcctgatttacccgggggggtgatatcctcttttgttttttgttcccgccccccgccgagagaggttgtttttttctttctcccacggagatttttttttttgtcgacgacgcccgttttctccccctccgcaccgcgtttgctccccttctcccccccccacttaattttagagagggcaccgtttggcgcctccccactacacgggcggttcctacctcccccgctgtgtataacttccccttgtaggggtgtgctccgcccctctctgctgtgaacgaacacatcgccgtggtgtttgtcttctgctcactcacagagtgagtgtgtctttactcaccccctggggcttgctcacccacttagttttttgatatatttgaggaccccccccgcgctctcgccccaatattatttcttaacgcccccgtggttgttaccaagattttcgtgggtgtgttattttgtcgccctctcctccagcctctcatggtggtctttcgatgtcgcctctgtctccacattttctctggcgggggatttttccggcgtcgacacactattgttgtaggcaaccaccggcgttctccaccgtggttttgtatccgtccttttattgggttgctcaaacatcttctcttcaccacaatttgcgttgtatccccgccgacctatatttttctcctttaaacacccaaaatacccttgggtttaaacccccccccatttcgccttttttaaaatgtggtttgtttttttttttgttttcccttttttgatggggggtttta

SEQ ID NO: 628646 - DNA, 109 bp, Homo sapiens
gtgggcgcctgtaaatcgcttgaaccctggaggtggaggtggaggttgcagtgagccgagatcgcgccattgcactccaacctaggtgacaaagctacacgccatctca

SEQ ID NO: 628647 - DNA, 289 bp, Homo sapiens
  misc_feature (53)..(55): n is a, c, g, or t
  misc_feature (165)..(165): n is a, c, g, or t
  misc_feature (167)..(168): n is a, c, g, or t
  misc_feature (171)..(171): n is a, c, g, or t
  misc_feature (198)..(198): n is a, c, g, or t
  misc_feature (217)..(217): n is a, c, g, or t
  misc_feature (222)..(222): n is a, c, g, or t
  misc_feature (241)..(241): n is a, c, g, or t
  misc_feature (247)..(247): n is a, c, g, or t
  misc_feature (258)..(258): n is a, c, g, or t
  misc_feature (271)..(271): n is a, c, g, or t
  misc_feature (276)..(276): n is a, c, g, or t
  misc_feature (278)..(278): n is a, c, g, or t
ctgaaaagtataagaatacaatttacttttcccaaactctttttccttatttnnntctttcaaataactttaattatttaatcccatactgattaaaatatgtctgtctaaagggatctactactatttgcttttaaaaaagtgttccctatttatttaggaaananncangcaagcaactgaatttatatgtaaaantaacatttagacctgtggntcaanggttattttcaaaaatgangatatnaatttggtatnagtaaaaagtgtnttttntnttagtatataa

SEQ ID NO: 628648 - DNA, 774 bp, Homo sapiens
  misc_feature (458)..(458): n is a, c, g, or t
cccaaggaagtagttacctttcaaatgcatctaccttgagggaaaatatgacacaagatagaatggataatttaacctaaacaattcaactaaaattccacaagctaataatattttaattggaatttttgtatataattaagtagtcctgattcaagaccagtcaataacttaatgtaaacagagtaaaacaaagtttgttcagttagtggaaagaataaggaacaatggagcaatctgcatatgtccacttcttggtatttagtttaatccttattagtttcctgaaatgttgtttctaaaggaaaactacacatctagaaaggtatcttggtattagacctatgcaaactaagttaaaactactgtgaaattttgcttttctttagtatgtacttatctctgcaatatattgctctttggagcagctcaattctgcatttctctgtatacctggngtctccatggggtgataattaacattcttaaccttagacactgaaaaatgccttctctttccaaacaacaagcatttgttgcatttagggttgtttaagaggaaagatggatatgaatagtggaacatgtatagtgagaaccttaagtttttagaagacaacttcaactagggataaaaaaaaagcctctgagattgccggtactggtctgtacagaatggggtgaaaataaacgaaaaaaaccagcctttaaactataaacatatgtgcccacgatatattgtggaagaaaaatcctccctagttggaaaccccc

SEQ ID NO: 628649 - DNA, 1080 bp, Homo sapiens
ttagtcagaaacactataccgctgcctgtactggtctcgaccttagccgtgccagcgcaccgaaggcgttccatagctgatcatcccggatcttggtgtacctgcgtgacttggcgttcaccctagatgcgatcacgcacacaaattgagtgtgagcaagtactgaaagacacagcgtatggatgctgcgtcaaaccgtttgaacatatactactcaactctcatgaagcaatatgaatcctgagtattgacgctaaattgacccatccgtgtaaaaatagactatgaccttgagcgggctcgaacttataaccaggtattgagatgctgtgctagaatgtcgctatcgatgtgtatacgtggagatgtgattcctatttgccactataatgtccactactggcttcgctgtaccatacatggatgatcccagggaccatatccactctcctctcgcgatgccgcataccacctcgtctatctctcaaaggaaaacttactaatcattatagtgacctcgcgagactcagccgacaggttcttattcgcttcacctctttgcttaggagaaggtggtaccgacagttagctccctggaacagcacctctcctgttcttccccttggtgcgatttcgccttcgagtcaagtagcaatgtaatggccctcctatgtggggttagtctttgactactccaactcccctcgtaatgctagcatacaagactttgttatatccgcctgtgcagttgctgcagagttggactaggtgccttgtgttagatagatagctatccgtcagaacatgggtatgcgcctggtgtgaaccatatgcgttcaacgatcctcaacaattccaagcggtcgtgacatcggtaatctcggcctatgaatttcacacatgctggtgaccgtgaacggccccacaagaaacgtgcatcgtagataaaccattcctggtctccacccgaacgtgtggcctccttgcacaccccgtggatcctccctcgccgatccaggcgtacaacccgcttgttccgtggaaacagctaacccaactcccacgctcaccacacgtaac

SEQ ID NO: 628650 - DNA, 138 bp, Homo sapiens
tggtcactgagctgccatgggatggctgatggatgggatggattgcattgagccgtgggaggcagaaggctgcatgtgagccatggattgcaccactgcgctccggcctgggcaacagagcgagaccttgtctcaaca

SEQ ID NO: 628651 - DNA, 1430 bp, Homo sapiens
  misc_feature (475)..(475): n is a, c, g, or t
  misc_feature (573)..(573): n is a, c, g, or t
  misc_feature (608)..(608): n is a, c, g, or t
  misc_feature (861)..(861): n is a, c, g, or t
  misc_feature (1164)..(1164): n is a, c, g, or t
ggaacgggccaacatgggccgcgttcgcaccaacaagcggggaagaaggcggggcgggtcatcatagaaaatagtactagacgcgccagggagcacaggatctcctgacatcggaaccaaggcgcgttgctgtcgcaggtagactcgcgcgaattgaatcaccgcagtgatagagaagcgtccgtggagcaaggatagacagcgataactgtcacagcaatctggatgaagacgaattcagcagaggccacagtcatacgaggtcatctaccaatctaggccgaggagggaggcagcgcagaggacgcacaacggcaagagacgagagtgatggtatgccttgcaggtcgtgcaaggctcgtatggcatcgagggaagatccatctagaacgtcagcatcgcatgcacccactttacgaggcagagagtgcgctggaaagccttgtgtatgtgacgcttcggggcgaagggtctntggtcgcaaaaactctctctctcagggtgtccaacttcgaaggctcagtaccacgtatgtggcgggcagtggcacagtttctcgatataattaggccnctctcagaggtggcacgcattgctctctgtcaccntgtaaggggtggtcacttgttgacgctggcggtggtaaattcaagtgtgtgtcccacagtaaggagagtcatcgcgggggagcaacaccgaagagaaaacacacaatgggcatacaaggtgtagacgaagcacagttgacagtgtacaaatcccacaatccacggggaaccgggttacactcggcccggggggacaccagaccccaaaaagacccggagtggcatggacgaatagagctcaccagaatttgcnacattctgagggagaaagtccacacgtggaagcaaagcaattcgcaccctggactgggcgccacgggggcacggcgagaccacacgacaccaataagtgagattggattattcccctcagaccaagggccgccattggatggggcggtacgcccacataaaaccaccaagggactacatcacagaggcgggaaatcacctattaaataggcgctgtgtaacgccttggggttccacaaggagctaatcaagggcccaaggcaaacgagggcacgccggagaaacatggcgcacagcagcgggntcacacggggccgcggtacaacacaatgtggcaacggtaatggaaaaccccggcggtcaagcccattgacgggaaggcacaggggcgagcacgtcaccgtgcatgacactgctacattacgtggcggaataatacaatgagccatgatggagacactctggtgcgcgacaacgagacttcactggggcacacaagagcgttcacacagacaacacaccagaaggtgggatgatgaacccgcgggacccacaggagaggcacaggca

SEQ ID NO: 628652 - DNA, 240 bp, Homo sapiens
  misc_feature (67)..(67): n is a, c, g, or t
  misc_feature (77)..(77): n is a, c, g, or t
  misc_feature (96)..(96): n is a, c, g, or t
gaggttttttatataatccaacttcccttcatgataagaaaccttcaacaagctaaacattggaagnatatacctcnaaataataagagtaatctnaggaaaccccgcagccaacatcatactgaatgagcaaaagctggaagcattccccttgagaactggaacaagacaaggatgcccgctctcaccattcctaatcaacatagtactggaaggcttagccagagaaatcagtctagt

SEQ ID NO: 628653 - DNA, 216 bp, Homo sapiens
atttgaaagaggtacccttgagaagggcccattttttcacatcccccctgcatcagagaaccccagaatggggtattaaaaataaacccccctccccaaaaaaggcattcaggcatgcacacacatccccaggcatcctttcagtttatcagggccctataattgagcttcaggggtgagagccagagctcaaatgttggaagtaaccctttggca

SEQ ID NO: 628654 - DNA, 242 bp, Homo sapiens
  misc_feature (18)..(18): n is a, c, g, or t
  misc_feature (20)..(20): n is a, c, g, or t
  misc_feature (27)..(27): n is a, c, g, or t
  misc_feature (109)..(109): n is a, c, g, or t
  misc_feature (169)..(169): n is a, c, g, or t
gaagtaagcacgtgccangnacgggcncatggaagctcacccatgtactgcaagtctgcaggagacttccccccaggagcagcacctgcagtgataccagcccccctgncccggggaagagggtatgatcgagaggaaacgggcagactctaaggcagaatggcgatgncaagcgcagtgctgctctgatgaggagggagctggtcctcacccaacccctgggcctcctccccgaaccccct

SEQ ID NO: 628655 - DNA, 407 bp, Homo sapiens
tatctgtgccctatgtgaatccttaccaagggtacacttacagaggctgttcctactcgggtgtctaggatgaaccattctgtggatatcagtcagcctctttaccaagctaaccttatcatcacccaataggctcatgaacaaagtggtcatgctggcagtgatgaaagttatgcatgggctcagcaacatggacttctgctcaccaaagacaaactggctacagctactgctgagtgcccagtctgctgtcagccacgaccaacattggttccccaatatggcaccattccctggtggcaggctgatacattggattgcttccctcatggcaggggtagtatttatctcttactggaatacacactttagatacaaatttgccttcctgacacaaaatgcttctg

SEQ ID NO: 628656 - DNA, 989 bp, Homo sapiens
tggggcccccaggtcgcttcccgacagcgtcagtagatagccaagcccattgtcagaattgggcggtgggacttcttcgcgtcttgggataataggaagttgttcataggagaaggacggacgttctacggcgtgggtcagaggacttcacacaagtggcaatctataaggagcaggtcctgcgtctgctctatcaaacgtcttctatcgaaacacgcgaaggaatatgaatgagaccatgtgaagttgtcagccaatgtgagcccttgcgccacagcgcgaatatcgaagcaagagtaaccggaggactagtgagaaggagaaggaatgcgcacgcggcaagtccactgcggcaaggaagggacaccgaacactgcacggcagtgggatgtgcccagtagggcaattgcagaaccgctggctcgaggcacggagaggaaccgcacctgtcctccccaataagcagcagggtccatcctgcgtcacctcggtgcttgtgcactggagtgactattccctggctaaatattggcatcgggtcttttcttacctacattgcttggtctgcggaggaccagaaatcaccgtgtgctctatacattggactgacctgtaacgacaccttggtcgctggacgtggcattttggaattcgctttctctgctagaaggtgatggacgaacaagactgggaaggattgtaggtccacatccctgcctgaacaagccaatggcaccccagggcatgcagatgcctggaaagcaaggcgtcatgatgctccccggaggtgacgtgtgcaaagagagggatgcaaggtgcacaggaccgtgcagcagagtggccagtattgtcgtcgtgcttcccgggatcctttgtgtcccaagatgtgcctgtgggtacagcgtgtctgaaaccgtgcactttgctaccacccaggtgacaagtatgggctttgagaccgccaaggaaatgaacgcgtcgccatatag

SEQ ID NO: 628657 - DNA, 359 bp, Homo sapiens
ctaaataccagcagcgaaatagcataagctgtaacaatctcaagacattcaatagaaagtctcagaatatcccagagttggcaacaaggtaacgctagtctggaatttgaagttatttctgtcatctttgtcttcggctccatgttccatgatgcgtgtgacctcgatgtatttgaaacttccccgtttttatcaataggtgcttctctgttagcagtttatccatttcctcatttgttatccgctcccccttggttgtcattcgctctctcaagtattcttcctgtatggtgccagttgcttcttcatcaatgcctgcgatggcatttctggtgatctcttcgaaatcctaatcaggt

SEQ ID NO: 628658 - DNA, 246 bp, Homo sapiens
ggggcccccccaaattttccttttccccggggggggaattggggggggggggcttttcaaaaacctttcggggggcctataaagggggggtttccggggggttttcggggggggtttccaaccaaacaaagggggggggaaaccccgggggggggggctttttggggggggggggggacgggggggttttttccccaggggggggggggggggggggggggggaatttttggggggggggggccta

SEQ ID NO: 628659 - DNA, 380 bp, Homo sapiens
actctagcaggaccccagcttagtgagctccttgatgctgcttacatgtctcgatcccacttaactatcttgggctgtgacgaagtcacgtggttcacatcggcaggcatactcagtctttctcagtgggggtgaattcatgtgtagtacaagccgatagacagaccagtccttgcttgacgcacaagtctgaatgctccactttgtccaattctctctccattcttcagtaagtcaactccaatgtcggatggatgatacccagacacatatgccacttccggaccatttgactttccattctctgccgggatgacgtgattaaacctgaaatctttgcgagtacgctggatagcctcccggccagacagagagagtag

SEQ ID NO: 628660 - DNA, 257 bp, Homo sapiens
  misc_feature (250)..(250): n is a, c, g, or t
gctcgagtcaagccggggtgcaaggcgaggtgtgcagatcatcgacgacgagcctcaagctcagagcagcggagggtgctgttcctccggctaactgctcagcctgtgaccctcaaaacataagagaactgtggatcattgccctcaacatgaagactgccatattccaagtcacatcattttaccaatggagttatagaattaacagtattttcaattacggtttataacactgcaggagaccttaagntgcaaac

SEQ ID NO: 628661 - DNA, 579 bp, Homo sapiens
ggggctcccagaggcccctgctttgttgcagtggcggatgctgacggtgagaagctgatgactcggagcacaagtacagctccacgccgctggactgggtcacgctggagaccaacatcgcctactggctgcacccccggaccagtgtaagcagagcgcttgtgcgcgcagagctgtcccgtgccccagactcccgtgaccttaggagcagccgtcgcatgtgaccgaggcccagccttgcgacgtctttcctaacaaaagccttggccttgcttcctccgagtgcttcggtggcgtggggccacagctcccacacagccagggcgtcaggtcgcagcgcctctgcagatcacggggaaccgagcttcactgcagacgcgggagcacgtggttccgcttctctggcaaatgtggtttggttttgttgttcggggcggggtgtattgttttgttttgttttgtctctttagggccgcacctgcagcatatggaacttcccaggctaggggactgcatcggagctgcagctgccggcctacaccagagccacagctacaccagatccgagctgcagttttg

SEQ ID NO: 628662 - DNA, 116 bp, Homo sapiens
ttagagtagtagattgcggtagtagttaggatactataaatagttaaattaccgaatggttatgttagggttgtacggtagaactggaataaaagctagcatgtatatttctaggc

SEQ ID NO: 628663 - DNA, 1312 bp, Homo sapiens
  misc_feature (178)..(178): n is a, c, g, or t
  misc_feature (219)..(219): n is a, c, g, or t
  misc_feature (295)..(295): n is a, c, g, or t
  misc_feature (980)..(980): n is a, c, g, or t
gctgggaccgaggagtcggagcgtgatccgagctttcagcgtcgacctgccacgccaggggccagggcaggatcagatcttagctccgggagactcatggagagcatcgcaggggagcaagcccgcactgagggagacggtggacactggacagcggggcaaacggcgctagaattcngagaaacacgtctagtaggcgagagtgggagccttgtacanggagtagctgtactagacgggtgtcgtgtaaaaatgagaagatcagcggcatcacgaatatggggccgcgtacgcntggcgggagagaaggaagtgttggatacggactagtgagcagcacaagattgaaagcgaggtgagtgttgcggtggccttggctcatggatgcggatcaagagatcttaaagcggttgtgaatggggagtctaggacaacatatgggtggggaccaaagatatataaatggtactggaagcatcagcgatggagattcagatgcatagcaaagtcattgaggttaagtgtgtgagcccatggggcatactttctgtgagcgattagtagcctaagcggggtgggggtggtcacacgcgcgcgtgacgacatgttcgaacgtagatgggggcagatcgacctgtgtaaacggaagcgccataagtttcgctagtattgcattcgggcgtggagaagaacacggttggatccctacaggtgtagtgctctcaagagtgccacaacgaccgtatacaatgtgttacgtagtccaaattggggcgtgcctcacccatatgccggttgcgggattataccacaagcttagggtggaactctggtcccagggcaagtttccattgtactctccttgttccatgctgggtggcaccccaagagtcctctttggcaaacgcgccatggtccattgccgccaattgggacgaccaggaagagtctaacaaaactaaccttccgaggggcgaggntcactcccacaagttgacccacaccggtttattgtgaggcgatggggcatatggaccacccccaaatgggtggcgttgctgggcgtggcccgactgcgtggtgggtttttgttcagtgcgagcccaaagaacaaattcttctaggacacattaaaacacaaatgttattttgccccctctagccaagctggttggttctggattgaggcaaacagcacccaattctcagaggggacggttggggcggggatacccacaaaccactcggcgagcgcagaataccaagcgcagttctgcattatgcgacaaagcaacctataagcgatacattc

SEQ ID NO: 628664 - DNA, 938 bp, Homo sapiens
ggtacaagcgccgttggggaagccagctgctggaggtgccgagtaatctgagtttcggcaagcaagccaggtctggaaactgtgagtgtgtgggcttactccgatcgatcgagcggtggcccctaggcgtaaacagatgcattcggcgtctccggttacactcgtttcataatcgtcagggcttccctcaaggccggagggtcaggagctggtagccttatgctcattactagacgctggatgggtgtcagtagggcaccaatcagagtctggtgccgacagggtgtaacttgttgcgcgctctctctaggcctcatacttcgctctcaactgttgatgcctcaggtcgcagggccggagaatccgaatcttggccgagctccatatctttatccacttggtggtagtccatgtcctcaatgtctcggcacgttgacttctgccctaaagatgggctttgtcttctagtctttttttagggtgtacaggacattcagtataagtcactgatggtgcagtgtgatcagtctcgcccgagatctcatcctaagtgtgcaggccagtgacaactagtacatgaagtgagccgtattcattcggtctgttcatgcaggtaggattacttatggaggggtctaggcttaggtggtgtcaatgttacaggtcgggtgtctgcgtgattaggaagatcaggtgctgtgtgcgatataggagaactcggtacaatgggggggtcagggaacgggtgagacattggcgggcattgggatgtattacggggactggcgtaggggccaggcgttcctgtgttcggacgtgagggttcaatggtgatataaaacagtgggggggtcagagaggctaagaggagcctttgtttataacacggggaaagaggcgttcttccttttctttctctattactaatttattaccgc

SEQ ID NO: 628665 - DNA, 156 bp, Homo sapiens
cgattgatggggctggacggtaaagtggaagtgagcacgggactgaagcccaggttgggggtgaagcctggagtgggactgaagcttgggtttgggggcaggtgcttagtagtagttccttcaagctccccctctttttcaggtgtcgatttccca

SEQ ID NO: 628666 - DNA, 129 bp, Homo sapiens
gcttttgataagtttggaagagaattttggatgtgggtacctgaaatgacttcaacactgattgtttacaagagccacagtatgtttcaattattaagatattatcaggtagcagcggctgacttttaa

SEQ ID NO: 628667 - DNA, 180 bp, Homo sapiens
cgcaaggtctgatggttttataaagggcttcccccttagcgcagttctcatacttctccttcctccaaccatgtaaaaaagcacttttttgcttccctttctgccatgattttaaatttcctaaaccctccccccccatcctgaactttaaatcaattaaaattcttttctttataaatt

SEQ ID NO: 628668 - DNA, 176 bp, Homo sapiens
ctagtttagaagtttcaatagcacctaataaaaaaagccccaaagcgaaacacctcaagtgtccatcaaccgatgaatggataaacaaaatgtaatatatccacacaatagaatcttattcgtcaataaaaaggaatgaagtactgatacatgctattgaaacttctaaaactagg

SEQ ID NO: 628669 - DNA, 127 bp, Homo sapiens
tttgtagagtagtggttgcttagggctagagattgggggaaatcgggaaatggggagtgactgctaatgggtatagggatcctttgtggggtgatgaacatgtcctagaaggaattgtcatgagggt

SEQ ID NO: 628670 - DNA, 785 bp, Homo sapiens
ctgtctcgtctgtgcagccggtgtggctgggcctgccccctccaagctgtggactcccataaagcacctgtggcgttggtggagggggtgggacgtaggtgcctcaaccagagccccccaaagcgggtcatccaagcctcagggttctcttccaagcctcccatgtgcctcttcgtcaagtgtgccccagctcgaaagacccttaagtcctcctttcttcagcctggacctggaccaagattgctctcgatcctgcgccgtctcccctcgtaggggctcctgggagtagtgatgctgaggtgcttgtcaccttgcctcacctcagtgccgttctctcctgtcgccccgagtctggggcctgtcggctagcctgctttgcttgccctctgctccggagcctctccccgcaattcctccccgagagtgtgggcctggggatcgtcgaggtctcccgtagacttcccctgtagacgtcgtgcagtcgttgttgagtctggatgcctcgtcaaaacatggggtcaatgcgaggccaacgaggaagatcccccgcgtgtctgcgagcctttcgtggggacttagaccacgatgaagtcagaagaccgatactcaggaatgtgtagtgtccaagaaatcagcccgggaaggctgcagcatctcctccccatggttccatggctgttaggcccccaccctctctggattctgcaggcccactggggttcttcccgggctgcgtgcactgaccggcggacgagcgggctgtggcatggatcgaacctcagtgg

SEQ ID NO: 628671 - DNA, 402 bp, Homo sapiens
tgagcgacacacgcatcagagtggagtccttggtccagcgtagggcagggtgtgggcaggccgtgcacggagcagttcactgactgcacggctgtttagaggtaaggaaagcaccttcccctcgctgagctctaggggtccagataggccacgcgcagctccagcgtcttggagagctgcacgtcatcttttgcgtcgtaatcctccattcttgcagccatagggtcccgttctggcccggggtcactccctccagggtcaggtttcccctcggagattcacattcaagcaatttcctcctgcttcattcctgaaggcggaaaaagtgtaatactcgggggctggggctggcgttccccgggcagagcagcttggacagtgtcaccctcttccccagcccag

SEQ ID NO: 628672 - DNA, 167 bp, Homo sapiens
tctcgatctgcctgacctcgtgatctgtccgcctcggactcccaaagtgctgggattacaggcatgactcactgcgcccggccccaataaatgcatctttatttgagtgtccatttaaacctggtcaccgaagattcccacaaaccatccacggtgcgttggcccaa

SEQ ID NO: 628673 - DNA, 160 bp, Homo sapiens
ctcgagctctgtacccatggaagattggagaaatttgcttcctcgaagtctatataaggagcatttacattgaactaccgaaaccttggcaatctcacggtctcatccgtcgggtttggctgtatggggatgagtcagagctatggtgcgcccgccgaaa

SEQ ID NO: 628674 - DNA, 1029 bp, Homo sapiens
acaaaagctttttattgaacgattcacctgcagatggataagagggaatgagaaggagtcaaaaggggcacactaagtggttctcatcctaagcttgcagggccaagtgctcgccgggtgtgggcaaaagtagtttgggttctgatgtagatggcataatacaggatctagtgggcagagtggcatgtggacgtgggaagggacattagtgtgaccccaattaacttcgtggaaagtgacacctccgtggctcatctttgcttctcgtgcccagtgggagggtgagaaggctcagcgtgaccattcctatccacatatccagaggtgggttacaaccaggaccgcaaatcaagcaagttagtctacacaaactctccacagagaggcagaagctcccgtggtccacagcaccagaaagaatcaatctcgtggggccagaagaagaagccccgagtgggaactaaagtggcacgggcgcataactcagctcaagacagggagaccaccgagaaaacaccagcagcgcatgcgcagcgctgcacagggcaaagtgacagccccgagcagcaccccaagtgcgtgtgccgccccaacgctgtcgacgaacaaacagtgagaacgtcgtgcccagggggaaccccctccggacagactacacctccaataagacgacaaccatcgcggggacacacaagggggcagagggcctcgccataaccaacgaaacgtggaacaccacatgacaccgacgtgggaacaacgtggcccacagcacgcaacagcgtagggcgagagagctaagaagacgtgcctagaaacgcgccaaggtaacacgaaggaagcggcggggaagcaccagaagggcccaacgcatagtatacaagcgacccaaaacacgccggggacaacccaacgcttcatcctgaacatcaccatcggaggctggcaacagccctccaccagtaggtcctgcggtagcgcaccaccgggcagacaatcccaccaagcaagccaagtgctaacaactgg

SEQ ID NO: 628675 - DNA, 825 bp, Homo sapiens
gacataataactacactcagaggaccatggaggcatgagggatcatggtttcaggccactgaagactctacgaggccagagaggactagtgcgatggactgatagagtcaggcgatgccctcgaaataggctgtgattttctcttccaggagatgtaaccttatcccctatttgcttctgacctgagccagatggaaatcagaaagtctcctgtatcatggagctgaagaggggctgctgtcttaccgaatgttctccatttcacaggcgccagctgcttgcccggggtaggtcttgagaagacacccgaaagtgttcatgcctcagaagaggcagcgagaatgccttttaggacaattctccgttagagtagttgggaagttctatagaagtgtgggtgaagaagaagcagtggtttctctcttttctccctcagtttcatggaggtgttaatgatcatggctggcgcgtgatgtacacgagtgggctgattatcgattttttacagtttcatagctgagaaattcagctatgtttcagtagaatcatcatattggaaagcagacattgaaagttgtcgtatttctatcttagttatgaatgtgctatggaccctttgggagacttctattgggtaatattctatgtgagagaaggaaacttggtatcaaatgtcgtggaagagatggtaagtgatgagtaataataaagtatatgctgcgaatggtgtactggccaatcagatgcttgggagaagcacagtctatgcaaatccaacgataaaaaatttaattgcttatcgaataaaacaggactgtgccaata

SEQ ID NO: 628676 - DNA, 1081 bp, Homo sapiens
  misc_feature (304)..(304): n is a, c, g, or t
  misc_feature (397)..(397): n is a, c, g, or t
  misc_feature (407)..(407): n is a, c, g, or t
  misc_feature (511)..(511): n is a, c, g, or t
  misc_feature (744)..(744): n is a, c, g, or t
cataatatgtggacagagcgatcatcgggtggagttgtacagaaaacaggaaaggctgttgaatacttgcatgtgtaaatccatctaagggtacctataccggcagagatgtacctgtgtacaagagaatggtagggcgtacaagtccagatgccactgactatggcatgaaccactggcgttgtaacaatcacagtgcttcggattattgaggtaactgtgtcatagaatgtgatggtagcaatgattaccgtatggtccattcgtgctgagagctctaatgacggggcatgagttgtgacanagaatgctcatctcaactatgtaattgccgcgcctgaagtaagaggaattaatggttccgacttgcggtagatcggctgagatctcgtagcantcctcgccantagtgtgtaccctcagaagggaagtggccagtcatcggggagagcaatcacctggtagtcacattagaggcgcacaagggtaagcgtgcattatgctcgcatgntgtcattctgttacatgcaatcgcataccattcaagatatacaggtaaccacctggggaatttggaattttccatggcataaacgttatgggagaccatcattggtcactcttttgctggcactggggtataataaggcttttgaattccttggagaggatttacgtaaataacccctggtagaagttcactccaggtaatacttgacacatttcacggaaaccatttaacangagagttgcgaacaaacccaattatatagtaggagcaagttttggccccgttgggcccgagccgagtttgtttggcggttactttgcaagtaaggacagggggtgcttttttatacaaagacacacgcttgtttaccgagggttggtggcgcgttggagagggggttgtaaccataagttaagaagtgtggaaacggaaacagccatggcggtgtttaagccagaaggacagtgggtttcacacgtgtcgagagagggaaaactgcaagaggaggagggtttaaggtagtccaggggagttgagtttgtaggggaagagctttcatttccccaaagg

SEQ ID NO: 628677 - DNA, 271 bp, Homo sapiens
gggcctcgctcttttgtccaggccgggtcacaactcactgcagcctggacctcctagcctcaagcaatccacccacctcagccttccaagtagctgggactacaggtgtgcaccaccacagctggctaattctatttttttatagaggcgaagtctcactatgtcgccaggctggtctctaactcctgggctcagtgatcctcccgtttcgacttcccaaagtgttgggattacaggtgtgagccacttcaccaggcccattttctcctaa

SEQ ID NO: 628678 - DNA, 370 bp, Homo sapiens
aaacactctttactggagccaaatcacgcactttgagcgtaacaaacgattgtactgttcaagcatggataaactcattttattcgtcattatctgattaacatttaatagtttcatgcaccttgctatagaggccctctaaatgagtgaatagacagtgagcctcttcatacaggctgggctgattatgatcagagtatagaaggtaattccacattttatttcctgaaaattcagggtctatctagtggacagtgattagagtaatactttttcacatttccaaagtttgcatgttaactttaaatgcttacaatcttagagtggtaagccatgttttacactattgaacttatatagcggtgagggc

SEQ ID NO: 628679 - DNA, 153 bp, Homo sapiens
aggtactcatcattatcttattattaacaaaataaagccctttctatgtttacagtcataaaaaaagaaacagcctggaaagaagtgggggctttgaggatggagagaaaacgggggcagacacagactccacatttggccctgtgggatttg

SEQ ID NO: 628680 - DNA, 237 bp, Homo sapiens
gactcctgtgaactgagagccatgctataaccagctatacatcagctacaaagtctagcacaagttttacatatagcaggtgttccataaactttttttttttactctgggagacagggtctcactctgtcacccaggctgaagtgtaggtgcatgaacacagctttctgcagcctcgacctcccagggtcaaacaatcctcctatctcagcctcctgagtagctgggaatacagag

SEQ ID NO: 628681 - DNA, 1033 bp, Homo sapiens
  misc_feature (1011)..(1011): n is a, c, g, or t
atgagcggagtttatgtgtgtgtgggtgtgtacgacattaaccgtttgccacaatgttcgatcgactatgttgtgatttgcgcttatttggccccggtggatgaatgtcctagggctgccctcgtgatggttcaagtctggaggcccggcgctagtatgatgagcgggaaaggaaatccacgctatcgcatttcatgcaattgccgggtgtcgggggcctcgttcaggccaccgacgatgggatcagttgacctggcccggcgtccaagccattcggccatttcgtccctgatgcgtggtcaagggtggaagagtcgcagtttgttgccggcaattcaggccgtggaaatgccccttcatgtctaagactggaaaccctgtcatgcccctgtcgcgacacatgacggccattactgtttgaccgataggtccgttgcgggcatgcttgcgcagtggtctcgcacgcctgtgatggcctagccttctgatgcccggtatccctgtgcacgggattccgagtggcttgcaagccagcccaggagcgacacaggagatgtgtgacgcctcgcatccgagaatgcaggctcatagctgccgcatttgccattaggctcgcccaggtgtctgagcacagcactctactcaaggacgttctaccaaggcagtaaatagcccggagcacgccatccaacatcggtgctgcagctcattgctagcggccgcggcgagagtccagcatcgcatgcagcgcaaggttctctaccgcctcaagtgagtcgcgccgcctgcactggacgtcatggactcggcccactgccttcggcccgctcctgccagctagtccatgcgcatgtgacaactagttgcatgggacctctgcctccccactgcagcccttcgaacttcccaggcacccttcctttctgccccagaggaaaggagctgtagtgtcctgctgcctctgggcgctacgcctctagcgcaggttctgggaagatgtgcataatgcanggcgtaataacacagggtgtcg

SEQ ID NO: 628682 - DNA, 134 bp, Homo sapiens
ccccattgggttttttttttcccttttttggttccgcttttacccggggtggaaacccccatttttggtcctggccgggggggtttttttttaatggtccccttcttttttattaaccggtggggggcctccca

SEQ ID NO: 628683 - DNA, 465 bp, Homo sapiens
  misc_feature (12)..(13): n is a, c, g, or t
  misc_feature (431)..(431): n is a, c, g, or t
cagattatagtnntagaaacaaactgaataagaaacatctcatgcaaaaactggcaaattggcagatgtcctttacatacatgcagcgtgcaagctaaagtcagtaataacccatagaaaccaaagaacaggcaggtcatagcatgccctctttactcacatcgcgatgacaaggaccatttcactggtcatcaacgtttttgtttttcgtccatcaaaatcagcatgccttaacaacactggagaaggtgtggggtgaagggtcattaagggcacgcagtagccataatgccacaccctttgtgccagccactgcgcttctggaaacctaccccacagcggtcaaccaaaagacagcaaaggcttctggcactaagctggtcacaaacgcattactaattattgtgcacatgtggaacctaccatctaancctcctttctaaggcgaaaattcccactactaca

SEQ ID NO: 628684 - DNA, 87 bp, Homo sapiens
cataaaactaaatataaaggatcgcaaaggagactgatcatgttaaaataaagttgatattttcaaaggttttatgatccagtaaac

SEQ ID NO: 628685 - DNA, 400 bp, Homo sapiens
gagcgtgactctaaggatccccacctcctaccacgattaagtcagcttcatccctgcggatggtggctggttcaaactactgccaatcaataatatctaactccatcatattatacatgaatctaatcgcacataaactccaagattatctcaatagacgcagaaatggccttcaataaaattcaacatcccttcatgttaaaatactctcaagtaaactaggtattgatggaatatatctcaaaataatatgaactatttatgatcaaaccacagtcaatatcatatcaaatgggcaaaagctggaaccattccctttgaaaaccggcacgaggcaaggataccctctctcaccactgctattcaacatagtattggaagttctggccagggaaatcaa

SEQ ID NO: 628686 - DNA, 510 bp, Homo sapiens
  misc_feature (269)..(269): n is a, c, g, or t
  misc_feature (315)..(315): n is a, c, g, or t
  misc_feature (320)..(320): n is a, c, g, or t
  misc_feature (335)..(335): n is a, c, g, or t
  misc_feature (361)..(361): n is a, c, g, or t
  misc_feature (387)..(387): n is a, c, g, or t
  misc_feature (393)..(393): n is a, c, g, or t
  misc_feature (407)..(407): n is a, c, g, or t
  misc_feature (410)..(410): n is a, c, g, or t
  misc_feature (414)..(414): n is a, c, g, or t
  misc_feature (423)..(423): n is a, c, g, or t
  misc_feature (431)..(431): n is a, c, g, or t
  misc_feature (440)..(440): n is a, c, g, or t
  misc_feature (442)..(442): n is a, c, g, or t
attccaaaagagttccttaacaaagttttatgacccagaatgaaacaaaacaaaacattggtgttattgagggaattaaatctaacattgagagaaatttggatttaagaaatatgttatttaaaaagtatgttacagtattaacatctggcaatatataatctattcagtcctttctagccatttgttggcaagaaataataattaaattttttattaaaacaaaacttttttcattgggagttattaagagcgcctccttttggtgnattcgttacaaataaaaatgaaatatttattttgcatttttattgngcttnatgttggttgcttanagttggtctcttgggcttaccttccnagttgggagatggggaaagtgcccantggaangaaattttaaaagnatncttnttgggaggntgaaccanttttttttncntttataaggggaaagcctgccaaagtttgtcatacaggtttacgtccccttttaaaccaaaaatacaa

SEQ ID NO: 628687 - DNA, 676 bp, Homo sapiens
cccccagcctcgctgccgccttgcagtttgatctcagactgctgtgctagcaatcagcgagactccgtgggcgtaggaccctccgagccacatgcaggatataatctcccggtgtgccgttttttaagcccgttggaaaagcgcagtattagggtgggagtgacccgattttccaggtgccgtctgtcgcccctttctttgactcggaaagggaactccctgaccccttgcgcttcccgagtgaggcaatgcctcgccctgcttcagctcgtgcacggtgcgctgcacccactgtcctgcgccccctgtctggcactccctagtgagatgaaccctcagatggaaatgcagaaatcacccgtcttctgcgtcgctcacgctgggagctgtagaccggagctgttcctattgggccatcttggctccaccaccctgagatagggtctcactctgtcgcccaggctggagtgcggtggcgcgatcacggctcactgcagcctccaactcctggactcaagcgatcctccctcctcggcatccctggactataggcgtgagccaccgcttacgggcgaagacttgcttgtcccgttgtccttgccatctaagtggagagcctacgactagattgcatctttacgtcctgcgcggaggctgtacacacttgcgaagtctg

SEQ ID NO: 628688 - DNA, 883 bp, Homo sapiens
  misc_feature (439)..(439): n is a, c, g, or t
  misc_feature (607)..(607): n is a, c, g, or t
  misc_feature (641)..(641): n is a, c, g, or t
  misc_feature (667)..(667): n is a, c, g, or t
  misc_feature (700)..(700): n is a, c, g, or t
  misc_feature (718)..(718): n is a, c, g, or t
  misc_feature (748)..(748): n is a, c, g, or t
  misc_feature (760)..(760): n is a, c, g, or t
  misc_feature (783)..(783): n is a, c, g, or t
  misc_feature (840)..(840): n is a, c, g, or t
  misc_feature (846)..(846): n is a, c, g, or t
  misc_feature (858)..(858): n is a, c, g, or t
  misc_feature (877)..(877): n is a, c, g, or t
tctctctctctctctctctctgctgctactactccatctaatgctcctgtctgagctctcgttgaacgcatcatgctgcgcgttgcacgtgcgcttgatttcgtggcgcattgcactactacgtccagcgtcatacaactgcagacaacacaagaggtatacattggctcaggtgtacttgcgggctcgtatgcgtgcgatgactgagaaggcaacgacagagagtagcggacgtagctatgcgtagtgtgagataatcaatatttcaccaagcaactcatctattcatagacactacacagcatagggaggcatggtagggataggccgatgtagatagatctgccctactagagataccgatgcatcgactccgacgtcacactaatgcatcgatgtgccctcatcgtcacgaacgatctgcaggacttcacaagtntgagacagtgacgacttatgggctacggtgactacaggagtagtgcggtcggaggcacagtagagtcgtaggacgcagtagtacaactagtaccactcatacttctgaagcactaatccatccgttgctatcgtaagtttgctccgatactgctatagttcgagtttngcttttgattggcaagatatgcgaagtgtgccanccagctgcgatgttctgattatgcgnacagttactgatgccagtgtgatcgtgactccngtgagtagttgaccttgnacactttcgtcttttggaatcgcacaccgnctctgtgacacnatgcgtcgatacactgggagttnactgcggatgaaacacggaagagcagacagacagtgcatagtacacgcatattagcnacgtgntacaaatgagancacacacggagacgtgtancatctg

SEQ ID NO: 628689 - DNA, 445 bp, Homo sapiens
gaggaggtattataactcttggaaagctggaaattctactgtatgtaattctctataaagattttataacttgtctttaattaaattgtaattacaggccaggcatgatagctcatgcctgtaatctcaacattttggtaggccaaggcaggagaatcacttgaggccagaagtttgagatcagtctggataacatagtgagacctgtctctatttatgtgttaaaataataatagtagggataataatcaattgtaattatagttattcctaaagaagttgctttagatatattccttaaataaggttttaaaagtgaaaatttaccttaaatctttttttgaaaaatgtcattttcagatgatgcacctttttcagaattactttaaacctaccgttcgttatggctatgaaggtgtttttttttccctttaatttgtgagca

SEQ ID NO: 628690 - DNA, 879 bp, Homo sapiens
  misc_feature (117)..(117): n is a, c, g, or t
  misc_feature (119)..(119): n is a, c, g, or t
  misc_feature (124)..(124): n is a, c, g, or t
  misc_feature (126)..(127): n is a, c, g, or t
  misc_feature (129)..(129): n is a, c, g, or t
  misc_feature (150)..(150): n is a, c, g, or t
  misc_feature (155)..(155): n is a, c, g, or t
  misc_feature (170)..(170): n is a, c, g, or t
  misc_feature (294)..(294): n is a, c, g, or t
ggggggccgtgctcgagtaggaggaggacaggcctcagtacatcgcttgagaagggaggataaaaactttcagaatgagcaaaacaccatcaacgttaattccagagatggaacatngngtttngnngngagaaaacaacccatttgaanagaanaccactaatgagaanaccactaaagagagacatcaagaatggattcagcagaatcatttcacgttttgaacagcagcagtttgagagggcaaagccttgatcagggatcagtcattaaaggagggggggggggtattantaaaccctcttatgatgattagaagagaagggcagccctctccaccttttggtactttctattcaacttgcactgaccataaatggttctcttctgaacaagccccatcattgggtgaacctccaccctaacaaagtaggatgagggtgggggctaaattaattggagtggggcgaggagagagccagaaaacatagatccgagggcagcagtgcttgggggagaggaccaaaaaacagattctggagcagcaagcctggatgggaatttctaagctggggcatggtgggtttggctttctttcctctttggatatgaaaagctatttcattataacttgttatggggggttttacaggcgaggagacaaaagggggggaaaatgtgcctcttctactgggaaaatgggttatgataccaaggaggataagggtgtttgtgaattggagggcgccttgggtgataaacctttatggggggaactgaaatggtacttggcgtacttcagataggagggtagtttctgggcgaggagaagagaaaaagtctaggggggaaggagcaggtgagggggcgtgtgggggc

SEQ ID NO: 628691 - DNA, 959 bp, Homo sapiens
  misc_feature (9)..(9): n is a, c, g, or t
  misc_feature (74)..(74): n is a, c, g, or t
  misc_feature (86)..(86): n is a, c, g, or t
  misc_feature (94)..(94): n is a, c, g, or t
  misc_feature (101)..(101): n is a, c, g, or t
  misc_feature (197)..(197): n is a, c, g, or t
  misc_feature (199)..(199): n is a, c, g, or t
  misc_feature (204)..(204): n is a, c, g, or t
  misc_feature (206)..(207): n is a, c, g, or t
  misc_feature (209)..(209): n is a, c, g, or t
  misc_feature (230)..(230): n is a, c, g, or t
  misc_feature (235)..(235): n is a, c, g, or t
  misc_feature (250)..(250): n is a, c, g, or t
  misc_feature (374)..(374): n is a, c, g, or t
ctgtcaggnccaaaattccttccagtgttacctgaagaaacatcccatccaaacccttcaaatgactccccctnctggaccacccnttatatgncactggntcaatcatgccaaacagtgtcattcttcgaaagggaggataaaaactttcagaatgagcaaaacaccatcaacgttaattccagagatggaacatngngtttngnngngagaaaacaacccatttgaanagaanaccactaatgagaanaccactaaagagagacatcaagaatggattcagcagaatcatttcacgttttgaacagcagcagtttgagagggcaaagccttgatcagggatcagtcattaaaggagggggggggggtattantaaaccctcttatgatgattagaagagaagggcagccctctccaccttttggtactttctattcaacttgcactgaccataaatggttctcttctgaacaagccccatcattgggtgaacctccaccctaacaaagtaggatgagggtgggggctaaattaattggagtggggcgaggagagagccagaaaacatagatccgagggcagcagtgcttgggggagaggaccaaaaaacagattctggagcagcaagcctggatgggaatttctaagctggggcatggtgggtttggctttctttcctctttggatatgaaaagctatttcattataacttgttatggggggttttacaggcgaggagacaaaagggggggaaaatgtgcctcttctactgggaaaatgggttatgataccaaggaggataagggtgtttgtgaattggagggcgccttgggtgataaacctttatggggggaactgaaatggtacttggcgtacttcagataggagggtagtttctgggcgaggagaagagaaaaagtctaggggggaaggagcaggtgagggggcgtgtgggggc

SEQ ID NO: 628692 - DNA, 421 bp, Homo sapiens
  misc_feature (239)..(239): n is a, c, g, or t
ctcgctgtgctggtgccattttgtgctagtgagcctgataaaacctggcccggttctgtgtgaaatgtgggcgggggagccatggatccctggaatggctggagactctgtcagtgcctagtgtgattcttggagctgtgtgtgtgcttgctggctgtgctctgcagctcctgcctcgtacagagacctgggactgcagtgctgccatcagctgacctagctagatggttgatctgatncttgctgtggctgtgatgcttgatgtgaaactgtgaatgtaggactctgagctgtggaaaccaaggaagctgttatatgattggagctgtgattgaaagaagtgcaaatttgaagatgaaagtgttggtaaatccttgaccgaaaatatgaaaattaccctcctgatgtgtgaacacaagag

SEQ ID NO: 628693 - DNA, 190 bp, Homo sapiens
  misc_feature (138)..(138): n is a, c, g, or t
  misc_feature (151)..(151): n is a, c, g, or t
accgggtagcttggccaggttgtgaggaaccgcagcgccgcaggaccgggccgctgagcctgcagccgccccgcccgtgacctgcgaccctagaccccgactccctttggctcagccgcgcgccccaggccggcccgnggcgcgacagganggatgagcggcgggcggcggaaggaggagcgctcagccg

SEQ ID NO: 628694 - DNA, 347 bp, Homo sapiens
atggagttgctgtggttcaaacgcttctgaaaatttcagagttctaggaaaccaacaatcaggcctcccacatagatcaaggaattgaaacttaccagatcacttcatctggacaatgagatactagacaccttacccatcatgagtgcctaagcgaccacctgctattgggttaccagctcctcttccatatccctccctaattcctgttttcccacacatgattacatttctttccagctatacaaactcttaattttagtacattagggagatggatttgagactgacctcccttctccacagctgcaacaaccaattaaaggcttcttccctggcaaaaaaaa

SEQ ID NO: 628695 - DNA, 205 bp, Homo sapiens
ttgatatagaggatccccctagtttagaagtttcaatagcttacataatataatgtaaatgctatgtaagttctattttatttatattattttattgttgtactgttattttttctaatattttctattcacaattggtcgaatccacaaaggcagaacacacagatacagagggctgactgtccatatatgtatatgtacatat

SEQ ID NO: 628696 - DNA, 227 bp, Homo sapiens
gaaacgtttaccaagaaccttgatgcccaaagccatacccaatactaattaaattaaaatgtctcatgtggaagatgaggcagatattaaagcttctcaggcgattttaatgtgcagcaaagtttgagagccactgcttaatttgagtttaggacgagaaactgctcctatttggtgggaccttgggcaagtcagttttaaggtttgtttccctgatctgtaaaaca

SEQ ID NO: 628697 - DNA, 871 bp, Homo sapiens
aaatgccaaaataatattttcataaccttttttggtttgagacattgctgatacctttttatgtttgttttccagagtcaagaaaatgtttttttcttttgagctgtacatagcttacagtaattagataaattacactttgtgagaacaattgaaacactaacctttctctctacctgatgtctccagaatttggaaagtatttgtgagtattcttcactttggcaatatagttatttgtacaaattcgataggaatctgttttcttttgtaacagaacacagttggatacactgattattttgccaaggctttcattggaatggcataattttttaatgaccagactgctttgaggatttgaagttgactttatagagcctataaaaagcctgttggaaaaattagcctgataccttgtctacacagtttccttacaaggttcctgaccttgcggtagtaaagaatgtcactctctggcaggcccaggagcctcaggatatttgggaaccttgacaagagaggagtgtatccaatttatacaggattaccagtgcgctgattgtgaatccttgtttgggttttagctgagaattttaaaagtgatggaaatccttttgaaaagtccaagaagggcaaatttagaagaggcctaatggggcaaaacacatttggggtggttttcgcatatcggggcgttaattaagttgaaatttttggaaaagggcgcagatggcttacaacaggggtggggagaagaattttcaaaaagaccttgggacacgactgaggaattatcaaagatatggtgacaaaattattggagaggaaatttatgacgtactcatggtgtgtattagtaaataatata

SEQ ID NO: 628698 - DNA, 144 bp, Homo sapiens
  misc_feature (84)..(84): n is a, c, g, or t
ctttttttttctttttgtctgttagttatttctccaggggaaaaggcaataattttttaagacccgtgtgaatgtgaaaaaaancagtatgttactggttgttgttgttgttcttgttttttatagtgtaaaataaaaatagta

SEQ ID NO: 628699 - DNA, 1382 bp, Homo sapiens
gatactgaggaagatgaacccacaaagaagaaaactatccttcagggcatccagtgaggtggactggtctatgtctgctcttgcattctcgcctaacacttacaatgaacctgactgatgaagagagaactaatcagggttgctcctgaccccatgtccattctcccgcaaaaccctcggcactggtttcgcccatgatagctacacgcccatcacagaacgtgggcttctagagagcacaaggacattcctctactatggccgcgctggttgatgggcaccatgaacctacacaactacgctgtcagcccatcgtgcataatcaaaggctagcatgaccaaagagtgcttgcctcttgacgaatggtgcacaaagcgatgatcgacgcaagaaggacgaagcacgacaagatgatagcaggacaattagatccccgcgcaaaactgtatgtacatcacacgtccctgtgaaaaggcatgagaccgatactgagagattgagaccactactcgccttatcccagtcacccaactgataccactggaagagcatgcctcgcaggacaacggaagcacaaggagtccggctttttccaggaactggaatgcatcgcctcagattggcactcccccatttggaaggtctcaggacgaatgggcaacgcaagcgctttacacacgatagaggagcacccccatatagcgcgattaggccttaccacgtccatagggggagaatatgaatctaaaacaagtgataaacaagaacttccaagaatttttggacgcaacaggttactaagggtcacgaattgtccagacatggacacaggatttaggtggacattttaattctaagtacaaggggagtaatcaaatttgcatcacacgaacggtgaatgggggcctaaacactaaattccatttgtccaaccaaggggaaaccaccacggacatccggcctgaggattacaaccactcacactaccagatgggaacaacaaatattggaacccccactaaggaattgacgccataaccctttacaagaacgaaaattgcaacgcaaaatagcacactatgataaggttacggggcacaggcgaaggcgcacagaaaggaaagaggaatacccagcaagggagaggaaccaagacaaaaccgtacaaacgtaatcggagagacggcagtacaaaaacgcggtaaataggacaaccaatgcgctcccatgcattcgaggaaggcccgccaaagtccaccatcggacgtttagaaccacagatgtcagaggataggaaacaggaagagacagtcaaaacaaacaaggagagcgtacaatagccacagcaccaacatcacgacatcgggctcgaatggagacc

SEQ ID NO: 628700 - DNA, 102 bp, Homo sapiens
acgtgacgcgtgagtgtatgcgcgtgcatgcgtgtacatgtgcatgtgtgtgtatgtcagcctgcatgagattgcatgagtgcatgtgtatacagtgtgcat

SEQ ID NO: 628701 - DNA, 390 bp, Homo sapiens
agggctgaggactaaaagttctgaaaaagtagagggaacgctgcaatactaaggtggaattcctgagtgagggttaaatgccaaatatagaatattttcttccccaaatgaacagttttctgtgctctgatcatccccatgagcctaatacatttttcaagtcatattttaaacacaaaaaagaggccgggcacagtggctgacacctgtaatcccagcactttggcaggccaaagcacgcgaatcacttgaggtcaggagttcaagaccagcctggccaacatggtgaaaccccatctctactaaaaatacaaaaattagctgggtgtggtggcacatgccggtagtcccagctactcgagaggccgaagtgggagaatcacttgaacc

SEQ ID NO: 628702 - DNA, 1079 bp, Homo sapiens
tccggtggttcagaagaatgatgactcctctttgctgagaactgttcatccttcttcaagaagaagcttgccaggccgggcacggtggctcacgcctataatcccagcactttgggaggccgaggcaggcggatcacaaggtcaggaattcgagaccagcctgaccaacatggtgaaaccccatctctactaaaaatacaacaattagccaggcatggtggtgcatgcctgtaatcccagctactcagaggctgaggcaggagaattgcttgaacctgggaggcagagggtgcagtgagccgagatcgtgccattgcactccagcctgggcgacattctgtctcaacaaaaataaaaaaaaaaagctggtctaatggattggcctaaaaattgcagggagctccaaagcaacattgtggaccgtgtcgttcctcaaataaaagctcgagggatacatccgtgaagtccgttaagtgctggccacatttgaggggcaaactttacaggcttcatcatttcgggacattctacgagaagcatcccaggtgaattggcgtataagacctccagaaacactgctcgttctcatggggatctaccggatccacaaaccgttgggattaacctccatacgggggaggtttacactcaatcatcccctgttactccaggtgtaatgcaacaccctttgaatgtaccatacaacttgctccaaatcacaaggcaccttactctggacaaatgggcaaagagtgagtaaaaagccatgcatggggcccccacaagtatggcaactatgcaattggcgggggccagccaggttatcgcggggccaaaccatcgcacaagggccctaacagagggataccaagagcccggcgcgacaacagcagaaaacacggttcccatggagaggcgaaaggaagcgacagccacaccggccacagccgttatcacaacaaacacaaagggagtgagaacaacaagacaggccaaagcgcaaacaaccaggtggagcgggcaccaaaccggtcacacacgacaaaatcagacaggcagcgtggaccaccaccagctac

SEQ ID NO: 628703 - DNA, 716 bp, Homo sapiens
tcgatctagaggatcccgcccaccgacggggtgaggatggatgaatggatgagtggagggtagatggatgggtgagtagatggataagtggatgagaagttgggtggacaggtggatggatggatggaagaatgggtggatgggtagacaggtgagtggaagagtgagtgaatgggtagttgggtggatagatgggtgggtgagtggatgggtggatggatgaatggatggatggatggatggataaatggccaacaacttcaaatcccaatgacggactggtggggtgggcactggagacggaaacacataggtgcacaggtctgttggtacagaacatgctcaccagctcattcccactggcaatggacagggagagcggggagtggccactccacagcaggttaggatttgctccgtgggatagaaggagccggactatgtccctggcacactgggtggagcgctccacccgacggggtgcgggtgcggacagctgttaaaccttaattcttggtcggtctgtcggcaactttgggaaccaccagtaggatgtggttaagattcagttcttgctgagctaaggaagcattctcatttcttttaattgtctggctcattctagtcctaattaatgccaccaagagtttagttgatgtcaatgtcacaaattaggggtgatcccccattcaggtaagagaaggaaaatgagtgcc

SEQ ID NO: 628704 - DNA, 417 bp, Homo sapiens
ctgtgatgtgaagagtgagctgaactctcatttccccaacagggacctctttttatggcaaaacgcagcaggtttcatctcgtcagggaaaagggatagaaagtggaagagaagtcgacctagtaaatgagggtcgatagcgggtggttgaggagagggaaggcaatgagcggttgtcgtcgagatgcgagatagaagtctggcagctagaaggcagattgtagcgacggaacccctagtgctctccctgcttttttttgttgttgttgttgtgcttaatgttagaaaataacattactactatggaacgaagagaatttttttttcaaaaccatgtcttgccattacagatgagacaaggcaaccccatgctaatacgctgttgaagaaaaaacaaaagttttttttcccttccaa

SEQ ID NO: 628705 - DNA, 259 bp, Homo sapiens
tccgtgactttgccaagaacctcagtaagtacgctcaaaccatacggtgaaggttctacgctcaaactcttcttccctaaggccaagccactatcatctgatgtgatagggatgggtactggttggcagaaattaatcagctcccaatgagagcccacggaactaagtagggtcccaggaaaaaaaacgggaggtattacacagagctcagcttctgccaaattacattcctcaaacctttagagagggtaaatagggg

SEQ ID NO: 628706 - DNA, 182 bp, Homo sapiens
tcctgatagagcataccctgtatcaaatggttcttttttttcggagtagtaagtacaatatgttgagattattcctgaagcctggtaggataagaatataaacttcagtgtgacctgaaaaatcagaataggcgttgggatagaaatgtggtctcctccctccgggcgggggtcgaaagaaa

SEQ ID NO: 628707 - DNA, 160 bp, Homo sapiens
tcactggcatggacgtgaatggcaggtacacggccgaacgggcccagaggtgctggagtatctagggtaaccctgctaattacccggtgtccattcgatttggccggccccgtctcacttctaatgaggagcttacgcttggcctacagcacatgccgaa

SEQ ID NO: 628708 - DNA, 121 bp, Homo sapiens
aacttgggactctgaggactgtgcgatgtacgccgcggcgcccctgctgtctttgcagttggggtgtagcgtgcagagaagtgtcctagaagaccccggggcgtgattcaaaagctctcga

SEQ ID NO: 628709 - DNA, 427 bp, Homo sapiens
  misc_feature (32)..(32): n is a, c, g, or t
  misc_feature (74)..(74): n is a, c, g, or t
  misc_feature (91)..(91): n is a, c, g, or t
  misc_feature (95)..(95): n is a, c, g, or t
  misc_feature (128)..(128): n is a, c, g, or t
  misc_feature (172)..(172): n is a, c, g, or t
  misc_feature (200)..(200): n is a, c, g, or t
  misc_feature (271)..(271): n is a, c, g, or t
  misc_feature (281)..(281): n is a, c, g, or t
  misc_feature (301)..(301): n is a, c, g, or t
  misc_feature (313)..(313): n is a, c, g, or t
  misc_feature (414)..(414): n is a, c, g, or t
tctgtgtctctctgtctcttcagatgtctgtntcaccagggagaatgttttctgaagcctgtccaggaaatttngttctaagaacagcctnctantttgagcatcttcagggataactcgtgcgatgnggctggcatgctgtccacagacagtggcaccatggcggtggggngtgcggcctgccttcgtctgccggggcngccgtgacaaaggaccacaggctgggccgcttaccccacagaaatgttttttctcacagttctgggggctngaagccccanatccaggtgtccgccgattntttttttctgtntctctctcctgggcttttggttggccatgcttctttgtccgtcctctcttggtcttccctctgcacacttttgtgtgtcccattttcctctttttaggtcncctgttgttttgg

SEQ ID NO: 628710 - DNA, 361 bp, Homo sapiens
ctgcactggttccatcgccctgcttgtagcctgttgtcacaggctggtcatgcgacgcttataatctctagttgaacctgatgacgaaacctgagcgaggagacaggccatggatttgcaaaacagcagcaacaaccagattccggtgattcgtccctgcccgcagaaattgggctgcgcgattatcgacgcacagggccgtgaagtgccgatcaccgaagaaatgatccaggacgcctgccgcgaactggaacagcgcttggtcaagcctgctgagcaagactgacagccctaactcccccttgacccggcctcgctgccggtttttttatgcctgcgtctacaacaggacagcccccag

SEQ ID NO: 628711 - DNA, 364 bp, Homo sapiens
gttgacatgatacgaatcgagctcgtgtacctgtgggtatcatcaatacggaagggtccccagcgttggggagagccccaagcttgagaacaagtaagtgaacacattagttgtactgaaccacttgttacgatactgctagatcacaaacaacctgtgtgtaatattatttccttacacaacgtagcacccttcagcaggaccctataaaactttcctccagcccttgcctctttgcaggtagccccttctctgctgagctgcccactgcaacatattttcacaatttctctaataaatctgcccttctttacctacaactatcttggtaaatggctttaccacctgcaaaactgaccctagg

SEQ ID NO: 628712 - DNA, 483 bp, Homo sapiens
  misc_feature (48)..(48): n is a, c, g, or t
  misc_feature (104)..(104): n is a, c, g, or t
tgggttttttttccctcgtgtgtgtgtgtgtgtgtgtgtgtgtgtgtntgtgtgtgtgtgtgtgtgttaatgagaccaaggtcttggcttctgtcacccagggntgcagtgcagtgttgcagtcttggccccatgcccccaccgcagcctcttggaatagctgtcttgcaggccaggcacggttagtcacgcctgtaatcccagctcttagggaggcagaggcaggaggatagcttgagcccaggagtttgagacctgcctgggcaatacagtgagaccctgttctccacaaaaagaaaagaaaaaaaagaaaaaaaaattttaaaaatgcaaaattaggtgggcatcgtggcacgtgcctgtaatcccaggtaccccagaggctgagacaggagaattgctggaaacctggaggcagagcttgcagtgagctgagatcacggccctgcactacagcctgggcaacaaagtgagacttgtttc

SEQ ID NO: 628713 - DNA, 162 bp, Homo sapiens
ccgcagctctggaggctgaggccgcagacttgctggagccctaaagggggcggttgctgggcgccaaggcatcacgagtaacgtgtatgctcagactctgctgacaccaaagtattttaaacaaataaaagggctcggggaattctgatgtccgtacggaga

SEQ ID NO: 628714 - DNA, 1610 bp, Homo sapiens
  misc_feature (175)..(175): n is a, c, g, or t
  misc_feature (632)..(632): n is a, c, g, or t
  misc_feature (676)..(676): n is a, c, g, or t
  misc_feature (745)..(745): n is a, c, g, or t
gcggaatagagaacgcagctcagcctcatggcgtgtcgtgtggtacccggcttgggcaggacgatgagccctagaaacagtgctgcgaaatcctcatctgcgcaggcgccatgaccagggaccaaagagtccagtagtccgcacccaagtaattagcgggtagccgctgtgcagngtatcgcgaagtagcctgctcacacaccaacgcgagcactcatctaattacctacgcacgttacttcccgagggtcacattagatgcatgccaaatatgaataacgacccgatacatgtcgaaatgggatctcattgtcgtcgcacccattcacctgaggaagcgatcgaagatacaagtgacccgatggatgcagtcacatcccgatgctggtccactccttcatcacacccccctcagtcacgttacagttgacgagcacttttctccaggatcacacccgtcacacatcccatcagatgtcaacgtccaaacaaggcatgtccagacatcctccagctcctgatatcccgtacgttattaatcccttgtctccgaggtggtgtaggacagatcaccccacctcttggctggcaaggtcagcctgtatatcccatcacgggtggattcaggcaancctacccatcctcactgtcagtcgacacttccatgtccaggttntcccatcatatgattcccggtcctcctggtccccaacaactggcatccctcatccagctattgtaacanctcaggtcaaacaggaacatccccacactgcacagtgcacctaatgccacgtgcacagcctccagcatgcaaccagcagcaacaggcagcagtgagcccaaaaagacctccacattcaagcaagcctctgaatgcttttcatgttcatcacatgcaccagaacatgagagcgaatgtcgttgcatgagtgtactctaaaagacacgtgcagctatcaaccagattcttggcagaaggtggcatgccctctcccgtgaagagcacgctaaagtattcatgcaattcaagccacggcaacgcaaagcacagctcacaatatgcaagcatttatcccaggctgtgtctgcacgcagccacattatggtacgcaaaacgcaagaggcaagagcgagaaaactacggaattctgcatccaggtgaacaaacgacgctcatttccaacgtggcaagccaaggaataagacacccaaggaactcttctggagatgcgacgctggtgacaaacccagactggctcaagggtcatgccagattgaaccaaaggaaaccttgactccaatacaaccccgtacgtccggaaagaaccgcgaaccaatacagcaagaagagaaacacacgacacatgaaaggccagacccaaaaaccctaaacggttgaaaagggaggcaagcgagaaaaatcaaacatgatgcaaataaaatataacacaaaatgataacacagacataaacaacagacctgaaagacacataacaacgctaaaccaaaaaccaaaattaaacaggggaggaatcataatataactaaactacacaacaacatagctacaaacccaacactgaactctttccttcttgcaagtaaa

SEQ ID NO: 628715 - DNA, 635 bp, Homo sapiens
cagggattggaaaatatcatgtgtcgtctactgagaagggcaaggataggaatgagcaggttagggcaagaactaagaattgagttttgaatgttgttttgagactctaagcagaatccaaatggatgcatgctcagtatggatgatggatatctatgtcgagagctcaggccagaggttgagagtatgaacataattccaggagtcagcagacatacgctaggtatataaagctaagaaatcagatgaggttctttttaaaatcttacttagtaacaagtacagaaatattgctaagtgcttcacaaatattaactcaatcctcttaacaactctctgaggtacgaactattattactcttatattccatattaaagataagagaaaactgagaaacagattatgtaaggcaattaggccaaagatcagactatcggtgagcagcaaatctgggactgaatccaagcagtgtgtgccccagtctgaattcttaatactaagctaaattgcttcctaatactctaagggcaaaaactcacgtggaaggagagaagaggctccggaactgagccgcagggcactcaacttttagaagttgccaaaaggggaagccataaaattaaaaggagctagt

SEQ ID NO: 628716 - DNA, 810 bp, Homo sapiens
ttgcgatcacctggaggagtattatccagctgttggatttttggccacggttcagtcagttggggttgccgtgctcccagaaacagttgtaaatgaaagtattggcatgtcgtagaaggcagcagacaaaatggaaagtaatatgagagcagaagagtaagcatttgccagcctatctaatttctttagttctcgtatttgcctccagtgcagtccatgtgtcctaagggtatacctagcctactgtactattgtcacaatgcgtcaatttcagcaccgatgggccatgtaaataagatgatttaatggctgattggaatcctgtagtataaaataaaaagtcacaatgagtttgggcatatttaagttgatgattatggagccttagaggtctgttgatcattggttcggctgcttttatgtagtttaggctggaaatggtttcacttgctctttgactgtcagcaagactgaagatggcttttcctggacagctagtataaacacaaaatctctgtaggtctattgcacctatctcagccataggtgcagtttgcttctacatgatggctaaaggtctgtcgaagtgggatcctgatggaactaaggactccaatgtcgaactcttctttggctgcattccatgttttcattcacttagcaagaacaggcctgaacttggaggacttgtctgtaaccaggaacattttggtaggggtcgaagtgctaataaataactcaaccaggtctacttaagaatggctgtatatatcaccatctcaataggttatacatctatgcatgtcaata

SEQ ID NO: 628717 - DNA, 400 bp, Homo sapiens
  misc_feature (386)..(386): n is a, c, g, or t
  misc_feature (391)..(391): n is a, c, g, or t
tctgacttattttacttagcatagtaacctcatagcatgtgtcaaaatttcctttctttttaaggctgaacaatatttctttgtatgtaccacattctgtttatctgtccacacattaatggacactttaattgcttccaccttttggctgttgttaataatgctggtatgaacatggatatacaaatatctgttcaaggccctgctttcatttcttttgggtatatgcacacaagtgaaattgctaagatcatatcataattctatatttaattttttgaggaattgacatagtgttttccacaagtcactgcaccattttacatttctaccagcaatgccagaagagttcgagtttttccacgtctttgccaatatttgttatntttcngtttttttc

SEQ ID NO: 628718 - DNA, 115 bp, Homo sapiens
aaaaaacaaaggctttaattcactccagccaccctctgtcccgcagtgtcccaggcagaggccctctcccttcccatattttttcgtgggaggaggaaatctaccacccagcaca

SEQ ID NO: 628719 - DNA, 105 bp, Homo sapiens
  misc_feature (5)..(5): n is a, c, g, or t
aatgnctctggaaaagcgggtaactacggtgatgatcgtcgtgatggcagaggacgctatgatcgaggcggctaccggggccgcggcggcaaccaagtgggagtg

SEQ ID NO: 628720 - DNA, 935 bp, Homo sapiens
  misc_feature (902)..(902): n is a, c, g, or t
gtgagagaatgacggcggaacgcagttgttggggtggctggcgcataatccttttttctattcttattttgcaaggtagtattaagtgtccatatttctcaagccacattcaaggaaatcatgtcttaactattttggatgttgcctctccttcatcttgtacatgaaactccagcagatttaatattggcatccatcatctagtcaaacctctcacatgttcttcaaatcaatcaaattggggattgtcaacattttctgtgtcaataaaaggtgtggaattagtagattcgatgaagacctgtttttccttgccacattggactttccgacgccatttggattgggttaaaaaaacgggggaatttaaaacgacccttctttgccctgagtctcttaggacgtgacatgcagaaagagagagtgaacctctgaaaatgctggtccgtgacttcgtggccaccccgacccggctgtggtggtgggatttagttcggctatcgggccagcccaacaatgagaagtcctcctgggagcgatcactcggatggccacggggaagctatgcaggaatagatctggtttcgcctttactagtcgagcttaaacaagagaacatgtctgtagcctgtattgagcgaggtagacaagctataggatcaggaatgtaatattgagcgttgatcacttcttgggagtatcgcagggggcgggatatgtatacggtcgagatgattggttatcccaccagtgccgaatgggtgaaatcccattcggcccttaatcgcattcgccactccaaaggtgcggagtgcgcgccgacaacacctaccgcgggggagcaccttacgcacctagatcgcgggagcgcggtggtgtgacagtagcatgacgcgagattnaaacaggctgatttgtgacgagttctccgccca

SEQ ID NO: 628721 - DNA, 233 bp, Homo sapiens
gaagcgggaggatcgcttgaacctacaagttcgagaccaggctgggcaacatagtggaaccccctctgtacaaaaaaaaaataacaaaaattagctggtgtagctgcatgtgcctatagtcccaactactcgggaggctgaagcagcggaagggctgctcgagcctgggagatcaaggctacagtgagccatggtcataccactgcactccatccagactgacacagtgaatc

SEQ ID NO: 628722 - DNA, 386 bp, Homo sapiens
  misc_feature (105)..(105): n is a, c, g, or t
gaacctcgagttatgggacgagaagaggtgtgagaatatggcgataagcgggagagacgtgtgagcttggggagattccccctgggaacctggggtatccacggnatctctgggatcagtgtcggaaactcaccctgcctgaggtgtagttagtgggagtaggatggagcggggcagtgcatgcccctcaagaaggagcccaggacctcttgccatctgggccatctcctaagctgggcccaagccccacaatgttttttctacgttctaaactggttcttcagttgacaatatcccctgaagggaccttgggtagggagtattttggcacacacgcaggccttgccagggaggaaccattgcgatatggtatctagcctggggtc

SEQ ID NO: 628723 - DNA, 191 bp, Homo sapiens
ggatccccatgcttatacacatggtagaaggtgaagggggaacaaggcaggtgacatggccggagcagggcaagagtaggggggaggtgccacacacttttaaatgaccacatctcacaagaactcactgttgagaggacagcaccaaggggatggtattaaactattcatgagaaaccgtcgaattcgag

SEQ ID NO: 628724 - DNA, 1064 bp, Homo sapiens
ggcggacgcggagatctagtgcagtcactgatctctttatctctgtgcgtgcttaaagttcagtgaccgtctctgaatggatgtcttcatctccgtctgaatcattacaaagcatactacagagaccatatcgtcttactgagagacacctgggtatatcctggacgtatcgtatgcgaaccatgaggttgtgaagccatgtactcaaagctctcatatgcactgttactctattggcagaggctttatgggtaggagcgcgtctgagtgcattgtgggaagcagcctaactcatggactctgagatacatgtcctgttaacatcaggttcattacccaggtccctatcctggcgcacaggcgcggcattgtgatgaattgctgcctagagaatggggaaccatgcctgggggctcgcccatgggggtgtgtaccagcatagcgggatcatgacgactgcacttaggcaggtaacgaaaatattgtccatggacagattgtgtagtggggcccacaagaggagcgaagtcctagagcatcagggcatgtgcatagagctcaattgggcgctggtcaagaagtgtaattagggggagccagggtgaaagtcgagcagagaaaggcattacccacacaataccaactgggccggaaaatcgtgggttttggagccttagctcgatgggtgacaaataccttgtgattgccttgtcctttgctatgttaatggatactttgggtcctccacgaggaaaagagctccctgaggttggggtgagacggaggaccggccgttatagcgttagctggttttgggaactatgagatagggtctcggtgtgcgtaggagcggttgatatcgaagcaaaaacaattggtgtgttaagttgctatgtcctccaaatgtaacttttataattaaaggggcttgtgaaatttaggtagaaagaatttatgaagttttaaaaggaaaaggggaaagtttttcatgtgcagaggttattggttggtggaaggacatgcattttaaatttcattgggaataaattgaaaaaaggattatg

SEQ ID NO: 628725 - DNA, 240 bp, Homo sapiens
ggagacgggggtctcactcggtcgcccagtcgggagggcaggggcatctcggctcgcggcaaactcggcctccggagtacaagcgattctctggcctcagcctcccaagtagctggggattacagggcgccggccaccacacccggtctaatttggcttattttaagtaagagatgggggtttcacccggaagggccagggcgggtctcaaactcctggacctcatggtgatccacccgg

SEQ ID NO: 628726 - DNA, 101 bp, Homo sapiens
ttcagttacaacatcaagcagtgctaacaaaagtcttggaatatttctctccacctgaccctaagtcccgaagttcctgacatcccataggcaggatgcag

SEQ ID NO: 628727 - DNA, 321 bp, Homo sapiens
gcgttcctgaggccttccaggtatcctcaatgcactcggggatgtaacacagcgattatctagccagaatgctaataggatgatgaggttgcatcagctcaagaaaagtgcagataccttcgtgggagcatccagtacaggacgtaaatagactctgtgatgtagtgagctctagggctgtagactatctaaaaagctatcaatgtgacttaactcgagcctttagttttcatgccatgtacatggatcacagtttgcttttatcttcattctaatatgtgaatttgggctcacagtataccgcctggactgttgaaactt

SEQ ID NO: 628728 - DNA, 132 bp, Homo sapiens
atcagggttgctgcatacagcctgaagtcggcaccactagagcaggttgccatccatgtaaaccacgagcgtcactcgtgcccaatgccctaatcatgatcctcccccggcttccaaactgcattagataaa

SEQ ID NO: 628729 - DNA, 149 bp, Homo sapiens
gtatggctagaccacaatttatatctccattctactggacacgggttgatggacagtcgtttccactagtaggggttattttgtatcttgctgctacagaccactcttgtgcaatgtctttaggtaaacatctgtcagcaggcgagaac

SEQ ID NO: 628730 - DNA, 2008 bp, Homo sapiens
  misc_feature (1998)..(1998): n is a, c, g, or t
taactcatgaaacttgagaacacgagaacaacaaaaatactttccttgaacattttcagctagaatgacacggcattctcctacataaaacattataattttcccactactccaaaggaatccaataaataattttacagtgaaggggcctggatcaaaactggcagtgacacctggcccctgacaagcctgagtcacaggtccctgtgcaggtcccagcgtccagtcctccaagaaccagcactgccggagcctcgctgtggtttcttccttccccgatgggaccagctggaatttccaagctgcttcacagaggccaaagatgacaacacgagaggtggtcaaagccaaggtttccctgcgctgcctttgtcttcttcccatggcctggcctgagtgctgcagctgggccccaggagatgagctcctcgcccaagctggagagcatccgctgcacccgccatgccgggaagagctcgggtgggctttctccatagcaattcttcgcaatggggtcccaatcggtgggatgaggccctgggatgaggtcctgcatttggccggacatgactcaatactgatcttcgactgccatgaagaggttctggaacaccacgatgctccaggagaagctcctggctgggctgcaggcagcaagagacatggccagcagccgtcacagcagcactgcttcacactagggctgtggacgttacagccctgcaccagcaaatccctcctctcgcaaacatagcctggttcatccacgatgaggagcttcccttgcacagagttctggcactgattccacgggtgactgctactgcccaggttaacctgcactttgcacgggctgggctggtcgtggtcttgaacctggaggagagtcctatgtctgactcccgctcttcctgcctgaaggtgctgctgaggacatgaatgaggatatctgggcaagggccccacatgcccagcagccccatccttgtgaatgattatagggagaaaagcattttccaggccaatggctcactccaggtgccaggggtcatgtcaatttgctctggaaaatatgtcacatcagtagcagcaggtgcagttggaatagccacctgctgagctttgtgaaaatccacaggcgttctccaaggatgcccgccttgcgcctcgcccagctagggagtcaggtgggggctgtgctggggatcaccagccctgcatcgttcacatcttttgggggtagcactaaccttggcattttcaccagacatgcagatttgagttcattaacctggtaggaaagaaaaattgcagggcttccatttaactttttataccatgacagccgtaaccctgtgggtcacagagctgatgtgagaatgccgccggtttctgggatgtctttttagctacacactcaggagcttgcaaagtgaccacaggcaggctctgcagaactcccaggcccagctcgagatgaacttggactacagttgcatgatccctgaccgtcagccaccactttgactggtggaccaccatggtgttttggggccccagaatttggcattcaccaaaatcagtgttctgtgggccctgaaagcgcaggatgtcgcccttgtctggagcaccccactgaaggggcagtggctcccgtggggaaggctgggagggcaagtcctgcacacctgagagcccagggagcccggctttcttgtcaaccacaggtgaggacaaggacaggaacacaaccaaatcagttgcacaactgtgtcttttagggtctgtctcatggcacattctggtgccaagtactgcatctatcagagtacagtcaggaaacagaaaacttaccacatttaagtatttaaaattgtagggcttgcacggtggctcacgcctgtgatcccagctctttgggaggctgaggcaggtggatcactggagtgcaggagttcggggccagcctgggcaacatggtgagatttcatctctgcnccggtgcgcc

SEQ ID NO: 628731 - DNA, 179 bp, Homo sapiens
aaatacgatggggtgacccctcacgagggatacgtgcttatagatcaaacaacccggtcagggcgtctccggcccggcggatgggcgtggatcgtgaccgaggttatactatggtcaccaatggatacctctagaatataccctgcaagcatgtcaactttgcactaaccagcagattt

SEQ ID NO: 628732 - DNA, 315 bp, Homo sapiens
  misc_feature (78)..(78): n is a, c, g, or t
atgaaatatgacattgtcttctttaattatgtgtaagtactaaacaattacgagtatgatgtagaggatagtgtatcngtaaatctagcagagaagcataccagcatagaaaaaaatttctgtacttaagttagattcaaagaaaggtaaatatcacctgtagtcagaggaagtcacaaagaagagtgattaattttctttctcttctgaaaatagtagtgattcttgcaagtggagataactttttgcttcagagagtcataatacaaaaaataataacacagtcttttggtggtggtagttacatattacggg

SEQ ID NO: 628733 - DNA, 470 bp, Homo sapiens
  misc_feature (15)..(15): n is a, c, g, or t
  misc_feature (464)..(464): n is a, c, g, or t
ttgtaaaaatcttgngaggaggccgggcgcggtgggtcacacctgtaatcccagcactttgggaggccgaggcaggcggatcacgaggtcaggagatcgagaccatcctggctaacatggtgaaatcccgtctctactaaaaatacaaaaaataattaactgggtgtggcggcaggcacctgtagtcccagctactcaggaggctgaggcaggagaatggcgtgaacccgggaggcggaggttgcagtgagctgagatcgtgccactgcactccaacctgggagacagagtgagactccgtctcaaaaaaaaaatcttggaggaaactcctgcagtcctggggtttgactaagtggtctgtgcagccccttccatctctaaggtgcagtgcagtctgtcatttctaatggcagaactccatggacatggacaacacaaatactggttaatggtgtttggtatantctctt

SEQ ID NO: 628734 - DNA, 1445 bp, Homo sapiens
  misc_feature (1435)..(1435): n is a, c, g, or t
taactcatgaaacttgagaacacgagaacaacaaaaatactttccttgaacattttcagctagaatgacacggcattctcctacataaaacattataattttcccactactccaaaggaatccaataaataattttacagtgaaggggcctggatcaaaactggcagtgacacctggcccctgacaagcctgagtcacaggtccctgtgcaggtcccagcgtccagtcctccaagaaccagcactgccggagcctcgctgtggtttcttccttccccgatgggaccagctggaatttccaagctgcttcacagaggccaaagatgacaacacgagaggtggtcaaagccaaggtttccctgcgctgcctttgtcttcttcccatggcctggcctgagtgctgcagctgggccccaggagatgagctcctcgcccaagctggagagcatccgctgcacccgccatgccgggaagagctcgggtgggctttctccatagcaattcttcgcaatggggtcccaatcggtgggatgaggccctgggatgaggtcctgcatttggccggacatgactcaatactgatcttcgactgccatgaagaggttctggaacaccacgatgctccaggagaagctcctggctgggctgcaggcagcaagagacatggccagcagccgtcacagcagcactgcttcacactagggctgtggacgttacagccctgcaccagcaaatccctcctctcgcaaacatagcctggttcatccacgatgaggagcttcccttgcacagagttctggcactgattccacgggtgactgctactgcccaggttaacctgcactttgcacgggctgggctggtcgtggtcttgaacctggaggagagtcctatgtctgactcccgctcttcctgcctgaaggtgctgctgaggacatgaatgaggatatctgggcaagggccccacatgcccagcagccccatccttgtgaatgattatagggagaaaagcattttccaggccaatggctcactccaggtgccaggggtcatgtcaatttgctctggaaaatatgtcacatcagtagcagcaggtgcagttggaatagccacctgctgagctttgtgaaaatccacaggcgttctccaaggatgcccgccttgcgcctcgcccagctagggagtcaggtgggggctgtgctggggatcaccagccctgcatcgttcacatcttttgggggtagcactaaccttggcattttcaccagacatgcagatttgagttcattaaccacatttaagtatttaaaattgtagggcttgcacggtggctcacgcctgtgatcccagctctttgggaggctgaggcaggtggatcactggagtgcaggagttcggggccagcctgggcaacatggtgagatttcatctctgcnccggtgcgcc

SEQ ID NO: 628735 - DNA, 604 bp, Homo sapiens
actccgaggtcaacaagtatcttgaccttctggcaccttcgtttgtaagtgtggagataacacccagctcctaggatggccttggagattaaatgagttgggataacaaatagcactcagtgagggcttactatgtgccaggtactatccaaatgcaaatttcaatttctaaattttaatctctctctttaatcaaacatacagctttgatatttgatatgcattcttgtattttcctcttaggtgcttttcagttatcttcctgagaatttgtgcattttatgtagaaataagataaaatacacaagatataatatcctactggtccttaattccacagcttaataactgtatgaacatgggaaattacttaatctctctgcgtctcagtttcttcaactataaaataacaatgctgctgctgctgctgctgatgatgatgatgatgatggtgaagatgatgacacctatttcatggggctgttgtgaaaattgagatgatccctgttaagtatttagcagagtgcctgacagtgagtgctcaatcacttattattattgctggtaatactgtcgttagcattacttttgctgttattaatgt

SEQ ID NO: 628736 - DNA, 481 bp, Homo sapiens
  misc_feature (187)..(187): n is a, c, g, or t
  misc_feature (206)..(206): n is a, c, g, or t
aacatttgttagaatcaatggccctacatggacacattatcacccaaaggccatggttcaagttagagatcactcttgatgtagtacatcctatgggctttgataattataaaatgacatgtatccaccattatagtattatacagagtagtttcactgccctaaaaatcttctgtgttctgcctanttatcccaccctcccgccnacccctggcaaccactgatctttttactgtctccatagttttgccttttccatatgtcatatcattggaatcatacagtatgtgacttcttaagattgtcttctttaacttacttagtaatatccatttaaggttcctgcatgtcttttcatgacttgatagctcatttcttttagtgctaagtaatattcgattgtctgaatatactactactgaaggacatcttggttgcttccaagttttgaaaattatgaataaacctgccgtagacatcc

SEQ ID NO: 628737 - DNA, 316 bp, Homo sapiens
  misc_feature (83)..(83): n is a, c, g, or t
  misc_feature (288)..(288): n is a, c, g, or t
gcggacgtatgcgaccaggccttggcatcgcgagtcttggcgcctcgcaacgtgtacagattgtgcatcgtgtgcgtgacgtnctcagctgaaccgagcgctttgaaatcaggcaggtagaacagcatttcggacggggcttcggttcccggagcaagcatgaaggtcactcgcacgccgtcgatcacttcttcgtgtaccggttcggtaatgatgtcggttggcacggcgaacgtcgacgtgccgtgcgaaggtggacaatccgagaccaccggatacctgcccctntggacccgggcgcaggaacgatccgtac

SEQ ID NO: 628738 - DNA, 539 bp, Homo sapiens
  misc_feature (103)..(103): n is a, c, g, or t
  misc_feature (163)..(163): n is a, c, g, or t
ctcagaaatccctctgttatggcatacaatcttttcaaggggaaaaaaaaaaaaaaaagaaatcccggctcccaccttctcgtatcagaaggaagacgttgtntgaggtcatcggttcacatggcagcagcttcctcgggtgaccctcctcattgggagcgcngcggagagatggacgcctccacgatgctgctgcttgcatggggcccgcacgaggtcctggttgagcttcactagaggaacactatcgcactctctgggtagctctggctgggtgggtgctttctcgtcacatctctatgctcctttagaaaaaatttggtacctgattccttaaaacgtcaccaaaagggagtacagtgctgtgttcataaaaaccagacatgctgccgaattcaaagtaagaagttccctcttcactgcctgcccctccttccgcagaggaaacaagtactttttcagaagacaaatgtccagacatactgtggcatgtatacaagtacatgcttgtacaaatcattaacaaatattaaaatggg

SEQ ID NO: 628739 - DNA, 118 bp, Homo sapiens
ttgttggcactacagcagtccacgtatgcctataatggttttaagcaaggtaaagacagcatattcaacaagcaagacacaatctctgaagggtcaagaggtgctcacagtattataa

SEQ ID NO: 628740 - DNA, 529 bp, Homo sapiens
  misc_feature (31)..(31): n is a, c, g, or t
  misc_feature (296)..(296): n is a, c, g, or t
  misc_feature (394)..(394): n is a, c, g, or t
  misc_feature (430)..(430): n is a, c, g, or t
ggcttggcgggtttcggcagtagctgtggcngcggtgccgggcctggggacgcgggcggcgaggccgccgtcgcagcctcctcgtctcgccggctatggctgcgctcggccggcccttcagcggcctccctctgagcggcggctcggacttcctgcagccgccgcagccggccttccccggccgggccttcccgccgggggctgacggcgccgagttggccccgcggccgggacctcgcgcagtccctagcagtcccgctgggagtgcggcgcgcggacgtgtttctgttcactgntaaaaaggaaacacaaagcgagaggaggaggcaggatgactgcattgttccagtaacgacaagaaacagggataacgtgggaagcagagctcctgtgncctggtcccctaatggacctggggaattccttttgntgggcaacaaatttcaaggggcatggtagaggggcatggagtaaatcccagtgtagtggcctttccataccgggatattagatgttattgtgaagaatg

SEQ ID NO: 628741 - DNA, 288 bp, Homo sapiens
accgaggggaaggatggggagggaggcgaggaggggggcggaagagagagggcagcaaggaagggccacaagatgccccagacccagcacaggcgcagacctggccgccggcgttgaaagtcacaggcaccaggaagtttcccccaatgccaaatgtgggcacagccggaatgcaaatgtggcggggggacagctctgtgggtgagctgagccgaggctggcttcacaaccacacccaggggtaccggggggagtatggttgcaaagctgaaacttaaaggaattgac

SEQ ID NO: 628742 - DNA, 466 bp, Homo sapiens
  misc_feature (221)..(221): n is a, c, g, or t
gcattgagatggtcatggggcatcatgtacactctaacttttcatttgttagctatgaaaccagaaacatccatccacatacaacagagttgcatctgtccagagttgaacataaattctcaaacttcctatcatggttggatctgagtttgttaacagatatcttgagggtttttaaattgactttgcaaacgtcagctggccaagagtagtgagtagcnccccgacggccttgggtgttctaaggtctatgttgatgctttttgatctgaacttctcacacatggtacatcttccgttctactgtgcagttaagtgcaagtaatagaatagtcttcctatttctttaaaatagtgtactcttttgcattaatataggaatatttgaaaaggcacattgctgaaggtgaaatgtttgaggccacaaactagatccttccagaaaagccttgggtaaaaaaaaaaa

SEQ ID NO: 628743 - DNA, 162 bp, Homo sapiens
ctggggaacaaggcgtattctcccagcctcgaggcatcctgcagtaagtggggactaccgagctctaccacccaatattttttatgttacgtcacgccagaagtagttgtgtgggccctcctgcataagaaaatccttgttacatgaatgcgcttgagtcca

SEQ ID NO: 628744 - DNA, 961 bp, Homo sapiens
  misc_feature (1)..(1): n is a, c, g, or t
  misc_feature (65)..(65): n is a, c, g, or t
  misc_feature (78)..(78): n is a, c, g, or t
  misc_feature (93)..(93): n is a, c, g, or t
  misc_feature (187)..(187): n is a, c, g, or t
  misc_feature (205)..(205): n is a, c, g, or t
  misc_feature (221)..(221): n is a, c, g, or t
  misc_feature (351)..(352): n is a, c, g, or t
  misc_feature (379)..(379): n is a, c, g, or t
  misc_feature (384)..(384): n is a, c, g, or t
  misc_feature (390)..(390): n is a, c, g, or t
  misc_feature (401)..(402): n is a, c, g, or t
  misc_feature (407)..(408): n is a, c, g, or t
  misc_feature (410)..(410): n is a, c, g, or t
  misc_feature (471)..(471): n is a, c, g, or t
  misc_feature (540)..(540): n is a, c, g, or t
  misc_feature (553)..(553): n is a, c, g, or t
  misc_feature (560)..(560): n is a, c, g, or t
  misc_feature (569)..(569): n is a, c, g, or t
  misc_feature (605)..(606): n is a, c, g, or t
  misc_feature (610)..(610): n is a, c, g, or t
  misc_feature (621)..(621): n is a, c, g, or t
  misc_feature (659)..(659): n is a, c, g, or t
  misc_feature (699)..(699): n is a, c, g, or t
  misc_feature (712)..(712): n is a, c, g, or t
  misc_feature (720)..(720): n is a, c, g, or t
  misc_feature (782)..(782): n is a, c, g, or t
  misc_feature (787)..(787): n is a, c, g, or t
  misc_feature (803)..(803): n is a, c, g, or t
  misc_feature (848)..(848): n is a, c, g, or t
  misc_feature (961)..(961): n is a, c, g, or t
ntctcccaggtatatatatacctccgtcccaagatataaagttctaaacatagatttaaaaagancaaaatggaaaanatataaatatttgcngttcctgtttatatcttttgtgcatttattgtcttttctaaggttggcctttttctttattttgccattcgatccatacttacagtaaaacccnatctaaatattatagacngcgtataaagccaaangtaagacttcccttcactccatcttctcctcagatattggtgaatctcctcccaaactttcaaccacatagatgccttttccttttccaacccgacagccattaacactaactctttaacggctgccgcnnacttcccgccacgacgacttatgtcgnttaangctgcngtctccctatnnccttnntngccggattccccctttttttaaagcccatccttcctgttccacacactgaatctgcctggnttgtctcaccttgcttttaactattaggcctgtttggcagaggcaatataaatttttcaaaatgtaagntgtttaaaatgcnattagcntttagcacntggaatttgaggcagaaaggtatgagttaggcaacnnttcntgccataatcncagttttgacaagcctcaaacacaatgtacaatatttnagacacaaattcattaggtatgggcacaggacagcatgcncatatttaatacntgcgtgcntgtggttttgcacaatggatgggtattagagtttgccttggatacttggcattgattagacngttcngaaatttggttatgcntagtcaaaaaattcagtttattgttcatcagcaagaatagatgtnaccactttaaaaatagttacattgttttccagattaagtaaatatttcagttaggagaatacatatttttatttttattttcagtttttgagatggagtcacaaacagtcacn

SEQ ID NO: 628745 - DNA, 200 bp, Homo sapiens
cgtttgaactctggggctcaattactcagcccaccttggcctctcaaagtgctgagattacaggtgtgagccagccgcaccagaagtgctttctgaattttttttgtgaggcggggtcttgctctgtcatccaggctggagtgtagtggtgtgatcccagctcactgcagcctctacctcccaggctcaagcgatcctcc

SEQ ID NO: 628746 - DNA, 123 bp, Homo sapiens
gttgagttgaacagagcaagcatagagcccgatatgatttctagataattggggggatacggagctttggtcctggatagctgaatacttcccatgagatctgtccaaaatagtactctggcc

SEQ ID NO: 628747 - DNA, 624 bp, Homo sapiens
agcggggtgtctggtgtgtgggcggggcctgccctgagccccgccccatcccccaccgcagtgggtgctggagaagcacccactggtgccatgaggctgaacgctgagctgacatgcttgtgccaaaccccaccatgctggctcaccaagtacccgctgctgctcagagtctgtgtgcttgagtgaacgaccctgatggagccgctgcgccaaggaggccgtcgtctgccatgatactggctccgttgtgcagcggctttcatccaggcactgtagaactgctgtggcattgcaggccatccgtgcatgtgacccggcatggctggcttgtgccggctctgctggttgacgctcgcattccgacttgccctaccgcagtggtggcgtggaaacgcctgccagctgaacgaatagtgcgagcgaatgcattccctcgcaacgggatctcatcctggcaaccttttggagcttttgagcactgctcggcccgagtccccttgggccgccctttcccacgtggagggaaccaaccggcgagccacggccctgcttggctcggatgcgtgcggaacccttggaggcgcttccacccgagcggcgcacggctccatgcacacgagatgg

SEQ ID NO: 628748 - DNA, 1153 bp, Homo sapiens
taaagggttacacaattaattattgggaaagccttcctctccccggcccttgcaatctctagggtcattttctccggttaggataaatttgggcgcgccgcaacgccccaaaaaagacgggttgggggcgcagggtgcgcagcgggtactggtgcaatggaaacgccataatggtggctggaaactggtgttccctccattattggaaaagacacattgggtgggacaatatcccagctccctacattatagcggctcttaacccggaggcacatttttctacagctctcctttctggcccggaatattttcccttacagggatacggggaacccggtgctctggagaggtgggcccggttggcaaaacctgtagaaccacaaccaagacacagctggctatatgtggttggtcccctggagatgtgtaaggtggcacaattttggcgcgcagagtaaacctgtggggggtgtcccccacaaaagagggccacagggcacactacatcctaggatattcttgagaaaaaattccgccacatttttcccaagcagggatcactttctgggagcattggcgggtggggcctcttactgcagctactcaaatttctctgggcacatgttacccatgggctgtgaacgctactcggagacggggtccaacggagagttcaaaacaagcggcgctattggatccatcagaaccacactacccaatttggctcccctctcttaacacagagagaactctgcgaacacaagatcctcccccattttggcccccttgggggagagatctcacaagcagcgaccaaaaagacccggcccaccatcctccaactcagctagcaaccacctccctgccagaaaaaaagtcccacacacagggcacccggcacacagggccgggccccccggaacaaaaaacatcacaacaaagcgcgcaacacaagcacaacagagggaaccaacaaagaaggaacaacaacccaccaccggtgtgaaaccagagaaactagccccggcgtcagacgaagaacccaaaagtaacacgaccaaggcaaaacagttgggcataaacacacacaacccaacaagcacgccggaatcaccaccatgtcgggcccaacccgaaacaacaacacaaccga

SEQ ID NO: 628749 - DNA, 81 bp, Homo sapiens
ggccgtgtattactgtgcgaaagccccaactaatcggccaatcagttactactttgactactggggccagggaaccctggt

SEQ ID NO: 628750 - DNA, 121 bp, Homo sapiens
atatggccggtcccctcattactattctgctaggcaactcaactacgaacgcgaagcttagtagtgcaggcttcggaatatctcccatatgtaacttactactccggaaaaaaagaaccac

SEQ ID NO: 628751 - DNA, 592 bp, Homo sapiens
gaccagtttctgagcccgttgcacctcggcgatccccgactcccttctttatggagtcgctcctgtgctgtgggccgaagctggccgcctgcggcatcgtcctcagcgcctggggagtgatcatgtgataatgctcggaatatatttcaaatgtccattccgtctgtgttgattgaggaccgtcccgttcacggagaacacgatattcgagaatggaccccagaacatatacaaacctttacagagcaagtcgagctacacacttgtcgtcatcgctgcagtgcctttacctcctcctcggcaggcttctcgtttctgccacgtctggctcaatacagcgcaaggaatacatggttgcgcttagggccctcgtgcagccggttccccgctccagtcgcctcctctatcttcaacagaattgcctgcacccggcgttcacccagtgtcgcgttccaaccctttgcacggggccctctgtagggaattgggtatcccggcctagacactgggtcccttcctcccatctgtgggatccggaccagtggacagggctgggatggcggcatgtcgcgctctcagacttgctggtccg

SEQ ID NO: 628752 - DNA, 375 bp, Homo sapiens
aggacttatggctcactgcacctgccttggcactgcctggctgtctcacgagtgtcggtttttcctgtccagggccctcccaaagcgcccacgtgtatttcgttgtctccctgccttccagtctctgctgcagtctttcaggacccgagcacttgggaagtgtgggcaggcattttgtagactccccctcaattttggtttgcctgatatttacgcgtgattaaactgcaattatgcattctggcaagaacacggaagagatcaggcctcctctgcatcaaatcaggatgtaggtggtgtctaccaggtctcttcactgtagagttactgttttctttggtgtaatgagtatcttgcggggacacaacgagaata

SEQ ID NO: 628753 - DNA, 115 bp, Homo sapiens
ggcagtggctgcgtaggtagatctagaggatcccttggggctccaattcagggggtcctgggggaagagcttgttaccagctcattctgtcatgggaagaatacagttccgggga

SEQ ID NO: 628754 - DNA, 458 bp, Homo sapiens
ttgttttatgctgaaagtagaacacaagtcacatttcagatggaggctgtaacatatcgtggcatttttcttatatggtttaagtgttatctctgtgttctattccttctgtgatcgggtttattatatcttattttcttgggggttttcacgggtaatgggccttgtgatacgagctcattacttgtctcctgtgcgtgcacattatcgtgaagtcaactctcgtcttcaagtgccagctttggcccaaagttaagtcttcgaagtaaaacgttggcaaacaacactaagagcttccgtggggcatttttaaatttccaaattcacaccggcttaaacaccagtggggggaaaccacccttctgcccctcctgggtttatctcctggcaacggggggacggtaaacgaagtgtttacgtcaatctaccatatcttaaatctttctgaggttggtaag

SEQ ID NO: 628755 - DNA, 493 bp, Homo sapiens
  misc_feature (59)..(59): n is a, c, g, or t
  misc_feature (63)..(63): n is a, c, g, or t
  misc_feature (67)..(67): n is a, c, g, or t
  misc_feature (73)..(73): n is a, c, g, or t
  misc_feature (90)..(90): n is a, c, g, or t
  misc_feature (93)..(93): n is a, c, g, or t
caccgcgcacatccctctgagaggccaggcacaaaacccgtgctttagtagatgatatngttnttcngtaaancttcatttccaaaaaanggnctatcatcctgttaaatctgtggactagagatccttgttacatgcccaggattacctattttaagtataactttgttggatgcctagtgacatgctttggctgtgtctccacccaaacctcatcttgaattatagctcctataattcccatacgttgtgagagggacctggtgggagataattgaatcatgggggcagtttccccaatattgttctcctggcagtgaataagtctcaatagttctgatggttttatacagggaaacctgtttcacttgcttctctcattctctcatatctgctgccaagtaagatgtgccttttgccttctgacatgattgagaggcctccccagcaatgtggaatgtgagtccattaaacatctttttctttatgcatt

SEQ ID NO: 628756 - DNA, 365 bp, Homo sapiens
gaggcggaatcgaccagaatacgggctggtggtggggcaggcccggagctggtagtgtggccggggagcttcctcctggaagcaggagaatcgagcctccccctgccgtttgcagcacccgtggggtcgggtcttgaccgagaactcggcctcacagaaccgggtcatcgcgtcctcccactagagcaagagggatggatcagcctggcagcccactgttcacactcctgtcttcctcccaggctccagaaaaggaccctgggcaggcaaataagcagaggctgtcctctgctcttctggcacactgaaggggccaaggtagggccaatgaaagggacctgaggttccgttgagatcaggcatgt

SEQ ID NO: 628757 - DNA, 469 bp, Homo sapiens
gtgtatagattaggaacaaggcagggcggttgggtgcctgcccagggtcataggcagcagcagtgatctggaactggagcccagctttcccacaccctgcccttaccacttgtcctctcctgatccagggctccagtgcccatgtccagtgccttggtggggctgggccaagaggcacagcgagggccctggccacaggcaggggcgttggagccctgctgcctaggtttggatcccagctctactcctggtgagctgtgtgaccttgggcaagttacattacatccctgttttgcagtttcacccactgagaaaatagggacaagaatagtacgtaactcatggagttgctggagacctccatgggtcagtacgtttcaggtgcttagaatagtgcttggcacactggaagcacagccataaaagtgttgtgaaataaataaaacccgctgggcgagaaaaaaaaaaa

SEQ ID NO: 628758 - DNA, 170 bp, Homo sapiens
tatgcaccgttgaaaacagctttgctccttcatcatgtacacaggcacgcttgactgctggcggaagattgctcgtgatgaaggaggcaaagcttttttcaacggtgcgttgcccaacaggtgcgttggccaacacggtgcgttggcccaacacggtgcgttggaccagt

SEQ ID NO: 628759 - DNA, 431 bp, Homo sapiens
tgtgagtccggtggatgatagctctggtgagctaatgctgtagttcaggagtattctgatcactgtcatccattttcctcttgtcgctgacaggctgagcaacttcccactagcccattgattgagtaggtggagcccagggaatccgattggggttattcctgatgagttacatctgaatctggggatcagcgtgtggtcgggaatcagagacttgttggccactctgatgtccatagggaggttgaattgcgttgatgcactttggtccggatgattctattaactggagctgacactgggcacgtgtgtcattgtcacagacgccctcagccaggagccggtctcggatctcccaggcaaacatggtagggttctggcgtttgtagtccccaatcttctccaccaccttggggggtggcaccttgggc

SEQ ID NO: 628760 - DNA, 103 bp, Homo sapiens
  misc_feature (88)..(88): n is a, c, g, or t
ataaagcactgtttatttttatgtattgaaaatgtccattttaaaagtcttcaaaataaaaacaatccctccaattggagcttttgcnaagaaggggaaggac

SEQ ID NO: 628761 - DNA, 224 bp, Homo sapiens
cttgtctttgtaagtcagtgggctccaggaaatgttccttctctttttgttggcatgggcactgtgggatctggtacattccggtagacactctcttttatttggactgtaagtctgacctctatgaataattacttcagcccctgattgctcccgtgccaagctccttggccaaactttcaccttagcttctggtaagtcttgggccaagctaagcagcatct

SEQ ID NO: 628762 - DNA, 343 bp, Homo sapiens
taaattctggggaactatgaagtcctgtgcaagcacagctctcgttttcgtgcagatttattttctccaaacgtggtttcaaaatgtggacccaaaaccggagaaactccctttaaaaaccgtgaagaggcgcaacatttaaaagctacgattactccagttagcaagtgtgtttccaggcctcttcagttgtgccagccggtttccctccttcttatatttcccaaaattatagggggagtgaatatattaggccttataaagcactttgagtgttggtgtgtgcaggttagtcccggaacgtgtgtgggtactcaggttgtgaagtgggtgtttgtctcct

SEQ ID NO: 628763 - DNA, 80 bp, Homo sapiens
  misc_feature (9)..(9): n is a, c, g, or t
  misc_feature (11)..(11): n is a, c, g, or t
ctcgtgcgnancaaaactatattttcagttttacttttgtatataaatctaagactgcctgtgtgataaaacacttgttt

SEQ ID NO: 628764 - DNA, 293 bp, Homo sapiens
gaagtgccacgataaaaagtgaaaaggccagactcatattaatgcagaacaacttcagctccaaagctcctccggattcagctgggacttctgttgcaattgcattagagagagagggagtgagagagggagagagagggagagagacagagagagagaaaagagaagagagaggagagaggagagaggggaaaggggagaggagagaggagagagacagagagagacagagagaaaagagaggagagaggagagaggagaaaggggagaggagagaggagagagacagagag

SEQ ID NO: 628765 - DNA, 1378 bp, Homo sapiens
  misc_feature (428)..(428): n is a, c, g, or t
gagtagagttcacgcggtgacactgcaactaggagtatttttgactgaaccctagcacccgtgtcgccaagtgagggcctacggctcgatgagggcgtgtgtgctatcatcgatcgtgcgagcacgattttgtggtctgcactaggctggaagtgctgctccgcgtgcgcacttgcgagccgtcggtgtgcgaaccgagagtcagacgtacctggggacctatcatagctacacggtggtcctgtgaactgtcactggagactgtaggagacttacctagtgctgtggttaggtaccttgcgctacgtatgcaagggaaatcgcgcagtggatatcacgatcgactgcgtgaattgatgcgattcgtagcctagcgtaagcttccgtgcaattcgatcactctgactgggttccatcaggcgtgtacnatttcaatgctctcccatggcaccgtctcatgtacacgggcaggcatcctgtactaggtctggcgttggttaggagatagaatcgtgttgtcacccaggttgtccacttgagtccgttccaattcactctgacttcgatagaccttcggaatgacggtgcgaattcggatccgaacttgcatacattggttgctgaagatggaatagcagggtatgccccaccttcatggctgtgcccatccataaacgtttacctgtatgccacacgtactgattcgcgcgaacttggacacgtggacctgctcgtatttgccatagtgcgcgcaaacatgcgcgtcgttgtagcaccctgtgctggagggggacttgtcggtgcagagtcctgcgaatcgttagcgcgagaaacctccctagtggtaagttgccgaagagaagacgaacgctctaacaccctaagtccccccgcaaaattcaatgtcggaaacacgcttgcgccgatgacacaaagatcatgtcggcaacgtcttgtctcccgtacgaaataggagcgccaacaccaggaaagtggggcccacgtccaaatatgttttccgttcgcgcccaattggcaagcgattattggtaggacatcgccacgtccaggaagcctccgtggtgtacatctatgtgacgactggaatctgcaacacgatttgcggagacgcaaagattatccgacagaccccccttgtgaagtggggtttgacagcgcaaacggacacggcaagatgtgaaaccccagcggtaagtggccagaaattgtattgacatcgggctcctaactcggaaccccaccattgcttcgtacgggaaatccagattcccgattatagctcgtactataagtccttagactgtggtcgctgcttccccctctgagggcacgagttcgaaccaatacaaaattccaa

SEQ ID NO: 628766 - DNA, 839 bp, Homo sapiens
  misc_feature (11)..(12): n is a, c, g, or t
  misc_feature (41)..(41): n is a, c, g, or t
  misc_feature (55)..(55): n is a, c, g, or t
  misc_feature (90)..(90): n is a, c, g, or t
  misc_feature (199)..(200): n is a, c, g, or t
  misc_feature (209)..(209): n is a, c, g, or t
  misc_feature (267)..(267): n is a, c, g, or t
  misc_feature (284)..(284): n is a, c, g, or t
  misc_feature (297)..(297): n is a, c, g, or t
  misc_feature (299)..(299): n is a, c, g, or t
  misc_feature (311)..(311): n is a, c, g, or t
  misc_feature (318)..(318): n is a, c, g, or t
  misc_feature (324)..(324): n is a, c, g, or t
  misc_feature (337)..(337): n is a, c, g, or t
  misc_feature (339)..(339): n is a, c, g, or t
  misc_feature (348)..(348): n is a, c, g, or t
  misc_feature (351)..(352): n is a, c, g, or t
  misc_feature (358)..(358): n is a, c, g, or t
  misc_feature (387)..(387): n is a, c, g, or t
  misc_feature (390)..(391): n is a, c, g, or t
  misc_feature (399)..(399): n is a, c, g, or t
  misc_feature (429)..(429): n is a, c, g, or t
  misc_feature (447)..(447): n is a, c, g, or t
  misc_feature (451)..(451): n is a, c, g, or t
  misc_feature (464)..(464): n is a, c, g, or t
  misc_feature (485)..(485): n is a, c, g, or t
  misc_feature (488)..(488): n is a, c, g, or t
  misc_feature (507)..(508): n is a, c, g, or t
  misc_feature (526)..(526): n is a, c, g, or t
  misc_feature (536)..(536): n is a, c, g, or t
  misc_feature (577)..(577): n is a, c, g, or t
  misc_feature (587)..(587): n is a, c, g, or t
  misc_feature (629)..(629): n is a, c, g, or t
  misc_feature (655)..(655): n is a, c, g, or t
  misc_feature (657)..(657): n is a, c, g, or t
  misc_feature (704)..(704): n is a, c, g, or t
  misc_feature (749)..(749): n is a, c, g, or t
  misc_feature (752)..(752): n is a, c, g, or t
  misc_feature (813)..(813): n is a, c, g, or t
atttcagaacnncctttatgtacagacatcatttaaaaaangcacatacaatggngattttccaaggaacaggagctggaaataaaattnaaggacattattagaactgaaattgtcccagagaagttctgaggatcaggattccttaaatgtccttgataacctcttcaagttcttcctttgtgaacatgtgggaatnntggccaggntgcactgtggctagctcaatgtttgtagcattcagcttctcctccattacttgtttgnggatgatgagtgaaganttgatggcttctntnaaagtcataganttgtggnaaactncttgcaaggagcncngggcacccnccnncgccgngccaatcccccgaccatcacactgtacanagnncccagacngctccataccccacacccggcgtcctttcncatcaactcctccaaatnatantgctactccaaanccacgagacaaggcacctggntcnccatctccttctccaaacnncaaagccagattggacanagcttgggtnaaactctccactgtcattgtctcattgtaggtgaaccagtngttctgtgtntccactctggctttatcaattaaagttttagcatcagcaatnagcccactcatggcacaacctatgtnancctcaatctctacaattttgctcaatgctgcagggctccattcagtngggaagttattctcttctccacagctaggcacagaccctctgagngtntggatcccaatggctgtagaaccaagctttgaaagcctcaatggcataatccacttgaaanaatcttccttcgggagaaaaagtatt

SEQ ID NO: 628767 - DNA, 610 bp, Homo sapiens
tagcaagaccctgtctcttaaaaaaaaaaaaaaaaagggaaagaggccaggcaccggggctcaggccgggtgagtctcagcactttggggagcccgaggtggcaggggatcacttggaggtccaggagtccgaggccagcctggactggacatgggtggaaacccgggctctactaaaaatacagaattgggccgggtgtgggtggcgtgcgtgcctgtagctggggaggctagaggcaggagaaatggcgtggaatccggggaggcgggaggttggaacgtggggccgagattggcgcccactgggactccaagcaataggccacaagagtgaaactccatctcgtaaaaaacaaaacaaaagaaaagaaaaacaaaaaaaccatcgtggggcggcggccgtcagacgccccacagagaaaaagcatgtattaaaaacaccacaaacgaacgctgtaggggacggagcgggggagcccaagagagagagaacaaggagaaaacagtgggtcacaaaaaaggaggtgaccacacaaggggaacactcggggaaaagtaaacaaagtgggaggagagaacaacaagcccaccaaaaaaaaaccgcccgggg

SEQ ID NO: 628768 - DNA, 638 bp, Homo sapiens
  misc_feature (11)..(12): n is a, c, g, or t
  misc_feature (41)..(41): n is a, c, g, or t
  misc_feature (55)..(55): n is a, c, g, or t
  misc_feature (90)..(90): n is a, c, g, or t
  misc_feature (199)..(200): n is a, c, g, or t
  misc_feature (209)..(209): n is a, c, g, or t
  misc_feature (267)..(267): n is a, c, g, or t
  misc_feature (284)..(284): n is a, c, g, or t
  misc_feature (297)..(297): n is a, c, g, or t
  misc_feature (299)..(299): n is a, c, g, or t
  misc_feature (311)..(311): n is a, c, g, or t
  misc_feature (318)..(318): n is a, c, g, or t
  misc_feature (324)..(324): n is a, c, g, or t
  misc_feature (337)..(337): n is a, c, g, or t
  misc_feature (339)..(339): n is a, c, g, or t
  misc_feature (348)..(348): n is a, c, g, or t
  misc_feature (351)..(352): n is a, c, g, or t
  misc_feature (358)..(358): n is a, c, g, or t
  misc_feature (368)..(368): n is a, c, g, or t
  misc_feature (412)..(412): n is a, c, g, or t
  misc_feature (430)..(430): n is a, c, g, or t
  misc_feature (450)..(450): n is a, c, g, or t
  misc_feature (456)..(456): n is a, c, g, or t
  misc_feature (486)..(486): n is a, c, g, or t
  misc_feature (489)..(489): n is a, c, g, or t
  misc_feature (496)..(496): n is a, c, g, or t
  misc_feature (498)..(498): n is a, c, g, or t
  misc_feature (505)..(505): n is a, c, g, or t
  misc_feature (508)..(508): n is a, c, g, or t
  misc_feature (510)..(513): n is a, c, g, or t
  misc_feature (515)..(516): n is a, c, g, or t
  misc_feature (524)..(524): n is a, c, g, or t
  misc_feature (583)..(583): n is a, c, g, or t
  misc_feature (614)..(614): n is a, c, g, or t
  misc_feature (616)..(616): n is a, c, g, or t
atttcagaacnncctttatgtacagacatcatttaaaaaangcacatacaatggngattttccaaggaacaggagctggaaataaaattnaaggacattattagaactgaaattgtcccagagaagttctgaggatcaggattccttaaatgtccttgataacctcttcaagttcttcctttgtgaacatgtgggaatnntggccaggntgcactgtggctagctcaatgtttgtagcattcagcttctcctccattacttgtttgnggatgatgagtgaaganttgatggcttctntnaaagtcataganttgtggnaaactncttgcaaggagcncngggcacccnccnncgccgngccaattgcncgggcctccccctgtcccccgcgcccccgctggggccctatggngcggcggggggcctttcncctcccctcctccccatcgncctgcnactccccgggggcggggcatggcgcctggntcngcgtcgncnccgcccnccngnnnngnngggggggncgcggcgtggggcgcgcgccccgctgccctgggctccttgtcggcggcccgggggttcngggtctccgctcgggctttgtcggttggggncntggcatcggcgattggcccact

SEQ ID NO: 628769 - DNA, 663 bp, Homo sapiens
accaggctgatgctgactttgtcaggttctgcaggaccatggctgacatctgcatgtgccgcctcggtggcacctgggcttcctcacagcatggcagtcaggctccaaggtgcagctgcccgagagctccaggaggaagctgcgtggcctcttatgatgtggtagcagggtgtcaccttctactgtggtagtcagcctgccccagttgtaagaggtgggagaggccccacatctgagtgtccacaccataatggggaaagggtacgcaccaacttctgagagagtcatctgccacagggtggcacaaggtcatggcatttcacatggttgtcacccaaagaaagccctcagccgtggagccttgccctctccagaagcgtcataggagatgccctgttacgtctgcagacaacccgtgtgggttcacagcctccaacaacaggtcagttgtatgttccctctgaggagcaggagcaggggcccaaggcacgctcccagtgtggcaccgaacacctgctgctggagatgcctgcaccgcacgtaggagggacacagtggtgagcaggcgctggtcctcattgcggctgcctgctggtgacgggatgtccgatcagggaggaggagatctcacatacagatgtcaatctggcatccaagaaaatc

SEQ ID NO: 628770 - DNA, 1654 bp, Homo sapiens
  misc_feature (127)..(127): n is a, c, g, or t
gctcctcttctgggctcacgattgacaacagcgaagcgcctggctcgtacgccagtcagtccagcttcctgggatgaccaggctccgcgcaacgggggccctctcggtccggagtgctcagcgcagnagcgtttgggaagatcagtccactctcatggttagctctgtgaatgacgtgctggttatgtggggtgtacggctacgaaggtacaggtgacgcttgctgcatccactacatgtaccttctgacctggaaggatcattggtgaaagacgaggtagactcacggagcctagggatgatgacactgtcctggatccatgaaggagctcctcgtcgctgaactcctcggtttaccgaggatggactcagtcaataggctgaagtccgtccgtcagataggcctgcacagggaacaaccgtatgtcgagcagttggacaagattgggaaaaaacctgttgcagagctggccgggtgctattttccttacgggacagagagcccactccgaggcatcagacccaagacccagctgccctgctgcctcactttcctggctagaactagatcgccccggcaatggcctttaccaagcaagaatcgtccagcggcataggctagggtcaaggcgcctgcgggttagccaaggagaaccttgcttgaaggccgggtgcccaatacgtaggcatttggaacccccgtgtccctaagcaaggcatagggcccttaaccgggcattgagaactgtcgggcccattggctggcgtccttcccgagagaccctttcaaaccaatggccaccgttgggactgctgcccggttgggtcgttttaccttacacaacgcacacggcggcttcttaggcaacgcttgagttcccccccggaacaaaacggtagaggactacgtaccaaaaagtcccaacacacgtcgaaatgcgacttacgcccgggaaggcgttggaaaggccgtttgccgcgaggaagggggcccccccccaaggcccccccaactagtaggcgcacgcggctgtttcgtgtgcgcaaaggcgtttatacggaatctgagtccctggccagatgagccttgtggcttgagaaatacataaaccatttgggtctttcacttggaagcgcacatttagggctttcgcggtatggccttaagtttgacacgcaaagtgcgccccagcggattttccgaagcaacgcgcttcacattagatccccagggcacatatgaattattccagggggttggagaaaccaacacccctatttggtcggaacacatcgcgagtgaaacacgaggccccatatcggaagaaatcggagccctgggtgccaagggcccttcatttccaaagggcgggcgcaacacactgctttgtgcccccgtgccgacatgcgtgacaggattcaatagccacaaagatgtatatcaagagaccactcattagaagccccgaataccgaaagtgtagtgagcaccaagtgacccgcgaaggcaggacacccacgtcatgagatgcagccagctcacgcaaggtgatacgtgaacatcggccgcaccaccgacacccctgtgtagtttgttcacaccctagctggaagtcagagagaagcagatagagacctaccagctcgagtatgt

SEQ ID NO: 628771 - DNA, 207 bp, Homo sapiens
cccggtaccggtcgacagcttcctgatgtcgcgagtgcatggtggctcatgcctgtaattgcagcacagcacaaggacagcttggggccaggagtttcaagatcaacctgggcaacattgtgagaccccggtctctacagacatacaataaaataaataaaaaaattagccagtgcacagtttaagtgccttgtagatcattagcta

SEQ ID NO: 628772 - DNA, 360 bp, Homo sapiens
  misc_feature (51)..(51): n is a, c, g, or t
  misc_feature (58)..(58): n is a, c, g, or t
  misc_feature (148)..(148): n is a, c, g, or t
gcccaaaccatccaggattaaaaggggcccttgtgttgccccccccctggntgcctgntaagggcccatgtgatttgcctggcaaaggagttttttcaggaaaaaccagggcagcttttgcccctaaagggccaatgcccttgctgtnaaaagtccctgctttggggagacctgatttggctgtgccaaatggaccctgaaaaaaaagtaaaagactcagaattaaaaaaggccccctggacagacctgctggagacctgatcctcagtgtccttaccccctcctaccttttttttgtgccccctgctgtgggtccagcaggtttttacttgagtacaataaaaagtttgagtcaaggga

SEQ ID NO: 628773 - DNA, 798 bp, Homo sapiens
  misc_feature (8)..(8): n is a, c, g, or t
  misc_feature (29)..(29): n is a, c, g, or t
  misc_feature (436)..(436): n is a, c, g, or t
  misc_feature (460)..(460): n is a, c, g, or t
  misc_feature (462)..(462): n is a, c, g, or t
  misc_feature (479)..(479): n is a, c, g, or t
tgaatggnaacgggaagccacgacgcatnaatgaaagccacaggaaagaagcccgtaaaacgcaggcaggcaggggcctgggggtggttttgaagcccagacacgtgttttccatgtggtcctctcatgcctgaaaggccttttgcccttacgtttacacagttattcctgcttttgaagaacttaaagtacctgaaaatgtcttcactttacgaaagaactctgccaagggttctctaaatatctagctttgtggatagttttaaatataattcattttacagactgtgatataaacatttgcacaaagcgaagccatatttctgttaatttttgtaatagagtagaaacatacaaacactgcatctaccagacagacagtctcagcccatttgctgacatctagattaattatgcattaaaagaaaagaaaaangaggtgagacagccaaaaggactntnggacaccaaggaggttncaagatctttctcttcaaaaagagaactgaaactattgttaagcccagaaagatgaagatgtacttagaagccctccaccttgagggtcttccttcaaatgtgacttcagggatgaagtgtaaggctcttcctctgctccaacctggcacctcactgcaggcatcttacaggatttgccagaggatcatggagcccgtcctttacaggcccggggctcagagctgtccccggacagttgtgcaggaaagcagacagcagtgcccaggctccagctagacatgagcccggcatatcagaaacagagatcaacgttcccta

SEQ ID NO: 628774 - DNA, 883 bp, Homo sapiens
ggaaagaggaaaaaatgaggagtcattggagagttacgagaatggcttccgggctgcagaggaaggtgtccagaagcctgctgcagaaaccccagactctgcttgcatccctggtcaagccctcagcatccacatccaccctgtgggatgggaagaagagaggggacctcccagcggagccagtggtcttcgccctcaagggggctgtgcaggaacatggatgcatgagggagcagtcgggcgagtttctcacgagagcagtgctatcgctctccttccgcctgtggctgagccgttcccccagcactataagagtctctactcgtctggccttcctctacacctacagtaagacccatcggaacctccagtgggcccgcgacgatgttgctaggcagcagtatccctgtggcaacaactgcagcacatgccgggcacatggggctcttctgcgagaggaacaagaccaatttcttcaacggcatctggcggatccccgtgcgacgagattgaccggcgggacagctttgcctggcacatgaaccgctccatcgtgctgctgctcaaggtgctggccgagctgcgggaccacaggaccctgctgaaggtgtcctccatgcttcagcggaccccagacagggcaagaagtatctgcgagattgctgaccgccaggtcctggtgcagtgggccttcatcctcactgtgaagggtgctcaaagagacgctgatcgagctcgagaaggggtcagaacggcccagggccaggtctggggcttcccggacaggatgaccacgatgtttacaccaaggccgtccttgaggtggcaagaggctcccatgaaaaaccgctggtatggtaggcgggccagcagggaagtggcc

SEQ ID NO: 628775 - DNA, 798 bp, Homo sapiens
aggctgtactggtccgaagccttatgatcgggagcccggttggcgtctggtcttcgctgtgggccccgcggagccagactgctgcccccggcgcggggagaagatggtgcctagcggcctcgtggcccgccacgcgccgcacgagtgagcccagcgcgactgcgggctgtcgccgagcagctggcccggctgggcccggggcgcgcagctgcccgccggggcggggtggagctgatcagaataatgttcagcatcaaccccctggagaacctgaaggtgtacatcagcagtcggcctcccctggtggtcttcatgatcagcgtaagcggccatggccatagctttccgtgaccctgggctacttcttcagaatcaaggagattaaatccccagaaatggcagaggattggaatacttttctgctacggttcacgtgatttgggacttgttgtgtaatcagagaaatgaaagccctcaagcatctacacaaactgagaccacaaattccgggaagtacaaatgaaccagcggggcaggcccgatgcttccacccagttccccccaggccctggaggactcggggccgggtgaaatatctcagtctcaatcaacctaaaccctggacccaattgaaaacccttcgggagggtaatacccggcaacgtacacccatcgtgtaactcaaccattctaaggagcatcagaatgggactttcagggccagtgaagcccaagaaggagataaacaatcaccttagccttgcctacagcgttgaagctcagatgattgcgccctca

SEQ ID NO: 628776 - DNA, 320 bp, Homo sapiens
ataatggatgttgtcctagttagaagatgagtaattttagggccggatgtgttggctcacgcctgtaatcccagcagtttgggaggccaaggtgggctgatcacaaggtcaggagatcaagaccgtcctgtctaacacggtgaaacccatctctacaaaaaatacaaaattagccgggcatggtggcgggtgcctgtagtcccagctacttaggaggctgaggcaggagaatggtgtgaacctgggaggcggagcttgcagtgagctgagattgcaccactgccctccagcctgggcgacagagcgagactctgtctcca

SEQ ID NO: 628777 - DNA, 194 bp, Homo sapiens
tgattatggtagctagcactgaatgcgagggtagaagcgtggtgagccagcagcacattagataaatacctatcaagtgtgagcttagacgtctaccctcaaatactttaccgtaatgctaattgtagatcattgtcattcccttcagtcacattagggggaaagtagttggctataagtacgtcattcttagt

SEQ ID NO: 628778 - DNA, 222 bp, Homo sapiens
attatcataggaggtggagctactccccacctcccaccattatatacattattgttgcacgaaatgttatatttaccagcatgatgtttccctcatccttccaacaaaataaggtcacactgtgggtcgtatgagccttgataatgttgtcctcctgttcatctgtgcaccacttgacagactgtagcttctcttgctctcgaccggccctgcattcttccg

SEQ ID NO: 628779 - DNA, 238 bp, Homo sapiens
gtgatttatcccaacacgtggctgagaagtgattcaggcgtcttttagtcttccgaaactccttgctgtatgtgttgggcgataacattgtatttatccccaacacccaaaaaaaaaaaaaaaaaaaaaaaaaacctgggtttggggggggccccttgaatccccatttcccgggaaggttaaggcagaaaattggtttcgcaccctgtgaagccaaaactatcgagtgaaggggaat

SEQ ID NO: 628780 - DNA, 1090 bp, Homo sapiens
  misc_feature (289)..(290): n is a, c, g, or t
  misc_feature (292)..(292): n is a, c, g, or t
  misc_feature (324)..(325): n is a, c, g, or t
  misc_feature (329)..(329): n is a, c, g, or t
ttttttgacagcagcatctgtttattgacaattccaggtcattcctaacacgccgcagcaaggctctgtacagtccggcccggtggttgttagggagggtatgcaggcacacgaagacacaggtgtgtcgggaagtgcacacaaaccgttgtctttcctttttggttaaagaagaaaaactttgtgatcaatatcccgctcataagtaaaagtggtgacgtggaaacttgattgctttcatcagggcgtgtgtgcatctcctctcccatttcatgtgcagtttattggnnantgctaccgtcaccagcagacacctgtaagtannaacnaatgtcaggaaggaaaaagtatgaacaacaggaagctccagagcggctccatgcggcgctgggctcagtagaagcagacggtgtgcagaaaggtgcggccactctgtctcctcgaactcctgcagcagcatcgtcgatctcgttctccatgtcttgccgtgtgctggatacactggcagagctcacagatgagcaacgcccccagggtaggcctcctcgtggttgtcctggatgtcacacattgaccacgtgcacaggcaggcaggtctcctgttctctggaattcagatctgccaccacctggtcatacactctctcttcgcaagtgaggatcagatcaaacaggtctttgcagttcgtggaatctctctggccggggcgttgattctctcatttctgtccagcactagtgctaaaatcccattctgtgtatagagttctttgtcctttcctaagaagatcagttgtacatctggtcatatcgtggttcttgcaaactcataaacacttgggcttgtcgggagctggtcctggaagcttcatcgtgagtcccatgttcacaaaggatcggacgctgaatgcacccgatgtatgctgaggatgatcagtgcacctaccatgctccgggatctggttgcatcgagcacacacaccgccacacgcgccatgcggggacgacggcatggcggcaggccgcaaaatcccgcggcatctcccgcttgggttcccaccctaccgcggcgattccgcgagaacccgct

SEQ ID NO: 628781 - DNA, 157 bp, Homo sapiens
tctcgtgtttactgcttatttttcatcaacccatgcctttttaaaagcaaaaattatattgaattattattcatcctttcttgcctttattaaaattgtctaattaaaattctcaattatttagatgaagaaaaagcatttgacaaaatccaacatc

SEQ ID NO: 628782 - DNA, 129 bp, Homo sapiens
ctgggacgggagtagaggggtctgtgtgtagatctgagtcctccctcacattccagcctgtgccacaagccgcatcggatgaggccggtctcccttcttcactggtctcaaaagccacccaggcccaag

SEQ ID NO: 628783 - DNA, 331 bp, Homo sapiens
ataccaatcaacatataggaaggtagaagtgagtcccataggtacccaactaatgtcaccagtttccgtggtatatctttcctggagtttattgatagtgtgtataagtaattatgtatgtgttcaaatgcctttctcaacttttcttttagagctgcctcttgttaacagttccattccattgtgtggatgtactatggatttattgaaccagttccctactgattattctgttttttgcagtcttttgttatgatgaacattccacagtgacaatgttgttcatagtcattcacacacatgcaagtccttctgcaggatatatttctag

SEQ ID NO: 628784 - DNA, 252 bp, Homo sapiens
tctgtactgagacactatcaccaccaaaaatttatccctcgatatatttataaaattatttaaaataatatactataataaattcctatccttttttattgtttaatattagtatagtttaagtttaacagcatgccaaatcctttggcatacgtgatggccttcaacaatctctctattaagtatatctattgctagagtattccggaagtaaaagcacattaaagcaagtatgagatgtaggtaaccttt

SEQ ID NO: 628785 - DNA, 219 bp, Homo sapiens
ttatagatcccccgactggcgccatcacggccggtggcccgacgtcgctcttccccgacgcccttaacccgcagctgtatctgaccgcctggtatggcaaaccgactgtggagacgggggtgccgtcaaatatttacaccctcgacaccacgggactgacccaggtgacgaacggtaaggacaaggcccgctttgtgctatccccaggtcagaggtaca

SEQ ID NO: 628786 - DNA, 793 bp, Homo sapiens
catataaccatatgaatttatttagagctaactttcaaagggaagctctaaattaatttcatgatggttatatgataaaaaaaaaaaaaaaaaaaacaaaacaaaaaagaaagaaaaaaaaaaaagacaaaagaacaaaaaaaaaaaaagaacacacaacacgacaaaaaaaaccagaacaaacaaaagaagaaaaccgaccacataaacaagagagaacccacagacggactactcagcagcggccagccctccacacccacaatgccgacagacacaactgaaacaccaccacaacacacaccacgcacaccaccagcaccgccgcaaccacacagcccgacccagcccccccacccacacaccccacacctggaagcgccaccagccacgaagacacacaccgtcgactgcgcgagatagctagcaactgcagccacgacgggcgtgcgtcagacgcagcgaacctcccccccacccactactactcatcccccctatagatcctatgtattccaacataataacaactaattatctgccgcatcagcacaagatcagccaccaacacactatttactaggagcatatcgcttctcacataacatacatccaccatactactacacttacactctacttagtactaactaactacacactatactgctacatacctaacgaaaacacacatcaatacaatcaccataactaaacttcactatcaactaatatattcaatctaacaacaacctaataatcaactataattaatacaataatctcaatacaa

SEQ ID NO: 628787 - DNA, 371 bp, Homo sapiens
caagaaggcagggtcactcctccctatggctaagttttggctgtgatgatgtgcttaggcacacagtgccatttaaacataccttatcttttatctgataaatgattttttaaaaattacctgtattcatcaatggctaatactactgttcacctaaatccagtacaactaattttccctccagctttggaaatagatcagtttttctccacctgagcaccagagaaagtagttgtcccactctcacccccccaagtatatatatttgggggtctttttgtgtgaaaaatagtttctttagaaaattaggttcatcatctgtgagaggtgctcatgctgtggtgtgtgtttttgtttttagtcactttttt

SEQ ID NO: 628788 - DNA, 182 bp, Homo sapiens
  misc_feature (2)..(2): n is a, c, g, or t
tntaatatcagcggagactttatttgggccaagcttgaggattgcatcccaggagcacagattcaagttgccctgaatatacactccgattagcagaagttgaaatggattttaaaaggacaagagagctcctgagttgtttactaagaatttacattaaaataacaaactggctggctgca

SEQ ID NO: 628789 - DNA, 822 bp, Homo sapiens
ccctgcccatgacccctagcaggggccctctcagccctcctaatgacctccggcctagccatgtgatttcacttccactccataacgctcctcatactaggcctactaaccaagcacactaaccatataccaatgatggcgcgatgtaacacgagaaagcacataccaaggccaccactacaccaccgtgtgcaaaaaggccttcgatacgggataagtcctactttagttacctcagaaggttctttgtttcttcgcaggattttcttctgagccttgtataccacttccagggctagccccgttatcccccaacttaggagggcactggccttccctagacaggcagtcacctccgcataaagtccccatagaagatcccactcctaaagcacagtccgtagttagctcgcgagtcaggagctaatgaatcatcctggaagctcaccatagtcgtaatagaacacacgagaccggaaaccaatgtagattcaagcactgcttatgacaatttgtactgggtctctattttaccctcctacaaggcctcagagatacttcgagtctcccttcaccattaccgaaggccctctacgggttcaacattcttgtgtagccacaggcttccacggacttcacgtcattatgggttcaactttcctcacttatcgtgttcatccgcgaagctaatatttccactttagatccaaacatccacttggcttccgaagccgccgcctgatactggcatttcgtacaacgctgcgtctgactatttcccgtatgtctccatctatcgatgagggcttaacaaaaccaaca

SEQ ID NO: 628790 - DNA, 175 bp, Homo sapiens
aatgtactgtgcactatcaagaggttaggatttggctgaagctcttgttgggaggtggggggtgcagatggagtgggtgtagcagaggggagcacttggcgctctggagcggttgggagcttggttgtgtcttcagctgaggcaccctgaggtcgccccgatgtggtctggcggg

SEQ ID NO: 628791 - DNA, 666 bp, Homo sapiens
ctctctggaggcattgcaagatccaggaaaaacaagtgatgggttgcttttgaatgagaatgagcagtttatttgttaactggtggtattatggaaaatccaagtaaagaactgagggtcagattgaccttgcctcatagtattcgatcagattcagaagatatctgtttatttacgaaggagtgaacccaattcaagctcctgataaagacagaacagttttatagacagagcttttaaagcaagcatggaattaaaaccgtttctcagattatctccctccaaactctaaagaaggaagtataaagtcctatgaagccaagcgtccgccgttcatgagcaggttttgagtgttcattccgttacgtgatgccagaaattaggcggcgtcttaccctcagctcatgtgggagacaattgtctagtcaaagaaaagaaaaggttccaggtatcgtgtaaaccttcatggtccaagaattatatcgaaagaagagatcaagtgactggtatagagtggaaacggctcttaacacatttctaaacagtggttacttgcaagtgctatacagtattggatcacgattggaatgcaaaattgagcacatcatatgacaaaccattggctgctgtcaccaaaggacttacagaaaaaacttgccagagaac

SEQ ID NO: 628792 - DNA, 517 bp, Homo sapiens
ccttgcgcactgctcaccggcagttagcttgttcccaggatggtgggtggcgactgatcatctaggtcgtgctttgatgttgcatggtcccagagacgtctaccatcagacatctcattacatcttgttcatcattcctcgtgaggaaaagacttcggacatgatataggacttgctatatcacaaagtattgtcatatccggatgtctcatttagatcttgtacaatcactgtttaaggtaatttggcaagttattaatactcatgtcctcattttactgaagaggaaactgaaatgcagagagcttgtcttttgcccaggatcactcacccagtttatcgggaggcagcagcacggggattaagaacatgggttatgccgacaaccaaccaggcagaattccagctctgtcagtagttagctgtctggccttaggaaagggatttcacacctctgtggcttagtttccttgtccattaaatgctcataagaatagagctttcctcacagagattg

SEQ ID NO: 628793 - DNA, 396 bp, Homo sapiens
  misc_feature (3)..(3): n is a, c, g, or t
  misc_feature (29)..(29): n is a, c, g, or t
  misc_feature (50)..(50): n is a, c, g, or t
  misc_feature (56)..(56): n is a, c, g, or t
  misc_feature (87)..(87): n is a, c, g, or t
  misc_feature (101)..(101): n is a, c, g, or t
  misc_feature (104)..(104): n is a, c, g, or t
  misc_feature (391)..(392): n is a, c, g, or t
ccnagggctgggggtgaagtgcctttttngggctcctagccccccacagnagcatnccccaggggtgtggttaacaattaaatggcnccctttaagcagcntcncatcccacagatggcctaagtgttaacccagctcaatggagagtcagggtgacagccttttacatcctgccctcttggtaccctgggttcttgtccagcatccagaaagaatcaggtcacatggacttgaaggatgcagagattttattgagtgtgtaaaaagtaaagtaaaggttcctcttcaaagactttcctccccgtctaattagaaataaacagtaacttctcttaaaaacaaaatttattcaaagacctgtgctaacattcttaaatatctgctagctganntaat

SEQ ID NO: 628794 - DNA, 800 bp, Homo sapiens
  misc_feature (9)..(9): n is a, c, g, or t
  misc_feature (16)..(16): n is a, c, g, or t
  misc_feature (18)..(18): n is a, c, g, or t
  misc_feature (67)..(67): n is a, c, g, or t
  misc_feature (231)..(231): n is a, c, g, or t
  misc_feature (342)..(342): n is a, c, g, or t
  misc_feature (356)..(356): n is a, c, g, or t
  misc_feature (608)..(608): n is a, c, g, or t
  misc_feature (610)..(610): n is a, c, g, or t
gcgcggganttggtcntngggaggagctggatcgatcgttactccgggaagcactgttcaggacttnttgaacctggccgacaaggtcgagcagcatcttggaatggtgttccacaggtatctagagggaacccgaccacgtctcagaattctgctcaacggacagccggtgaaaccctgggatcctttcatgacggaccatccggggaaaccctacaaccctcccgtatncaagcacccgacactcaaggggattgaagccgaatgtcatgttttaccgcacaaggacatgctttctggcgaggattttgaagtgcttggtggccctgaaggctggacggnccagcaggggtttnatgtttatcgcaacgagcgccttctcgttgcaggcagttggctgggtctggggaccggtaggtcttggacaaaggacgaagctcaccgattggcaagaattcgtctggatatacccaactctgccgacgccgactggaagattgatatccgcaagtccacggccagaccccctgtctatcttcgagactggctgacccgtcttgccgaagctacgcgtggacgtgcgcgccgagcctttgctcacagaggcngnccaccttgcttggaaatcaacaggttgccgaagccggaaggtgaggcaggaccactgggggatcctagagtcgactgagatgaagctgagggtgttttaaaaaaaaggggaggaggggggggggtatttttttattttgaattaaaaataataaaaaacgaattaaataaaaatatacatttaatgacat

SEQ ID NO: 628795 - DNA, 957 bp, Homo sapiens
gcacgcggactatccccctaagacaggcacaaagacatgggaaccagctatacctataattcggcgcatgaggctggagtcctaggcacaggtctaaggctccttattcgagccgagctgggccagccaggcgaagccttctaggtgaacgagccacatctgagcaaggtcatcgtgatagcccaactgcgatttcgtaataaatcttcttcataatcaatacccatcatcaatcggaggcttgggcgaacatgacattagttccccttaatgaatcggtagcccccgatatggcgttaccccgggataaactacataagcttgctgacgtcataccgtcggcctctctcctactcctgctcgcatcgtgctatagtgtaggccggaggcgaggagacagggttgcaagcagtgcgtaccctccctgtagtcagggggagactactccacaacccctggcgaggcctgccgagtagtacccgtaaccaaatcttacttccttaacaacctagacaaggtggtgctgccctgctgatgcttgaggggggcgcatcaagttgtgcagttcacaaacgaagttagtcagtagtaagagtgccccgtgccatagatgccacaggtaaccagaacgcgccctcttcgtggctgactccgtccgtaaatgcacatgcaggtcctacttcctcctatactcctcccagtgctaggcgtgtcatggacatgcaaatatactactaaacagaccgcaattctccaataccactttctgtcgaacccccgcgcggaggacggagaactccattctatacaagacctattgctgaggttgacggtcaaccctgaagttaatatgcttaacgctacccggggtttggaaataatcccccatattgtgatgtacttagttccgggaaaaacagacccttgggatcactaaggatggccgagttggaacaa

SEQ ID NO: 628796 - DNA, 813 bp, Homo sapiens
  misc_feature (296)..(296): n is a, c, g, or t
  misc_feature (602)..(602): n is a, c, g, or t
  misc_feature (813)..(813): n is a, c, g, or t
ggcatttactagccagagctctgaaaggcagtgctgtcgtgtttcttgtactgcgaccaaagtaaaaatccacagcacattccccttgcaagttaggggaggccctactgacttctcaaagcagagaggcagcttatcaaactcagcgctcgaaaacttctgtttacgattgaggtgggggagatggacggccagggaacgtcacagagttgggatgttccatggaccatgttgcccattgcaaccgacacaatcgcgcggaacttccatggagtaggaggagtggtccactcccnttcgtactcacgtgcagcgtaagagatcttagcgagaggcgggttaattttgccctcgcaaacactacttaggccaagtagtgcgaagggatggcatgggcagccacgtgcctcgagccgctccctttcaatcttgatcttacatattgcatggcccttataccatgtcgtgtgagattggtgccgtagtttcgtggcatattgtgttgttaccccctactcgagccccctattgacgcctacagtctgatcctatggaggtagattccgttgttccacattacataacatgtcccatagaccccnttggagacacatagacagaccacagaatttatagagaacataacacattcatatttacaaaacaaaagagacagagataggttaacatacacatatacaccattagaaaaacaaacagagagagcagagacattataccacttggagggaccaaaacagttatatgggcgcggggacttgtgaacaattccctgcggaaggccggtttggn

SEQ ID NO: 628797 - DNA, 885 bp, Homo sapiens
cgaggcgtttcaaaaggggccccaaaaggtggggttgtacagaataaaagtgccgtctggcaaaaaaacacggggccatgggcccctccaaagtgggggcggggccaccagcacacagctggggggtgggcgcaaacaagaccaatcggggaaagccgagaaaagagaaacagagtgggggtgcgccgcagaagagaatgacctacgggcagtcggcaagacctcgtttcataatggccgcattcttgtccccgccggtactcacaggtgaaggagccccgcggcgccccccccaagcgggggaccaaacaccgcctttactctggcggagggcccaaaaaacgataatgttgtcgcgaccccctcccaggcaaaacattcttgacaatgaggcgacccagcagggcaatcccctccaccaaccaggtgagtctcctccacgtgcacaccatagctaaaaggtggccaacccggagtccccacccgtgtggcagtgggcgacaaagacaaccgcccccccgtgtgtacaaataggagcacacacataacttttttggcaaaaaaataaccgcgcgaacctgattatgttatcatcaatcgaccccaattccccaggactcctagatccgcccacaatttctagatacagatacataatgaaggcgcccacaccatttaataatagcacaactctacttcttgttcaagaagaaaacaatcctgttattattccttctggcccacaaaaatcgctgaaatgcgcttgcttttaatatttataggcgcttgatgtcaccatgcgggttttcaaaacattttgtttaatattctgcatttttccgggcaaaaaaaaattcagccaaatttaacagcccacaaaacaaa

SEQ ID NO: 628798 - DNA, 211 bp, Homo sapiens
tagaagtgcaatagcatttttttcacgagctaacattagttttcctttggtgattggttttaactggctcatgaataagcaatactttagctggacactcatgggttttatggtataaaacgggtttcttcactccccgtttatggatactttgggctcagggctaattttggttccttacaagactgctatggaaacttctaaaactagg

SEQ ID NO: 628799 - DNA, 234 bp, Homo sapiens
agagttatagcatctgtttgagtaagagacgccagtgagaggccagatcaataagatagaaaataatagatggacgttatgtataaaaggcaatgtttaaattatgcaatctagtacattcgattggatgattcctactaaattgactaaccaaaatgtgaaagttcggatacccggatggaaatgtttgataaattgtacgtgatcatttttgattaggatgtaataagtaga

SEQ ID NO: 628800 - DNA, 374 bp, Homo sapiens
gcgaccaattttatcggataaccaaccaaggaacggaatggtcataaagccgagaatcgaactgatcatcaatgcatctgttggaattgctttgttaaacaataacgtctgcactatatagcctgcaaggaaagtctgaattaacccggagttacccgcctgaccaaaacgcagccctgttgccagccagaaggatttgctctggaacatgctaccagcaggtgcaggttttgctgtcggttggttactgtcgttaaccttctcaaagaccgggctttctttcagattcatacgcaaccagatagcaaagaccatcacgacaacactcgccaggaacggtatacgccatccccacgccagcagttcctctttac

SEQ ID NO: 628801 - DNA, 490 bp, Homo sapiens
  misc_feature (27)..(27): n is a, c, g, or t
gctcctgggcctgctggggcctctgcntgcccagcctcagggggggccctggcagaccggagagagcggaggcccaaggagggcgcgccttggccccacaccaacccccagggcctcgcgcgagtccctgcctagccccttttgcccctgcaaatgcccagcccaggcaaattgtatttaaagaatcctgggggtcattatggcattttacaaactgtgaccgtttctgtgtgaagatttttagctgtatttgtggtctcggtagttatatttatgtttagcaccgtcagtgttcctggccaatttcaagagaggaaaaaaaggagggaaaggtacaagaagagagagaaaaggtgaatgacgtttgtgtagccagtaggagaaaataagatagataaataaatcccttcggggtaccctcctgtataaatccgacctgtgggtccgtgctcgaataggtagtgaaactgatagtagtttgtaaaacttt

SEQ ID NO: 628802 - DNA, 443 bp, Homo sapiens
agaataaagttcctttttgttgttgaaaggccaaaaaattaagaaaaaaacaaaaaaaaaaaaaaaacccaaaaaaaaaaaaaaaaaaaaaaaaaaaaaaaaaaaaaaaaaaacaatgaataaaaaaaaaaaaaaaaaaaacaataaaaaaaaaaatggcgcccccttggcccaactcacctttaacctctacaactttaagccagcggccccaattcgggcccaattggccaaattccccaaaagggggggggtataacattaaacggcccgcgttttaaaaccttgctacttgaaaaacctctggcttacccaatttaacgcgcttgcaacaaaatccccttttccccatttgccaaaaaccctcagggcctcgacacaacgctcttccacaacgttctcacccctaaaggcaattgaaaattctaccgcaaaatttcgca

SEQ ID NO: 628803 - DNA, 82 bp, Homo sapiens
tcgatacgactttttcttttaactttcttttctcaccgtcagggcttctatttcactactcctccccttctgtcgtcttctc

SEQ ID NO: 628804 - DNA, 170 bp, Homo sapiens
tagccacaccacgtcatggaaaacagcagtgattaacctttagcaagtaaactgacagtaacactacgctatactaaccccaggcttggtcaatttcgtgccagccaccgcggtcacaggattaacccatgtcaatagaagccggcgtaaagagtgttataagatcaccc

SEQ ID NO: 628805 - DNA, 308 bp, Homo sapiens
tcctgagtatccggaggcattaatacgggttcatagttcatcctctattagcataacgtgaagaaggttgagaagcactgtcgatgtattagaatgctagtggactgttatacagctgtctggttgtaaccattatggtagtctttttagtcttcaaagtgtctcagtgatactcagtggaaccaagatagattataaggaagcaccgtgctcccgtaacagttatataaattaggattttggtaacgtgaactaagagcgccccactccaaagtgtaacttatgtgtcaaaaggtcacttgattcag

SEQ ID NO: 628806 - DNA, 257 bp, Homo sapiens
tgctctagaggatccatgttattgccaacacccaacactgtatatgactcagagaggacccagatggtgtctaccatcttccctatatatattcatgccttgagggcttcattgtagatcaaagcaaggcccccaggaaggtgacatactcctggaagttcacctcctggtccttgtaccgggtccacgtcttccatcagccttgcaattttcagcatcctgcagcttcgagccaatggtcgtgtagggggataaca

SEQ ID NO: 628807 - DNA, 1628 bp, Homo sapiens
  misc_feature (1356)..(1356): n is a, c, g, or t
  misc_feature (1399)..(1399): n is a, c, g, or t
  misc_feature (1439)..(1439): n is a, c, g, or t
  misc_feature (1459)..(1459): n is a, c, g, or t
tgcacctgattcacgtaaatcttgtagctaggcattccggccatctacgacctactaagacgatagctagtagtatgcgcgtcatcctcgtcattggtcgttcgcgcgtagtatagcctataccggactgatagtactggtagtgaagcaatatgctagatctacagtggtctgtacagcggccacgtgccctgctgtaggcgcaggattagtgcactcatctggcgatgactgaagtcttttggctcggccttagcatcacatagggccgagtaggagccgtgcagcgccataagtgcagatcatcccagatcctcgctgaaccaccattatgtgccttacgttatgtgcagcttcctataagtcggttaaaacgcgttacttcaccaactagcgtcaagacaactcagacgtacgttgccgcgaagcgaaagtcctatccagtgcacgtcatcgcgaatggtggaggattgcgatcgtaaatccccgatacatagaagagaaggagtaatatccagggacgtctcacaatggtgaaaacccacggcggagaaagtgcgcgcaaagttcatacccatggtattcccatacagcgccttctaaaactgattaaggtttcctcaaacacgtagatatgtcgctatgagcacaaaattcttacattgggacagcatgagacgtaacgcgcacaagcaatcgagcgtccttactcatcacccggaattcccccatgttgaacaccaacagccccttcgcctctgacgcatgagaattccatctcgaaaaggctaaaccactattgagaatggcggtaacttcgaccgttccaacggagcattacccctccgaagaacatcgttctggagcgcagccccaccgtatgaatgcggcacaaaggcgagaaagagccactgtaacatccatcctgcacagcgagtcgacaacgcacagatcacgcctcaagccttcatgtaagcgtacagcctcttttggccccgtcaccgagacgattgagcgtccattatagacacttctacattaggacgccattgggcactacaaacggtcggccaaacgacagagatatggcgatgacaagtcctcaagctcagtggtgccgcatcgactacgcgacgcgaagacctgcgacacaaggagcgccagccagcacggctgacaattggctcacctcaacacgccataggggcgaacacacctactctgaggtgcgtgtcgccaccacgctcatatgtcagacctcagctcagtgaacacaagctaggacccctatacgtacacaagctgcctgcaggaggtcacacctgtgacacctgggccaactgagtactgtcaganccagcgtggctccgcacatatgcgtagctcaccgatacaccangaccctgctcgcacacggagcacatagacgatgtcgtgcncacacaccggctatgagcgncaccaccgagtgagcagctctacgagatcacgcgtactacgacttatatcgagattggtgatcacacatgcattcgccctacgagacatcggagcgccgctcagacggccacgcgccgcacgcacacagcgacacaccggaccaaccacacgcaacgcagtcagaacgt

SEQ ID NO: 628808 - DNA, 998 bp, Homo sapiens
  misc_feature (58)..(58): n is a, c, g, or t
  misc_feature (127)..(127): n is a, c, g, or t
ttgtgctaacttctatgtcaatgacggaagtactcacgagccgatctatagtttaccngatgctctctctcgcctctcgtaatgatgctgctcctgcacagatatccgaccacttgttgtgagtccntcaaatccatatgtcgcttgtgccaatatcaacacctggcgctattcgaggtgagcttctccttcttgtagtcccctcctcccggcttctctactaaaatctttaaggggcgctctccctgtcttaaacatatatggccaaaactcaccatacctaaaatgtctggccaccaattctctcctgtggcaacagaattgctctcctgtaaatctcctcttgggcaaaatcaacccaagtgtgtcttgcgcgctgcgatagcgcgctgtgcacgaaggggtgcaaaaaaggccgcggcttcatcagcggtacaccccaagaggccggggcacgctctgccagaacggttgagaacgcgggaatcttagcagcctcacggggtgtccagacagagcgcctgttcacacggtagacgcccctcccctcgctcccccactcgcaataggtggtacccctacatgccggatacactcctgcgatacggaacagcggtgtgacgtagaagcgcctccctcacgaacactccgcggcgccagaaaccctgtttctggtacgcacatgagcctcaattctctatcatttgtctgaaaaatttgagcgtgaaaatcactcccgctactgacaagtgattgtacgagcagagtcgcggactagaacaatcgtatgcgatacaaactggtcttttcttataggagatacaataccactgcggatgaactgcaatattttattccgggcttccacagccctagaaacaaaaatgaatctgctcagccccacttctaaactagcgcctcgctgtgttcaaggatccagcgatgaaaattacccattcatgaggggaataaaatttaaaaccacagcccacaaaaca

SEQ ID NO: 628809 - DNA, 221 bp, Homo sapiens
gctaagtttgaaaaataaaaagaaattgcatcacactaattacaaaatacaggttctgggaaaaaatatttttcttcattttaaaacttttttttaactaataatggcttttaaggagggggcttaatttggggggtggtaactaaaatcaaaggacattatttactttaggggtctctttttggataaggaatacatcattaggcttaaataggccggca

SEQ ID NO: 628810 - DNA, 228 bp, Homo sapiens
tctagacgatcggtatgagcagctggagaatacaactgggcttaagcgcgtgcgaggtgcgttccatggggcggtgagtcagccagaaggccccactggcatacacatcgtcaacgagccggaccccctccataaaagctgctaaaatcattaccaactcagtctgattagcacatgcagctgattgagatgcgtgtatgaataatccagggtctgggtctgaggccg

SEQ ID NO: 628811 - DNA, 211 bp, Homo sapiens
gcacgcccagctgacagtttcttacaaagttaaacatacacttaccgtatgatccagcaatcctactcctgggtatttactcaagtaaaacaaaaaactatcttcacagaaaacctgtgcacaaatgtttatagcacctttattcataatcagagacaccccactggaaatggataaacagacagtagtacatcacatgatggatacttct

SEQ ID NO: 628812 - DNA, 641 bp, Homo sapiens
  misc_feature (439)..(439): n is a, c, g, or t
atccaggagaccagcagcaggctcaagaccccaaatgttgggcaccacaaataatgtgatatgtgccaggagcacggggggtaggggtgaaagagaaaaacaataaggccttaatttttgacacaccatacactctgaaattgctgtttagcaatgcatttggccccacaaaatagggggtggaggtgggacaaaagttaaacctagatagcctcagtcctaatcacccaccttcctataccttggaaggctgctgaaccttgcctatgtcgttctcctaactcctccagacttcatctgaatgccactcagacacaaacaaaatcacacagtagcttcaagtagccctctccttcatctcagccctaagtgagctggccactgagtaataaaagaagctaccacatttatagggaggccagtctccaaatacaatggnagtgggggttgttcactgctgtgagtcaaaaattgactgttataatagaagagagttttaaaaatgtaatactgtttatttaacttcaaaaacatttcagcattctaaacatccaaaaaaaaataacagacggttgcgaaatgtgttaaagtacagaagttcttgaacctttatttgatgcagggattctttgctttggtgg

SEQ ID NO: 628813 - DNA, 187 bp, Homo sapiens
actctggagagagagttttggcacttgggttcctcttcctccaggaggagccatctgacagggagctgttatcagaggcactgaggctctcgtgcccaggtggagagcagcagccgggaggtggctcgcgtaattgcgccggctgatcgaacaggcagcgctggagctcctgcagcttcatctcctc

SEQ ID NO: 628814 - DNA, 726 bp, Homo sapiens
tcacatgtactaaaactagacgcccatctcggagattcatatacctcacaatctctgcctctcaactagaaacgcttaagcccttcttctcactcactgcaatgcttatccaatcatacgcaggcacgctgttgaaggtgcgtaattaacagccaacacctccgagactagcgcacaaagtcttagcgatagctcctcaattacccacactaggatgaataatagcaggttctatcctgtatcaatccgtaacatataacattcttaatttaactatttagtattatcctaattactaccgcattcctactactcaatttaaagctccaatcaccactgaacctactactatctctgacacctgaaagatagctaatcatgacttaatctagccttaattcgcatgctgaacctctcgcatctccctaggaggcctagtccccgtctaaccggctttttagcccaagagtgggcctaggttatcgaagaagttcacaaatagaaacaatagccgtcagtcgatccccatcaatcattagaccgaacatcagcctccttaaccgtctacgttctacctaagacctaatctacgtccacctcaagtcgacattactcccccatatctaacgaagcgtacaaaataataatgacagttggaacatttgggaaaacctgaaccccatttgtccccaaaattcatcgaccttatcacgcatactcctacct

SEQ ID NO: 628815 - DNA, 392 bp, Homo sapiens
ctggtatatataaggaaaagaggttatttggctcacacaattctgcaggctgtacgagaagcatggcacagcatctgcttctgtttgagggctcaggaaggcttcattggttggtggaagggaaaggggaacccgtgtgtcacatgatcagggaagaaagagaagcagaagagggggagggaagggtttcagatttctttttaaccaattaagatcttcacaggaaagtaaggaagtggagaacattaattccccatgaaagaacagcacccaaagcccatttccaatgaaggggatcttgccccccgttaaaccaaaaaacaaccttcccaagccccgggccccggccctcgggttacccggaaggcttcggaatttcggttaaattcatg

SEQ ID NO: 628816 - DNA, 220 bp, Homo sapiens
gccagcagtctaatcaggaaatatacaaatagtacttcagtgatcctgttcgctgcccgaatggtgtgccggttaatagcgttaatccggttggtgccttgcaagatgaatgtaatgttcagttgaatacggcaacgtctggtaatactaatttgaaacctgaaaagtccaagcaatactctttaggtttggtattccagccgacctatagaactggctt

SEQ ID NO: 628817 - DNA, 231 bp, Homo sapiens
tctttttaccacctctcccctcctcacacctggtccggcttacagtttcattccctgactagccctcccccacctgcccagcaatttactcttaaaaaggtggctggagctaaaggcatagtcaaggttaatgctcctttttctttatcccaaatcagaagtgtttaggctctgtttcatcaaatataaaaatccagcccagttcatggctcatttggcagcaaccctgag

SEQ ID NO: 628818 - DNA, 459 bp, Homo sapiens
  misc_feature (76)..(77): n is a, c, g, or t
  misc_feature (79)..(80): n is a, c, g, or t
  misc_feature (83)..(83): n is a, c, g, or t
gctcctctaccaacgtgtacaactcatacttacctggcaagggagacaccgtgatcaagaaggcggttcacccagnncnnggntcagccattgcactccgactgtgctgacccctgcgaatttcccaaatgtggaaatctcgattgcataatttatggtagtgggggactgcgttcgcgctctcccctgatcttgatgttaaaaaaatatactaacagatttaatttgacatgtgtttcaactcaagagttcaattgagtttcttgttgaggagaaatgttcttatcagatgattggcaagttaaaactcaacctaattgcctcagacatacattttgtcttctcataacccggatggatgtgtgtgatctgttattgtgatgggtgattatgcctgtcatgtcctgattatgtgaaggaaaaggcctacttctgaagtcgacgcggccgcgaatttag

SEQ ID NO: 628819 - DNA, 980 bp, Homo sapiens
  misc_feature (6)..(6): n is a, c, g, or t
  misc_feature (360)..(360): n is a, c, g, or t
  misc_feature (377)..(377): n is a, c, g, or t
  misc_feature (379)..(379): n is a, c, g, or t
  misc_feature (394)..(394): n is a, c, g, or t
  misc_feature (396)..(398): n is a, c, g, or t
  misc_feature (400)..(404): n is a, c, g, or t
  misc_feature (406)..(406): n is a, c, g, or t
  misc_feature (409)..(410): n is a, c, g, or t
  misc_feature (412)..(412): n is a, c, g, or t
  misc_feature (431)..(431): n is a, c, g, or t
  misc_feature (444)..(444): n is a, c, g, or t
  misc_feature (455)..(455): n is a, c, g, or t
  misc_feature (458)..(458): n is a, c, g, or t
  misc_feature (464)..(465): n is a, c, g, or t
  misc_feature (467)..(467): n is a, c, g, or t
  misc_feature (493)..(493): n is a, c, g, or t
  misc_feature (504)..(504): n is a, c, g, or t
  misc_feature (888)..(888): n is a, c, g, or t
  misc_feature (939)..(939): n is a, c, g, or t
gaatcnttcacgacacagaaaccaagatggaagaattcaaggaccaattacctgctgatgagtgcaacaagctgaaagaagagatttccaaaattgagggagctcctggctagaaaagacagcgaaacaggagaaaatattagacaggcagcatcctctcttcagcaggcatcattgaagctgttcgaaatggcatacaaaaagatggcatctgagcgagaaggctctggaagttctggcactggggaacaaaaggaagatcaaaaggaggaaaaacagtaataatagcagaaattttgaagccagaaggacaacatatgaagcttaggagtgaagagacttcctgagcagaaatggcgnacttcagtctttttacngngtttttgcagtattntnnntnnnnntnccnnantttgtaaatttagtgaccntagctagtgatcntttaatggacngtnattctnncngtataaagttcacaatattctatgtncctagcctgtncatttttcagctgcatgtaaaaggaggtaggatgaattgatccttataaagatttaactattttatgctgaagtgaccatattttcaaggggtgaaaccatctcgcacacagcaatgaaggtagtcatccatagacttgaaatgagaccacatatggggatgagatccttctagttagcctagtactgctgtactggcctgtatgtacatggggtccttcaactgaggccttgcaagtcaagctggctgtgccatgtttgtagatggggcagaggaatctagaacaatgggaaacttagctatttatattaggtacagctattaaaccaaggtaggaatgaggctagacctttaacttccctaaggcatacttttctagctacncttctgccctgtgtctggcacctacatccttgatgattgttctcttacccnttctggaatttttttttttttaaataaatacagaaagcata

SEQ ID NO: 628820 - DNA, 162 bp, Homo sapiens
ggatgtttccttcctcccccaatttcctaaatttcttcccttatctatccaaaggctttgatgtaatgttcatattaaagcctgaaagcccctgtattttactgaaataaactatttgtattcttgcccttttaataaaaaaaggcttgtcctttatagtta

SEQ ID NO: 628821 - DNA, 222 bp, Homo sapiens
  misc_feature (76)..(77): n is a, c, g, or t
  misc_feature (79)..(80): n is a, c, g, or t
  misc_feature (83)..(83): n is a, c, g, or t
gctcctctaccaacgtgtacaactcatacttacctggcaagggagacaccgtgatcaagaaggcggttcacccagnncnnggntcagccattgcactccgactgtgctgacccctgcgaatttcccaaatgtggaaatctcgattgcataatttatggtagtgggggactgcgttcgcgctctcccctgatgtcttgtttaatgataaactgttgcttggcg

SEQ ID NO: 628822 - DNA, 162 bp, Homo sapiens
tgattttggagaccaagctaagtcattctcagtggtgaaaagttgaaagcatttcctctaatatcaggaacaagacagggatgcccactcttgccacttttgttcaacatagttttggaagtcctagccatgacaatcagagaagaaaaaataaaaggaatc

SEQ ID NO: 628823 - DNA, 140 bp, Homo sapiens
  misc_feature (26)..(26): n is a, c, g, or t
  misc_feature (50)..(50): n is a, c, g, or t
  misc_feature (75)..(76): n is a, c, g, or t
  misc_feature (88)..(88): n is a, c, g, or t
  misc_feature (99)..(99): n is a, c, g, or t
  misc_feature (112)..(112): n is a, c, g, or t
  misc_feature (127)..(127): n is a, c, g, or t
gaactcatctcctcctgttttctttntcttactgatatgcaaatgatgtntactacgttggttgtgaccacaacnncaggcaagtgcnacaatcacgantgttgctatgctnctttgcaaaaagttnaaaaaacaaaaaa

SEQ ID NO: 628824 - DNA, 474 bp, Homo sapiens
gcattcagagagcacgtttatttacaaagcgctttacaaacatcagcttatgcctccccacagccccctgcgaggtaggtcagtagtcatatctacagtttacagatggggaaattgaggcacggaatgggggtgtggcctgccccattttaaagagaccttcccacccacccaaccaaaaattacaaaagaaacaaaaaagcactggtcctaaccttttcctttgaactccagagggtatgaccagcccttgtttaacactgcccctccccacaacgggcagcctgaccaggagccacaggggccttaaccccaggggcttgtgttcaaccttggagattggcacttggcccaacctgagcaagacaggcccatgaggcccgaaaaattaaggaaaaagggggccaggttgacttttttttgaaacatggggttaggcagggaagggacccccccttgggggcccagctttaa

SEQ ID NO: 628825 - DNA, 998 bp, Homo sapiens
  misc_feature (489)..(489): n is a, c, g, or t
  misc_feature (995)..(995): n is a, c, g, or t
tgattcctacccctcacaatcatggtaagccaacgcaacttatccagtgagccactatcactgaaaaaaatctatctctctatactatatctccctacaattctccttattataacattcacagccgctagaagtaatcatattctatatcgctgcttgcgaataccacatcttatcccgcaccttgggtatcatcacccgatgagggaaccggaggcagaatgcgtgaacgcagtggacatacttccgtattcatacacccatagataggtctcccttccgcctactacatcgtactaagttcttcactcacaatgccctaggctcactaaacgttctacgactcactctgcatttgcccaagaactatcatactcatgagtggaacaacttattattgactaatccttaacagcgatagctgtgatagtaaaagatatcctctaaccggaggtccactgtatgagcttccctaatgcgcatgtcganggccccacatcgctgggtcaatagtcactttgcctgcaagtattctggaaaacatatggaggctactcggtataatactgcctcacactaaatttctaaccgcctgaaaaaaacatatagcctacccccttccctgtgttactaatacctatgaggcatattataacagggtcatttggctaatgacaagaagacctaaaatcggggcagttggataacttctttagtgagcaaaattggccctgtaagaaaaaggcattttttaatcagagccccttgtaggtcacaggggcaggaatctataagaggcccaggagataccgcataaatttgcaagcaaactagagcagagccacaagagaaaagacttcagaggaaaatacccaatattgtggagaacagacaaaacttccccacaaataaggaatttgtacagcggcaactattaggaacacagcctttaagggcgaaacacaacatccccctactagtaggccatttctgtngcg

SEQ ID NO: 628826 - DNA, 158 bp, Homo sapiens
gctgaaggcaggacactgcaccttcgcccacataggtatataatttaaaaagttattttctagtgtgataaatgaaagacctcctattagctgggattacaggcatatgccatcatgcctggttaatttttgtatttttatgtagaaacgtggtttca

SEQ ID NO: 628827 - DNA, 1122 bp, Homo sapiens
  misc_feature (322)..(322): n is a, c, g, or t
  misc_feature (421)..(421): n is a, c, g, or t
  misc_feature (564)..(564): n is a, c, g, or t
  misc_feature (692)..(692): n is a, c, g, or t
  misc_feature (709)..(709): n is a, c, g, or t
  misc_feature (735)..(735): n is a, c, g, or t
  misc_feature (737)..(737): n is a, c, g, or t
  misc_feature (806)..(806): n is a, c, g, or t
  misc_feature (947)..(947): n is a, c, g, or t
ggctggtccggtcggaggatttaggatgcgggcgactatggccgtgggacccgtgacggaggttgaggccatggcatgcgcgtccgggagcggagtccgcgcccgccgtcgccatgccggacagctgggacaaggatgtgtaccctggagcccccgcgccgcacgccggtgcagcccaatcccattgttctacatgcatgaaatgcgttcgcacctcatcgctggtaccgaccccgttgtactcctcgatgatgagaatttctatagatgcgagtagcatcagcaatacgaacagtggtattacatagctagccactcgtgncacgttactcggtccgccgtgtgcacacgaacaatccacgtgcaggtagtcgagaggaagcggacgagtaccatactatcgtttgacctattgcttaancgcatagggccaggagaaattggcatgggttgtggacacgcagcgggatcttatccaacacgttgcttgaaccacctaagagattctatcacattcgattaatggcatggggatcccggccttcaagatggccatgttgctanggctaatggagtgtgtacagcgcagcagcaatcgtgactcagagcgagaatactcgtcattgcaaggggaagtcgagctaggcagtctacgaccccattgttgggccaaaggtcgctgagccgagtgnacctgcttaactcaggnacccttggcgggggccctaactaggntncttgaccgaagcgaatagtgcgctaggcgcgaagactacgatggcccgttaggtgattgctctgctaangaggacgtaaaaaccgctgtgcaaacatacgatgggcctgcctcgcgatgctcaacccttccattagacggcacagcatagttggggttgccgcccatgtcttggatgcttgggcatcctagcttaatggaacattgctcntgtcttgacacaactatttaacacgtccccgttgcaaaagtctttgcatatagacatagacaccaattgacacaaaatcgccttatagctaccggaggcgcgtgtaggcacctccttcagagagctctaacccacgtgaaagcgggccccacaaggtcattcacgcttgtttccc

SEQ ID NO: 628828 - DNA, 245 bp, Homo sapiens
  misc_feature (2)..(2): n is a, c, g, or t
  misc_feature (47)..(47): n is a, c, g, or t
  misc_feature (113)..(113): n is a, c, g, or t
  misc_feature (143)..(143): n is a, c, g, or t
  misc_feature (165)..(165): n is a, c, g, or t
cnagtatagtgggacacgtaacctctctcccaacccaccttgccttnacccttccccacatgaaaggattttactggctgtaaagcctatgccttaattttcccgatctttancttactgttttagagcatctctggacgtcngtatttttattttttttatttntgtttttttatttttaatctttcatttgttaaatttttaaactgtgctgcaataaaatgtgtgtggtactacttaacacc

SEQ ID NO: 628829 - DNA, 672 bp, Homo sapiens
cccaatgggctgttaccgcctccgggtttacgggcgtctgccgagttgggtcatgcgtgctgtcgtagggcttggcccgagggtctacctgggtttgcacgggggggcccggctctgaccgtaagtgcgccttcctgacttcactgctgggtgcgcggggctgggggtgcgagtaccacccgctgagagtctcttcctgggcgacctccggggcctcattcgtaggcctccttaagagagaaaggatctagaattaggaagaaggaagtgcccttatccacgatccaagcgtcttccacctgcggagctcgcttagtctgcacctcaagcgtgcggaaagtgactgccctgtatactgaggaaaaactggggctcagaaagataccatggagtagtttgaaacaggaacaaaatcttctgaaagctcggagcagaagccttaaaggtcaacatggaggacacaaagacggagagcccgagttcagggagcctgggctgccctgttaaaagccagggccatggctcagccagctaccacgtgctaagagccattctccaccagaagcctggccagacctggaagaacaaagagcatcatctctctgacacgagagtaagagttcaaaagaaacctcagcaggatagtacgtagagctcctgagccaagagtga

SEQ ID NO: 628830 - DNA, 375 bp, Homo sapiens
ggcccccggacctggggagtggaaatcaaatgggaaatttccttccattccccggtccaggggaaagtcactagttggaccctactccattaggtcccaaatgggggccccatttcacctggatcaggactttgagcatccccaggtgccccacattttgcctttggccctcaaaaaggggggtttttgtggggactccttttaccccagcaaataaaaggaattgtttgaccctaaaggcaaatggtgccctgccctactccaatgttttccatggagcctcagggggtccccctttcccctggcagccccttcagctggtagtgaaatcccttgttggacatttttccaaaaaaggtttttgggcaaactgga

SEQ ID NO: 628831 - DNA, 1021 bp, Homo sapiens
  misc_feature (763)..(763): n is a, c, g, or t
gctccatcgacgggcttgctgaatgacaacattctttgccccagtgccatagatatggtgggtgcgtgatggttgaatctgtgcccagtgtgagggatcgatggaacagacggcgccctgctcctgtggtcctggattctggcctgtgtgccggggctgcattggaacgttttttcggaagacgccgccacgggacctggcgccattgagtcggtgaccatgcaagaactgtcatctgcttgattaccccatctcgaggtgccacgccaaccacatgattgctcgaagacgaccgggtgtcgcgggacgagaatatctgcttgtatcagtctctgcttggcaacatttggtcgcagagagggaagatctcctcaccgtggtggcttagttgaaaattgcactccagagcccacgtgtcaaccaatgctgacgcatattcatacttcgcacaaactaccccgaagagcaattgtgtagtttaggcttctgggggagcacatgctccgtgagggagacctagcctcgaattgtcgaagcgctgttgtgcttgggggtccccccctggaaagtggaacacaacttctcgggagcttgtactatggcaacaggggtaatacaattgcgcttttataggaaagtaggctcgtgggtaaaccgtgcacggttatatagctctctgggcaaagttcctattttgggtccggttatcttccctttgaacacaaggaagagcatttttgcaacacgggcatggggggtggcntttggtgacacgatgtatgtcgaaaggggggtaatcgttgtgcttgacttagaaacaaggacggcataggggctggtctgggatgttaaccccaaactatcgcgaatagggacgcttggcctagcagaagatgggcggaagcaagaagtgtttctcaggttggtgaaattgcccatcgcatggaacaaggtggtccacttgggcaggggaagccactcttttagaagagggaagttgagggttttgggataccaaggg

SEQ ID NO: 628832 - DNA, 325 bp, Homo sapiens
gaagatagggataaaatggaatttatacacataatacaagaaagtttttttctgggaagagtattgatcactgacagtgtttagaattcccggtgctcagttataataacagagcaccctgactttcagtcggcttgatcagtcttttttttttttttcgagacggagtttcactctcgttgcccaggctggagtgcaacggcgtgatctcggctcaccagaacctccgcctcccgggtccaagtgattctcctgcctaagcctcccaagtagctgggattataggcgtgcaccaccatgccaggctaatttccggtatctcaag

SEQ ID NO: 628833 - DNA, 954 bp, Homo sapiens
  misc_feature (1)..(1): n is a, c, g, or t
  misc_feature (68)..(68): n is a, c, g, or t
  misc_feature (245)..(245): n is a, c, g, or t
  misc_feature (251)..(251): n is a, c, g, or t
  misc_feature (590)..(590): n is a, c, g, or t
nttcggcggcgagctccccgctgagggcgacgagggcgaggggtttatttgaataatagtaattacangattgtgaggttatgggggttctgtttacaaaaaataattcttatctggggagccattaattaatttgggatgagtttccatcaaactgggtgggtgatgagtatcaatgggctgagaatcagttatcaagtgtgcgtggcaatcatgagataaagggggggggggaaaaatactanatgggngcttggggatttttgactagtggaatcacttcattcaagggggattaaaagtgggggcattaatttagaactaagaaataactattaaacaaacaggttgtgtcaggagaacaaattctttctaaacaatacctccatttaatggcaagagaggtctcttactatggagctatcttgggatttttcatcctatgggtttctggcatgtggtcctcaattggtggggggggacattttcttttctaattaaattacttccttcctatagggagggcatagggcttgggtgggtatggaggttctctgctcttttcttcataacttcttggagggggggtnttgtctggggacttcttatctttaagggctgggggcttgggtatggcgtgtcttgttgtggggggttgagctcttcctggcagtgaggggcaatgggttgggcgactctttatctggcttggggaggaaatcggggatgggagctggggatttctggtgcaaagggggtggcctgggggctataggggggggtgacggggcctggggtgggggtgcggggcgggagctgaacttggacattaggcgggtggtagggggggacgggggggggctagaaggggggggaggggtaggcgaaaggcgggtgggcccgggttggcgtggcgcgagaacatgggggtgaggggtgatggctagcagcctg

SEQ ID NO: 628834 - DNA, 129 bp, Homo sapiens
cccgttcggcagtatgtccgtctggctgcagtgtctgagccctaggattcatctttcttttgcaccgtcaggtagcctgaactgggcattgtattcagcagaactcatcactagacatcgtactacacg

SEQ ID NO: 628835 - DNA, 658 bp, Homo sapiens
tggcacagtggaacacactccgcaggatattatccaggagaacttccccaatctagcaaggcaggccacattcaaattcaggaaatacagagaatgctacaaagatactcctcgagcagagcaactccaagacacataattgtcagattcaccaaagttgaaataaaggaaaaaatgttaagggcagccagagagaaaggtcgggttacccacaaagggaagcccatcagactaacagctgatctctcggcagaaactctagaagccagaagagagtgagggccaatattcaacattcttaaagaaaataattttcaacccagaatttcatatccagccaaactaagcttcataagtgaaggagaaataaaatactttacagacaagcaaatgctgagagatttggtcaccaccaggcctgccctaaaagagctcctgaaggaagcactaaacatggaacggaacaaccggtaccagccactgcaacaacatgccaaatggtaaggacaactaacctcctcggactcatgcctcactcatttacacaaccaccaattattaataacctagcaatgccatcccttatgagcggcgcaggattataggtttcgtctaagattaaaatgcctagccattctacacaggcaactacacctta

SEQ ID NO: 628836 - DNA, 200 bp, Homo sapiens
  misc_feature (124)..(124): n is a, c, g, or t
  misc_feature (150)..(150): n is a, c, g, or t
ctacacgaattataaacattgtagtcgggacagtaatcctggcacgtggtctcaggagtttctggcagttttcctctgttttatatataactataatatatatgaatagataatataactaatngtgcgtgagatgggctgcacacctgngttgctcggggtagggctgccatgctgcagagctgatggagtgatgttgt

SEQ ID NO: 628837 - DNA, 800 bp, Homo sapiens
tggatccctgagcgtaaaggaggcagacctgactgtgagctgcttgtccccatcctgcggcctgtcctggtggacacagagccctccgtggtgccctggggattggattggatgccagtgacctcacttcctcctctgcccctgcccctgcccctcccagcactggccacaccctgcagcctgccccagtggtctaggcccgtgtgtgtttgctgactggcagtccacgtgtggtgtgtaccccatcactttggcctggctccagtgcttgcctctgtgactcctgtgtgtgtgcatctccttcttgatgtgactgctgtcattgcacagtgcatgacaaaccacatcagtccactctgatgacgaagagtaagccagagcatagggacgagagaaattgaccgatccatagccccgccatggagccatcgctgaaagctgggtgttgacacgctagtgatgactagtggacagtggacaacactacaatacatgctaggcttaccaacccagtggagtggtacgttatccatacgagcaatgtggactcctttcgagtgctttggagactatttaggaatatggactggcgggagcagactagagaaaagcaccaagaaatagccatgggagagccccaggagaaaaagggaaaatagcatcagaatatgtcgtaccaaaccttataatccccaaacaatgtgagaaatatattacaaacaaccctagaacccctaggacaacagaatacaaggtacccacaagcggaaagaatagcatatcaccatgagaaaacaatg

SEQ ID NO: 628838 - DNA, 266 bp, Homo sapiens
aggctgactctagagatccccgccttcatcatactaccaagtaggggttctgggtaaacaacctcatgattcctgtctgaagatgccagagtaactcagagtaacttaatcttggggaatggtgcaggataaggaacctgatcagatatcaagggtggggatactcttgctaaactgactcattagggttcttgctaaagactggtttttacaagaacagagcacaggtaggtattattgaggtaggtttttatgccaggacggga

SEQ ID NO: 628839 - DNA, 379 bp, Homo sapiens
tttattaaatgaatgacatacttaattttgttctctactggtagtttgccctggcgcatttctttttatttctattagccaaggcagggttaggtgttttgttttgttttgtttttccatatttttgaggattaatgataaagcacttatcttgttggaatgagagtctactaacaaatcctgtacatcataataacagaactatcatctaacaacttgttctcaataaataaactttaaaacaacttcctttattatttcaaagggcatacatagtcatatatataaccagtaaccaatacttgtcagtgtttattttaaaatgcaggttaggtttccatttaggtttgctacctaccttaaagcccctcttcctccg

SEQ ID NO: 628840 - DNA, 768 bp, Homo sapiens
ggtgggcgtgagggggacgagacccggtgctcacctgcatctgggtgtgcagattctcaggtgagctgagaattcctcccgtgagccaaagcaggtgcgtccaatgctgccctttcctaaagagcaaaacaacaggtatccccggaaggtaagtttctcaaaaataagccgaaatttcaggatggacggtcttggtacttaaaatgctaaccatggagacacggttagctgacaaatgctgaaatacgcagatacgctcagcagtgtgtctcgctcggtgtgtcttcatgcggctgccagagcagggacagtcccccagcggcaggttctgcctgtttgggagctgcgcggctccaggtcgggcggatcctctgcttccttgtggccatctgtgtcctggtgtcacgatggcaggaaggatgagaggccgactcccacagcgaggacagcgcgtggcaggctcccagaggagagggccctgttatttacgtctttgtcactcggtagagaagagcggtggacgctgcacttcgggggccgttcagattcacccagaattgggcgtccaacctccctgccgtgctgttaatggccacactccagcccggaaaaacctgccctttgagaatgaccggttctagcttttcctgcttttgaggaaagaaagggaaaagacaccaccactggtgtctgagagtttatcatcattactgataatcacaaccgtcgtggcgagcattggaatactccagagtacaaaaacaaaca

SEQ ID NO: 628841 - DNA, 818 bp, Homo sapiens
  misc_feature (13)..(13): n is a, c, g, or t
  misc_feature (79)..(79): n is a, c, g, or t
  misc_feature (87)..(87): n is a, c, g, or t
  misc_feature (89)..(89): n is a, c, g, or t
  misc_feature (163)..(163): n is a, c, g, or t
  misc_feature (177)..(177): n is a, c, g, or t
  misc_feature (223)..(223): n is a, c, g, or t
  misc_feature (255)..(255): n is a, c, g, or t
  misc_feature (278)..(278): n is a, c, g, or t
  misc_feature (302)..(302): n is a, c, g, or t
  misc_feature (311)..(311): n is a, c, g, or t
  misc_feature (318)..(318): n is a, c, g, or t
  misc_feature (386)..(386): n is a, c, g, or t
  misc_feature (390)..(390): n is a, c, g, or t
  misc_feature (678)..(678): n is a, c, g, or t
  misc_feature (714)..(714): n is a, c, g, or t
  misc_feature (751)..(751): n is a, c, g, or t
  misc_feature (780)..(780): n is a, c, g, or t
ttgcggattctanaacggaaactttttttaattcttcccaatagaaaagtaagaaaaaattcgtgaaagcaaaccggantgcccaananggcggcggccgtaaagtgcaatgggtaagaaaccttgaataaaaacaatcaaaaggcaaaaagcctttccaaanaatggtttaacaanaaatcaatttgttcttgttctgtaaaaaatccgagtgcccaacaanacaattttgctgctgctaaaaagtctgcaaanaaaacaaaaaaaggtgctaaaanaaaaaaaaccagatgagaaaaaanatgaaaaanaaaaaanaaaagcatatccctatatggaaggcgaacctgaggatgatgtctatttaaaacgcttatacccgaganaganatatgaggtggagaaagctgttcacttacttaagaaatttcaaattcttgactttactagtccaaagcaaagtgtttatcttgatttgacactggatatggcactgggaaagaagaaaaacgtggagccatttaccagtgttcttagtttgccatacccatttgcttccgaaatcaataaagttgctgtatttacagagaatgcatcagaggtcaaaatagcggaagaaaatggagctgcatttgcaggaggcactagtctgatacagaagatttgggatgatgaaantgttgcagacttttacgtagctgttccagaaataangcctgaacttaatcgattaaggaagaaactgaataanaaatatccaaagctttctcgaaattccantggccgtgacatccccaaaatgcttgaattatttaaaa

SEQ ID NO: 628842 - DNA, 366 bp, Homo sapiens
  misc_feature (366)..(366): n is a, c, g, or t
atgaagatattgaaatttgttcaaaaatagttcaaaatatttggggaaatgaacatcagcatctttatgccaagattctttatttagtcatggtagatggagcctaccaagaagatactgatgaataatactcatgctgttacttaatcctcaactatatgaaagcatgtgaatttggcttatgagaataacatgctatagtgggaaatacagcaattatttatttaatcagatttaagatggcctgtcttattgcatgatgaagatggagaaacatgtcatatatcaatgatgaatctcatattttatctataatgatcattgaattccatgggttctcataacctgacttaatggttttggttn

SEQ ID NO: 628843 - DNA, 102 bp, Homo sapiens
  misc_feature (44)..(44): n is a, c, g, or t
agctcgaattcaagcttcttaacgatagtacgggcgacatgggnctaaaacagcgtgtaatagtcatataaaattggtcccagaaaaccatcgaccaggtca

SEQ ID NO: 628844 - DNA, 410 bp, Homo sapiens
agagagagagagagagagagagagagagagagagagagagtgtgagagagtgagtagagactcttcagccacttctgcctttcaacttcttgtcctccacctgtactgtctaggccatcctgctactgtgctcacctttctcactctcttctcaggtcctactcccatcttgaaccttctctacgtctgctagagtctctcttctcagtctgttctttcttcctggaggagtgcatgctgcatgtgtgtgtgtgcatgtgtgactgactgtatatcctgttgcttcctgatcttctcctccctttctgtttggcactgctgcgttactatcgacgacactgactctgtcccaatcctctgacattctcggacgtcccagttctcgttacccactggccttctctgctcgc

SEQ ID NO: 628845 - DNA, 269 bp, Homo sapiens
  misc_feature (161)..(161): n is a, c, g, or t
  misc_feature (265)..(265): n is a, c, g, or t
atcccatgccatacaccagaatggctacaatgaaaaagactgacaataacaagtgctggtgaggatgtggagcagccagagtgctcacacattgctggtggaagtgcattagtgcagtcactgtggaatatactttttctaccaaagctggacgttcaccntacaatatagcaatcccacccccagtatttgtcccagaaaaatgaaagcatgcacccacacaaaggttatccacaaatgctcatagcagccgtacccataccanccca

SEQ ID NO: 628846 - DNA, 142 bp, Homo sapiens
ccgttttatctgtctatctatctggctggcagggaaggcaagaacttgatgtggtgaagaggtggtatagggtgtatagcggtggtatagcctatatcaccaaattaagaactttttgaactaaaaccagaaactctgccat

SEQ ID NO: 628847 - DNA, 292 bp, Homo sapiens
  misc_feature (202)..(202): n is a, c, g, or t
  misc_feature (249)..(249): n is a, c, g, or t
tagagtttaaattgtgagtgatggctcacacctgtaatcccaacactttgggaggccaaggcagtaggatcactggagcccaagaggatgggactacagtcagctatgatcacatcactgtactccagcctgggcaacagagccaaaccctgtctgtaaataaataaataaaaccccaccactatgtattatgggaaatttnccaccatacctgaaagtagtatgtgggtatgtaacaagcatccagtntttcattcattcgggatcgacaccgctcgggtttttgcctgtg

SEQ ID NO: 628848 - DNA, 446 bp, Homo sapiens
gtgctagtaatatgggacaatgaagtccaagctgaggtggtctcagatggagatgaggaatgtgtagggaactgaagtaaaggtcactagtattctatgctattagcaaccgagactggtagacattattgcccctagccctagtagatctgtgtgaactttgacacttaacgagagattatttcagggtatctaggtggaagaaatttccagagcagcaaacgcattcaacgatatgacctggacttattcgtgaaagcattcagttgatatgtgttcacaaaagaggtggtttaaacatttgaatttatgtttaaaacgggaagcagagcattacagtttggaaaatttgcagcctgacaatgcaataaaaaagaaaaaccaattttctggggagaaattcaagctggctgcagaaatttgcatgagcaacaagcactccaaca

SEQ ID NO: 628849 - DNA, 192 bp, Homo sapiens
gctctactgaagtgtcttttgtccaacgttgttccagagtgtaccatggcttcccagtaatacactgtgttgatgcggttcgtagcttccgacatattctattgctcaaaaggcagggaatgatagtcagacgtgttattgctgaaggagaccctgggtattgttggagaagacctggtacaacataccttc

SEQ ID NO: 628850 - DNA, 460 bp, Homo sapiens
gagtgggtaaatgtgcaaggcactgtgatagacgttgaagggaattcgactatcaaaaagaaaatgtccaacaatgatagactggattaagaaaatatggcacatatacaccatggaatactatgcagccataaaaaatgatgagttcatgtcctttgtagggacatggatgaaattggaaatcatcattctcagtaaactatcgcaagaacaaaaaaccaaacaccgcatattctcactcataggtgggaattgaacaatgagaacacatggacacaggaaggggaacatcacactctggggactgttgtggggtggggggagggggggagggatagcattaggagatatacctaatgctaaatgacgagttaatgggtgcagcacaccagcatggcacatgtatacatatgtaactaacctgcgcattgtgcacatgtaccctaaaacttaaagtata

SEQ ID NO: 628851 - DNA, 273 bp, Homo sapiens
tcgatacgacttatatttttttttattatatgatctatcaatctatctttctatctatctcgctctcgctctctcgctctctccctcgctcgttttctttctctttctctatctctctctctctctctctctctctctgtctctcgctctcgccctctctctctctttctctctgtctctctctgtctctctctctctctctctctctctctctctctctctctctctctctctctctccctccctccctctctccccttctgtcgtcttctc

SEQ ID NO: 628852 - DNA, 208 bp, Homo sapiens
ggccccccagaatccccttaagaatttggaaaaattgggtccctttttttttccatcccccccccctgggaagtttaaaaagggatttattttttgggggggggggggggtttgggggcctttacaaaaaaaaaggggccccccccccttcccctttttaggattgggggccccaaaaatgaaaccctcaataaaggttgggttgcca

SEQ ID NO: 628853 - DNA, 191 bp, Homo sapiens
aactataggagttgcaattcaccaagtcagcccgttcacaccctatagttaaggtggccattaaggggccaggaggtggcaatcagataagctgcctcctgcctaactctcttatctccaaccattctctatagagctccagcgtagttgcgagccccagatgtatccaagaactccggagccagcatgcg

SEQ ID NO: 628854 - DNA, 564 bp, Homo sapiens
tatggggtgctgtgtgggactgctcaggaaatgagttagggaagcagcaggttggtgtcggattagtgctgggtaatatcagggcagggatgaggtcgtcgatggcctggcgctgctccagctggtgttccatctcgatgaggagcttcactccgtgcaccagcatctgcaccagctccacctctgagaagcccagggggacagcgtaggagacgtcgaacaccccggtgaccgcagccgtggtcacacggtctgtgcctcgcttctgaagtcgcagccgcgaaagcggctccgagaagtcctcatgcttgcccaggttgggcagcttgatatgcacacctgtccgcaggccggtgccccggttgcatgtgcaggtgaggatgtaggccaggtgagggtcccagatgaactcctagtccttagacttgaacagagttacaatctgggtgaggccggtgcacaagcgggtgaagacgtccttcatgtggatgccgttctgcatggagatgacctgcaggtggactcctcgttgaccacatcaggacggtgtcttgacatgtgcag

SEQ ID NO: 628855 - DNA, 789 bp, Homo sapiens
gagcggaggccggagccgcgcggcgagcgggcggcgggcggaggggagggcttggcggccgggaggctcgcgaggcccggtcccagatggtgcagcgcggataagggttactagcaatgaatagtatgactgtaatatgtagtggatcagtaaggaagttgaattgttgatggacgagctgtgaagtagagcaataagagagattatcaggcgaggaaggataaacagagcgattgtgctgaaataaagcaaatgagtgagtgaagtatgtaagtaagatgaagagaggaggacaagacatgagtaatgaaagtaacccgtggatgaatcaatgttggcccgtagaatagacacgattacaaaaacgtagatactgataaaatgtcggaacgtagaagaaagagagagaaatgatcggacacacgtgctaatagtagattgaacctacgagaacaaactaacgcattgataaagattccaaggtggtgaacactagacagtaactcaacggcacatcgaaattcaaaccgtccagtagaagcataggtcccaccgacgtcagtgccacacagtaaacgtgaacgtaaaccctcggagtgcaccgcgaccaacagcgaacagccagcagctaacagagccaacatcaacccaattgaagtcaatagcagagtgcaagaacccaatggcgcaacaaacctacacacgccataccacggagtgaagacaacctcaaagaacacctagaaagcgacgacagtcgggcggaacggtagatgacagcaaacacaa

SEQ ID NO: 628856 - DNA, 331 bp, Homo sapiens
tacataaaaatacaaatttataagcttttataacacaaagtgatatacatattttctaacaaaagcaaatattaagcaattttcttgagtaaaaaaatgatagtcaatcttaccattgcttagcaaaatagaaaaagttaaacttaataatttttaaagattatttaaggctcacaagagggaaggctagggcaggggcaagagtttaaaacattagaatccaggcaatggattgaataggaagaagacaaagcaaaagaaataaaaaatcttaggtatcattgtcacaaagaaaaccaatgctaaggatgatcttgaatacaaccttgat

SEQ ID NO: 628857 - DNA, 997 bp, Homo sapiens
actagttctagatcgcgagcggccgccctttttttttttggtattttttttaaacccaggttgaaacatttcatctattatctctgccccattccgggagggtggggtatcagttctctaacccttgttcccggtaaaacttaaatgtgtctcttttttaattctcttatatattctctgcatcttctctctctacatataacagcatttgtgggtgaccttttaaccaagtgtggctgagtataggctttttaaaaatataaaagtgtccatggctattttcagaagtttcccctcagtccattgaaattgacctgtggggcagggccgtggggggtccctcaaggggacgagaaacgtgttgaggggtatacttttaacaccaccttgaacctctaccacaagatgtggagactccatacggacggagacaacttcaggccctcacttggacactcacaaggacgcttagacactagcgggcgtgacaacgccaacttttcagagagtgtgtgtcccgcggtatacaccaacctcatatccgccaagagacacccccgggggaaacaacctgtctgtggcgaggaaacacgtgtggaatccacatatattctcgcgtgtgaaccgtcgaaagaacattcgaggatcatctctcctcgcccgagaaaaggtctgtcaacagtaattaccctccctttagagagacaaatttcgtgtgggcgcaaccacaagataacacacctttcaccccaatatatgcgttgggacaacaccgggagtcacgccccactacaccgcactacagcacaccatctcaaacgggagacacggctctaaataagcgccactcacaccccgtgggtggtaaccacgttacacacccacaccgtgagcgagccacaaagcccaccacacacccgggggggactcactctccacacagcgacgccccaccaccgccaacgcaaccccatcagggcgcccaccgcccgccacc

SEQ ID NO: 628858 - DNA, 899 bp, Homo sapiens
tgggtaccgttggaggcggcgtgtgggcgcccgtccggtggtgggcccacctcgggcgtcttaagccgcggtgagcgacttttgtggtaacctgtgcgggcgtgatccgtccccctgtgtggttgggggctccggccacgcgcttctggttgtactggtgtgcgccgctcgtctccgcgtgttgtgtagtgcgggtttccccttccggccaatctggggggtctatcttcgtcgtcggcggctgtgcggagcccttgaagtgattgcgtcccgcgcattgtcgtagttgtctctgtccctgtccactcatttcgcctgcagtggcgtttgcagcccgtcgcataccgacgtggtgctcgcgttgtgcaagaccggggtgtccatgccaagatcgttcgtcggacggcgccccgggctccggccacgagcacgacttcctgtccggtgggcaggcggtggtgcccaccgcagccccccatgtggtgagaaaaggttcggagcgtccccctcattgcgccccgacagtaaggtcaaggcgcctgtcgctcccgccccctcctcccaagaggtggcattttctcctgccggagcgcatgccgcctcgggagaaagaatccgcccacactattgttttgcctcaccacactggcactccgaagcgtttcagcacccgccgactcggtgctcccctccctctatacgagcttccacggtttaactttttcctatccctcgtggacttctccactccaccacattatgccctcttaatctctgcttataaaaaccacccatgcccccacacccaatctcttaaacatcttccaactctcatataataagctacaccccctcccccaaacttaaacaaaacgtctccttcatgcgccaacataaca

SEQ ID NO: 628859 - DNA, 210 bp, Homo sapiens
gtccaaggagctctggctgtacatcggcatcaacacctttgactatcttgacagcgaagatcgagctcaggttcgccacatagatccgtgcaggagccacatgggtcctgtgcaggaccctagcagtggtgggctgagccaggtctaggtttctgtgggggacaatgaatctcccagtgttcagtctccaggactcttctgcctaacaga

SEQ ID NO: 628860 - DNA, 279 bp, Homo sapiens
aggctattgcacagcccggtgcccgggtgctgatcctgcggacatggtgatcggtacgtcggtgaacctggacggtattgatgcacaagttgccgttcttgtcttccggggtgtagttcagctcagccaaagccgagtgaccggtaccggcgttgttccagccgttggagctttcttcggccacgccatcaaggcgctcgaccatctccatcgaccaatccggttgcagctcattgagccacacacccagggttgcactcatgatgccgccgccgatca

SEQ ID NO: 628861 - DNA, 2826 bp, Homo sapiens
aaaccccagctggaactccggccacagccagcatgcagggcgaagagagcctccggatcctggtggagcccgaaggggacagcttcccgctgatggagatcagcacctgtgagaccgaggcctccgagcagtgggactatgtcctcgtggcccaacgtcacacccagagagacccccggcaggcgcggcagcaacagttcctggaggagctcaggagaaagggcttccacattaaggtgatccgggaccagaaacaggtcttctttgggatccgtgctgacaacagtgtctttggcctgtaccgcactctcctcctggagcctgaggggcctgccccccacgccgagctggccgcgccgaccaccatcccggtcaccacgagtctcagaatccgaatcgtgaacttcgttgtcatgaacaacaagacctcggctggtgagaccttcgaggatctgatgaaggacggggtctttgaggccaggttccccctgcacaagggggagggacgcctgaagaagacgtgggcgcggtggagacacatgttccgggagcagccagttgatgaaatcaggaactactttggggaaaaggtggccctgtacttcgtctggctgggctggtacacctacatgctggtgccggccgccctgacgggcctcttagtctttctgagcggattctcgctgtttgaggccagccagatcagcaaggagatctgtgaggcccacgacatcctcatgtgtcccctcggcgaccacagccgcaggtaccagcggctctcggaaacctgcacttttgccaagctcacccacctctttgacaatgatggcacggtggtgttcgccatcttcatggctctctgggccacggtgttcctggagatctggaagcggcagcgcgcccgcgtggtcctgcactgggacctgtacgtgtgggacgaggaacaggaggaaatggcacttcagctcattaactgccccgactacaagctccggccataccagcactcctacctacgcagcaccgtcatcctcgtcctgaccctgctcatgatctgcctcatgatcggcatggcccacgtcctggtggtctaccgcgtcctggcctccgcgctcttcagcagctcggccgtgcccttcctggaggagcaggtgaccacggccgtggtggtgaccggggctctggtgcactatgtgaccatcgtcatcatgaccaagatcaacaggcgcgtggccctgaagctttgtgacttcgagatgcccaggaccttctcggagcgagagagcaggttcaccatccgcttcttcacactgcagttcttcacccatttctcgtctctcatctacatcgccttcatcctgggcaggatcaacggccaccccgggaagtccacgcgcctggcgggcttgtggaagctggaagagtgccacgccagcggctgcatgatggacctcttcgtgcagatggccatcatcatgggcctgaagcagacgctcagcaactgcgtcgagtacctggtcccgtgggtgacccacaagtgccgctctctgcgggcctccgagtccgggcacctgccccgggaccccgagctcagggactggcggcgcaactaccttctgaacccggtcaacaccttcagcctgttcgacgagttcatggagatgatgatccagtacggcttcaccaccatcttcgtggccgccttcccgctggcgccgctgctcgcgctcttcagcaacctcgtggagatccgcctggacgccatcaagatggtctggttgcagcggcgcctggtgccgcgcaaggccaaggacatcgggacctggctgcaggtgctggagaccatcggtgtgctggcggtcattgccaatgggatggtcattgccttcacatctgagttcatcccccgagtggtctacaagtaccgctatagcccatgcctgaaagaaggcaactctactgtcgactgcctcaagggctacgtcaaccacagcctgtccgtcttccacaccaaggacttccaggaccctgatgggattgagggctcagaaaacgtgactctgtgcagatacagggactaccgcaatccccccgattacaacttctccgagcagttctggttcctcctggccatccgcctggccttcgtcatcctctttgagcacgtggccttgtgcatcaagctcatcgccgcctggttcgtgcccgacatccctcagtcggtgaagaacaaggttctggaggtgaagtaccagaggctgcgtgagaagatgtggcatggaaggcagaggctgggtggggtgggggcaggctctcggcccccaatgcctgcccatcccaccccagcatccatcttcagtgccaggagcacagacgtgtagggccagagcccgtccagaggccaccaggagctgagacagtgccaccaccagcacctcccacaagcccaccgctgtgcgtgttgaggggtgctgtgagaaggctgtgcccatgtggggccgcaggaatcccctgtatgttcagggctgtgagctgccaccctattccgcctgctccgtctttgtgggggctctcaggcttggcacagccctgacttgaactctgggtgaccctgggcacccacagaactgggagtgagggctcctcaggcagccacaaggcaggaaaactggcgcaaatttcctgggcctccctctgacttctgggcgccagatcctgccgtgcccccatcctggctgttgggggtgtcctgagcccacctcgctggcctgttcccttcagccaacccgtttctgcagtaaaattaagcctgtctgtcttgcaaaa

SEQ ID NO: 628862 - DNA, 285 bp, Homo sapiens
  misc_feature (49)..(49): n is a, c, g, or t
  misc_feature (96)..(96): n is a, c, g, or t
  misc_feature (117)..(117): n is a, c, g, or t
  misc_feature (236)..(236): n is a, c, g, or t
  misc_feature (258)..(258): n is a, c, g, or t
atcgagctcggcccgaaattctaattacgaagttcaattacacgtgatnggagacagcacactggttatagcaaacttcaccccatgctctccgtncctttgatttattcagttggncaccttcaagcgtaggatcctggtttagaaacatcacacaaactggatttgtcatattacttttatttctgccctgcataattttttctaagccaataaggtgatgctagctcaatgtnttgggatgatctccaatgcttntgaccatggttagcgtaattagggtta

SEQ ID NO: 628863 - DNA, 856 bp, Homo sapiens
  misc_feature (844)..(844): n is a, c, g, or t
ggctcggtacttgcatatggcaaggccaagcagacgccccagggaggaacctggttttaatgggccctgtgctcagggaggccttcagtcagcagggtcgcctcagcagcatttgggagcctgccctgcagctccctgcctccaccctgcacgctgtgcccacacccccccacaacacgtaggtgaaagcacaggcaccatgcggaggccccgagcaccccttagtggggcggggtggggggaggaagtcagtccataatgttgtagttacggatcttggggggcctctggcagcctttagcttttgcaggatgagaccgggaggctcctgtggtcttggcctttgcctgggctgctgtcttcatccctggggtggcaatgcctgcctgcatcttgacgggcctcctgtcggctgctggaggagctgggagctctggagttgagtcaccctgggaggtgacaccagaagggctggatcccaggtctagcaacctccacgtgtcctggagggtgccactggcaaaggaggaggagctgtgggattggcgaccatgctcctcagggtgcttgggagcctggggtggctttggggacctgtcttctttctgccgaggtgatttacaggtcaccgtgtggatgctgtgttgtgtcttcgggccttgcagggcgttaagtccgctgcccacctgtgctgagcggggctggtgctttcccaagtttcttgaaggagcctcatcctcggcactcttggcgtcctgagatgtaaaatggggctgcacctgtcccaaaggtgggctgcgatccaaaggcctcctgggctcctcgcctggcttccgggcctcangggcaggaggga

SEQ ID NO: 628864 - DNA, 1805 bp, Homo sapiens
  misc_feature (1793)..(1793): n is a, c, g, or t
aaaaaacaaggacattaaattacataaaaataaaaaatatgaacataaaaaaacaccataataaacatttaaaaacatgaagaactgggagaaaacatttaaattgttgtcaccgaaaaggcctaatttctatcacatataatgagctgctacaaatcaataagaaagaccacaatctaatacacaaatgggcaggtaactgaagaacagggaaaggaagtggctcctaaacacacacgaagatgcacgacctcccagcagaggcgctgatgccaatcctgctgccaccggcaaaagttccgtgtggctacaggactctcagacactgctgctgggagcagcctctgggtgggtggcggaggctgaggcgatgctgtccaccacacgtggcacgcgggcagccttgactacgcaagcccctggggcacgtacacgtgtgttttcacacacactgcagcctgtaaggttactattctaacagtatctgtgacggtaaaggactggaaatagcctaaaatgcgcatgaaggagagaatgattaaatgaatgaggcacaccctcatgacggaagacagaagctgtaaggtaagaaggggacgccctccatgcaggcacacaggaaggacgcacgctcccgccccaaccacatcacacgtcccgcaactccagctgcctcgaagcagcatctgtttccctccccccttctcgctacatcacagacccatgcagtcctcacaaggtgcacccttcaaacagacttttctgaaaacttcctgagaccagtagcaggagctggcactgtgacctgctgagtttaccaggcctatgacttaggtgcagagaagagtctcagggcggcaacgtccgcgcagcaaagcaggacgaggatgaggatgcggctgacacttgtctggcccgtgaggctgagcatcactggggtcggcctggctcttccccgggagcatcgctggggtcgacctggctcttccccaggagcagggccgtctaaagtgcaccaatgcccacgcgtctcacctgggctccattctaagtcagcctgcgcccgggtgtacagtgctccattctaagtcagcctgcgcccgggtgtacggtgctgcattctaagtcagtgtgcgcccgggtgtacggtgctgcactaggaaatggcatggtttctgcccttcagggctttgcaccataacccgggaaacactcaggtgccaaatgagaggtaaagagactccatgcattactcaaccaaagtgcagggatttcagggtgcaggaggcacgcagggtgctgactctccacatgcccctcggagagggtggccctcgccagctgccagctgtgggcagctcctggggagggcagtctcctatctggagttgagtcaccctgggaggtgacaccagaagggctggatcccaggtctagcaacctccacgtgtcctggagggtgccactggcaaaggaggaggagctgtgggattggcgaccatgctcctcagggtgcttgggagcctggggtggctttggggacctgtcttctttctgccgaggtgatttacaggtcaccgtgtggatgctgtgttgtgtcttcgggccttgcagggcgttaagtccgctgcccacctgtgctgagcggggctggtgctttcccaagtttcttgaaggagcctcatcctcggcactcttggcgtcctgagatgtaaaatggggctgcacctgtcccaaaggtgggctgcgatccaaaggcctcctgggctcctcgcctggcttccgggcctcangggcaggaggga

SEQ ID NO: 628865 - DNA, 192 bp, Homo sapiens
accaagttcagtcaggttgactccctcagtcgtctaccaggtatttatctccgatcctcagtgactctcctgtgtgtcctcagctactctcccagcacgcccactcttcagcgggaatcagttgcaagcacccggaaatcaccaccatactcaccaatttcactgcgttactccccggtctctctcatgtct

SEQ ID NO: 628866 - DNA, 170 bp, Homo sapiens
  misc_feature (147)..(147): n is a, c, g, or t
ggctcggtacttgcatatggcaaggccaaggagttgtgtaaggcagcggacatgtgcaggatatgaagatgaaccacgtgacgaaatagaaaaagctacctatggagttgtgcccctacgcaggtacttggccttgccatatgcaantatgcaggccttgccataataca

SEQ ID NO: 628867 - DNA, 263 bp, Homo sapiens
  misc_feature (165)..(165): n is a, c, g, or t
cccctgtagacccagctcctcaggagtctgaggcgagaggatcgcttgagaccaggagtttgaggctgcagcagagagctatgatcgcgccactgtactccaggtaacagagcaagaagaccccaactctaaaagaaaaaaatagacaagaaaaaagaagttgangccagaccctgtggttcacacctgtaatcccagcactttgggaggccgatgcggatcgcttgaggccaggagttcaagaccagcctggccaacacagc

SEQ ID NO: 628868 - DNA, 493 bp, Homo sapiens
gcctggcttgttcaactgcaggcaggcaagtggaatgaggcttgtcatggtatgtaaccggaccagcataaccagcagggtcaatggcaggacaatgtaggatcctagttgcgatgtcctgttcaggcagcttcctcgtggggttaaaaatcaaggtgatgtgtattatggtaacccactgcggtgagagaaacttgaggcaagattgtattcttactgggatctgggtgagtgtggagtccagaagcacaacatagttctcgccatctctgagcagtggggggaaatggaagaacagagactggccaagggaaactgtctggattggattgtcgaggttttcgcttttgtaaagcttgacccataacgtaggaaggtattcagaggaagtgatcacatttccacttaaatcaaattgattaatctgccggaaaactatgatgtttacatcatcgatgtcattattcccaacctcaatcaccctatggtgggg

SEQ ID NO: 628869 - DNA, 148 bp, Homo sapiens
  misc_feature (6)..(6): n is a, c, g, or t
  misc_feature (10)..(10): n is a, c, g, or t
  misc_feature (125)..(125): n is a, c, g, or t
ggtgantctngaggatcccttcttatggcaaggccaaggtcagaagatgaaccacgtgacgaaatagaaaaagctacctatggagttgtgcccctacgcaggtacttggccttgccatatgcaantatgcaggccttgccataataca

SEQ ID NO: 628870 - DNA, 183 bp, Homo sapiens
  misc_feature (160)..(160): n is a, c, g, or t
cggtacccattgcatatggcaaggccaaggagttgtgtaaggcagcggacatggtgcaggatatcaagatgaaccacgaagatgaaccacgtgacgaaatagaaaaagctacctatggagttgtgcccctacgcaggtacttggccttgccatatgcaantatgcaggccttgccataataca

SEQ ID NO: 628871 - DNA, 241 bp, Homo sapiens
  misc_feature (218)..(218): n is a, c, g, or t
ggacgcagtgcagctgcatcctgcaggtgactctaagatccccttgcatatggcaaggccaaggagttgtgtaaggcagcggacatggtgcaggatattcgtggcccctctggagttgaagagacgaagatgaaagaagatgaaccacgtgacgaaatagaaaaagctacctatggagttgtgcccctacgcaggtacttggccttgccatatgcaantatgcaggccttgccataataca

SEQ ID NO: 628872 - DNA, 373 bp, Homo sapiens
actatgaatatacactccaagccaaaagaaaaaggtaatcacgtgaacctgtactacatacctttcatctctcttagatgacagtaatcgaacaatttaaggtacaaaacaaagaaaagcttatggctgaaccctgacttatttcactatagagaacactagagatatatactaccgacagataacaaacccaatccccattataattgaatttaacattagttaccatgaatctctatcttaaatggatatgtcacacatatttacgggtttcaattaggcaattcatgttttcaaatgctctagaacaagcacacctaacatttcatcattattgtccccttctttcagcttatctcattcctatgcatcg

SEQ ID NO: 628873 - DNA, 178 bp, Homo sapiens
  misc_feature (178)..(178): n is a, c, g, or t
ggacgcagtgcagctgcatcctgcaggtgactctaagatccccttgcatatggcaaggccaaggagttgtgtaaggcagcggacatggtgcaggatattcgtgggaagatgaaccacgtgacgaaatagaaaaagctacctatggagttgtgccctatcttggccttgccatatgcan

SEQ ID NO: 628874 - DNA, 1424 bp, Homo sapiens
  misc_feature (1)..(1): n is a, c, g, or t
ntcctcctcctacagtgggctctgctttgctcgcccgcaccactgttgtttgttgctcctctccgccgctggggagggggggtccttattcggccctctcatagctgaagggatgttttttttgttcctttctcggggagatttgttgatgggataccttctcctctgggccccgtgctctcgacagtgatgttgctcccacctggtccaccaatgttggtgtgttttctggcgccccacgtgttggttctttccccgctggggagccccctgtcaaagagccttgggggtggtcgccccacccgcggtggtggttttggggggtgtcgtcttctctccgcggatgtagtgtgggtccctgctttttggggcccccccactaggtgcgctcttgtgtggacccccgcggaggtatataattgtccccccaaagggtcggcccttaggagtctttctgtgtgtttttggtggaacccaccacttgtggggccgcccaaatataccgcggggcgccgttttgttgttggcgccccccaggggcctcccccttattggatagtggtcctcagtgttcctccgctcgcggggctccccgcgtggaggttccccccgggtgaccctctgtgtttgggggggcctcccacgtccgccctcgtatctcgcgttcgttgcaccgcttgttggcccccccccactctttcgggggacccccaacggcaccacacacccccacagggagagagacacctgtctgtaatagacaccctcgggggggcttgctataaaaattgggtttgagagaacccgcgggttatttctttttgtcggtgggagacacacctttgataacagtggagacacttcgggggacacatatatgtgggagagccccacctctgggcctcgtgtgtagatagtctgtccacgcagcacctctatatatagagagcacacgcccacgctgtgagagactcgcgcccacagcttttctcgtgctatatctcgtgcgagatatgtgagatgtagagcacatccgctgtgtccaacaggccacccacagaagagagaaagcgccgatatgagccccgagagcccgcgcacacaggccgagggctcctctctatatgctctggcccacggagatggagagtggtcttaaggcacaaggcgtaacttcccaaaggcacccggatccacccacgaggtcctcccctctttcctcgaggcccgaggtggccacgggaccacctcgtggaacgttctttgttcacgaaagggaatacacggttggggggcacgcccccacgtcccctttctgtccccgctccagattttccccaaagaccctgaccacagtaattctttcttctattgtaaggtttcccctttagtttgcttcccgatgattaaatctaagtcccttt

SEQ ID NO: 628875 - DNA, 677 bp, Homo sapiens
  misc_feature (323)..(323): n is a, c, g, or t
  misc_feature (419)..(419): n is a, c, g, or t
  misc_feature (654)..(654): n is a, c, g, or t
tccaaaagtgctggggattacaggtgttgggcccaccaagcccggccttggaggtttaacctggtggaatctcaagggaggacatagcctgtcctattgcagggaaggtgcggccctcactcccgtctcagcctgggggcatgagaactctgagcacaaagaggacggagctggtccccagctttctggccaccctgtgagtttcttctcctgcacctgagcctcagctcagctcttgaccaagttggcctctggtggctcattctccaggctgctccgggctctctgggtgcccctgggcacacctacgtggcttcctaggncggaggctgcatcacggaaggcgggcacacaggcctcacttgggcgagaagagacccagagacgcatggccttcctcctgggccggctcccgaccngagcccatctgagctcagcccacaggaaggggaggtgccaagaaccccaagcacaggtggctgcaggctggtgggtgccgaggaggccactaggaggctgagacggtgagagccagggccaggcagtggcctgagagctggacagcctctgggtatctccacaccccacccttctcctgcctttcagaagataaacgcaccgcgaacgccccgccgcccaggcctcgctaccttnagtactcagggtctgccgtcgtg

SEQ ID NO: 628876 - DNA, 334 bp, Homo sapiens
tcaaaaaattcggattgccataaattatacaaagccttttttcaacacttttttccttccacttaaaaagctggaatccaacatgatgggggtgatgccaaaacaaaactggtggttcattttatttagggtacaaatacccccttaatcacttgaccctttactgaatgcaaagcaagatttaccatttttgccctctttgtacaaagcttaaccaggaaaccagggggggggggacttcttggttttccttggcaggggagttggcccccctgcaaccctgtggtgttgtggaaaaaacaacccattttttgtcggttcccataacccctaa

SEQ ID NO: 628877 - DNA, 770 bp, Homo sapiens
gaacccggaaattcggccattatggccgggaagctctttcctttcgctgctgcggccgcagccatgagtatgctcaggcttcagaagaggctcgcctctagtgtcctccgctgtggcaagaagaaggtctggttagaccccaatgagaccaatgaaatcgccaatgccaactcccgtcagcagatccggaagctcatcaaagatgggctgatcatccgcaagcctgtgacggtccattcccgggctcgatgccggaaaaacaccttggcccgccggaagggcaggcacatgggcataggtaagcggaagggtacagccaatgcccgaatgccagagaaggtcacatggatgaggagaatgaggattttgcgccggctgctcagaagataccgtgaatctaagaagatcgatcgccacatgtatcacagcctgtacctgaaggtgaaggggaatgtgttcaaaacaagcggattctcatggaacacatccacaagctgaaggcagacaaggcccgcaagaagctcctggctgaccaggctgaggcccgcaggtctaagaccaaggaagcacgcaagcgccgtgaagagcgcctccaggccaagaaggaggagatcatcaagactttatccaaggaggaagagacccagaaataaaacctcccactttgtctgtacatactggcctctgtgattacatagatcagccattaaaataaacaagccttatctgccttatttgccgtgattacatagatcagcccatttaagtta

SEQ ID NO: 628878 - DNA, 136 bp, Homo sapiens
atcggaacaccttgcatatggcaaggcacaagcatccctctggagttgaagagacgaggaagatgaaccacgtgacgaaatagaaaaagctacctatggagttgtgcccctacttggccttgccatatgcaagtag

SEQ ID NO: 628879 - DNA, 538 bp, Homo sapiens
  misc_feature (405)..(406): n is a, c, g, or t
ttgtgaggtagtctagagatcccttaggaactcaaagccacaccccaggggctccactcgaaggcccggggaagcagtctagctcagccgtctaagtggaggtgactgatttattctgaccatcctgactcttcacgacactgctctcctccaaccatgcacggctttaattgtccatcaagcagggcagggaggaaccgtaaatctttcctcccgctgctccgagctgagcctgcttgacctgcaattgccagcccctcgcctgcgtgcagcctggagaagtccgctggctctgaaggtgaaggaggggagtgaggaaggggaacgcaggagaggcagaagggggtcaggaggggaacagagagagccaggcagcaggagaaagcaagcagccgacatggccannctcccgctctcccgccccggggccctgcggaggaatgaatgcctcagcccgacttgcagcctcgaggggccccggctggggcgtctacaacacctcgcctcccaggctcctgctctcaagcagcgggaccct

SEQ ID NO: 628880 - DNA, 1411 bp, Homo sapiens
aaaagaaaaaaaacattacggctaggtacgaggcctgcgtgttatcatgatctccatggacagacacccacctactaacagttgctatgctacctactatacttatctagctccaggcgtcatgaacttaggtaatcccagtatacccaatatgctccagaggcactagcctacccccaccaccgactcatctgatatcctaatacacaggccccatcacaggtatatggaggagtgacctactataagcccgacaccagacagacaggatgcagccaaagacactcacaccaacccaggaggactccaacagaacagaacaccaaacaagacacccactcacacacaagaggacgaacacacaagggaatatacaggtaaaaacaagaaacatgaatatacaaaatctaaaaataataataaaaagacaaaaaagaacaaaaaaacacaaacaacgacaaataacagaatggacatacactatcaaaaccaaaacaggagcatcccaacgaatatacggagaagaaggaataccgaaacacataaaacaacaacatgaaatacagaggcagagcccacacatgcacaaaacaacaagaagagaaaaaaaagtaatcattgtacgaaacaggaacataatacacatagaatagacaacatacatagtacacacatcatttacaaaatcaattccaaatgagacaaataaggaaataatgaaattatataaagatcagacaaaaaaggatgaccaaagaaataatcccaagattatattggagatacctaatacatacaaaaaaatacaacaagaaaatacaagaaagagacatacaacaaacagacgaaaaaaaaagcaaaaagaacaaaaaagaaacaccaaaaggaaacaatacaacacaggatatgaccagcaccatacagatgaacacaaataaaaaggacatgacacacgtatccaaagaaacaacaaaacataacatgactaacaaatatagaagtaccggataccagaactatatcaccacatgaacaacacaacagtaaacctaaccataatatatgataaatcaacaacgacagagataaccatacaaaaagatacaatgaacacaacaatgaaagagaaataagtagaccacaacaaacacgacaacaaaatcacatagacatacacataaacgatgaaataaatgaaacaaacacacaaaacaccaaggacaacgaaataagagagaacagaaataggctaaatacgtagcgaaaacagcacagtagaaagcacaaaaacataaacaaagcaacataatcaagccaatagatagaaagaaataaaacaagacgaaaagacgacaagaaaaaacgcataaacaaaaacgaaatgataacaacaaaacacaagaaagacagc

SEQ ID NO: 628881 - DNA, 755 bp, Homo sapiens
gaacccggaaattcggccattatggccgggaagctctttcctttcgctgctgcggccgcagccatgagtatgctcaggcttcagaagaggctcgcctctagtgtcctccgctgtggcaagaagaaggtctggttagaccccaatgagaccaatgaaatcgccaatgccaactcccgtcagcagatccggaagctcatcaaagatgggctgatcatccgcaagcctgtgacggtccattcccgggctcgatgccggaaaaacaccttggcccgccggaagggcaggcacatgggcataggtaagcggaagggtacagccaatgcccgaatgccagagaaggtcacatggatgaggagaatgaggattttgcgccggctgctcagaagataccgtgaatctaagaagatcgatcgccacatgtatcacagcctgtacctgaaggtgaaggggaatgtgttcaaaacaagcggattctcatggaacacatccacaagctgaaggcagacaaggcccgcaagaagctcctggctgaccaggctgaggcccgcaggtctaagaccaaggaagcacgcaagcgccgtgaagagcgcctccaggccaagaaggaggagatcatcaagactttatccaaggaggaagagacccagaaataaaacctcccactttgtctgtacatactggcctctgtgattacatagatcagccattaaaataaaacaagccttatctgcgggggtcacggagctcggatattc

SEQ ID NO: 628882 - DNA, 107 bp, Homo sapiens
gtttcggcacagcgcagtctggccacccgcttccatgcgtgtcgggtccaagatgatgccgatgtttcttaccgtgtatctcagtaacaatgagcagcacttcacag

SEQ ID NO: 628883 - DNA, 700 bp, Homo sapiens
gaacccggaaattcggccattatggccgggaagctctttcctttcgctgctgcggccgcagccatgagtatgctcaggcttcagaagaggctcgcctctagtgtcctccgctgtggcaagaagaaggtctggttagaccccaatgagaccaatgaaatcgccaatgccaactcccgtcagcagatccggaagctcatcaaagatgggctgatcatccgcaagcctgtgacggtccattcccgggctcgatgccgggtacagccaatgcccgaatgccagagaaggtcacatggatgaggagaatgaggattttgcgccggctgctcagaagataccgtgaatctaagaagatcgatcgccacatgtatcacagcctgtacctgaaggtgaaggggaatgtgttcaaaacaagcggattctcatggaacacatccacaagctgaaggcagacaaggcccgcaagaagctcctggctgaccaggctgaggcccgcaggtctaagaccaaggaagcacgcaagcgccgtgaagagcgcctccaggccaagaaggaggagatcatcaagactttatccaaggaggaagagacccagaaataaaacctcccactttgtctgtacatactggcctctgtgattacatagatcagccattaaaataaaacaagccttatctgcgggggtcacggagctcggatattc

SEQ ID NO: 628884 - DNA, 565 bp, Homo sapiens
  misc_feature (8)..(8): n is a, c, g, or t
  misc_feature (64)..(64): n is a, c, g, or t
agagaganagagagagagagagagagagagagagagagagagagagagagagagagagagagangaaaaacaccttggcccgccggaagggcaggcacatgggcataggtaagcggaagggtacagccaatgcccgaatgccagagaaggtcacatggatgaggagaatgaggattttgcgccggctgctcagaagataccgtgaatctaagaagatcgatcgccacatgtatcacagcctgtacctgaaggtgaaggggaatgtgttcaaaacaagcggattctcatggaacacatccacaagctgaaggcagacaaggcccgcaagaagctcctggctgaccaggctgaggcccgcaggtctaagaccaaggaagcacgcaagcgccgtgaagagcgcctccaggccaagaaggaggagatcatcaagactttatccaaggaggaagagacccagaaataaaacctcccactttgtctgtacatactggcctctgtgattacatagatcagccattaaaataaaacaagccttatctgcgggggtcacggagctcggatattc

SEQ ID NO: 628885 - DNA, 136 bp, Homo sapiens
tacacgctctcgaagttggatcactataccaccttaataattgtactgagagaaactgcttatgtacacattgcagatcaaatctacggagtaaaaatgttagtctacatagatgagtggtatcagggtggtatag

SEQ ID NO: 628886 - DNA, 376 bp, Homo sapiens
cgagctccgtaccccgcagataaggcccggatcgccacatgtatcacagcctgtacctgaaggtgaaggggaatgtgttcaaaacaagcggattctcatggaacacatccacaagctgaaggcagacaaggcccgcaagaagctcctggctgaccaggctgaggcccgcaggtctaagaccaaggaagcacgcaagcgccgtgaagagcgcctccaggccaagaaggaggagatcatcaagactttatccaaggaggaagagacccagaaataaaacctcccactttgtctgtacatactggcctctgtgattacatagatcagccattaaaataaaacaagccttatctgcgggggtcacggagctcggatattc

SEQ ID NO: 628887 - DNA, 985 bp, Homo sapiens
  misc_feature (195)..(195): n is a, c, g, or t
gagatcgcaccattgcactccaggctgggcaacaagagcaaaactgcaaaagaaaaataaaaataatactaaaaaaagaacagtacatctcacagaaaaaaaaagtacatagtaaataagtacatgaagaaagaggccactttggctctttgtaccagtcaggtgggccccccaggaacaacatgtcccttctcnttttggtgtggcatgggccactgtgggattctgggttgcattctccgggctcgacagcttcttcggtgatattcttgggacctggtaagtcttgactcgtcttattgaattaatttagcttcagccccttgtatgtgcctccccggtgccaatgcttcctttgggccaaacttttcaccttgtagcttctgataagttcttttgaggccaaggcttaaggcaggcattcttattcaagtctagtcgcctttcagcttcctgattttgactcccggggccaaaggcgccggtgtggccaaagcttgagccacacggttttgtcaaagacacgccttgtgaaccttaggcagcattttcctttccctttcccagtccattaagaaaccctggaacccagcctcgtaaagggcaccactttcagaacaggctatctctgctggcaaagagctttctgctctgtgattcttaagattttcactccaacctcacctttggtgttcacgcttccttaatctccttagagcgtagaacaaagaactccgggatgtgatctcagactacgagagactgttaccagcttgggtgcccggggtgaggaacttagcgagcactggggttacctttcgagtttgaccctacaatttttccaccattgacgctggtacatttttccggatttcccttttttggcctggccttattttactttaccagaaatgtctttgaacgatttgtcccttattggagaccttctccaggattccttaatttaagggcggaatggttttcc

SEQ ID NO: 628888 - DNA, 925 bp, Homo sapiens
aggcttccagagaagatgcttccgccctcttaagggtgtccctccaccactgtggggccataataaggaaagtggtttttgggtttaggaccctcccacatgggagtaccccccatggaaaattcggccacaatggccaaatttttcccgttcatctcaggaatgtccgcgatagcttttcatacacaaagattgggccctgaatctaattccgctaaaagggcactggtgaaccagggttccaacattctcccgcggtcttttgtaatttctcccgggaatataaccaccctttgtgggcctcgcctcgcgatagaggggcacggtcacacaatggagacactaagttatatataaccgggaaataggggataaacacgccccattgtgtcccgcatagatgccccaagagaaaggggtcacaccatgtgaatgagaggaggaaattgtagggagtttttgtccaccagcgtctgtttctccacgaaaagaatattccgctgaaaatctctataagaaagatatccgatttctcccacacaatggtatttcaccacggccgtgtataccgtgaaaggtgataagggggaaatgttggtgtcacaaagaaccatagcgcgaatttttcactggagaacacacaatccaccacaagtctgtaaaggcacagaacaaagggcccgccaagaagctcctggctgaccaggctgaggcccgcaggtctaagaccaaggaagcacgcaagcgccgtgaagagcgcctccaggccaagaaggaggagatcatcaagactttatccaaggaggaagagacccagaaataaaacctcccactttgtctgtacatactggcctctgtgattacatagatcagccattaaaataaaacaagccttatctgcgggggtcacggagctcggatattc

SEQ ID NO: 628889 - DNA, 270 bp, Homo sapiens
cgagctccgtaccccgcagataaggcccgcaagaagctcctggctgaccaggctgaggcccgcaggtctaagaccaaggaagcacgcaagcgccgtgaagagcgcctccaggccaagaaggaggagatcatcaagactttatccaaggaggaagagacccagaaataaaacctcccactttgtctgtacatactggcctctgtgattacatagatcagccattaaaataaaacaagccttatctgcgggggtcacggagctcggatattc

SEQ ID NO: 628890 - DNA, 660 bp, Homo sapiens
ccgggagaaggtgctgatgcaggagcttgtgaccctcattgagcagcgcaacgctatcatcaactgcctggatgagtgaccggcagagggaggaagaggaagacaagatgttgtgaatgccatgatcaagaagaaagagttccagatgggaggctgaacctgagggcaatgaagaaggggaagttcaagaccatgaatgatgtttgaaactgctaggaaacaaactgtgatgccaatgagcaatgtcccccatgagacaatgatgctaacagcactgatgaagccagttgtggtgactgccccctcctggagcagctcctgtgtgctgtgctctgttttgaagtggtggcgccctgctcccctcatgatcagtcatggagtgaagatgactaatggggacgggatcctctgtggtgattggcctcttcctcctcagtggacctctgactgctctgtggccaaagaatctcttgtttcttctccagagccccagtgcagcggtgattcagccctgcccaacctgattctgatgactgcgtgatgctgtgacgtgacccaatggggcaactagtggtcccatgggtccagggaggggcgcctgctgagcacttcctgccctcacctgaccatgccctgccatgagctctgggctgggtctcc

SEQ ID NO: 628891 - DNA, 598 bp, Homo sapiens
gaacccggaaattcggccattatggccgggaagctctttcctttcgctgctgcggccgcagccatgagtatgctcaggcttcagaagaggctcgcctctagtgtcctccgctgtggcaagaagaaggtctggttagaccccaatgagaccaatgaaatcgccaatgccaactcccgtcagcagatccggaagctcatcaaagatgggctgatcatccgcaagcctgtgacggtccattcccgggctcgatgccgggtacagccaatgcccgaatgccagagaaggtcacatggatgaggagaatgaggattttgcgccggctgctcagaagataccgtgaatctaagaagatccgtctcggcaccaaggattacagcctgttatcctgcgggggaacggccatcgcgcctaaattcaccaggtcttttccgtctacccacttgcaactcctgtggggtcattgacttgtatgatgccgaccgttgccctatttcccctccctatttctaacgctccccaccactcccgctttccggcctgcacccgccgtcctcgttaagactacggtaatgcttatataatttacgactttttcttt

SEQ ID NO: 628892 - DNA, 220 bp, Homo sapiens
ggtggatgagaggctgggagaatagagcagctgatattggactctggaggtgaacttcacctccctggtggcagattaccctttaggtgtcatcaccaaggtttgtgtagagtatgccaggtttctttcactttctttccttttgccgtttccagtgggtgggagttctgggtttggtggtgggtctagtcaggttcatgacctggcctctaaatgtatg

SEQ ID NO: 628893 - DNA, 428 bp, Homo sapiens
gaacccggaaattcggccattatggccgggaagctctttcctttcgctgctgcggccgcagccatgagtatgctcaggcttcagaagaggctcgcctctagtgtcctccgctgtggcaagaagaaggtctggttagaccccaatgagaccaatgaaatcgccaatgccaactcccgtcagcagatccggaagctcatcaaagatgggctgatcatccgcaagcctgtgacggtccattcccgggctcgatgccggaaaaacaccttggcccgccggaagggcaggcacatgggcataggtaagcggaaggctacaccaattccgaattcagagaggtacatggattagagatgggattttgccctctgctcacagatacctaatctaaggatgcttgcccactgtataaacctgtcctgaggtgaggg

SEQ ID NO: 628894 - DNA, 343 bp, Homo sapiens
gaacccggaaattcggccattatggccgggaagctctttcctttcgctgctgcggccgcagccatgagtatgctcaggcttcagaagaggctcgcctctagtgtcctccgctgtggcaagaagaaggtctggttagaccccaatgagaccaatgaaatcgccaatgccaactcccgtcagcagatccggaagctcatcaaagatgggctgatcatccgcaagcctgtgacggtccattcccgggctcgatgccgaaaacaccttgcccccgaaggcaagacaatggcatagtaacggaggtcaagccatcccatccaaaagtcaatgataggaatgagtttcg

SEQ ID NO: 628895 - DNA, 538 bp, Homo sapiens
catctacctatgagtaggtaatcatactggagcaaaaatggaactcaatcaaaaagggctgtttgtagtgtacaattcaaacaaattgcttataacaattaaaagaataggtcattaggcttattcccaaactatgatataaaatcaaactcccaacatgttgttctgtacacttaaattggtttacactctgcaatatctcctggtacttagaataccttgcaatgtaatgaagaaaattagtttgttttgcatgatttgaacctctgaaaagtaatatattgtacattaaaataatcaagcaaggaatcaaattgccagttcctgtgagatgataggcattgaagtatagatgcctgaactcatccatgaagcaatccatgctgattgcttcaatctgtaaattatttgaacttataaataggaaagccaactttcccaaaaatatttgacaataaaattaatcaagcatatgtgataaaaaattagttctttattttgtgcatatactcagtgataagcagcactttaccagctg

SEQ ID NO: 628896 - DNA, 349 bp, Homo sapiens
tatgaggcgccgatccaagagccaggcggtcataaaggccaacacaagccataagcagccagaaccacaaggccgaggtccatgtgactatcacagggtcacgctcgttgccacagggtaggaaaagcatctcagccagacgttccgtcaggaactcgcatcgccgtttaccctgagatcatgctcgtcgagtaaattggatgggtccaaacgatttgtctctaacttcgaatccagtagatttctgacaggcacggatacgagtccctggagtgtgtatgacctactggagcagcgaagtcgcggacatctgcgtgagaagcctttggagacagttcgcgctgtctct

SEQ ID NO: 628897 - DNA, 129 bp, Homo sapiens
tcaactactatgcgtctatggtataatacgcctcacacttcatctcaagcacctactcaatatatagcctaccccgtccttcttctatccctatcaggcataattatgacaagctccatctgcctatat

SEQ ID NO: 628898 - DNA, 319 bp, Homo sapiens
ggatcccccagtatctgctcactcacagccttttaacaacctcactaacaggccgggcaccgtggctcacgcctgtcatcccagcactttgctctgcgtggatcacctgaggtcaggagttcaagaccagcctggctaacatggtacaaccctgtttctactaaaaacacacaaaattagctgggcgtggtggctcgtgcctgtaatcccagctactctggaggctgaggcaggagaatcgcttgaaccagggagttggaggttgcagtgaaccgagattgtgccactgcactgcaagcctgggtgacagagtgagact

SEQ ID NO: 628899 - DNA, 107 bp, Homo sapiens
  misc_feature (32)..(32): n is a, c, g, or t
caaacgtaattattgagaaaggaacggagagnaaagagagagggagcgtgtaaagggaacgagcaaaggcgagtaacgggaacgagaaagggaaagagcaacgtcta

SEQ ID NO: 628900 - DNA, 290 bp, Homo sapiens
  misc_feature (1)..(1): n is a, c, g, or t
ncccgaaaggtagctgttactggtgcagacactgtaacatataaaatggcctccacctgtaaaataaagctcacagatcagtgagaaagacataagtataaacaaataatcacaatctacctgtgctgagttgtgaaactgctatgggcgactgctggaccacacgacagtgcctaacttcttcctaaactgaaacgacggaaacgtgcactaccacgggctaggacaccagggcggttggacggttactatctcgacacgctggttgcttgacactgactgacctgacc

SEQ ID NO: 628901 - DNA, 179 bp, Homo sapiens
attctctttggctagctgtcctagctcagatacgtggacttgttgtaagaagatgaaggcgtgagggcatatgggtcacaaatagctatgacttcagtccagagagccctctaatgtaaagaagattggtatttctcatcccaggaaatcagtggcttatttataacacaataaggtaa

SEQ ID NO: 628902 - DNA, 227 bp, Homo sapiens
aggatccccagtttttagtaatggggtcctctcatgttagataatcttcattaaatgattcgagcggaaacttgatttctgatttcatgacctttcatcattattctaatgtcttatcattgttatcgttttgctcgtctagcctcgcagactatatgataatgtaatataagatacagtcaaatcataaatttatgctcatagaacagagatataaatgggcgtac

SEQ ID NO: 628903 - DNA, 241 bp, Homo sapiens
agtcctgtccgtggtcgtcatctccttgttgggccgcattcagctttagccattggagtagcgtttaggttcctgtactgtgtcacggccactctgtgttggcgcttgcgactcgtcgggctcggcccaccgctgcttcgcaggcggcaaagacctagtatggcaataggcacactattggctacgcgggagtgggtgttgagggttatgagagtcgctataatgaacagcgataggcaat

SEQ ID NO: 628904 - DNA, 189 bp, Homo sapiens
  misc_feature (18)..(18): n is a, c, g, or t
  misc_feature (25)..(25): n is a, c, g, or t
  misc_feature (97)..(97): n is a, c, g, or t
  misc_feature (175)..(175): n is a, c, g, or t
accgaacactggcttcanagccgantttgtgcattgctgccatgaactttgacctgagccgggggagaggatggcagccgactttattaaaaaaaanccaagattgtagtggtagtcctaactccataacgctgaggaaatacatcattttcaccccagtggcttttaaatcccncttatgaattttag

SEQ ID NO: 628905 - DNA, 386 bp, Homo sapiens
taccagtggatcacgcttgtactccagcactttgggaggcgagggcgcgactaacgacggtcaagacgatagagatcattctcgccgatacggtgaaactggatctctactaaaaatacaaaaattgggcgggtgtggtggtatggaacctgtagtcccagctactcaggaggctgcggcaggagaattggtttttgacatcctgacacatgtataattgccgggagcgaaagttgcagactacgtttcagacacacacacacaaaaaatggaatctgagctggtgggggccagctgaaatctgggaacacacagacaccctggttaaaaataacatccagacatcattgccagacggtctctccagggaatacctctagagtcga

SEQ ID NO: 628906 - DNA, 823 bp, Homo sapiens
  misc_feature (43)..(43): n is a, c, g, or t
  misc_feature (180)..(180): n is a, c, g, or t
  misc_feature (220)..(220): n is a, c, g, or t
  misc_feature (232)..(232): n is a, c, g, or t
  misc_feature (295)..(295): n is a, c, g, or t
  misc_feature (300)..(300): n is a, c, g, or t
  misc_feature (302)..(302): n is a, c, g, or t
  misc_feature (325)..(325): n is a, c, g, or t
  misc_feature (332)..(332): n is a, c, g, or t
  misc_feature (336)..(336): n is a, c, g, or t
  misc_feature (411)..(411): n is a, c, g, or t
  misc_feature (430)..(430): n is a, c, g, or t
  misc_feature (451)..(452): n is a, c, g, or t
  misc_feature (475)..(475): n is a, c, g, or t
  misc_feature (481)..(481): n is a, c, g, or t
  misc_feature (546)..(546): n is a, c, g, or t
  misc_feature (550)..(550): n is a, c, g, or t
  misc_feature (552)..(552): n is a, c, g, or t
  misc_feature (578)..(578): n is a, c, g, or t
  misc_feature (738)..(738): n is a, c, g, or t
  misc_feature (813)..(813): n is a, c, g, or t
gagtcatcacatgccctctagaacccagatccccatgccgggncctcttctctcctgcacaccggtcgttgcgagggagggcgtgttcaggccggaagggggtgccggttgcgttctccgcgcctgcacgggtatttaatgtggcacactggccaggctcctctcctgccgccgcccagnagcagcacgggcgcgcgtgtggcgctttcttcagtgcccnccaagacgtggncgagagaggaggcacagacgtgcggagagagagagggcaagagaagtcgtaattcgagcagtnagttncnacagaaagtgcgctggaatcggnccttggntgcntctgcgcgtggaagcaacccacttaagccccaggagaggggacagaggagagactgggatgggggtgggagtgcncagaaggcacccaggaganactggctgcagaaatggggtnnctgatcttgcaagaaaatccgcntgcggngggcaggttggcctgagaatcccaggggcagcttcagacattggggggactcagacccacccccncagncngcagctgtggcagtcagaggtttggnaatgtagccagggtcacctggccatggcccaggggcagggtgcaaacaagaaccctggtgcctcccgcccctcctgctgagccatggtgccacctaagccatctagaaaggctcaactttttgggagacatctgcggcagggccactggaggcaggagantggggtgctggcctctgcgaggcaggtgcagctctgggagaacagaattctccctctcctcctcctctcacacantgtggctcca

SEQ ID NO: 628907 - DNA, 666 bp, Homo sapiens
ccattttgtttttgagactgtatttcccagcatatatctcctaacctttgatgactctgtactttgtttttgagactgtattccccagcatatatctcctgacctttgaagacactgcatttgtttttgggactgtattccccagcacatatctcccgacttttgaagacactgcatttttttgagactatattccccagcatatatctcctaacctttgaagactccatatttcgtttttgagactgtattccccagcacatatctcctaacctttgaagaatctccattttctttttgagactgtattcctcagcatatatctcctaacctttgacgactctgtatttcatttttgagactgtattccccagcatatatcttctaacctttgaagacactacattttgtttttgagactgtattccctagcatatatctcctaacctttgaagactccagcctctgactttgctgactcagaaatcaggatttggaatttttaaaattaagaagagagacctgactccttgccaggaattctcagaatcatgtgattagccttcctcctggagaaggcctttgcagttgataccctgagggagtgaaggaggaatcagagaccttagtccctcaggtcgctaataaagctgtttttttttttaa

SEQ ID NO: 628908 - DNA, 90 bp, Homo sapiens
ctagaagattcagcaaagtacttttgtgctcttggagacccccccttcctcatactgggggatactgtgggggccaccgataaactcact

SEQ ID NO: 628909 - DNA, 234 bp, Homo sapiens
  misc_feature (118)..(118): n is a, c, g, or t
tttataacaccgaaaccaattttgaaatgtcagtcgtccagcttgccaaagaactaatgcacctgataaaagcgaccaataacagtttaaaatgaaaaatagggctaataatgttaangatgaacccaccaatgatatgaaatgcaggatgaggttgaaccacataatgaattttatactgcagtcctaaatagccttggaaaaacagaaactgaccttaaaaccaagaacccc

SEQ ID NO: 628910 - DNA, 252 bp, Homo sapiens
cgacaccaggagtactcgagattggccgaacgcgacctggctatcataaaggcctatcaatcgcgctccttgcggcacgagttttacccggcccgttggcgagtcaaacaccgctgatgtcacttgagcggtgatctgtccgggaagatctgacctgatgcccgtaatgagagccgcggaaatgattgttccggcctgcacgacaaatggcgacgcagggcgcgcaatcctgttaggtgccgtggtccttcg

SEQ ID NO: 628911 - DNA, 433 bp, Homo sapiens
cctatgtgcaccagcgacatgtcctatggtgctattattagtgttgaaccactgaagggagtcagaatcacctccagcttcaaacaagttgggaagttcattaacctgtgtgtattctaagtctcctcgctttcgagctatatacctatgttctatagccaacactccactagggtaacttaaaacaaaatagtaatttatttacaactagcaaagatgtcaaaaataacaggaacaatatatcacaaatccaagatttttatgcacaaaaggcaaacagtatatacacgaaacaaaagatgaacacacaatccatagggtaaacttaatttgaccttagctaaacagttacagaatgtggcaaaatggttatcatttatattagtcaccctgggccaattaaacacacacacacacacacacaatcttttac

SEQ ID NO: 628912 - DNA, 125 bp, Homo sapiens
tttatcccagaagcactgtctgtgtcttggatggtagcgagacaagatggtggatccccagactcagtgtcttgtatacatagggaaggggcatacatgcttcagaatggggcaagcggccgcaa

SEQ ID NO: 628913 - DNA, 283 bp, Homo sapiens
gggttttttttttttggtcccccggttccctgttttaaaaaaaggggccccccaggtccttttttgggggtttggcccgattatattaggttgggtgggggaaaaattttatggggggatgcccccaaaagggggggtccccaaatttggtaggccccggccctttccagctcctgggccttttggggggtttggcctccatagggggcttccttttttttttggaaggaacccctttggttttaaggggtttgttaacctttaaggggtttatacttttgga

SEQ ID NO: 628914 - DNA, 935 bp, Homo sapiens
  misc_feature (7)..(7): n is a, c, g, or t
gatctcncttaattccagatagtcgttccctatatatgaactttcggtcggccgacccactttctttgaatctttctccgtgacacttaatataatgtcgcccacgtaacatatttctttcccgcatcaaattcgcatgcctcccccgttcaacagaaaaagaagactgggttacaaaaaaacacattgtactggggcaaacaacacttgccaccgtccccaagacaccctcgcgctaatcttttaactgcgtgccatcccccaaagaccacttttttttccgtgttcaaacagaagctctcccttctttgtgtcccgcccacttcaacttcactatctataccccagattacccaaaagcaattgttaaaaaggaatcttataaattatcagacctttctatacaccaactagtccttgccggcccgcaccccacccattaggcaacctctctgttgtatgaaacccacccactcctgcagcccccccgataaactcttttaaaccatcgtatatgaaccatcttcaccggcgcggaattattccaccaacacaaaagaaaaacgggggggtgttacaatatcatcgttgaaaaatcttctcgtcccctctttttataagactcctcttatgtgtgcgccccacaggaaacaatcttgcgtaagtatcctccccaagatatctccctataaacatttcaggttaaaaaacatgtggcccatccctgctttttgtgactaaaaccccgacctagtagtcataactccaccaccagagatctttcgcagtaaccaccggaccatttattattttagtaagttcatacgtactcttccccgcgttttttctcgacaggctcgccggcacacttaacacttttgagaacagcacccccccaaacaatcgaaaattcgctctaaacagcaaacaagaca

SEQ ID NO: 628915 - DNA, 506 bp, Homo sapiens
gatgaaaagagatgaaataacagaaaataagcctgaaagatcagctgctaaatgtttatcaatgccgaatgtaccttgtggtaattacgaagaaaactatagtaggagtacatgaagaacttgctaaggaaagtgttaaactgccttctttgagggtctttaaaattaggctaaagaatcttctatctgaaataatttagtcctgtctaaagactgattagaaaagttgtaatgacgttagaagggttctttcagtcctaatatctaagcatgagcagggcagagaagtttaaaccaatgtggagtttctgcatgagtatgtgaaatttaagaaactaagttgaaacgggctcagttcagtaaagcaacgtatgtaattttatttcatcctgtttccaaaacatccctattcctaacaaactgctggatatactatttagcagaaatttccggcagttgtaattccactaattcacttttcaatgttgttttctttaaaataaagg

SEQ ID NO: 628916 - DNA, 707 bp, Homo sapiens
acagtaaattacacacacacacacacacacacacacacagcacacacacacagcgccgagcatctgtctcgggtaccagagcgagcagctgtggatctcagatgacagcagcagggaagaaactccacgtgaagggaaaaaacccaatattttccattctccacaagagaaaacaggtgcaagcccccagggactttactcgtggggcgtggctagtgtgtgacgtgtctcggatgaatgtgagtgacccagtgcacagtggagtcaaatagtgcgtgctttccctctgtgtctcacaagctgtgggtgagctcgtgtctctgcagggttagaatgtcgtgctaagagatcactagtgtgaagatgtacttggagaaacgtgaaggtctcttatgtgtaagtgtgtagagttagagtgagccatatattttcgtgccgtcttcgcgggactattcatgcagtgtgtcccaagctattcccttggtgaattgtcgcgtgagtggggccagtaagagtgaagtgtgctccttgaatccgagccccatctggggcttctctaacaaatctgtagtatgtatacggactccagggagagagggtgggcttcttctctcatgtgttccttgtggacacatcgtgggccacagatgtgtgacccgtgtgggtgttagtcggtgtatatgtataaactccgtgcgtgcttttcc

SEQ ID NO: 628917 - DNA, 955 bp, Homo sapiens
gccacgttcgcagacgccaccgtcgaggaaaaccgtgtgctataagcacatggtcacaccccaccgtgttcttcgacattgtcgtcgacggcgagcccttgggccgcgtctcctttgagctgtgtggcagacaaggtcccagagacagtcagacagattttcgtgctctgagtcgactggagacgcaaaggatacgtgtatcagggcttcctgcttcaccagaattgttccagggtatatgtgtcagggtggtgacttcagacgccataatggtactggtgggcaaagtctcactctatggggagaaatctgaagatgagaacttctatccttaaagcaatacagggtgcctggcatctgtgatccaatggcagaattgctggacccacgctcctaaatggttcctcacgtttgatccagtcgtgcaactgacaccctacttgagatggttcgagattggcaagccatgtggctggttagtggacacagtgaaacgaaaggcttgacgtatcgtgcgaaggccatgtaagcggcgttagtgggtccaggacatggtaacgagccatgaaaagaatgattgccatggctgacgtgggacaacttgtaataagttcgactatgtgtctatctcacccaacaagatgcattccttctgacgctgaggagagccccgtccaacgccattggttcgatggactcctagaatctatgtgcctcttgaaatccctggtccatgtttccgtgtgcctccatgctagctggatgcgaagtcaggtctgatatgactaaactactacatgcacaaacaacaaagcaagcgggggcgcgcgccgaaaatacacaacggtggcggccagaaaacacgccaggccagaacggcacgaggcccaaaaacgggcacgacagaggaagtaagcgcacccccgggacacaaccaacgcaatctccttcagcg

SEQ ID NO: 628918 - DNA, 342 bp, Homo sapiens
atggaacgagatatgattgagatgaacataacagagtggctcctcttatacttagagacagagtttcacttgttgcccaggctgaatgtgaatggagtgatctcagctcaccgcaacctccacctcccaggtccaagcgattctcctgcctcagcctcctgagcagctgagatcacaggcacgcaccaccacgcccggccaatccttgcatctttagtagagatggcatttctccacgttggtcaggctggcctcgaactcccaacctcaggtgatctgcccacctcagcctcccaagtagctgggactacaggtgcgtgccaccgtgcccagctaattttt

SEQ ID NO: 628919 - DNA, 1138 bp, Homo sapiens
gtctcagcctcccaagtagctggggctacaggcacctgccaccacacccggctaatttttttgtatttttagtagagacggggtttcaccgtgttagccagaatcgtcttgatctcctgacctatgtgatccacccgcctcggcctcccaaagtgctgggattacaggtgtgagccaccacgcctggtccaagaacccaaacttttagatctagagtgatgtcagcatgaccattgatttcctgaggcccaggggtgaaggagctgaggacagcagaggggtgaaggcacgtcagctacaagacagcagcagctgatgcacaaggctcccaagtgcctgaagtcacccggaacttgggacgtgctcagaagcttacaaagctgcctcgaggtggggaacacaaattaatccaagagcagatccctgatccctataaaaagtgtactagatgcagtggggggcattttcacatgagcagggcaagggaccagacagatacacagaacggacaaacagctcttgcggattggggactaaatgctcagctttatgcccaaaatcttaagtgacttaagcatcacttattagctcacgcattctgtgggctggaccactttggtatggctcacagggccagggactgtgcttgggtcttacctgaagcagcaccctgcaattgtctgcgggtcaaactgggggtatgggaaagaagacgaggagctagaccttgtcttcccttcccaaggaacggcacgacaggggtaccactggggctcggacaagcagacacagaaggcgaactcgcacagcgacctagtcatccctaccaggaaagcaagccaggctatcacactggaatgggccgacaaacaaggaaggggacaagacagggagacactaggtcgttcccgtcccgagggaaatggcagcgcacagggtacgggcgacctgggctaaacctatacggctgggaggcaagcacaggagcctcccacggggccaagacacagagacagaaccaatacgcccaccaatagcaacagattcctagacagccctaccggtgcaacaatcagagaacactggtacaaaatcaccacattgagcccagatggcaaagtcaagaccggcagaagcc

SEQ ID NO: 628920 - DNA, 333 bp, Homo sapiens
ctttgactacttctcaggctcagacagaaaaaccgcaacccaagcttaggttgcactcagtaggcctgttgcttgtcatggtctgggtgccgccatgctgatgctgttgtgtgtgtaggtttgtgtgtgaatgctagcatgggagtgtgtgtgcttgtgtgacagtgcgcctgtgtgagtgtgcatgtgtccctgtgtgtgtgacaagtagttcaaacagacacctctaattccagttacatccacagggctttcctttgccttcctcatcagtatttgtatctttcctctcactgtgagaggcctggctcccagtcatatcaatgttttttt

SEQ ID NO: 628921 - DNA, 207 bp, Homo sapiens
agagagatctagcgcgcaggggtccatacatagagccgtacatgcccaccaagcaaggcccggatggagcagcacagccgcgtgctcttggcacagagagagcgtactacagcgcaggtctccggagggccgtactagcaccacctacaaagacctaggacagcccacggcagtacatgacacgctgggcagcgacaagcggcatga

SEQ ID NO: 628922 - DNA, 504 bp, Homo sapiens
attgggctgcttcaaaagaatgactgccctcaaattgaatccttgcccggtgaaccctttcccccaagaggccccgcccaagtccagtcggttggtccttaaaatgaagaattcggaacacaacctgttgttgaaaatgtgacctttaaacccccccaaggaatttttgcccttcaaagttttcaaccacttttatttacctaaagaataaagttattccgaattaaccaatgaatggcttccaatgaaagaaaaaaaactgcccttttccttttgggcccttaaaaggccatttttgcctttattttttaggctaaggaaggtcctcctccatttttttacaaaaaatactttggtgccttaaagacatttcccttccccctttccttttgagggttttccttttcctttccatttttttaccataaaggggatgttcccttttgtccccttccccacctttaaatttggggtccttttttaaacaggaaaaaccaaaccaag

SEQ ID NO: 628923 - DNA, 193 bp, Homo sapiens
gtgatcagcggtctatgctactttttgtagataaacaacatacaaatcatttctcttgaaactaccacaagtctctgctttcttcaatagcaaaattcacagagctacatccttgctatctttaattcctctcttcccatggtctcttaaacatatcccaatttggctttcaaagaaagcactcaaccaagtc

SEQ ID NO: 628924 - DNA, 1780 bp, Homo sapiens
  misc_feature (415)..(415): n is a, c, g, or t
  misc_feature (987)..(987): n is a, c, g, or t
  misc_feature (1153)..(1153): n is a, c, g, or t
  misc_feature (1164)..(1164): n is a, c, g, or t
  misc_feature (1166)..(1166): n is a, c, g, or t
cccctccctcgttctgttttgtgtggacgtgttttcatcattgtcttgcttggtagcagcacgcttcgtcgtcgttagttgcgtgtttactgctgctgggtaggggtcctcttctcctctgatcttgtgttgtgttgatgcctgtgtttgtgtatttgcatcgcgtgggtgctctgttgtgtatattctcctccgttgggtggtttcttcttgttgtctggtgtggggtggtacctcgcccctccgctctcctcctcgccacaccaacactggtggtgtcgccaaacctggtgttctcccggcgccccaagtttcgcccgcggtggtggggttgatatatgtcgctcggtcccccacttgtctttcccgcgggtggtgtgtgtctgctcccctctgtgtcgtctcatccgagagngtgcgcgcgaggcctcttttcttaagtggggggtgtctcccgcccgggtttcgttcctgggacccccgtggttcgccagggacccccctttgtgggtccccggcgccccgaaaattttgggtgtcccacacacacccacgggacaccgaagagatgttgtcgtgtggtattaaaaccctgagatggcgccccccacctctggggttttcttttgtgcccccctcccccggtgtcgcaccacgccccacatgggggatgttataattcctgtggtgaatgctccaagaaccagcggtttctcgttgtttcttcgaggaagggtgttccccctctcgcgcaacccctccgttgttgggccctccctctttaaaaaaccttcgcctttttcttcatcgccctctctggaagaaaacgcccaccccaagttggaaccctcgcccctcgtgcgccctggtcgagataatagcacccctcctccgcgccttggtaaaaataattttgggggggtttggggtatatagcacacgcggtccccccattttgatacttttctttccgccacaggagaaagntcctccccacacatttgtttcccccatataatactcacagcgtctctacacaccacacgcgctcgcgccacatgccccatattgttttaaaaggagcacatttctcccgcagcaattatagcgagcatcctgatatggatacgccatcatttgtttacaccgtttntttgaggcacntnttttgggggggtgtttatatcttgcaccccacacgcacacacccacagtgccccacttttgtgagaaatagaaaacacccacgtgcgcccccctggagatatttacaccacagatactcacgaatatgtgtctcacacacacgcgcgtgtgagatacttttgtgtgtgttgacaccacatagagccccactgagaaggtgacaccacgagaaccttggtggtggtgttctccacagatgggtgtttttcttacacaccccacacataatagtgttgtctccactcgtgttcacacccacagccgagagcgcccaaggggtgtctcccacctggacgccccaaaggccttgagggcttgcgccacttctacgcacttgccacaaccacaattgtgtttcctcataaacgcacttcctctttatttcttctgattttatccctcgggtgtctgcctccacacaccctggagatataggaagaattcttctggaactaagctgctcgtgaaccacgctgcccctcatcccgcggcccttaatggagattttggacccctttttttctctgggattccccgcccccccccctcctatagagatgacttttaaagggaa

SEQ ID NO: 628925 - DNA, 790 bp, Homo sapiens
agtccgaggcatgcggatcacttgaggtcaggagttcgagaccacctggccagtatggtgaaaccccatctctactaaaaatacaacaaagttagccgggcgtggtggcaggcgtctgtaatcccagctgcttgggaggctgaggcaggagaatcacttgaaccctggaggtggcggttgcagtgagcacagatcatgccactgcactccagcctgggcaacaaaacgagacttcgtctcaaagaaaagaaaagaaaagaagtatagaaattgggatccttgggtcggggttctcccaaattctttggaggtgtccagggtcaactggtttcagcttggtttgggaaaccccttgccggaagtcgcatatgggcgtgttcttcactttgttcccagggttggaggaccagaaagtagcctctggtttcggaggaggtgggaagtcaagtatcactttcatttgtaactggggactggtccaggaccacttttgacaaaagggctggttcccttcaagggtttctggaagggaaagttctatcactatggtgtaacttggacttctgaatagtttgttaaatgagggcttatttgggaaaaatgcggagttacttcaagtgtttcgcaataccttcaaagtaggtaatatccagagacagtggtggggaccagatggcttagagaactttcgggaatattctgtgtcgaagattcttaattagtgaatgtcttggacttaaatttagcaaaaatgtgcaacattatccttgggccatttcttaaataggga

SEQ ID NO: 628926 - DNA, 543 bp, Homo sapiens
aaatttaacagtggaaggcaacaattgacttagtagaaacaatggatgctgattaagcgtttagaaggagagcggttttcaaggttatatggtttggtaatgttccttccacgtacatactaagttcgtttggtaaagaggtgtgtggtgccagttgttccacatgtcgtggtggcagtaagcgtaataagaaccaatgtggactctactactacgatccacggttgggttgtagactgcactgtcctcgtatgttgaattcaagtgattgtaattaacaagtgcaacgttaggcgtaacgctgggttcaggttatcgtagttaggatgcatgcctgtaagtgtcaatggggctcatggctgctatcccagatgagcaatggaagtgtagcgcacgtctcctcattccgggtgtcattaatgtgaatgcagcataagtagagtcaggtgaaaatgggaactttgatcaatcaacattaacacgaaactcttattgggtaaacaatttaaaacataacaaaaaaaaaaacagccccacaagaca

SEQ ID NO: 628927 - DNA, 974 bp, Homo sapiens
ggctctatcttgtgccggaagtgggaagagagaaaggttgtgatggcggtatagctgcatccgaggtgctggtgaacagcgcgaggaggggtccctcgctgcgggggggaggtgggccgataagaaagcgcgaacagagattgcgcaaatccgggggagcttgcaccttgatgggaaatttgaagctcgtaaattaaatcaccaggaagttggtggaaggaagataaaagatctaagaattaccctgcaatttggggagaagccaaaaaagagctcgttggggaggtgggggaaactaaaggggaggagggaaaagaaaaggggatgtggggcaaggagggacgaaagatatgagaaaaggtgaacgtgggtgaaagatcagtgcaagaagattgcagaaaagatgggagagggaaaacagagggaggaaaaaccgtgtgatcggggatttacaagatttatgctgctggccaagttacggccaggtatccatcgggttgaccaagcggatcaaacttggatgtgggaaacatttgagagacttgggagaaaactctggagaaagatgttttcccaagcaatcaaataggtttctttcatgggaacaagtggtgccttacaacagaggaattggacagggtgggtcattagatttgaaaaacagtttggaaaaaggagaaaattatgggggagaacggttcttataatgatgagtcgatttcgaacttatttatgaacgggaagtgccaattcacaagacaggggaagattctgtgggaattaccagtgaattaacggatttggagaggacagtgtctatctctcagaaggttaagaagctgaagtgaaaattggtcaaacaagttttgtgattcacgaaaaagaatggacgcgtcccagataaaaaaggtgtgagattgattacaagggggaagatgggggggcacctcaaatttatgtggtgtgtgaagcga

SEQ ID NO: 628928 - DNA, 222 bp, Homo sapiens
agctttgaggctcactagagatagggctggcgcggagtctagagctctgccaccaactgactgagggaaactgagccctttatctctctgagcttctttgtcatcttctgaaaagttatcatactaaacttaactaggtttgcctgcatgatagccagtttaataatagtaatactagagtttacgattctttacgtgtgtactcttgaacgtgttaacacc

SEQ ID NO: 628929 - DNA, 406 bp, Homo sapiens
tgggactggagaccgggctccatttttcaaagggttcccgcagctgtgcaacctgggtttttggccagtgaatcaggaatatttgcttgggcttttgaccagtttgaaagtcgatttctaccagctgaagctgataaaccccttaaagtatccagagggggtgccccccccccagaagaaactcttcccgtcagctggaaccccgaaattttcaagagaaagagtttttaatgaatggggaattttttctctttttttttttttttttttaattaaaaaaaaaaaagcttggggttcttggggatatcccgtctttttgggcttgggctgggaatataaaggagaaattcccttgcttccttcattgttgtttcattttttccaataaactgtcccctgtccccta

SEQ ID NO: 628930 - DNA, 511 bp, Homo sapiens
aatgagtggtttgccagatttgttgaaacggcaaattgcaaagaaagctgctgcgctggatgtgtacaatgcagtgagtaccagtttccagagagtcgtacatgtgcaacaaaaggatgatgggtgttgtttgtggcatttgaaaccaccctcttgtcctctcttaactaaatttaaagaactgaacactaaagtaatagatctctcaaaatgtggtattgctcttggtgaattttcaacattgaattcaaagttgaaaagcggtaactctgctgctgtgttcatgaggacaaggaaggaatttactgaagaagtaagaaatcttttgcttgaggaaattaggtggtcaaatcctgaattttcattgaaaaaatattttcccttactcctaaaaaaacaaattgagcaccaagtactttcttccgagtgtcatagtaaacaagaactggaggctgatgtcagccataaagaaaccaaaaggaaactcgtagaagcagaaaattctaagtca

SEQ ID NO: 628931 - DNA, 153 bp, Homo sapiens
agctggtagctcattgagttgcattccttctcacttgggtggagttgtaggattctgcctctggaaatgtgccatccttctgaatattggacccaggaagaggagtgtactagagtggccagctctccgccagctgatcacaccaagagagaa

SEQ ID NO: 628932 - DNA, 862 bp, Homo sapiens
gtatatacacacacatatatataaatatgtattcatgttcttaaacttacatacctgttaggagtgttgcagtctcaaacaaaataagagctacaaaaacaaaattttaagtcactatatgattataaaataataatattatttaataatctttggcaagtagaaaacctacgttatataatggacattgaagagaccaaatctatgaactttttatcttaaaagaactcttattttcttgtgataaatttttcaaaaagaaagcaaagtttgcttaaaagcatttctcactgatgtttctgcatagtctaattttttcctttcacttcatgatttacttatcttgcctttaaatttacatccccaaattcttcgtagacaattacaaatgtccttcctcctactttagatatcacgtagctgtaagttttcatttcttaatcatacattatcttactattatttagtagctagttcaccccttaataattttccactgaactacggattctttccagttaacatcaattctactgtagacatacccaaatattaacatagaattttcaagtaatctcaaagaatcctaatagggatatccgtcctgtttatacattgggagcttaatgtttcttctaatgtttcccatgtcaaattgccctaccagatgttttagccagactgctctttggatggtcctccttcgcatcctaaccggtctttcatccccgtggtccgggattagttgtttccctctcatgtctaccaggggatggcgttttcccccggaggcccgggccggcgcggcctgcttgtaggaggggcccggtctcttgggcgttcttccttgggtgcgtacatc

SEQ ID NO: 628933 - DNA, 734 bp, Homo sapiens
taatataaaagcaccttggtttattcacttcttaaactttgtaccttttcactttcttgattattaggtataaaatatgggatttacatgtagaaaaaatatttaatgggcccaggagtccggcttcttttagtgggcaatggtaattcggtgcaaccctctcagtaaggtagattaagaaaggtgtgtatctgcgtatgtgtctgtgcatgtgcacacatgtgcattgggagtgctaggaagacaattataggaccaaattccaaaataaaagaaaatgaaatttagagaaacatgaacctggtatttagctcaattttttgcctttaggagtatctgccaattcaggaagaagtggtgggtgagatcaagaagttgttgagagttttgggaaaattcatagaattgaaaataaaaatggggttcaaatttggctaagagacatgggtaattcaccaacagtttgaattaggattctggatgatctagacccctcaaataaggggaaaatattttggcaacttctaatttaaattctggataatatgaaggtcactcgtggtctatggatagccctagaacacttggcttaaagaaaaatcaagctactctagaggataagaaaattatccgtggaccttaaatccttttggcatatttttatatggaacctgtgcgaacaatgagggcaactgggcaatgagtaacagatgatgttcgtgaaaagaagagaa

SEQ ID NO: 628934 - DNA, 1138 bp, Homo sapiens
  misc_feature (1138)..(1138): n is a, c, g, or t
gggctggccacccgagacgcggcgcgcacgctcctggcctgcgcagcccggccctggcctatggctggctcgccccgcccgtctcccgcgatctcgcgtttcgtgtctcggctccggtcatttttactgccccgcgagaagagaagttcggccctggtggtggccccaaagcccatagtgaatcccttccggcccggggtacagcgatgcctcccccggcgagcccgtgggtcccagtcgcgcatcatgatgggtccgggtgtggcgagattcccccgatcgtcctccggaagatctttcccctgtctccatctcctcttgctggggatggtgaggagtgcatgaggggttgctctgcggagggtggcattccgagccgttcggagttccccgttgagatgtcttaagaaccaggccgcaagaagcaggcatctctgactcactcacatactggcaggcgtcccctccatgcatcccacatacaagcactgccccaatccccagcgatggcctcactgtcgtaacgtaggtcataggcgctactgaaatagatcacccagaatttgaatcctgaccctcccacaatgcaaagccccaggagagcccaagaccaaggatggcaacatgaaactgtaggccagggcatccacatagtggcatgtacacaaggctgactggcctagccatagccatctcacaggagcacagccgctacttacctgcaacacccaccccgtggctagcaacaacccgagggtcagctgattcagacgctccaggcattccggcactggtgaccggccctaatgggaatatcaggggatcactggtccactatctgtcagcgctaccgggggcgtgccccgacacaagaaccccaaaacaccggcaatatcccgggagctacggagacactgacccacaggacaatacacacgtgacaaaacacaacaaagccccacgaagcgactgcaggtaccaaacctcgcgccacgtaaaaccagagccacaccgcgcacagcaacacctacacaacgctctcgagacacagtgcatcagccacacacgatccccgcacaacaacgcagaccccaaacccaaccgccacaccccacgagcacgcagtgtccgctctcgn

SEQ ID NO: 628935 - DNA, 147 bp, Homo sapiens
cggacatgcgatcttagatacaggtactacttagctggacattcgcaattatcattaaatgattctctaaatctttgtgtgtgtgtgtgtatgtttttcttcgttagagtttgagtgtttagctttgtgttttggagatggagtttc

SEQ ID NO: 628936 - DNA, 294 bp, Homo sapiens
ccatcatggacacgagtcgcgtgcagcccatcaagctggctagggtaacaaagtgctgggcaggaccggttcgcagggacagtgcacgcaggtggagtggaattcatggatgacaccagccgctctatcatccgaaatgtcaaaggccccgttcgagagggtgacgtgctcaccctattggagtcagaaagagaagctcgaaggttgcgttaatcttgcagctggtggggttctggatatccactacttagcccacggaatgatctgcaactgttaaataaagcatttatatta

SEQ ID NO: 628937 - DNA, 418 bp, Homo sapiens
  misc_feature (149)..(149): n is a, c, g, or t
  misc_feature (155)..(155): n is a, c, g, or t
  misc_feature (158)..(158): n is a, c, g, or t
  misc_feature (181)..(181): n is a, c, g, or t
  misc_feature (380)..(380): n is a, c, g, or t
tggggggacaaaatgggcacccccccactgtccccttcaaagtgaagggccgttggggttggggtgggaaccccccatcccggcccccagggggaatggggtttgtttccgcccctggcctaaaaaagttgttcataaggggtggtatnaatgantgnacaccctcagcccgggggtgcantgcccccctgggcaattttgccaaggccccctttgatgccatttttaaaacctacaggtacctgcccccccccctttggaaggagactgtattccccaagtttccctatcaggagttccctgacccccttgtcaaaaccccccccaaagtttccgtgcaacgggactcaggctcccacgctgtgggtccacacaaaggngtttttatacaaagaaaaataaaatgaattaagggtga

SEQ ID NO: 628938 - DNA, 1315 bp, Homo sapiens
ccctatggtagggactccagcacgaggtggaagtccatatggacaacaggtgggagttttaggggcctccagggcagcaggcacacacctccatatcccggaccacatccagctggaccccctgatcatacagcatgccaacaacaccacatgtttgtagctcccccaccaaagacccagcgagcttcttcactcagaggcactactgaaagtacattgaaggactcagtgcggagtccaacagcattagccagtgggatcagacactggccgctcgaagacgcgacgtccatttgtcgcacgaccaggagagccgccataccctctcactggctgaaaagcacaaggggcccaaaccagcatggcagatgccctctggacgccttcgagatttgctgctccgggacaacctcaacattcgacaagcaatacaacctagaacaatgtttacatcacatccattcacgtctctcattctccatactagcaagccattcaagcagtgctggatcagtagcccataatagtctcactgcgctggatggcacggcaggcacaaacaggagcgaataaataacacatatgcatctacacctgtacaatcacataaggcccacatactaaaaatattaccgggcaacacactttctctgatacaagagcctactttaccaactatagcattcagcttccatactccacggctggccccgtttaatcaaaaccatacaaccacagaaatactacgtggcacttcatgcttgcccatgctcggtactaccaaaccaccggttcaactaacgtagggaacaagaaacacaacacacacaaccagaccaacgcaaacaaaccagcgaacaaagcaaggagaaagaccaacgagaaacccaaaacaaaaccacacacacccggacaaacaacacaaagacacatagccacacacccgagcaaccaacgccgatacaggaagcaaccaaccacaatacatacacccaccacgccaaccacacaaacaaaacacacaacaccacacacaaaactacaacgcgagacaaagaagacagagcacacacgagcgagaacaagcgacagaacagaaggacgacacacataaaagcaaacgacagggcaagcagaccacccaggaatcacaacccccgaccagaccccacccgaagcacgaactaaaacggcacgaaccgagggcagacacagcacgcccaaacaaccacacagacaaatgaggaaaatcaatgaacacggaaaaatcaaccaccagaacgaacaacacgcccatctccctaccgacgccaaa

SEQ ID NO: 628939 - DNA, 188 bp, Homo sapiens
atcgatgtatgatggttactcatttgacgctgctgtcacccagcaaccctaaaagagaattttgtacattctgtatcccacagacctgagcaagccaggcctggcttgctcaggtctttgtcttgaggaatggtaagatactaaaaaagtattgataacagatactgagcagacctgagcaagccagg

SEQ ID NO: 628940 - DNA, 159 bp, Homo sapiens
gctggacggagaacggcagctctttgactctagatgtcctgagtttacaggtgtaactcgtagtcgtgcacgctgatgcctgccagctcttctgacagacttcggcatcgcatcacgggctggcagaagacgcttcagcttcgcagtcaggattcagcg

SEQ ID NO: 628941 - DNA, 92 bp, Homo sapiens
agctccctttgcagtctggaagaaaaaggtattgcagtcagaactgtgtactgatgatagaaagcctctggtagcaataaaaaagtgtcctt

SEQ ID NO: 628942 - DNA, 349 bp, Homo sapiens
tctagaggatccacgatatgtgtctcactctgtggtcaggctggagtacaagtggcacaatctcggcttactgcaacctcaacctccacctcccgggttcaagtgattcttgtgcctcagcctcccatatagctgggactataggcacctgccaccatgcccagctaatttttatgtatttttagtagagaaggggtttcaccatattggccaagctggtcttgaactcctacccaccttggcctcccaaagtgctaggattataggcatgagccactgcacccaggctagcattttctttctaaagcacaggtccaatagcatcactccctgcttccagaccttccac

SEQ ID NO: 628943 - DNA, 355 bp, Homo sapiens
  misc_feature (27)..(27): n is a, c, g, or t
ttttaacacctaaataactctaagttntgtacatgacatttacacaataagaatacaaagaggccaggtcctgtggctcatgcctgtaccagcctttttgggagaggccgaggcaggtggatcatctgagctcaggagctcgagaccagcctggccaacatggtgaaaccctgtctctactaaaaatacaaacatttgccaggcgtgggtggcaggcagctgtaatcccagctactcgggaggccgaggcaggagaatcgcttgaacccgggaggcggaggttgcagtgagtggatattgcgccaccaaactccagcctgggcaacagagcaagactgcatctccaaaaaaaaaa

SEQ ID NO: 628944 - DNA, 125 bp, Homo sapiens
gcttgatgcttctggtcgctctagagtatccccctgcctccccattcagcgacactcatctacacactacacaggtgcacccacctcgatgagaccgcctaagccccagctgcggtgggtccgac

SEQ ID NO: 628945 - DNA, 587 bp, Homo sapiens
agtaacatgattaatttgagctcgtacctctcatggagctggtacgcagtacaaagtaggcgtgcattcttcaccaatcggcggccgcatgtggcaccatgcactcccaccagcaggggcatgtgctgcggatccttgctaggaattgtcaggctcccgaattcttctcctgcggctttccccatccctggtttaaatatttatcccacaaaatggggagggagtcaaacagacttgggataggaggagtgagtgccctggtaaaaccaattacttagctaaacctttggctaaaactctaggaagggaggcacaaaatgggacagtgtgggtttttttttgggcttctctaggtaaaggtttaatttaacttcagcttgggtaaaactattctttccttcttttttctctcccagagttctcaccacctcttcccaggctaaatccttcatgttgcaggagacagagaatcccaggtgagacccggacttttgctcctccctcccttccttttttcaccatgttcaggataaattatctgggttaggttcctggagggaaaagggcagagaggccctgacttgaat

SEQ ID NO: 628946 - DNA, 345 bp, Homo sapiens
  misc_feature (46)..(46): n is a, c, g, or t
  misc_feature (113)..(113): n is a, c, g, or t
  misc_feature (183)..(183): n is a, c, g, or t
  misc_feature (219)..(219): n is a, c, g, or t
  misc_feature (251)..(251): n is a, c, g, or t
  misc_feature (267)..(267): n is a, c, g, or t
  misc_feature (306)..(306): n is a, c, g, or t
  misc_feature (337)..(337): n is a, c, g, or t
atcggagtcttgcaggctaattcccaagggttcacacctccaggantggatagatcctctccagataacagcccagtgcactgggatgttacgtcaaccatccatcacaactnggggtcaacatccccatcatcactgaactagtgaacgatactaatgttcacgtttttgggaccaacgacngatgatgatgaccctgatacagaactgtacctcacngcagccctttgcctgtgggacagcatttgccngtcagtgtcctggacncactccatgagcgcgacgtacttcaattgacaagtatcntcacccttgatacggaccctgggtgaccggnagagccac

SEQ ID NO: 628947 - DNA, 638 bp, Homo sapiens
gggcttccaaaattatgcagccagtcctaagccaggtgtggtggtgggcccctgtaatctcagctacttgggaggctgaggcaggagaatggcttgaacctgggaggcggaggttgcagtgagccactgcactccagcctgatgacagagcaagactcagtctcaaaaataaataaaaataataaaacctccataagtaatcctgaaaacaaaaaaaaaaaaaaaaaaaaaaaaaaaaaaaaaaaaaaaaaaaaaaaaaaaaaaaaaaaaaaaaaaaaaaaaaaaaaaaaaaaaaaaaaaaaaagagagagagagtaagacgagagagagagagagaggaggcggagaggaggaggggcgggcgcaggagcgagggggggggggggggaaggagggggagagcagaaaggagcgggagaagagcggcgagggcgaggaacgaggcgagaagagagggcaggagggagagaagggagacgaggagagggaaagggagaggaggaaggcacagcgggagacgaggaggggggacacgggaagcacaaaaaagagacacgaccgcgcaaggaccaccgcagagaaacaacaagggccgcggaggccgagaagagacgacaggggggcccggggggaggggg

SEQ ID NO: 628948 - DNA, 336 bp, Homo sapiens
  misc_feature (169)..(169): n is a, c, g, or t
  misc_feature (200)..(200): n is a, c, g, or t
  misc_feature (334)..(334): n is a, c, g, or t
tgaggagccggcagcgggggcggctgtaactgtgaggaaggctgcagagtggcgacgtctacgccgtagttggaggctgtggggggtggccgggcgccactcccaggccgcagaagtgacctgcggtggagttccctcctcgctgctggaaaacggagggaaaaggttnctggccgggtgaaaatgcctccctctgcttnacggggctgaagggcccgaaatctaaggcctccctaatcgccccggcctccgttaaaccccaagtctaaaaatattacccgaaaattcccatctccggccccggggcctgggggctccgctgaattgatcggtnct

SEQ ID NO: 628949 - DNA, 139 bp, Homo sapiens
agtgtgtgcgggtttagaggatccctaagaatatgatacgtctctaaatcttcccatttaatagcttagttgggctggtggggttggattggtcagttcctgatgcagagcgcaagaccggggggagcgcaacaccggg

SEQ ID NO: 628950 - DNA, 169 bp, Homo sapiens
agtctaaaaggcttatcgagctgatctgacgagttcttgaagtgtactggaatcgttgatctgcctgtgaactttagttcacgctgaatacagtcttctcagattttcatgactgtaagggtgtgaaaatggaacgcatccttgatcttaggtccatctgacccatctt

SEQ ID NO: 628951 - DNA, 250 bp, Homo sapiens
aaaaaaaaaaaccttttaaaaaccccccctttaaaccaaacccttttttggtttttgcccaaggggttttccaattttgtgggggggttgttttttggagaggaaaaaaattttttcccccctaaaaccccccctttttttcccccctttttttttgggttgggggggggggggggggggggggtttttttttttttttttttagggggggggggcccaaggggaataaaccggggggttgggcccttta

SEQ ID NO: 628952 - DNA, 473 bp, Homo sapiens
cacgaggcctcgtgccgcgtgcgcgcctcgtgcatgaccgaatcctcgaagtcgtagatgaagctgaccgcgctcttcaccttgcgcttggcgtagccggccagcgaccagtagccggcgatgcccagcgtgcggcgcagccaggacagccgcgaattgatgctgaccagcaggttgtaggcgacgtcgccgagcagggcgacccagcggtggtggcgcgtgacctggtcaaagtcgtcgccatgcaccagccagtagcggcggccatcggcagcctggtggatgtactcgcgctgcagttcgatgtcgccgaacacggtgccggtgtattcgcgcagcgcctcgtcgtgattgcccgggatgaagacgacctgggtgcccttgcgcgcgcggcgcaggatcttctgcacgacggtgttctgcgacggcgtccagtgtatggagcggctcatcgcccagaaatcgatgatgtc

SEQ ID NO: 628953 - DNA, 389 bp, Homo sapiens
gggggttcagggctgtggacagcagcacctgcctcccctggcagggcggatatgattagtatgagagagtgaagggattacacagaccttcttaaaagactaccaggccaggcacggtggctcacgcctgtaatcccaacactttgggaggctgagatgggcggatcacctgaagtcaggagttcgagaccagcctgaccaacatggagaaaacctgtctgttctaaaaataataaattagccaggcatggtggcacatgcctgtaatcccagctactcaggaggctgaggcaggagaatcgcttgaacctgggaggcggaggttgtgtgtgagccaaggtagtgccattgcactacagacagggcaacaagagggaatctccgagtca

SEQ ID NO: 628954 - DNA, 313 bp, Homo sapiens
  misc_feature (66)..(66): n is a, c, g, or t
gaggacgccgaactgggcctgcgggtgttcgagaaaggcctgtcggcggcgaaccaccacgaaagntacggcaagggcctgatgcccgacaccttcatcgacttcaagaagcagcgtttccgctgggcctatggcgcgatccagatcatcaagcgccacaccgccagcctgctgcgcggcaagaacaccgagctgacccgtggccagcgctaccacttcctcgcgggctggctgccgtgggtagcggacggcatgaacatcttcttcaccgtcggcgccctgctgtggtcggcggcgatgatcatcgtgccgc

SEQ ID NO: 628955 - DNA, 318 bp, Homo sapiens
gctcatacctgtaatcccaggcacttcggggaggccgagggcaggtggatcacggggtcaagagattgagacgattctggcacaacacggtgaaacctcgatctctactaaacaatacaaatattagttgggcgtggtggcatgcacctgtagtcccagatattcaggagcctgaggcagaagaatcgctgtgagcctgggaggcggagcttgcagagaggccaagattgcaccagttgcactccagccgtgggctacagaggtgagactccatctgcaaaaagaaaaaagacaaagaaaacaagaagaaaagagaag

SEQ ID NO: 628956 - DNA, 281 bp, Homo sapiens
  misc_feature (4)..(4): n is a, c, g, or t
  misc_feature (11)..(11): n is a, c, g, or t
  misc_feature (17)..(19): n is a, c, g, or t
  misc_feature (47)..(47): n is a, c, g, or t
  misc_feature (53)..(53): n is a, c, g, or t
  misc_feature (70)..(70): n is a, c, g, or t
  misc_feature (242)..(242): n is a, c, g, or t
  misc_feature (248)..(248): n is a, c, g, or t
  misc_feature (252)..(252): n is a, c, g, or t
  misc_feature (257)..(257): n is a, c, g, or t
  misc_feature (262)..(262): n is a, c, g, or t
aganattgatnatgccnnngaactacaagaacagagggattctttgnactcangaaactacaggaagtanaaattcggaacaatagacctggagggacaactgtctgacttagagcaacgtctggagaaaagtcagaatgaacaagaagcttttcgcaataacctgaagacactcttagaaattctggatggcaagatatttgaactaacagaattacgagataacttggccatgctactanaatgcngctnagganagtgnaatctctgtgcccatttcc

SEQ ID NO: 628957 - DNA, 344 bp, Homo sapiens
cttgaactacacggggtgttcacagaggacgacgaggcaccgtccatcagtccaactgtaattctttcctttcttgtgattattaaattttaaagaaaagaggtttctactacaagctatatactgcagcttaaaacctcagtgttactttttcacttgatacacaattcaaattaatttacgacaaatacttttcacataaatgtatgtaggcacatataaactctacagctttactgtaggggcgaggtcttcattgggatcatgattctggattccatttcctgaataagtggaactgtgtaatataccatttcctcccagccatgtttgtgccatgctgc

SEQ ID NO: 628958 - DNA, 839 bp, Homo sapiens
ggtagctgaaagagaacgtgttttggatagtctgcaacagataactcgatcgtaatgtaatgatgtcgagatgaaccaagcgtaaatgactcttaacggtgtcgtattgtggcagtattgcacatatagaagtctcaggactaggagacagataagcttgatttccattttacagaatattagaaagttttctctgtcgagtatacgaagaatcagggaaggagagataaaaacctaatgaaacttaattttgcgtataatgtcgtggtgttggaagaaaataatgtgtgtagaagttgtgcgttattagcttaaataccttatagtacttttaaaagatcatccttggtaattattgacttatcctagatccatgtacaattcagacttttatcttgtgagctttaataaagaatttaaaaccatctcatttcagaataaaataaacggaattacaagttcatgcattagcatttttaagtgaaagttctcttaataagattgccttttgtctaaccgaaatagggcatacagattagttggatgggaaagtggtaaagacttgagttgtttaatactgtgcctatttccaaaaagaagacttgaatgttggctttttacatgatgctataaagatgttaagtggaggatacaatagtcttaaaaaaaattgttgggagtaagtaatacgtccggaacacaggtgagataatgaatgcggagttaatggtaaaggcaaaattaattttggaacctttttgttggttgacaaacaatgaggaacggttcctcaatatattatgggccaggagaaaacggacttaaagatatgtgtaaca

SEQ ID NO: 628959 - DNA, 301 bp, Homo sapiens
  misc_feature (4)..(4): n is a, c, g, or t
  misc_feature (11)..(11): n is a, c, g, or t
  misc_feature (17)..(19): n is a, c, g, or t
  misc_feature (47)..(47): n is a, c, g, or t
  misc_feature (53)..(53): n is a, c, g, or t
  misc_feature (70)..(70): n is a, c, g, or t
aganattgatnatgccnnngaactacaagaacagagggattctttgnactcangaaactacaggaagtanaaattcggaacaatagacctggagggacaactgtctgacttagagcaacgtctggagaaaagtcagaatgaacaagaagcttttcgcaataacctgaagacactcttagaaattctggatggcaagatatttgaactaacagaattacgagataacttggcctagctacttagatgtctaacgtaagggatactgtaaattctggccccaaatcaagggccgagctcgatt

SEQ ID NO: 628960 - DNA, 197 bp, Homo sapiens
taaactttactcttttgagaatttgcgaaggcagggaacagagccttgcccaggtaagtatggttcttcttgtcaagtgacccaacccaacccaatttctagccacacgaatagttaggaaatgccaaagtgggaatttgtttaaccctcattcaaaggagattgggacctgcaacacaagcaccttttgggtccag

SEQ ID NO: 628961 - DNA, 164 bp, Homo sapiens
ctattcgtctactgagtagttattcgattggacagctgccagcagagctgtgtcctcagcgtgctgtccagttactacctacaaggttctgaactagggaacaccccatatgaaaaatctgggtttcaggctgggtgtggtgttgcatgcctgtaatcccagca

SEQ ID NO: 628962 - DNA, 328 bp, Homo sapiens
  misc_feature (4)..(4): n is a, c, g, or t
  misc_feature (11)..(11): n is a, c, g, or t
  misc_feature (17)..(19): n is a, c, g, or t
  misc_feature (47)..(47): n is a, c, g, or t
  misc_feature (53)..(53): n is a, c, g, or t
  misc_feature (70)..(70): n is a, c, g, or t
  misc_feature (260)..(260): n is a, c, g, or t
aganattgatnatgccnnngaactacaagaacagagggattctttgnactcangaaactacaggaagtanaaattcggaacaatagacctggagggacaactgtctgacttagagcaacgtctggagaaaagtcagaatgaacaagaagcttttcgcaataacctgaagacactcttagaaattctggatggcaagatatttgaactaacagaattacgagataacttggcccccccccccccccacacacaaaaacccnacatttcagtgccaattaattaaaagatacactgtctctcttcataggactgtttaggctctgcgtca

SEQ ID NO: 628963 - DNA, 137 bp, Homo sapiens
catgcaagcttgtgtggattgagagatgaaagcctgccgtatagtgtatcttgtgcactatggtgaggagctggggaggaggagatggagcctgccgtatatgtatttagtgcactagagagaggagctggtgatca

SEQ ID NO: 628964 - DNA, 102 bp, Homo sapiens
gctgtctactcatgcatttcaaggaaatcacttctcttctaattacaagcatccagaaagagcagtcatgtggagaattgtccagaagcacttggtctcagc

SEQ ID NO: 628965 - DNA, 296 bp, Homo sapiens
cgctatacgagagggcaaacagagtatacttgcatctcacacatatttacacaggtcttttttctagatcacagttgagtttgagttatggttccttttatactggtcacgtgtgttactcactttagaaaactgttagtcctagccagatcctaagaggcacgcaattagagtacatggaacaaagtaacagatggctactttggggcctccattatcagcctttcaaaaagacaaaaaagatctatttcaagaaacaccacggccgggccaccgtggctcacgcctgtaatccc

SEQ ID NO: 628966 - DNA, 410 bp, Homo sapiens
ccccttaatctgtctcattgcggagagggaacagtgggcctcaacgataacatctggggacaagaaacagaagactacctgtgtctcaagtcttccttgattagcttttgggtgcaaacacacacatactcttggctcacaactttcaaaatatgggttgcatagcaacgttatttccttctgaaaaataagttttccctccttttttgcatattttaaacatatacatacacacacacagtcactgtattttacatatcctttttttcttttgcaaatggatattttttgagttcagtgagcttccctctccaagacattacaatgtaaacatggtgtaactctcggacaccacagtatgtttccggaggggtaacggcggtgaggaaatcagactttgcctaacaaag

SEQ ID NO: 628967 - DNA, 95 bp, Homo sapiens
gagaggtgggacacggggagaggtggggggattgcttgagtgtcatgagttggagacgagcctgggcaacaacatggcgagaccctgtctatatt

SEQ ID NO: 628968 - DNA, 126 bp, Homo sapiens
ccttcctggtccctcttgaggacagtggggatgggattggcacggccctcaccccgggtgcccatctccagcccgggcttcaaactgctgctgaggcggggctgggagccaggaatggggctggga

SEQ ID NO: 628969 - DNA, 160 bp, Homo sapiens
tggggatcatttagggattcaggatcacgatttctaaacatcagggatcaaatggttgcagatgccgttgctataagtaatgtagccggatgcagctcgtaaggtaaagcagggtactttccctggaatttccttgttaaataaatatctgtttctttga

SEQ ID NO: 628970 - DNA, 284 bp, Homo sapiens
gcataccagtgttattcaaaatgaagactagcacaagtgagctaatgaaaacatgatacttggctattccactgcacttgaatataatattttgataattagatcaaggaaaatgacctcatcttacataggtaccgacgccaaaatccttctaggttatttgagcacattcctaggctgtcacggtgtacagaacgggacaaagaacatatgtacctatagttgtaaagttctaacctacgttggaaccctgtattataaactacgcgtccagtaaccatgct

SEQ ID NO: 628971 - DNA, 1749 bp, Homo sapiens
tcataagccctgccattactgcttgtgaggtgttagcagatttttgtggggagcttcagattccctgcttgtccagtgggggtgatacctgctagaatcacagctgtgagcttctgtagagagtggatggaaagagtccttggtaaactctaaggtgcctggtaactgctacctgtagaaagaaattccttcctctaaacgttgcatcctgagggtcacgtctgtgtctcccaacaagtggttttaatgtgtcttctagttttctctctctacagcgctgagctcatggatcccaaagaacttgtcccagagctgcaccatcagtaataactagtggcacatttttgtcttctaggggccaactcaccctatgcagcacagcccaccagctacgactatgatgccccactgagtgaggctggggacctcactgagaagtattttgctctgcgaaacatcatccagaagtttgaaaaagtaccagaaggtcctatccctccatctacaccaaagtttgcatatggaaaggtcactttggaaaagttaaagacagtgggagcagctctggacattctgtgtccctctgggcccatcaaaagcctttatcccttgacatttatccaggtgaaacagcattatgggtttgtgctgtaccggacaacacttcctcaagattgcagcaacccagcacctctctcttcacccctcaatggagtccacgatcgagcatatgttgctgtggatgggatcccccagggagtccttgagcgaaacaatgtgatcactctgaacataacagggaaagctggagccactctggaccttctggtagagaacatgggacgtgtgaactatggtgcatatatcaacgattttaagggtttggtttctaacctgactctcagttccaatatcctcacggactggacgatctttccactggacactgaggatgcagtgcgcagccacctggggggctggggacaccgtgacagtggccaccatgatgaagcctgggcccacaactcatccaactacacgctcccggccttttatatggggaacttctccattcccagtgggatcccagacttgccccaggacacctttatccagtttcctggatggaccaagggccaggtctggattaatggctttaaccttggccgctattggccagcccggggccctcagttgaccttgtttgtgccccagcacatcctgatgacctcggccccaaacaccatcaccgtgctggaactggagtgggcaccctgcagcagtgatgatccagaactatgtgctgtgacgttcgtggacaggccagttattggctcatctgtgacctacgatcatccctccaaacctgttgaaaaaagactcatgcccccacccccgcaaaaaaacaaagattcatggctggaccatgtatgatgatgaaagcctgtgtctttgagggattctaccctgaacatacctcacagatcctccctgtcatgccacatttcactgattggaatgtggaaatggaaaaggaatttaggatgtgcattttcacctgaggtttccctgcatccctgcagtgccaaagccccaccttcagggaccacctggaatgtgtgaggggctgacagcacagtaacgtgcatacatatctgcagggctggaatggaagctttaaaggtggtagtgatttttattttggaagaatcatgttacctttttgttaaataaaatttgtactcaaaa

SEQ ID NO: 628972 - DNA, 1744 bp, Homo sapiens
acagcggggcggggcgcggggctgaacaagcgcgagggctggctgctgggccgacgaggggcggtgccaggccgtgggtccttagtcaagtgacgcgaagcggccggcctgggcgccgactgcagagccgggaggctggtggtcatgccggggttcctggttcgcatcctccttctgctgctgctgaagatgaagatggctgggctgaacgccatccagacattacctggcagctgtggacaagtggttgggagtccttctgcccaagatgaagcctctcctctatcagaatggagggccagttataacagtgcaggcagcaacatcacagatgctttcctaagccagaggaagtgtgagcccaaaggacccttgatcaattctgaattctatactggctggctagatcactggggccaacctcactgagaagtattttgctctgcgaaacatcatccagaagtttgaaaaagtaccagaaggtcctatccctccatctacaccaaagtttgcatatggaaaggtcactttggaaaagttaaagacagtgggagcagctctggacattctgtgtccctctgggcccatcaaaagcctttatcccttgacatttatccaggtgaaacagcattatgggtttgtgctgtaccggacaacacttcctcaagattgcagcaacccagcacctctctcttcacccctcaatggagtccacgatcgagcatatgttgctgtggatgggatcccccagggagtccttgagcgaaacaatgtgatcactctgaacataacagggaaagctggagccactctggaccttctggtagagaacatgggacgtgtgaactatggtgcatatatcaacgattttaagggtttggtttctaacctgactctcagttccaatatcctcacggactggacgatctttccactggacactgaggatgcagtgcgcagccacctggggggctggggacaccgtgacagtggccaccatgatgaagcctgggcccacaactcatccaactacacgctcccggccttttatatggggaacttctccattcccagtgggatcccagacttgccccaggacacctttatccagtttcctggatggaccaagggccaggtctggattaatggctttaaccttggccgctattggccagcccggggccctcagttgaccttgtttgtgccccagcacatcctgatgacctcggccccaaacaccatcaccgtgctggaactggagtgggcaccctgcagcagtgatgatccagaactatgtgctgtgacgttcgtggacaggccagttattggctcatctgtgacctacgatcatccctccaaacctgttgaaaaaagactcatgcccccacccccgcaaaaaaacaaagattcatggctggaccatgtatgatgatgaaagcctgtgtctttgagggattctaccctgaacatacctcacagatcctccctgtcatgccacatttcactgattggaatgtggaaatggaaaaggaatttaggatgtgcattttcacctgaggtttccctgcatccctgcagtgccaaagccccaccttcagggaccacctggaatgtgtgaggggctgacagcacagtaacgtgcatacatatctgcagggctggaatggaagctttaaaggtggtagtgatttttattttggaagaatcatgttacctttttgttaaataaaatttgtactcaaaa

SEQ ID NO: 628973 - DNA, 1601 bp, Homo sapiens
  misc_feature (296)..(296): n is a, c, g, or t
caatatgttggctgtgatggacctgcccgcatgctacatgacatcattgaacttgtgcagcaatttgggagaccatatatttcccaaggcatcatcacaggtccagatgaacacacgaccatcccaggagcagctggcaatggtgctggtgggcaggctgatggagggggcccaggccacatctcaaacccagtcactgtgcttccagcttctgctctccttccactggccatccttgaagaggttgtcacagccacctgatggaaacttcttgatgtaattgggtttctgcctgnacagctggtctatgaggcttccagtttgaaaaagtaccagaaggtcctatccctccatctacaccaaagtttgcatatggaaaggtcactttggaaaagttaaagacagtgggagcagctctggacattctgtgtccctctgggcccatcaaaagcctttatcccttgacatttatccaggtgaaacagcattatgggtttgtgctgtaccggacaacacttcctcaagattgcagcaacccagcacctctctcttcacccctcaatggagtccacgatcgagcatatgttgctgtggatgggatcccccagggagtccttgagcgaaacaatgtgatcactctgaacataacagggaaagctggagccactctggaccttctggtagagaacatgggacgtgtgaactatggtgcatatatcaacgattttaagggtttggtttctaacctgactctcagttccaatatcctcacggactggacgatctttccactggacactgaggatgcagtgcgcagccacctggggggctggggacaccgtgacagtggccaccatgatgaagcctgggcccacaactcatccaactacacgctcccggccttttatatggggaacttctccattcccagtgggatcccagacttgccccaggacacctttatccagtttcctggatggaccaagggccaggtctggattaatggctttaaccttggccgctattggccagcccggggccctcagttgaccttgtttgtgccccagcacatcctgatgacctcggccccaaacaccatcaccgtgctggaactggagtgggcaccctgcagcagtgatgatccagaactatgtgctgtgacgttcgtggacaggccagttattggctcatctgtgacctacgatcatccctccaaacctgttgaaaaaagactcatgcccccacccccgcaaaaaaacaaagattcatggctggaccatgtatgatgatgaaagcctgtgtctttgagggattctaccctgaacatacctcacagatcctccctgtcatgccacatttcactgattggaatgtggaaatggaaaaggaatttaggatgtgcattttcacctgaggtttccctgcatccctgcagtgccaaagccccaccttcagggaccacctggaatgtgtgaggggctgacagcacagtaacgtgcatacatatctgcagggctggaatggaagctttaaaggtggtagtgatttttattttggaagaatcatgttacctttttgttaaataaaatttgtactcaaaa

SEQ ID NO: 628974 - DNA, 293 bp, Homo sapiens
gtaataacggggagcagcgatgggagcagaaaatatgtataccaccaggagaaagaatctgtcaatctgaaaggcaaagtctcaaacaaataggtacccgtaggtctaagacagtaattgaggcactaaaataagaagcatggttataataaattagagaggaaagatagatgagacatacaaataaggacttaaacaaggagtatggatttcagctaaatcctgaccatctgtttctcatatcccaactctttccatttgtgactcccattctgaatgcgtaattggggtta

SEQ ID NO: 628975 - DNA, 1880 bp, Homo sapiens
  misc_feature (296)..(296): n is a, c, g, or t
  misc_feature (448)..(448): n is a, c, g, or t
  misc_feature (451)..(451): n is a, c, g, or t
  misc_feature (465)..(465): n is a, c, g, or t
  misc_feature (468)..(468): n is a, c, g, or t
  misc_feature (470)..(470): n is a, c, g, or t
caatatgttggctgtgatggacctgcccgcatgctacatgacatcattgaacttgtgcagcaatttgggagaccatatatttcccaaggcatcatcacaggtccagatgaacacacgaccatcccaggagcagctggcaatggtgctggtgggcaggctgatggagggggcccaggccacatctcaaacccagtcactgtgcttccagcttctgctctccttccactggccatccttgaagaggttgtcacagccacctgatggaaacttcttgatgtaattgggtttctgcctgnacagctggtctatgaggcttccagggattccatcaacgtaagagttccgctgatgttttggaaatgggtcactgtaggaattaatcaagtggtagtgaggacttgataactgtggagtggattctgggattctcaaagatgtgacttcctgnccntaagttggagctanatncnattccatgaatgaaacagcactgttcatacctcctggtctctgcaccctctgcctttattcacctggaaatgaagacacacctcagttaccttatctgcagagtcttctttgacccacttgtcagccaatttgaaaaagtaccagaaggtcctatccctccatctacaccaaagtttgcatatggaaaggtcactttggaaaagttaaagacagtgggagcagctctggacattctgtgtccctctgggcccatcaaaagcctttatcccttgacatttatccaggtgaaacagcattatgggtttgtgctgtaccggacaacacttcctcaagattgcagcaacccagcacctctctcttcacccctcaatggagtccacgatcgagcatatgttgctgtggatgggatcccccagggagtccttgagcgaaacaatgtgatcactctgaacataacagggaaagctggagccactctggaccttctggtagagaacatgggacgtgtgaactatggtgcatatatcaacgattttaagggtttggtttctaacctgactctcagttccaatatcctcacggactggacgatctttccactggacactgaggatgcagtgcgcagccacctggggggctggggacaccgtgacagtggccaccatgatgaagcctgggcccacaactcatccaactacacgctcccggccttttatatggggaacttctccattcccagtgggatcccagacttgccccaggacacctttatccagtttcctggatggaccaagggccaggtctggattaatggctttaaccttggccgctattggccagcccggggccctcagttgaccttgtttgtgccccagcacatcctgatgacctcggccccaaacaccatcaccgtgctggaactggagtgggcaccctgcagcagtgatgatccagaactatgtgctgtgacgttcgtggacaggccagttattggctcatctgtgacctacgatcatccctccaaacctgttgaaaaaagactcatgcccccacccccgcaaaaaaacaaagattcatggctggaccatgtatgatgatgaaagcctgtgtctttgagggattctaccctgaacatacctcacagatcctccctgtcatgccacatttcactgattggaatgtggaaatggaaaaggaatttaggatgtgcattttcacctgaggtttccctgcatccctgcagtgccaaagccccaccttcagggaccacctggaatgtgtgaggggctgacagcacagtaacgtgcatacatatctgcagggctggaatggaagctttaaaggtggtagtgatttttattttggaagaatcatgttacctttttgttaaataaaatttgtactcaaaa

SEQ ID NO: 628976 - DNA, 499 bp, Homo sapiens
attgacttgtgcgtgtacggtggtaccccactgtctcccacaccacaagagatcagcttcgggcaaacagggggggcgtgccttgatggtgctgtcaggcgaggatgccttaggccaggcacgtcccagcgatgttctgctggctgaggtacaaggtgggaggagaatatgcctcattcgttactcaatcaatttcttgcgcctgcaagaagcgtcgcagggggaagacctgccaggtagctagtccaatgagacagaacatcgaacaagatgctgaagtactaggacccgagtgctcgttgactcgtcggtatcacgcatctcctcttctctcttcttcatgtaggcaaaatcattaacaatagattctgaacggtcttctaggcgtcgcagctctacctctaatggcttgagcttctcaactcttgcaatctcttcgctactttttcgcctccacctccatgctccatgtctaggatacagcagggagaggggatcc

SEQ ID NO: 628977 - DNA, 119 bp, Homo sapiens
ggtcgacgagggggtgatctaaaacactgcttgtcagcgctccgagcttctattgacttgggttaatcgtgtgaccgcggtgggctgagcacgaaagttgagccgaaccactggtggtt

SEQ ID NO: 628978 - DNA, 164 bp, Homo sapiens
cgagattgtgccagcgtgttgctaacacatccaacacagacaatgggtccacgtcctgcagctgcagccggtggagctacgcctgctgtccgcaccgttcggacagtatcaatattgctgcagagagttcagcaatgcctcagtgaacatctttaatgcaccag

SEQ ID NO: 628979 - DNA, 194 bp, Homo sapiens
tccaccgcctctacatcttcttcactgccctcttcactgactctggccttcttcttcttcactataaggctctaggtaggtcaggagatcaagaccatcttggctaacacggtgaaaccccgtctctactaaaaatacaaaaaaattagctgggcgtggtggcaggcgcctgtagtcccagctactcgggaggc

SEQ ID NO: 628980 - DNA, 2712 bp, Homo sapiens
acagcggggcggggcgcggggctgaacaagcgcgagggctggctgctgggccgacgaggggcggtgccaggccgtgggtccttagtcaagtgacgcgaagcggccggcctgggcgccgactgcagagccgggaggctggtggtcatgccggggttcctggttcgcatcctccttctgctgctggttctgctgcttctgggccctacgcgcggcttgcgcaatgccacccagaggatgtttgaaattgactatagccgggactccttcctcaaggatggccagccatttcgctacatctcaggaagcattcactactcccgtgtgccccgcttctactggaaggaccggctgctgaagatgaagatggctgggctgaacgccatccagacgtatgtgccctggaactttcatgagccctggccaggacagtaccagttttctgaggaccatgatgtggaatattttcttcggctggctcatgagctgggactgctggttatcctgaggcccgggccctacatctgtgcagagtgggaaatgggaggattacctgcttggctgctagagaaagagtctattcttctccgctcctccgacccagattacctggcagctgtggacaagtggttgggagtccttctgcccaagatgaagcctctcctctatcagaatggagggccagttataacagtgcaggttgaaaatgaatatggcagctactttgcctgtgattttgactacctgcgcttcctgcagaagcgctttcgccaccatctgggggatgatgtggttctgtttaccactgatggagcacataaaacattcctgaaatgtggggccctgcagggcctctacaccacggtggactttggaacaggcagcaacatcacagatgctttcctaagccagaggaagtgtgagcccaaaggacccttgatcaattctgaattctatactggctggctagatcactggggccaacctcactccacaatcaagaccgaagcagtggcttcctccctctatgatatacttgcccgtggggcgagtgtgaacttgtacatgtttataggtgggaccaattttgcctattggaatggggccaactcaccctatgcagcacagcccaccagctacgactatgatgccccactgagtgaggctggggacctcactgagaagtattttgctctgcgaaacatcatccagaagtttgaaaaagtaccagaaggtcctatccctccatctacaccaaagtttgcatatggaaaggtcactttggaaaagttaaagacagtgggagcagctctggacattctgtgtccctctgggcccatcaaaagcctttatcccttgacatttatccaggtgaaacagcattatgggtttgtgctgtaccggacaacacttcctcaagattgcagcaacccagcacctctctcttcacccctcaatggagtccacgatcgagcatatgttgctgtggatgggatcccccagggagtccttgagcgaaacaatgtgatcactctgaacataacagggaaagctggagccactctggaccttctggtagagaacatgggacgtgtgaactatggtgcatatatcaacgattttaagggtttggtttctaacctgactctcagttccaatatcctcacggactggacgatctttccactggacactgaggatgcagtgcgcagccacctggggggctggggacaccgtgacagtggccaccatgatgaagcctgggcccacaactcatccaactacacgctcccggccttttatatggggaacttctccattcccagtgggatcccagacttgccccaggacacctttatccagtttcctggatggaccaagggccaggtctggattaatggctttaaccttggccgctattggccagcccggggccctcagttgaccttgtttgtgccccagcacatcctgatgacctcggccccaaacaccatcaccgtgctggaactggagtgggcaccctgcagcagtgatgatccagaactatgtgctgtgacgttcgtggacaggccagttattggctcatctgtgacctacgatcatccctccaaacctgttgaaaaaagactcatgcccccacccccgcaaaaaaacaaagattcatggctggaccatgtatgatgatgaaagcctgtgtctttgagggattctaccctgaacatacctcacagatcctccctgtcatgccacatttcactgattggaatgtggaaatggaaaaggaatttaggatgtgcattttcacctgaggtttccctgcatccctgcagtgccaaagccccaccttcagggaccacctggaatgtgtgaggggctgacagcacagtaacgtgcatacatatctgcagggctggaatggaagctttaaaggtggtagtgatttttattttggaagaatcatgttacctttttgttaaataaaatttgtactcaaaatgatgatgtcactgtttttaatgtgcaggtattgaattatatggtctgacttaaatcataactagacttgagtgggctgaataaaccacttcactaacttgaagttcaaaggatgaaataaagaataaaaattgggccttgttggctctcacggtggaactttgcggccgttcctttagtgagggtaattatgatcctcgtacggctcgtgggctgggg

SEQ ID NO: 628981 - DNA, 1019 bp, Homo sapiens
  misc_feature (937)..(937): n is a, c, g, or t
  misc_feature (941)..(941): n is a, c, g, or t
  misc_feature (943)..(943): n is a, c, g, or t
  misc_feature (953)..(953): n is a, c, g, or t
aaaaaagctggtgtcagaagacatgtacattatgatactccagaagttcaaaaacaagtgaaacttgtttagacatgcggttggctgtctgtatatgtgggttccacatctatggactcaaccaactacaggttgaaaatattgagggggaaaattgtgtctggactaaacctgtacagacatttttccttgtcatttttccctaaacaatacaaagtattagatggtgtttatactgtattcggtattataagtaatctagagatgacttaaaagtatatgagaaggtatgcacaggttatatccaaatacttcatattagggacttgagcatcagaggatttttatatccaaggaaggttctggaaccaatcctccacggatactaaacggtgactgtgtgtgtatatatatatgtatagtctgttctcattatctatagtagttatgttttataaagtcaccatgaacactgaattagagagtactgaaccattattcccaagggaaatacagggttgggttcctatgaacctctgggcacagtttcatcaacccatcagtacataaacttgttacatgtgtttctgtttgaagacaccttagtatatatggttgacccattaacactgaacttagcccacgacacttattcctgaatgaagcttacctcagtttctccaggcggcacatcacagtcttcttgcacttaggaacacttggcactgtgcgtgggggtcactttaagcagcaaaatccacaaaaatgcaaaagacatggcactaaatagactgaaaaggatacttgtttataagaactgaaacaagaaggccttgttccacctcagctgggaacatggagagcaggcaattcaaattttttcacatgctgcatgtccgcaaatggctgaaaagccagcagtactgatactggagtngaantnaatttagcangaggtaattccccttcgggtctgcaaaatggattgccttcttgtgctgttttttttttgtcccccc

SEQ ID NO: 628982 - DNA, 541 bp, Homo sapiens
ttgatatcctatctcagatgacactccctagctatctctcccgaacgtccgcatcgcacctccgctccatactcgttgcacaaagaagatctctagcttgttcagcagctcctcctcactcagtctgaggctgacaggaaatccagtgacctacaccctccggtcactcaactggctggacacctggattgtggtgatccatgggactagctccaatggctggagctgcatccggagccggcactcctccatgttgatcgtgtgctccttatgttgcagcacctgttcagccactttggggtcatcaaaggtgatcagagcagagcccgcgtagcagagggcagtggatccgcaaattggaaactatagacttatgcagctatccgggtcctgctgggtgtgtcctccgaataccagggggatcttgggcactgaaaatggtacctggcagtaggggaggggagtcggagtgttcctcactcccatctatgaggaaggcatctccgattccattccattgatgctgagtgccggagataaa

SEQ ID NO: 628983 - DNA, 2648 bp, Homo sapiens
acagcggggcggggcgcggggctgaacaagcgcgagggctggctgctgggccgacgaggggcggtgccaggccgtgggtccttagtcaagtgacgcgaagcggccggcctgggcgccgactgcagagccgggaggctggtggtcatgccggggttcctggttcgcatcctccttctgctgctggttctgctgcttctgggccctacgcgcggcttgcgcaatgccacccagaggatgtttgaaattgactatagccgggactccttcctcaaggatggccagccatttcgctacatctcaggaagcattcactactcccgtgtgccccgcttctactggaaggaccggctgctgaagatgaagatggctgggctgaacgccatccagacgtatgtgccctggaactttcatgagccctggccaggacagtaccagttttctgaggaccatgatgtggaatattttcttcggctggctcatgagctgggactgctggttatcctgaggcccgggccctacatctgtgcagagtgggaaatgggaggattacctgcttggctgctagagaaagagtctattcttctccgctcctccgacccagattacctggcagctgtggacaagtggttgggagtccttctgcccaagatgaagcctctcctctatcagaatggagggccagttataacagtgcaggttgaaaatgaatatggcagctactttgcctgtgattttgactacctgcgcttcctgcagaagcgctttcgccaccatctgggggatgatgtggttctgtttaccactgatggagcacataaaacattcctgaaatgtggggccctgcagggcctctacaccacggtggactttggaacaggcagcaacatcacagatgctttcctaagccagaggaagtgtgagcccaaaggacccttgatcaattctgaattctatactggctggctagatcactggggccaacctcactccacaatcaagaccgaagcagtggcttcctccctctatgatatacttgcccgtggggcgagtgtgaacttgtacatgtttataggtgggaccaattttgcctattggaatggggccaactcaccctatgcagcacagcccaccagctacgactatgatgccccactgagtgaggctggggacctcactgagaagtattttgctctgcgaaacatcatccagaagtttgaaaaagtaccagaaggtcctatccctccatctacaccaaagtttgcatatggaaaggtcactttggaaaagttaaagacagtgggagcagctctggacattctgtgtccctctgggcccatcaaaagcctttatcccttgacatttatccaggtgaaacagcattatgggtttgtgctgtaccggacaacacttcctcaagattgcagcaacccagcacctctctcttcacccctcaatggagtccacgatcgagcatatgttgctgtggatgggatcccccagggagtccttgagcgaaacaatgtgatcactctgaacataacagggaaagctggagccactctggaccttctggtagagaacatgggacgtgtgaactatggtgcatatatcaacgattttaagggtttggtttctaacctgactctcagttccaatatcctcacggactggacgatctttccactggacactgaggatgcagtgcgcagccacctggggggctggggacaccgtgacagtggccaccatgatgaagcctgggcccacaactcatccaactacacgctcccggccttttatatggggaacttctccattcccagtgggatcccagacttgccccaggacacctttatccagtttcctggatggaccaagggccaggtctggattaatggctttaaccttggccgctattggccagcccggggccctcagttgaccttgtttgtgccccagcacatcctgatgacctcggccccaaacaccatcaccgtgctggaactggagtgggcaccctgcagcagtgatgatccagaactatgtgctgtgacgttcgtggacaggccagttattggctcatctgtgacctacgatcatccctccaaacctgttgaaaaaagactcatgcccccacccccgcaaaaaaacaaagattcatggctggaccatgtatgatgatgaaagcctgtgtctttgagggattctaccctgaacatacctcacagatcctccctgtcatgccacatttcactgattggaatgtggaaatggaaaaggaatttaggatgtgcattttcacctgaggtttccctgcatccctgcagtgccaaagccccaccttcagggaccacctggaatgtgtgaggggctgacagcacagtaacgtgcatacatatctgcagggctggaatggaagctttaaaggtggtagtgatttttattttggaagaatcatgttacctttttgttaaataaaatttgtactcaaaaaaaaaagagaaaaaataaaaagaaaaaaaagggggggggggctaaaagaattccccgcggggggggccaattttgggggtaaccgcgtttttttttgaaaagggtggccaaaaggggggacggattaaaaagcagggggggggcggtttttaaca

SEQ ID NO: 628984 - DNA, 476 bp, Homo sapiens
aaaaaagctggtgtcagaagacatgtacattatgatactccagaagttcaaaaacaagtgaaacttgtttagacatgcggttggctgtctgtatatgtgggttccacatctatggactcaaccaactacaggttgaaaatattgagggggaaaattgtgtctggactaaacctgtacagacatttttccttgtcatttttccctaaacaatacaaagtattagatggtgtttatactgtattcggtattataagtaatctagagatgacttaaaagtatatgagaaggtatgcacaggttatatccaaatacttcatattagggacttgagcatcagaggatttttatatccaaggaaggttctggaaccaatcctccacggatactaaacggtgactgtgtgtgtatatatatatgtatagtctgttctcattatctatagtagttatgttttataaagtcaccatgaacactga

SEQ ID NO: 628985 - DNA, 165 bp, Homo sapiens
atcatctcaatgcgtctcagactacacttgaagcagctccgaagtagagcgtcagcgctgggtgacagccttagaactgccaaggccaaggctgtgaagatgctggccgaatcagacactaacagcacatctggagacccggtggagaagaaggacgaaacacct

SEQ ID NO: 628986 - DNA, 2869 bp, Homo sapiens
acagcggggcggggcgcggggctgaacaagcgcgagggctggctgctgggccgacgaggggcggtgccaggccgtgggtccttagtcaagtgacgcgaagcggccggcctgggcgccgactgcagagccgggaggctggtggtcatgccggggttcctggttcgcatcctccttctgctgctggttctgctgcttctgggccctacgcgcggcttgcgcaatgccacccagaggatgtttgaaattgactatagccgggactccttcctcaaggatggccagccatttcgctacatctcaggaagcattcactactcccgtgtgccccgcttctactggaaggaccggctgctgaagatgaagatggctgggctgaacgccatccagacgtatgtgccctggaactttcatgagccctggccaggacagtaccagttttctgaggaccatgatgtggaatattttcttcggctggctcatgagctgggactgctggttatcctgaggcccgggccctacatctgtgcagagtgggaaatgggaggattacctgcttggctgctagagaaagagtctattcttctccgctcctccgacccagattacctggcagctgtggacaagtggttgggagtccttctgcccaagatgaagcctctcctctatcagaatggagggccagttataacagtgcaggttgaaaatgaatatggcagctactttgcctgtgattttgactacctgcgcttcctgcagaagcgctttcgccaccatctgggggatgatgtggttctgtttaccactgatggagcacataaaacattcctgaaatgtggggccctgcagggcctctacaccacggtggactttggaacaggcagcaacatcacagatgctttcctaagccagaggaagtgtgagcccaaaggacccttgatcaattctgaattctatactggctggctagatcactggggccaacctcactccacaatcaagaccgaagcagtggcttcctccctctatgatatacttgcccgtggggcgagtgtgaacttgtacatgtttataggtgggaccaattttgcctattggaatggggccaactcaccctatgcagcacagcccaccagctacgactatgatgccccactgagtgaggctggggacctcactgagaagtattttgctctgcgaaacatcatccagaagtttgaaaaagtaccagaaggtcctatccctccatctacaccaaagtttgcatatggaaaggtcactttggaaaagttaaagacagtgggagcagctctggacattctgtgtccctctgggcccatcaaaagcctttatcccttgacatttatccaggtgaaacagcattatgggtttgtgctgtaccggacaacacttcctcaagattgcagcaacccagcacctctctcttcacccctcaatggagtccacgatcgagcatatgttgctgtggatgggatcccccagggagtccttgagcgaaacaatgtgatcactctgaacataacagggaaagctggagccactctggaccttctggtagagaacatgggacgtgtgaactatggtgcatatatcaacgattttaagggtttggtttctaacctgactctcagttccaatatcctcacggactggacgatctttccactggacactgaggatgcagtgcgcagccacctggggggctggggacaccgtgacagtggccaccatgatgaagcctgggcccacaactcatccaactacacgctcccggccttttatatggggaacttctccattcccagtgggatcccagacttgccccaggacacctttatccagtttcctggatggaccaagggccaggtctggattaatggctttaaccttggccgctattggccagcccggggccctcagttgaccttgtttgtgccccagcacatcctgatgacctcggccccaaacaccatcaccgtgctggaactggagtgggcaccctgcagcagtgatgatccagaactatgtgctgtgacgttcgtggacaggccagttattggctcatctgtgacctacgatcatccctccaaacctgttgaaaaaagactcatgcccccacccccgcaaaaaaacaaagattcatggctggaccatgtatgatgatgaaagcctgtgtctttgagggattctaccctgaacatacctcacagatcctccctgtcatgccacatttcactgattggaatgtggaaatggaaaaggaatttaggatgtgcattttcacctgaggtttccctgcatccctgcagtgccaaagccccaccttcagggaccacctggaatgtgtgaggggctgacagcacagtaacgtgcatacatatctgcagggctggaatggaagctttaaaggtggtagtgatttttattttggaagaatcatgttacctttttgttaaataaaatttgtactcaaaaaaaaaaacaagaaaaaacaaaaaacaaaaaaacaaaagaacaccacgacccgagcgacaacaccagaaggaggccccataccacaacaagcacaccgagccgagccagagaagccagcgcgcacggcggaacccaacagaaaaacgaaaaaaagcaagccaacccaaaaaacaccgcacaacagcacgcaccacaagaccacgccggcacgcgcggcacaaaacacaaccgcgcggaacacccacgcacccactccaggaagcgagtcaacacacccagtagagtcaaacctcacacgggaccacccaaacagcgcacaggcacaccgccacacgctgcagaccccccccgggtgagcgcgagccgcgccaaaacc

SEQ ID NO: 628987 - DNA, 2633 bp, Homo sapiens
  misc_feature (2633)..(2633): n is a, c, g, or t
acagcggggcggggcgcggggctgaacaagcgcgagggctggctgctgggccgacgaggggcggtgccaggccgtgggtccttagtcaagtgacgcgaagcggccggcctgggcgccgactgcagagccgggaggctggtggtcatgccggggttcctggttcgcatcctccttctgctgctggttctgctgcttctgggccctacgcgcggcttgcgcaatgccacccagaggatgtttgaaattgactatagccgggactccttcctcaaggatggccagccatttcgctacatctcaggaagcattcactactcccgtgtgccccgcttctactggaaggaccggctgctgaagatgaagatggctgggctgaacgccatccagacgtatgtgccctggaactttcatgagccctggccaggacagtaccagttttctgaggaccatgatgtggaatattttcttcggctggctcatgagctgggactgctggttatcctgaggcccgggccctacatctgtgcagagtgggaaatgggaggattacctgcttggctgctagagaaagagtctattcttctccgctcctccgacccagattacctggcagctgtggacaagtggttgggagtccttctgcccaagatgaagcctctcctctatcagaatggagggccagttataacagtgcaggttgaaaatgaatatggcagctactttgcctgtgattttgactacctgcgcttcctgcagaagcgctttcgccaccatctgggggatgatgtggttctgtttaccactgatggagcacataaaacattcctgaaatgtggggccctgcagggcctctacaccacggtggactttggaacaggcagcaacatcacagatgctttcctaagccagaggaagtgtgagcccaaaggacccttgatcaattctgaattctatactggctggctagatcactggggccaacctcactccacaatcaagaccgaagcagtggcttcctccctctatgatatacttgcccgtggggcgagtgtgaacttgtacatgtttataggtgggaccaattttgcctattggaatggggccaactcaccctatgcagcacagcccaccagctacgactatgatgccccactgagtgaggctggggacctcactgagaagtattttgctctgcgaaacatcatccagaagtttgaaaaagtaccagaaggtcctatccctccatctacaccaaagtttgcatatggaaaggtcactttggaaaagttaaagacagtgggagcagctctggacattctgtgtccctctgggcccatcaaaagcctttatcccttgacatttatccaggtgaaacagcattatgggtttgtgctgtaccggacaacacttcctcaagattgcagcaacccagcacctctctcttcacccctcaatggagtccacgatcgagcatatgttgctgtggatgggatcccccagggagtccttgagcgaaacaatgtgatcactctgaacataacagggaaagctggagccactctggaccttctggtagagaacatgggacgtgtgaactatggtgcatatatcaacgattttaagggtttggtttctaacctgactctcagttccaatatcctcacggactggacgatctttccactggacactgaggatgcagtgcgcagccacctggggggctggggacaccgtgacagtggccaccatgatgaagcctgggcccacaactcatccaactacacgctcccggccttttatatggggaacttctccattcccagtgggatcccagacttgccccaggacacctttatccagtttcctggatggaccaagggccaggtctggattaatggctttaaccttggccgctattggccagcccggggccctcagttgaccttgtttgtgccccagcacatcctgatgacctcggccccaaacaccatcaccgtgctggaactggagtgggcaccctgcagcagtgatgatccagaactatgtgctgtgacgttcgtggacaggccagttattggctcatctgtgacctacgatcatccctccaaacctgttgaaaaaagactcatgcccccacccccgcaaaaaaacaaagattcatggctggaccatgtatgatgatgaaagcctgtgtctttgagggattctaccctgaacatacctcacagatcctccctgtcatgccacatttcactgattggaatgtggaaatggaaaaggaatttaggatgtgcattttcacctgaggtttccctgcatccctgcagtgccaaagccccaccttcagggaccacctggaatgtgtgaggggctgacagcacagtaacgtgcatacatatctgcagggctggaatggaagctttaaaggtggtagtgatttttattttggaagaatcatgttacctttttgttaaataaaatttgtactcaaaagaacgaacgatgtaatggactcggtggcctcaccgggggagctctagggccggtttccttttagtgggggttattgcttgatccttttttactggcttcctttcactccgcgattcagtatgaggcgaacggattcagcn

SEQ ID NO: 628988 - DNA, 155 bp, Homo sapiens
  misc_feature (23)..(23): n is a, c, g, or t
  misc_feature (54)..(54): n is a, c, g, or t
tttgctattacattttattttanttttacttctcaaatgttaaggaaacctatnttaaatataaagatataaatataggggaattacataatgataaaagggtcaattcaccaagaagataaacactgaaatataatatgcaactaacaaagatc

SEQ ID NO: 628989 - DNA, 154 bp, Homo sapiens
gccaggatgaagcggtcgttttaagttacgtgaatggtgatcgttgccctccagaaaccgatgaacggctgtccccgtgtgtcttccctgttgtgtggtctgtggttgtgttgttgtgttttgtgttgtcttttgtgtgttggttttttgcttt

SEQ ID NO: 628990 - DNA, 405 bp, Homo sapiens
tgggctggataaagaaaaagtggtacgtatacactatagaatactatacagccataaaaagaacaaaatcatgtcctctgtagcaacatgaatggagctgaaggtcaatatcctaagcgaaataatgcaggagcagaaaaccaaatattgcatgttctcacttatgagaaggtgctaaacatagagtacacatagacatgaagaagggaacaatatacacaagggcctatctgaggatggagagtaagaggagggtgaggattgaaaactacctattgtgtactatgctcattacctgggcaatgaaataatctgtacaccacatccccacaaaacacagtttacccatgtagcaaactggcatgtctaccactaaatctaaaataaaagttgataaaaaataaa

SEQ ID NO: 628991 - DNA, 382 bp, Homo sapiens
tatgtcactgactccgtgggggagacgagagagattgtgaagccactctactgggggctcacttttttcctctttacaaaaaagatggaaataaagcggttttgcacatgttgcaataatgctgtgcatggggagtgtttgggggggaaggagagagaaggaaggagtgggtattcccgtctaacaagaaagcagggtatcaactcctattgttctgcactggatgcattcagctgaggatgtgctgatagtgcaggttgggcctcaacaggatgacagcagagtcctcgagcacctgggcctggttgctccaaacgttgccaagacacattatcaggccctatttctagagggattactttgaattgaaccggatagcttg

SEQ ID NO: 628992 - DNA, 1387 bp, Homo sapiens
acagcggggcggggcgcggggctgaacaagcgcgagggctggctgctgggccgacgaggggcggtgccaggccgtgggtccttagtcaagtgacgcgaagcggccggcctgggcgccgactgcagagccgggaggctggtggtcatgccggggttcctggttcgcatcctccttctgctgctggttctgctgcttctgggccctacgcgcggcttgcgcaatgccacccagaggatgtttgaaattgactatagccgggactccttcctcaaggatggccagccatttcgctacatctcaggaagcattcactactcccgtgtgccccgcttctactggaaggaccggctgctgaagatgaagatggctgggctgaacgccatccagacgtatgtgccctggaactttcatgagccctggccaggacagtaccagttttctgaggaccatgatgtggaatattttcttcggctggctcatgagctgggactgctggttatcctgaggcccgggccctacatctgtgcagagtgggaaatgggaggattacctgcttggctgctagagaaagagtctattcttctccgctcctccgacccagattacctggcagctgtggacaagtggttgggagtccttctgcccaagatgaagcctctcctctatcagaatggagggccagttataacagtgcaggttgaaaatgaatatggcagctactttgcctgtgattttgactacctgcgcttcctgcagaagcgctttcgccaccatctgggggatgatgtggttctgtttaccactgatggagcacataaaacattcctgaaatgtggggccctgcagggcctctacaccacggtggactttggaacaggcagcaacatcacagatgctttcctaagccagaggaagtgtgagcccaaaggacccttgatcaattctgaattctatactggctggctagatcactggggccaacctcactccacaatcaagaccgaagcagtggcttcctccctctatgatatacttgcccgtggggcgagtgtgaacttgtacatgtttataggtgggaccaattttgcctattggaatggggccaactcaccctatgcagcacagcccaccagctacgactatgatgccccactgagtgaggctggggacctcactgagaagtattttgctctgcgaaacatcatccagaagtttgaaaaagtaccagaaggtcctatccctccatctacaccaaagtttgcatatggaaaggtcactttggaaaagttaaagacagtgggagcagctctggacattctgtgtccctctgggccccacacggtgcgttggcccaacacggtgcgttcgccaacacgttgcggcccaa

SEQ ID NO: 628993 - DNA, 1505 bp, Homo sapiens
acagcggggcggggcgcggggctgaacaagcgcgagggctggctgctgggccgacgaggggcggtgccaggccgtgggtccttagtcaagtgacgcgaagcggccggcctgggcgccgactgcagagccgggaggctggtggtcatgccggggttcctggttcgcatcctccttctgctgctggttctgctgcttctgggccctacgcgcggcttgcgcaatgccacccagaggatgtttgaaattgactatagccgggactccttcctcaaggatggccagccatttcgctacatctcaggaagcattcactactcccgtgtgccccgcttctactggaaggaccggctgctgaagatgaagatggctgggctgaacgccatccagacgtatgtgccctggaactttcatgagccctggccaggacagtaccagttttctgaggaccatgatgtggaatattttcttcggctggctcatgagctgggactgctggttatcctgaggcccgggccctacatctgtgcagagtgggaaatgggaggattacctgcttggctgctagagaaagagtctattcttctccgctcctccgacccagattacctggcagctgtggacaagtggttgggagtccttctgcccaagatgaagcctctcctctatcagaatggagggccagttataacagtgcaggttgaaaatgaatatggcagctactttgcctgtgattttgactacctgcgcttcctgcagaagcgctttcgccaccatctgggggatgatgtggttctgtttaccactgatggagcacataaaacattcctgaaatgtggggccctgcagggcctctacaccacggtggactttggaacaggcagcaacatcacagatgctttcctaagccagaggaagtgtgagcccaaaggacccttgatcaattctgaattctatactggctggctagatcactggggccaacctcactccacaatcaagaccgaagcagtggcttcctccctctatgatatacttgcccgtggggcgagtgtgaacttgtacatgtttataggtgggaccaattttgcctattggaatggggccaactcaccctatgcagcacagcccaccagctacgactatgatgccccactgagtgaggctggggacctcactgagaagtattttgctctgcgaaacatcatccagaaggtgggtgcttggtatgagctgtggtgggctgatcttggacgagcctcttttgaactcactgtggtctgtggaccactttctggctggagcctcctgttaaaggatggtgagggaggatcagtagactgggttggctctgtcccctggtagagtgggcttggccgtgttttgaggggggcttagcctgttttacggcttattccggcgaggcctcgacctttttggggaaccgggaggcctttttcgcgcatccgcggggggggggaccctccaggggggccgcgaaactttta

SEQ ID NO: 628994 - DNA, 847 bp, Homo sapiens
gagcctatgagttcagacttggggggctccatctgtccctccctgaggtccctcatcttgtccctgctctgattctgtcagcagcatcctgaactactccttgtgctggggacgccatgcctcgcaaggctgcccaccaatagtcctagcatgtcctggggaagactcccgcaagaacttcgtcgcgggataaggccgctgagaaacgcttcagtgagtgcatagcctcgcgaggtcactccatcagtcgcactcatgcatctgcttgctcttccgctgtgacccgactagctcattcagtgtatcacggaagagggcaggcccctgtgccccctctccccttcccatggggcgtgacgaactaactactccgaccatggtggccgctatacctattgctatctctgtgaaacactaacgagcattgggactagacatggaacgtggccttgagggggcggctgaccgagagggccccgttgctgcctgggagctctagcgcacaagacggccgccggggtcacggacaggaacctcagcccagggtgctgggctttctccttcgcaggagtcccccaaaatccacacaaggactcgagcagccttccactcagccagaggagggtcgggctcccccgcctgctctcggtggtggcgtctggcccttcctgccgtttccaaggcctccggaagcaccaagccagttctcagttacctcctctggccggaaggcctcacgttgtcctccagagctgctctgggcccaggctggctccgtgaccagctgatggcacgtgctgggcagcatgggctccaaagaagcatcccaagtgtctccagccaccca

SEQ ID NO: 628995 - DNA, 532 bp, Homo sapiens
tgctgcaggacagacatgggtgttctatggctgtcaaggggttcaagcatttcaggtgatctgcaccgatcaaaaggtgttggggacatgctctgacaactgaagcacctcattctggaactgttgagtgctactggaggtgtccgtgaaccacaatgatttcttgttgctggaggagtagcagatcgtgaacgatcagaactactttcagatgcagaacgcctgccgatggctggaggagatcttgttaaggaccgtttacccccagctgttcgtggagtacgggatctggagcggcggcggatagcaagtggtgagcgacttccggaacgtttgcgtggtaacagtggcgttcgagatctaaagcggcgccgaatagctggaggtgtccgggacctaaagcggcggcgtgtcactggtgaggttcgagagcgggaccttcttcgagttactggagatgtgcgagatcgaaatctccttcgggtgaccggagatgttctggatcttgatcttctggaccggcgttcgcaaa

SEQ ID NO: 628996 - DNA, 223 bp, Homo sapiens
agggggttccctgcctgcagccccccattagcctttttccaaagggccggggggccggggaagggccaaggtcccccggctggttttcccgggagttgggggggggcccccccccagggggcggcttttgtccctggggtttgttttccctggttgtttgcgggttgggttttttttttggccaacccccatggttttcccataaaagatttccgatggccca

SEQ ID NO: 628997 - DNA, 312 bp, Homo sapiens
ctcccagccccccagaggcaaaggaggcagtaaaccctaccgtctctggtcccttcgtggtcgccaaaaatgctgcgggaaactgaggactggtgagaccgatacggagaacaggaggattgtttattttaggtgcaaaccggctcagtggactcgcatctaaaaagctgagcatgaaacaaagacagagcgaggtttttatgagcagacttacaaaagtaaaacagaggcagttaattttaggataggtgacataatttatagtatagcataacttgtggccttgcatagctggtggccttgtagctgtat

SEQ ID NO: 628998 - DNA, 379 bp, Homo sapiens
ggtgggctaacagcccagcagaggtctagttggggcattacaacaacggtgggggaggaggcacaggtggattctctaaggcatggagtggagggacaagatcagactaggtctctgggtcctgagagcatgagggggctgggtctgacacgttatttcaccgggggcagaaatcctccttaaagacaatacaaggctagcttccagcagctcctcgtcatttccggtggaaaaaatccgggggcaggggaaatagatctcaaaacggcatcgggggccggagtgcgggggcttaccccgtgtaatcctagcacttggggaggctgaggcgggcaggtggctggagtctaggagttggagacaagctgggccagcaggg

SEQ ID NO: 628999 - DNA, 244 bp, Homo sapiens
  misc_feature (30)..(30): n is a, c, g, or t
  misc_feature (32)..(32): n is a, c, g, or t
gggggcaaaaaagggggggggaatttgggncnggggatttaaaaaagggttttttttcccccccttttttttaaaaagaaccccggggccccctttgggtttgggggcccccccccggggggggggggggggggcccccccccccgggggcccctttgggggttggggggggggggggggttccccccagggcctttggtttttttttttggttttttaacccccaatttttttttttggggga

SEQ ID NO: 629000 - DNA, 254 bp, Homo sapiens
tggggtatgtatagcttaggttaaacttgcgttattgctacaggttaagcactgcgttgtcccgtgagggatgtgagcataggctaatccgtttcgatgcagcattgctgcgatgcttgattgcatgtccctttagatcgtggtgatataaaaggtgaactcactggaacggggatgctgtgcctgtgtaatcttactacagagctaatataaaggctagggaccaagacctatggggggacactcgaggctag

SEQ ID NO: 629001 - DNA, 261 bp, Homo sapiens
agtacagggctgtgcagagtctggcccaggttgtagggacagttgccataagaagccagcagccaggtatggtggctcacacctgtaatcccagcactttgggaggccgagaaaggtggatggctagagcccaggagttccagacccatctggacaacatagcaaaaccctgtctctacggaaaaaaaaaaattagccaagtctggtggtgcacgcccgcagtcccagctacttaggaggctgaggcaggagaatggcgtg

SEQ ID NO: 629002 - DNA, 473 bp, Homo sapiens
  misc_feature (225)..(225): n is a, c, g, or t
acacctgccccaagcgtccacagaccgagcgccgccgcccggcacaaggaccaaccatccggcaacttcttcgcgcgtcaagtgcattgggggccgaggtcctggccgaatctgtaaacactcgactgacacttgttcattcctccgggcggaaggcctgtcccaaggtcggggccggcaggaggcgccctggaggccgcacctcattgccggggcaccgggaancggggagcctcaccatgggttccaggttcactcgcaggaccctggcgccctgccgcccgtgccgccagcggcgctcgccccacacgtcgctgccgacgcggatggtggggaaggtggtcagcgtcggggtggccgccctccagatctcctccaaggctgcgcccgaagcatggccgggggcacggcttgccgccactctctcgggggcgcgcggtggggtggcgcggcattcctcctcggcagcggcc

SEQ ID NO: 629003 - DNA, 414 bp, Homo sapiens
tgtggttctggctaactagtctgcttggtgttggtcaggttgagccgcagatagtccaacgtgctccaggatctgctccagaggtcagctgggccagcttgctgctatagctcctcaggctcggtctctggcgaggcaggcggttgttcttgatgagacagggacttgatgtgctcggccagcaggtcgtcatgtttcatgcaccagtgccggagtatgctggtggtgaactggtcgtcagtgatagacgggccggctcagtaccatcttcaccatctcctcgctgggcttttctctacggagatgaagcagtaggcaggacagggcctctgggtgctcctatgtatttgaggtgctgcaggatggggataatggtctccaggggaatatggtgggccagaaccacaaatatcg

SEQ ID NO: 629004 - DNA, 819 bp, Homo sapiens
gactaaaagtttcctctacaagttctcattacaccacacgctgctagcttaaagattaactgcatcttttacaaaccaggagtgggcttggcttgtacaagcctgtcattgaataaattggactgggccttagaaattgcccagtagtcatgaatttcacagaaagtctgagtcctgaagggttaagagatttattgaggacttccaggatatccacacagtcgggggaagtcagatcttttgactcccaagtctaaacttctttcctctgtgcagattccagggaaaattccagggcctcactgtatctgattcactgaggtgtgtcctgttggtactggctgggacagggtggagatcgtgtgaaaagaggtggtattgctttcagtttgcaagggtatctgacttgcaagagtgactgtaggaagccatttttggttattgctttgggaggcactgccctgagcagaaggcaggatcctaggactgggccaggaaggtaaaggtgtgatgagaatttcatttatttgtcctggggtaaagccagcctcgtatataatggtatttggatttctaacattttgcttactcaatacagttgtatttagttagactctgcagtgccttcctcagcattacattagactaaggatcatcttttctaatatccctgtgtccagtacttttttgataactgctcagacatagttctcacattgacttagggagaggttcaagatacgtgttcttagaaatcttagatcctagttacctctttgaacatttgaggctctcacatctgttaatctacgaaacctg

SEQ ID NO: 629005 - DNA, 172 bp, Homo sapiens
cctggtggtacctcctccatgctatacgtgctcttggtgttaaaaaaaaaaaaagaaaaagaaaagctttccttggtggctggcaattgtggcacacgcccccagttctccacttggcagtgagggtattcccagttaaacgccctacagagggccaggtggttctggcaga

SEQ ID NO: 629006 - DNA, 605 bp, Homo sapiens
ttccacgaggaggtggagcaggcgtgaagttctccctggaattaccaggtcatcactggaggccactacgatgttgaatgctatgtagaggacccccagggaacatcatctatagagaaacgaagtaagtagtagtgaatgccttcacgtaccgggctgaagtcaagggcgtttatcagtatatggctatcagataatgagatttgccaccttctctcacaagaccgtctactttgactttcaatgtgggcgatgagcctcccattctccctagaacatggggaacagggtcacagcatctcacccagatggagtccgcctgcgtgacgcatccattgtaggctctggagacaacggtcgatttgtacttcccagtagcgcacttatccggacttgcgggaggtcccgatggacccgtgagctccgaagcggataggaagccttagataagccgagtctcttactgggtctcgttgagcagagacgatagccctgttgcgtggtcgagcttcgagttcaggtgctactagtatgaaaagcttccttacacagaaaaaccgacccatcgagccagggcagtccacttcctagaccccggcatcctg

SEQ ID NO: 629007 - DNA, 1359 bp, Homo sapiens
gcattggccttggccatgtacacgatctcagaagctgtcacatgaggagtgcttctatctgggagagtggtgtgcattcgtccgctagtcccgggccacaatctccgcaagcttgactgtatgtctccgaggatttggaccagcagagcctgccaagtgaaccagaggagaccctaatgccgggacctagtgggagggagaggagggagagctggcccctcccgaatgatcctactaggccgtcctcaagctctgtcaagggcaaaggccctggaatctcgaaggagagagagagagaagtagtgtgggatactggaggaacatccgttgtagcggttctcatccctccatctcagtgagtgaacacgcaacttcaatcggggcagggtccccccaagatggagtgaaatgctcccctggaggaccagtggagacactgagccccgagacagtgagtggtggcctcactgctctgcccggcaccctgtcacctccactttgccttgttggaagtgacccagccccctccccttccattctcccacctgttcaccaggagtcaccggcatgccctgctgcctctgaggaagacaggcctcacactgaggattgagtcgctgcatcacggggagctggagcagctgaatgcagagctgggcttggagccagagacaacgccaaaaccccctgatgctccacccctggggcccgaccatccatgctctggtacagtacagaccaagaagctcaggccgtggcagagccatgagccagccgttgaggaaggagctgcacgcacagtaggggcttccttggctaggagtgtagctggattcctcctttgctaacactctggggtggggcaactgtgtggggaagctggctgtcggatggtagctattccacccctctggccctgactgccctggactgctgtcctgggcatggtgcagtaccatgtgccataggacaggcctctcaaatgcgtaaactaatttaccatgacgcgttagaggaatgtgaacaagccctaggggaagtcttcaccaccagactggcgcttggctccccggacacatcatcctatactcgatcacactatgcacaacgcctgatcgggctggcccccaccaaacctcatatcataagaaccgcagcgccccgccgcaggacacaaggagcgcaggccagcacaacacaggcccggccgggccctcacggcgacgcagcgcgccgcgagaaccacacccactgcaccccccacgggcaggcaccagcgcccgcggacaaagagggcgggcccacaccgcgcggcccctcgcaccatcaaacccccgcggacaaagccgggcctgtgca

SEQ ID NO: 629008 - DNA, 553 bp, Homo sapiens
tctaagtccttcacacccatttatttattcagtcctcacaacacaggctttcaataaatgatggatgaatgctgaatgaaaatatagtatcctttattttttacaaatacctcagagaaaaatagaaaatatgtctaggaatatacttactccaccttgtagagattaaaaacgtgaacataaagactcaaaaccctgacaatgatatggggaaagcagtgttcatttgggtaaattctgagtgatgcatcttaatatgaagttagttttagtcactaagtgtgatatttattttactttaagtagatttattcaaggtaagatgcctgggaaaattgactagattccagtgatcatcaccccaaaccttgtgcattctgttataactgttacttaaagtggttccaagattagtttgggaaattatcagttaaatacatttcagtcaatagacagtatttttttgtttttaactattggatttctcagcagtcctaagatgatgatgatatgtatcttggaccatgaaactctcttttacattaaaaaaaaa

SEQ ID NO: 629009 - DNA, 133 bp, Homo sapiens
atctgcaacgaacaactcacagcaactccatgctagtcagaggctacttcattgttgtcttataagatgtagaagattaacagatcttggcaataaataatgaagaggccaccctgtttccagtgtagaaatt

SEQ ID NO: 629010 - DNA, 583 bp, Homo sapiens
  misc_feature (1)..(1): n is a, c, g, or t
  misc_feature (12)..(12): n is a, c, g, or t
  misc_feature (22)..(22): n is a, c, g, or t
  misc_feature (45)..(45): n is a, c, g, or t
  misc_feature (47)..(47): n is a, c, g, or t
ntcggggggatntcaatatggnttccaccaaaggtttttcttcananagggaaagggattcagagcagagagcaaaaggcagaagacaaagcagtagagcataaggagattttggatcagctggagtcactcaaattagaaaatcgtcatctttctgaaatggtgatgaaattggaattgggtttacatgagtgttccttgcctgtatctccccttggttcaatagctaccagatttttggaagaggaggaactgaggtctcatcacattctagagcgcttggatgcccatattgaagaactaaaaagagagagtgaaaagacagtgagacaattcacagccttaaagtagcctcttaaaaaaatcacaatcttggaaataaaaataaacaccaaagagttactgtcatctgaagtagcagctctttaaaaacatgaagagataaaattataaaaatgatacatctaaagcagtggtgaagaaagctgaaaaactgatacttttgataggcattttctctgcactggtttgtttaaaggacttcttccagcaataagttgaaagaataaaccactttgctaga

SEQ ID NO: 629011 - DNA, 138 bp, Homo sapiens
gtccagaacttctaccaatcactggaacgtcattgctgcatggatttggggacctgcagagaataattctggcttgggctggacaatcctgaacaaaatcacagcccatgggtcagtactgagctccggcgtggacct

SEQ ID NO: 629012 - DNA, 868 bp, Homo sapiens
cggcacgaggattaaagccatagattaactacttacaactaaaaaacactgaggttttccaaccagcagtatcacagatcacaggtattcttgtacagattaagtgactctagtattcttttttattaggcaaaagagatttcactagcagacctccaggagaattatattgaggcattaaataaattagtgtctgaaaatcaacaactacagaaagatttgatgaataccaaatctcagctggagatttctactagatgtgcaaaaaacaaaatgacaggatctttaaaccaacacacagcagaacaactgagttcaagaatacagagttcaagccaacccatggccagcacagacatgatggaataaagactgagcactacaaaacagatcttcattctccaagaggacaagcgtcggatagtataaaccccatgtctagggtgctaagccccctgagtcctcaaatcagccctgtgttccttgcctgtatctccccttggttcaatagctaccagatttttggaagaggaggaactgaggtctcatcacattctagagcgcttggatgcccatattgaagaactaaaaagagagagtgaaaagacagtgagacaattcacagccttaaagtagcctcttaaaaaaatcacaatcttggaaataaaaataaacaccaaagagttactgtcatctgaagtagcagctctttaaaaacatgaagagataaaattataaaaatgatacatctaaagcagtggtgaagaaagctgaaaaactgatacttttgataggcattttctctgcactggtttgtttaaaggacttcttccagcaataagttgaaagaataaaccactttgctaga

SEQ ID NO: 629013 - DNA, 147 bp, Homo sapiens
gtaactttgtgatgtgtctgctttgttctcttttagaatgtgggcaaaatattggagaacagtaccccgttatgcaatggtaaaggaagtaatgcagataaggttcaagatagtgagacatccctgtcggtctccaagaaagctgat

SEQ ID NO: 629014 - DNA, 533 bp, Homo sapiens
tgctagaagtcgacgatgcccacttctgctgagctctggttttcacttagacaattcatccttcacggctctctcttcctctttagacatacgcttttcatgtatatagaagtattttcgtgttcgggcctgcaggttgaaccatgtgtaggcaaaggctcggacgtggggccgacagtgcttcgatgacaggactgaaacttcactcctgggtgacgaccgacgcggagacatacataacctgccgggcgctggggtatgcgtgtgcgtctgggtgtgcggtttggacggtgtgcgtgacgtgtgggtgacacgaggagacacacgagggacgacgacggacacacgagagacgacgacacacgagacgacacggggggagaaaaaaaaatcaagcctgcttcttgcgttcacatttcccagtccggctcaagtgcagccagccagccatgcgcttatcgccgtccatgagctgaactttaaccccgcctagagtttacctacactccaatatacctgcatactgtaccaag

SEQ ID NO: 629015 - DNA, 342 bp, Homo sapiens
  misc_feature (291)..(291): n is a, c, g, or t
gttccgagttttgcattcctgtctgactgacactcctattcttctcaaggacagtgtatttttgtagtataatcactggttaatactaagctttttccatggagtaatgtttagctgctataaccccattttggctgctgcttgttaaatactgtgtctttgggagttaaaaaacacagttgacttctcttttgctcttacaagaattttcaaaaatattgagtcttagagacttattcatctctccccagggatacatacttgattggtcttcaatagactagacagttnagtcacaggtggctggaacatctatttttctacaaaactggatgcatgaac

SEQ ID NO: 629016 - DNA, 451 bp, Homo sapiens
  misc_feature (10)..(11): n is a, c, g, or t
attttttctnnccctattgcaaaccagaataaattcccaacgataggggtcaaaagttagtgttccttgcctgtatctccccttggttcaatagctaccagatttttggaagaggaggaactgaggtctcatcacattctagagcgcttggatgcccatattgaagaactaaaaagagagagtgaaaagacagtgagacaattcacagccttaaagtagcctcttaaaaaaatcacaatcttggaaataaaaataaacaccaaagagttactgtcatctgaagtagcagctctttaaaaacatgaagagataaaattataaaaatgatacatctaaagcagtggtgaagaaagctgaaaaactgatacttttgataggcattttctctgcactggtttgtttaaaggacttcttccagcaataagttgaaagaataaaccactttgctaga

SEQ ID NO: 629017 - DNA, 424 bp, Homo sapiens
gacaaaaatacaaaaaaattagcagggcgtggtggcaggttcctgtagtcccagctacttgggaggctgcggcgagaagagtggagtgaacccaggaggcggacttgcagtgagctgagatcgcaccactgcactccagtctgggcaacaagagtgaaactccgtctcaaaaaaaaaaaataagtaaaaaggaagacttcactgagatgtcatttgagtaaagacttgagctgggtgctgtggctcaggtctgtgatcccagcactttgggaggctgagatgggaggattgcttgaacccaggagttggagaccagcctggacaaaaaagtgagaccatcatctctacaaagaataaaaaaattagctggatgtagtgatgtgctgatgtgtgcttgtggtcccagctacacaggaggctgagg

SEQ ID NO: 629018 - DNA, 359 bp, Homo sapiens
  misc_feature (25)..(25): n is a, c, g, or t
gcgactactactactactaaattcncggccgctcgacgttactgtcatctgaagtagcagctctttaaaaacatgaagagataaaattataaaaatgatacatctaaagcagtggtgaagaaagctgaaaaactgatacttttgataggcattttctctgcactggtttgtttaaaggacttcttccagcaataagttgaaagaataaaccactttgctagaaaattttctcatacgaatatttattatcataaagtgatacttaccttgctgacttaaatgtgaatagctatgtactaattgaaataaggattttatgatacatgttgaaaataaagtaactgcaggaactttcttta

SEQ ID NO: 629019 - DNA, 148 bp, Homo sapiens
tctagcctcgccggtgtggtgggtcccataatcccagctactcaggaggctgaggcaggggaattgcttaaactcaggaggcagaggttgcagtgagccaagatcatgccattgcactggcgaggctaggacactggcgaggctagga

SEQ ID NO: 629020 - DNA, 363 bp, Homo sapiens
ccaggactgcccagtgacaaatgggagggtggggtttcccatgggttcagaggcaagaagttacacatcgcattttaaaatgtatattcccaggctgggcatggtggcttacacctatctatattcccagtactctggggggacgagacaggaggatcatttgaactcagagttcgggaccagcctgggcaacatagtgagaccctgtctctaccaaaatttaaaaattagccagcatagtagcacacatgtgtagtcccaactacttagtgggaggctgaggcaggaggatcggttgagcccaggaagtcgaggctgcagtgacctatgatttgccactgcactccagcctcggtggcagtg

SEQ ID NO: 629021 - DNA, 939 bp, Homo sapiens
gggaagcatactcggtgagccactggggagctttgctacaaaggccgatgtacaggccttcaggcgggccttccaacgagtgtctccgctgcaccgtgtgtctgcactggttctggccggtcaagtgtcctggtcctgtccacccacctggcaacccgatgcgcaacgcgctcgcgggtgctctgcccatctgctccatgctggccctggtcgacctctttgctggccctgactctgcccttcgcggcagccggggctcttcatgggctgcagtctgggaacgtgccacctgccgcatcatctctggcctctattcggccatccttccacgccggtttcctcttcctggcctgtatcagtgccgaccgctacgtggccatcgcgctgagctgcgtcccagccgggccgcgggcctccacctcccgtgccgcgccctacttggttctccgtcatcgtgtgggtgttgtcactgttcctggcgctgcctgcgctgctcttccagtcaggatgggctagctgggaaggccaactggactgctgtcgcctcatcttccctcgagggtctcacgcagagggtgacgggggcgagcgccgtggcgcaggtggccctgggtttcgcgctgccgctgggcgtcgtggtcagcctgctacgcgcgttcttgggcgcacgctgtggccgcatgtggcccgagcgccggcgtgcgctgcccgtcgtggtggctctggtggcggcttcgtggtgctgccactggcctatggctcgcctgttgctggatccggcgatcctactggtgcgcgccagcggatggcctgccgcacgcaggattctcctgctggtgccccggctttgccctcccctgggctcaaccgtttagcttctggctggttcgcggcggggctccggggagggccccgccccccgggccccgcccctctcgc

SEQ ID NO: 629022 - DNA, 293 bp, Homo sapiens
cggcggatcactttttattattgctagttagaaaatgtcatgaacagtgtatcttagaaatataatattctacttatttacacatgtcaaaatttgtgtctcttccagtgttccttgcctgtatctccccttggttcaatagctaccagatttttggaagaggaggaactgaggtctcatcacattctagagcgcttggatgcccatattgaagaacttctctctcttacatacacataacacctggtaaactgtgggtgatgattttctgtttgcaaaacactcgagtccag

SEQ ID NO: 629023 - DNA, 125 bp, Homo sapiens
accggctctttgggcggcaggacactggagggtggggacgcgtccacattgtgacgcccagtcgacgttacgtgtggccgtaggcgtgcctggagctctgggccagctgccagccagagcggggt

SEQ ID NO: 629024 - DNA, 204 bp, Homo sapiens
tgttgtgaccaaaagtctcccgagatagtgtcaatatggcgcccaatgcaatgaggtatttgggaatgggagccatgtctaaacacaaaatacacttatgcttcataaacacttagccacatacacataacctgaaggtaatcttatacaatattttaaataatttcatgcatcaaacaaagttctgaatgtgtatttactgtg

SEQ ID NO: 629025 - DNA, 1005 bp, Homo sapiens
cggcacgaggattaaagccatagattaactacttacaactaaaaaacactgaggttttccaaccagcagtatcacagatcacaggtattcttgtacagattaagtgactctagtattcttttttattaggcaaaagagatttcactagcagacctccaggagaattatattgaggcattaaataaattagtgtctgaaaatcaacaactacagaaagatttgatgaataccaaatctcagctggagatttctactagatgtgcaaaaaacaaaatgacaggatctttaaaccaacacacagcagaacaactgagttcaagaatacagagttcaagccaacccatggccagcacagacatgatggaataaagactgagcactacaaaacagatcttcattctccaagaggacaagcgtcggatagtataaaccccatgtctagggtgctaagccccctgagtcctcaaatcagcccttgcagctccaccaggtctttgacttcctactctctatgtaaaactcattctttgccttcagcgctagatacaaatgaagccaatttttctgacactatgtctgagagtatgaatgaccaagaagagtttatatcttcgtgttccttgcctgtatctccccttggttcaatagctaccagatttttggaagaggaggaactgaggtctcatcacattctagagcgcttggatgcccatattgaagaactaaaaagagagagtgaaaagacagtgagacaattcacagccttaaagtagcctcttaaaaaaatcacaatcttggaaataaaaataaacaccaaagagttactgtcatctgaagtagcagctctttaaaaacatgaagagataaaattataaaaatgatacatctaaagcagtggtgaagaaagctgaaaaactgatacttttgataggcattttctctgcactggtttgtttaaaggacttcttccagcaataagttgaaagaataaaccactttgctaga

SEQ ID NO: 629026 - DNA, 1367 bp, Homo sapiens
  misc_feature (296)..(296): n is a, c, g, or t
  misc_feature (448)..(448): n is a, c, g, or t
  misc_feature (451)..(451): n is a, c, g, or t
  misc_feature (465)..(465): n is a, c, g, or t
  misc_feature (468)..(468): n is a, c, g, or t
  misc_feature (470)..(470): n is a, c, g, or t
caatatgttggctgtgatggacctgcccgcatgctacatgacatcattgaacttgtgcagcaatttgggagaccatatatttcccaaggcatcatcacaggtccagatgaacacacgaccatcccaggagcagctggcaatggtgctggtgggcaggctgatggagggggcccaggccacatctcaaacccagtcactgtgcttccagcttctgctctccttccactggccatccttgaagaggttgtcacagccacctgatggaaacttcttgatgtaattgggtttctgcctgnacagctggtctatgaggcttccagggattccatcaacgtaagagttccgctgatgttttggaaatgggtcactgtaggaattaatcaagtggtagtgaggacttgataactgtggagtggattctgggattctcaaagatgtgacttcctgnccntaagttggagctanatncnattccatgaatgaaacagcactgttcatacctcctggtctctgcaccctctgcctttattcacctggaaatgaagacacacctcagttaccttatctgcagagtcttctttgacccacttgtcagccaatttgaaaaagtaccagaaggtcctatccctccatctacaccaaagtttgcatatggaaaggtcactttggaaaagttaaagacagtgggagcagctctggacattctgtgtccctctgggcccatcaaaagcctttatcccttgacatttatccaggtgaaacagcattatgggtttgtgctgtaccggacaacacttcctcaagattgcagcaacccagcacctctctcttcacccctcaatggagtccacgatcgagcatatgttgctgtggatgggatcccccagggagtccttgagcgaaacaatgtgatcactctgaacataacagggaaagctggagccactctggaccttctggtagagaacatgggacgtgtgaactatggtgcatatatcaacgattttaagggtttggtttctaacctgactctcagttccaatatcctcacggactggacgatctttccactggacactgaggatgcagtgcgcagccacctggggggctggggacaccgtgacagtgggcaccattgattgaagtctgggccaaactcatccaataacgctcccggcttttattgggactctcctccccggggatccagattgcccagaaactttatcagtctgaaggccaggcaggtgataaggttactggcgtatgcaccgggctcataactgttggccacacctgatacgccaacaaacgtgagagtgcctgataaaatgttatgggatattagacaaataaacccaatgtag

SEQ ID NO: 629027 - DNA, 821 bp, Homo sapiens
  misc_feature (88)..(88): n is a, c, g, or t
  misc_feature (90)..(90): n is a, c, g, or t
  misc_feature (120)..(120): n is a, c, g, or t
aagaaatctctttctgatctgagtaggttgctcattttgtaaattgtagccttattagttaggctattaagcaaatttcctacatttntnttggaaagagaaaagttgctacaatttttnatttgttttgttttctaatctaccatccaggccaacccatggccagcacagacatgatggaataaagactgagcactacaaaacagatcttcattctccaagaggacaagcgtcggatagtataaaccccatgtctagggtgctaagccccctgagtcctcaaatcagcccttgcagctccaccaggtctttgacttcctactctctatgtaaaactcattctttgccttcagcgctagatacaaatgaagccaatttttctgacactatgtctgagagtatgaatgaccaagaagagtttatatcttcgtgttccttgcctgtatctccccttggttcaatagctaccagatttttggaagaggaggaactgaggtctcatcacattctagagcgcttggatgcccatattgaagaactaaaaagagagagtgaaaagacagtgagacaattcacagccttaaagtagcctcttaaaaaaatcacaatcttggaaataaaaataaacaccaaagagttactgtcatctgaagtagcagctctttaaaaacatgaagagataaaattataaaaatgatacatctaaagcagtggtgaagaaagctgaaaaactgatacttttgataggcattttctctgcactggtttgtttaaaggacttcttccagcaataagttgaaagaataaaccactttgctaga

SEQ ID NO: 629028 - DNA, 628 bp, Homo sapiens
tagagagctgctaaatgtgttattatcagcgatcagaaagtcttctggtctaccacacatgtccctccctactatctcttcagtatgtgtggctgaagttagcctctgtgtgagaaaacaatacaactccccttctccacacacgttactttccagcccagattaataagtatcccctaccgctaatccgcaactactatgatctactaccttatagtagagaggaaccacttctttttattattgaaatctgctggtttacttgatgtaattctcactgttctgtgtgactaggagctgaccacagggtgtcatcaattcagattcctaaataatccctttctctgccacaacccagtacctccagctggtgagccctgggccagattgttatgatcttcaggtattataaattttagttacatcaattactgtacaattaatccaaatgctaattatatgtggtgcaagaagtgtcttatgtaaattcagggtatggataagctaattaagatatccatctttggtggctctaagtgtataatttgtttttaaataaagtgtacaaatataacataacatgctataggtgtatcatgaattggaatatatgtcgagaattgggata

SEQ ID NO: 629029 - DNA, 102 bp, Homo sapiens
  misc_feature (2)..(2): n is a, c, g, or t
  misc_feature (75)..(75): n is a, c, g, or t
  misc_feature (93)..(93): n is a, c, g, or t
gnggggggggttttgtctttgctttgctttgttctttttttaatttttttgttcctctggttgaaatttctgggntgttactggggggggggngggggggtg

SEQ ID NO: 629030 - DNA, 566 bp, Homo sapiens
  misc_feature (25)..(25): n is a, c, g, or t
gcgactactactactactaaattcncggccgctcgactgcagctccaccaggtctttgacttcctactctctatgtaaaactcattctttgccttcagcgctagatacaaatgaagccaatttttctgacactatgtctgagagtatgaatgaccaagaagagtttatatcttcgtgttccttgcctgtatctccccttggttcaatagctaccagatttttggaagaggaggaactgaggtctcatcacattctagagcgcttggatgcccatattgaagaactaaaaagagagagtgaaaagacagtgagacaattcacagccttaaagtagcctcttaaaaaaatcacaatcttggaaataaaaataaacaccaaagagttactgtcatctgaagtagcagctctttaaaaacatgaagagataaaattataaaaatgatacatctaaagcagtggtgaagaaagctgaaaaactgatacttttgataggcattttctctgcactggtttgtttaaaggacttcttccagcaataagttgaaagaataaaccactttgctaga

SEQ ID NO: 629031 - DNA, 208 bp, Homo sapiens
  misc_feature (178)..(178): n is a, c, g, or t
ggatgagtctctgctgcaggcggcagctgcgtgtggtgcatctcagctgctctgaagagtcggatctgccctgagtagtgactcttacgtgtccggtagctggctgatggtgctgacagcgtgattctgctccgggcaccagtgtttttcatttggctcccggctgtgctttgttttnttctgctgacatctcttgttgaggtccctc

SEQ ID NO: 629032 - DNA, 1401 bp, Homo sapiens
  misc_feature (401)..(401): n is a, c, g, or t
ggtacacgccgtcccagccatcggctagcgcggccctgagagcgagacagctaggtggtgctgtgacccgtggagtctaattccctcttccggctcccaccaatttgtcttgcgccttggccaccacctcccacgtccggatgctcgggtgctgctagagtatgccgaggtccccgtaggctcgatccgctacctggcgtctcagttgctgggcgcttatacacggtgattgtataagtgcacgacaggagtccgtgcactcctctgacctcgatctttcggctaggcttggacgtgcgtcagcggcctatcgtcgtcgccgttgctccaccgggtctagcccgtgggcgatctgagggcgataacatagctaggttgcatcctacttgcaaaggtcctangagctcgcttagggccgatttccccccaccggccattctcggcgggtggaccggttggaatgctctcgcattgggctaacacccatcccccaaattccccttgcgccatggccggggacgcagctttcgagaacgcggctgttgtaccccccaggggggagttccaaccttccattgcgggtggacagttcccccctttggtttcctctcccgcgacggaaccgaggtttggtctcggggaccgctcacgtgtggtttcgattaggctgattcgagcgcctatgggagcttcctttttgtcgcaatggcccagccccctctcggcccctgggtccccctcgctatatgttatcgccggcatctttccatggtctacattttaagggtggttttaaccgcaacgaagatacacacccaaggttatacgccacggagtggattccacatataaacagccccccagaaggccaacggggtggagcctcaacaccaaaagccccggggacggaaaccttaaggtgttgcgccacagtagtgttaggcgctattggttcaaatccccccatagggaaggccgtccactgtgggcaagacggtttacgaccagagtaaggctaaaccttttggagtggccccccatctcgagagagggcacccacaggaaaagaggtaacgatttgtgaccacaatatacgcccctttgagtttgtaattgcccaccggcactatctcccacaaccagagtggtcgtcccccccaggaaaacctcacgctgccgatgaggggggtggtcacgttgcgggatcagggcaacagcgaacgaagggcctctgttagtccccggataaagggactccgccgtgtttgtgcgcccgtaggagtcatgtgtaaaactaccaaatacgctggtttgacgacaacaaggctaggtgacacgaaaactacctggtacgcacccgatcacagggtgagtaccacaccaccgacggcttcaaaggag

SEQ ID NO: 629033 - DNA, 1142 bp, Homo sapiens
cggcacgaggattaaagccatagattaactacttacaactaaaaaacactgaggttttccaaccagcagtatcacagatcacaggtattcttgtacagattaagtgactctagtattcttttttattaggcaaaagagatttcactagcagacctccaggagaattatattgaggcattaaataaattagtgtctgaaaatcaacaactacagaaagatttgatgaataccaaatctcagctggagatttctactagatgtgcaaaaaacaaaatgacaggatctttaaaccaacacacagcagaacaactgagttcaagaatacagagttcaagccaacccatggccagcacagacatgatggaataaagactgagcactacaaaacagatcttcattctccaagaggacaagcgtcggatagtataaaccccatgtctagggtgctaagccccctgagtcctcaaatcagcccttgcagctccaccaggtctttgacttcctactctctatgtaaaactcattctttgccttcagcgctagatacaaatgaagccaatttttctgacactatgtctgagagtatgaatgaccaagaagagtttatatcttcgtgttccttgcctgtatctccccttggttcaatagctaccagatttttggaagaggaggaactgaggtctcatcacattctagagcgcttggatgcccatattgaagaactaaaaagagagagtgaaaagacagtgagacaattcacagccttaaagtagcctcttaaaaaaatcacaatcttggaaataaaaataaacaccaaagagttactgtcatctgaagtagcagctctttaaaaacatgaagagataaaattataaaaatgatacatctaaagcagtggtgaagaaagctgaaaaactgatacttttgataggcattttctctgcactggtttgtttaaaggacttcttccagcaataagttgaaagaataaaccactttgctagaaaattttctcatacgaatatttattatcataaagtgatacttaccttgctgacttaaatgtgaatagctatgtactaattgaaataaggattttatgatacatgttgaaaataaagtaactgcaggaactttcttta

SEQ ID NO: 629034 - DNA, 720 bp, Homo sapiens
  misc_feature (1)..(1): n is a, c, g, or t
  misc_feature (12)..(12): n is a, c, g, or t
  misc_feature (22)..(22): n is a, c, g, or t
  misc_feature (45)..(45): n is a, c, g, or t
  misc_feature (47)..(47): n is a, c, g, or t
ntcggggggatntcaatatggnttccaccaaaggtttttcttcananagggaaagggattcagagcagagagcaaaaggcagaagacaaagcagtagagcataaggagattttggatcagctggagtcactcaaattagaaaatcgtcatctttctgaaatggtgatgaaattggaattgggtttacatgagtgttccttgcctgtatctccccttggttcaatagctaccagatttttggaagaggaggaactgaggtctcatcacattctagagcgcttggatgcccatattgaagaactaaaaagagagagtgaaaagacagtgagacaattcacagccttaaagtagcctcttaaaaaaatcacaatcttggaaataaaaataaacaccaaagagttactgtcatctgaagtagcagctctttaaaaacatgaagagataaaattataaaaatgatacatctaaagcagtggtgaagaaagctgaaaaactgatacttttgataggcattttctctgcactggtttgtttaaaggacttcttccagcaataagttgaaagaataaaccactttgctagaaaattttctcatacgaatatttattatcataaagtgatacttaccttgctgacttaaatgtgaatagctatgtactaattgaaataaggattttatgatacatgttgaaaataaagtaactgcaggaactttcttta

SEQ ID NO: 629035 - DNA, 1186 bp, Homo sapiens
gagtgatgccttgggcatgcttttttattttattgcttttttaaaaaacagggagttgaagtccaccctatttaaaaagccccaccattgggagaattacaaggggttttggtgcctggaattggtatgtggttgggcaacgcccaatgccattcgtgctaactggattttgggtatcgagtggctattccaagaacatgaatggaggaatgttgggccgaattacagcgtggttgtgcatgggagtggtggtggtgggggggggtgcgctctcagaaagacgcggccagtaagaacaagcgagggaaagtgaagggtcccaggcacactacccgtgcccatggcagggggacctcttacgagctctcgtgggtgccagcagcgggatcccgtggaggggtgacctcagcgcagggcagactgtggaaacagtggcggaggtgctccaaagggcatccttaagtggggggcaagagcaaagaaaacccaaacaggataaaccttttcaaaagactttcataaggagtgaatatgggaagtgccccagccctcacagtgtgtttgcacatttgtgccagaattataagaagttttgggttttaaacatacaggtctgtgtcagggatttcacggtaatgggcaattatgggaaaggtgattgggtgatggcaataaatctataaggggtaactctggggcaaagcagagggtctcaagccatttgccccagaaccttggaacaataaggtgtctgacataaagtttttacgaaacttacacactttgtggaggaccgaaaatatttttggtggcattggactgggaggaggtgtgtaagagtccaagaaaacttgaatatactggaaggaaaccaggaagggggctttgaaagagagttaatcgtaaaaccaaagaaacaattcggggcacccggggggcatctaaaaaccagcggttcaattataaacacggggcgggtaattcgcacagaggaaaaagggcgctacaaggtgtgggagacctcgggtgcacacaaggggtgttagaacaaccaccggagaagggacccacaaagagagcacaaaagaagaggcacatgaacaacccaaaccaaacatgcccaaagaggagcacacaagacaaaggcggacaaacccacaccaagacagaaaaccggaagcaaacc

SEQ ID NO: 629036 - DNA, 263 bp, Homo sapiens
tgatgcggtgatacactaatacacttcgggctacagtacccatggcagactgtaatacttacagtgaacggtgtctacccacagataacaatggctgttgactcctacgtctcatgttagaccctgtaaaaaggtaaggtttatcgctgtcattttaccccagtacgcttatagactaactggagatatacattggtgataagtatgagcgtgaagtacacagatctaaaaatattagtcttagaacaaaaatgacactcatg

SEQ ID NO: 629037 - DNA, 453 bp, Homo sapiens
gtcgacgtttttaatttaattttatgagtactttttaattttatgggtattttgtctgcacgctttgttcaccaggagagagctatgcattacttagtagtggagtcacagatggttgtcagctgccatgtaggtgctgagaatctaaactgcgtctttagaaaggcagacgactaaactgctaagccagacctctaccctgggcagctgatgtgaaaacgtttctcacagttctggatactttgtagttccaggtcactggttatctgggaacctctacttcctgatttgtgggtgactgtctttttttgctcacactgtgggaagggtgcagagttcttgggatttctcttgtaagaccctttgctcttgtcttgatcacctcccagtaccccagctcctcccaccatcatatcagggaccaggagaggcagacagcacaaccatcagtcc

SEQ ID NO: 629038 - DNA, 1357 bp, Homo sapiens
gattctacagaaggtgaagcccggggacatggtacagagcctgttctctctgtgaacgggagaagaaactgttaggctaggatttcctgtggatccactgaaaggtgctccatagtagctggccgatcgacaactggattgtagcgtgcgatatgcccattatggctgtgtgttacgagaatccaagaatcttcagagatggcagacaagtgtttaccgagcccatatttggacttggactatcgaacgagtagcttctaaatgcaaatggtggttggagggtcaggatggagacaaagaccgaaaagtgggtatgctagtagcctcagagagtagcatcatcttgtggcagtgttcaggatgggggcagtggaagctgagaactaggagtgtgcacgcctggcgtgtgcctgtagattctctcttgctacatggagcccaaccacagtactaggtgggacacagacgatcataccaagggcacatgtgggtgcgtcgtagggaccgctggacgacatcacaaccactgagcaagtgttcgcaaagactgtcagtagcttataagtgatgttaatagaccataagagtgggagtcactggtccgatcttgggtccggaattgtcaggcccatgggacatcaagtagtagttgacactacgtgaatatgaacagacagggctggccccggttgacggacaatcggcacgcatagacaagacatctctacagtttgaaacagataggcaacgtggaacatcaatgaactcctagcgaggaagaaggatccgcaacagacaacctagggagccatcaaaggaagctaggcccaggtgcaacaagcgccgacaaagagaaacggatggccacggtcagactagccgaggggaaaccgcagacacacagaccaagatgtgagaacacagagacgaccacgagacagcacaagaaacggacagattaggcattggaaccacacaaccccacgagagagaacaagactgaggacgacaagaaggccacacacagagtgatgaacaagaagcggtgagacgagagaacacacgcaaagagaatcaccgaggaacagcaaacaaagcgagcgcacgaatcgaaaaacaagaacacaaggagaacgagaggcagggcggcgactacacatccctgctggatctgcagagacagttaacgctaggaacacgaacacagaagaaatgcagagacacgacgcacggagagccgacagacacgtagagcgagagaacaaaaagacacacccctagagcgaaggaaaaagcaggacagtaagcacaagaagtaagagagcacaccgacgcaacgagcaccaacgaagtgcaa

SEQ ID NO: 629039 - DNA, 895 bp, Homo sapiens
  misc_feature (218)..(218): n is a, c, g, or t
  misc_feature (233)..(233): n is a, c, g, or t
  misc_feature (254)..(254): n is a, c, g, or t
  misc_feature (257)..(257): n is a, c, g, or t
  misc_feature (260)..(260): n is a, c, g, or t
  misc_feature (274)..(274): n is a, c, g, or t
  misc_feature (278)..(278): n is a, c, g, or t
  misc_feature (280)..(280): n is a, c, g, or t
  misc_feature (284)..(285): n is a, c, g, or t
  misc_feature (293)..(293): n is a, c, g, or t
  misc_feature (295)..(295): n is a, c, g, or t
  misc_feature (316)..(316): n is a, c, g, or t
  misc_feature (322)..(322): n is a, c, g, or t
  misc_feature (340)..(340): n is a, c, g, or t
  misc_feature (381)..(381): n is a, c, g, or t
  misc_feature (386)..(386): n is a, c, g, or t
  misc_feature (392)..(392): n is a, c, g, or t
  misc_feature (394)..(394): n is a, c, g, or t
  misc_feature (405)..(405): n is a, c, g, or t
  misc_feature (407)..(407): n is a, c, g, or t
  misc_feature (414)..(414): n is a, c, g, or t
  misc_feature (416)..(416): n is a, c, g, or t
  misc_feature (418)..(418): n is a, c, g, or t
  misc_feature (421)..(421): n is a, c, g, or t
  misc_feature (423)..(424): n is a, c, g, or t
  misc_feature (426)..(426): n is a, c, g, or t
  misc_feature (445)..(445): n is a, c, g, or t
  misc_feature (465)..(465): n is a, c, g, or t
  misc_feature (474)..(474): n is a, c, g, or t
  misc_feature (492)..(492): n is a, c, g, or t
  misc_feature (495)..(495): n is a, c, g, or t
  misc_feature (503)..(503): n is a, c, g, or t
  misc_feature (515)..(515): n is a, c, g, or t
  misc_feature (526)..(526): n is a, c, g, or t
  misc_feature (532)..(532): n is a, c, g, or t
  misc_feature (538)..(538): n is a, c, g, or t
  misc_feature (541)..(541): n is a, c, g, or t
  misc_feature (543)..(544): n is a, c, g, or t
  misc_feature (547)..(547): n is a, c, g, or t
  misc_feature (549)..(549): n is a, c, g, or t
  misc_feature (556)..(556): n is a, c, g, or t
  misc_feature (558)..(558): n is a, c, g, or t
  misc_feature (561)..(561): n is a, c, g, or t
  misc_feature (564)..(565): n is a, c, g, or t
  misc_feature (574)..(574): n is a, c, g, or t
  misc_feature (576)..(576): n is a, c, g, or t
  misc_feature (590)..(590): n is a, c, g, or t
  misc_feature (594)..(594): n is a, c, g, or t
  misc_feature (604)..(604): n is a, c, g, or t
  misc_feature (610)..(610): n is a, c, g, or t
  misc_feature (632)..(632): n is a, c, g, or t
  misc_feature (745)..(745): n is a, c, g, or t
  misc_feature (759)..(759): n is a, c, g, or t
  misc_feature (804)..(807): n is a, c, g, or t
  misc_feature (811)..(811): n is a, c, g, or t
  misc_feature (831)..(831): n is a, c, g, or t
  misc_feature (884)..(884): n is a, c, g, or t
tactgttgtggtcacctctggaaaatacattctgctactcttaaaaactagtgacgctcatacaaatcaacagaaagagcttctgaaggaagactttaaagctgcttctgccacgtgctgctgggtctcagtcctccacttcccgtgtcctctggaagttgtcaggagcaattgttggctgtttgtactgtttgtgtgaattgtggttttcttgcttnaccctttatgcttgnggacacacaaggggctgcaanatnctnccggttttgtgggnggantncaannggggggtnangggtggatggggggcttgttnccttgnggtgccccacggtgcccncctggttgtgggcttttgtatgcccccgattaaccttgcantggantaaaantncttttgattgncnggtccangntnatnanntncactgggtgtgggccatgncgggtggtttgtgggttttncaacctttnatggtggcttttggaccntcngtttgacntctttaaaatgntttttcttgtncaaaantgtcanttnanntanangtttttncnaancannatccttccntnccgtcaacacaatncccnaaaattttanccttgnaaccatctggggtattagtatnccctgacctgagtgaattcacccgtgacaaaactgacgtgaagattcaatggtacaaggattctcttcttttggataaagacaatgagaaatttctaagtgtgagggggaccntcacttactcgtangagatgtggccctggaagatgctggctattaacgctgtgtcctgnnnnttgncccatgaaggccagcaatanaacatcactaggagtattgagctacgcatcaagaaaaaaaaaagaagagaccnttctggtgatc

SEQ ID NO: 629040 - DNA, 163 bp, Homo sapiens
gtactcaggaggctgggactacaagtgcatgccaccatacctggcttgtattcaaatttagagtgctttttctattctctcccactttaatatttaatcacataaaagttcggtattccacgctgagcgctcggtcgctaccataaccagttggtctgtgtgt

SEQ ID NO: 629041 - DNA, 270 bp, Homo sapiens
cccgaggtgcgactcgagtggagaggtgtgaccactgtggcgagatggtgggaccacggggagaggtgggaccacgggggggcgtgaggatgctgggtgggcgactcagtgccgcttcttgtgcttctgcttaaggcgttctttgccctttcgactcttcttctggcccctctcgtggtgggtggggtgcttctccttgctgcgtggatagtgagtgctgacctggcttctccatcccaggtggtacctgagcatcgaatatcgtaatca

SEQ ID NO: 629042 - DNA, 923 bp, Homo sapiens
gctaaattgaaggtatatttcgcactttccaccatgggtccagaggggcaaacgttggcaagagccgacgaggacaagttttatcacttggcgaccgagacgggttcccgttcccgatctgctttcattgcgtgatccatgcatcaagtcgcacgattttcaggttcctgcgagaaatgcccgtaggccttggctggacctgtgtgctgcgccagggggatgtgctgctatggtagctgtccaaggtttatgcctgtatccagccttattgtgtggagtggcacctgtggttccaagtcaagtcctctccccaagtgtggtgactctccagtgaggagcatcacaaggagaacgtagtaggcaggcccgtgaggaaggagctgaagacctggcaaggttgatgttgtgctcaatgatggggcccccaacagttgcgggctagctgggtccatgatgcttagctcacaagcgccagttctgacactgagtggctctacagtctggcttgtgacttttttggcccgtggtggcagcttcatcacaaaggtaaaccgttctcgtgactatcagctctgctatggatctttcagcagctgttcgcgcgtgtccaggccaccaagccccatagctctcgcccttgaatctgaagagatctatggagtcttgcaaggattcctggccctgacaagggtcgacgagtaaattcttttgagccccaacattttatgccttcacagggaagcgtctgcaacgtccagggcttaaagaaccgcgtactgggaacttggggttcacctaacagaacagcaagaccaagaaggcctggaaagggcttatgcctggagcgggtcgcaccctcacactgcgtcttagttcaccggtaaccttcagtttcagctgaattgcctccggaaggttggcca

SEQ ID NO: 629043 - DNA, 532 bp, Homo sapiens
aacttcagatcattgcatcggtctgctaaaaactccactaaggctttccatcatgccccagccgagtccatgtccttagtgtggctcctaagggcctatgtgatctggagaccctgctacctccccaaatctaactcttgccaccttggcctcactggtggtccttataagtggcaaacacaatcctgtctcagagcctttgcgctcactgttcccactgcctagaatactcttctctccgataaccatatagctcactcacttcattatatcttttcattttctactgaaatgtattcttatcaacaaagccctctccgaccacattacatgaaactgtaagtcccctgcaccacccaccctgtcactcccaatcccttttacccttatttttttccaaagcacttttcaccatctaaaaagctacatatttatcgcgtctccagcctgtaaaaacagaagctctgtgtgggcagcaatttctttgttcacagctttagccccaggatttagaacactacatagctcatta

SEQ ID NO: 629044 - DNA, 171 bp, Homo sapiens
catgtgtgtggtgcccgcttctcaacgcggggagaggtttggaacccagtgctagagccaggctgcttggctcaacatccgtccattactccttacgatccaacagagatggcttcacagcgttaagcttcggttttccgttggtgaaatggcacatagttcagcgtctga

SEQ ID NO: 629045 - DNA, 717 bp, Homo sapiens
gtatacataggaggactacgtgtgttgcatctccctggtgctatatgctcaactgtgactaaattcagctactgcaatggctaacacagtaacagaaacctgatctacgacgtaaagttcagtaagccaattagtcacaatcttagagaacttgctctatcgatttcaagaagatcatccttttttatcacacgatcactgacctagtcaagaatttcaaaaaactaatagctacaattctgccctcaaacaacacgtgcttccacagcttgactagttcattgtgtttacgtcaatggcaatcactgagaactcgaggactattatggctgctcataatctgcataggtataaacgaggatcatttctacctagggatagccaaagcatgggtttcaacacgtttgtgtacttataatatattctcaaagtccagcagctgactttttctagaacgctttacagattccatgaagatataaagtctattctcttcaagtggagctaaccaggataatctttgtccccaaaggcaaacctgttaaaatacatagatcattcaatcttcacttgtggaaatgagttttacgggaagggattgagtcttggcacatgactttcatccagatatctaacgacataatagaatgcataattagctctgtgcctcatgcattattgccttctaaattacattacgactaagggcagacataa

SEQ ID NO: 629046 - DNA, 196 bp, Homo sapiens
gctgaggtgactctacaggatcttggaacgtctgaagcaggaattgcagagcttaagagctgtttgtgtcccactgttagccgctttgttccctcatactattgtgtgggagagtcttgatatcccatgtgggattggccacgggtttggataaacgtggagaatgcttagtttttataggcacaagaggtcatat

SEQ ID NO: 629047 - DNA, 549 bp, Homo sapiens
aggcgacatttgccgaataatggcatgggatggcagagttatgggataagcatgtgacctctgaacaggagtggaacatgtactgccactatgttgctgggctgatcggaattggcctttcccgtctttactcagcctcagagttggaagaccccttagttggtgaagatacagaacgtgccacatctatgggcctgtttctcgcagaaaacaagacatcatccgtgactatctggaagaccagcaaggaggaagagatgtctcgggcctcacgaggttgggagcaggtatgtaaagaagttaggggattgggctaagccggagaatattgacttggccggcagggccttgaatgatcttataaccaatgcactgcagcacatcccagatgtcatcacgtacctttcgagactcagaaaccagagtgtgtctaacttctgtgctatgccacaggtaatggccatagccatttgggctgcctgttctaatacccagcaggtgtgcaaaggggcagtgaagattcggaaagggcaagcagtgaccctcatg

SEQ ID NO: 629048 - DNA, 117 bp, Homo sapiens
tccgagtcggccgagattctccttcaatgaaaacaaaaaccctcaattatattttactagcaatctatctgtacaggactaagctggccattcagttacatgtaaccctctttttct

SEQ ID NO: 629049 - DNA, 591 bp, Homo sapiens
gggatgaggcacgagtttgtcgccaccaatctgcagtcaagatgaagatggctggtcgctggtactgtgaggacccggtagacgagagctgaataacagaatgcggcgactgtccgcttccagcacggacactcccgccgcctgcgcctcgtagctcctggtgctgcagatgagcagtctggatagcaggtgtggctgaccctgactggaaggagctgcacatcgtgggcacctggcctgacatcacctagagcactacctgcgtcctcacctgtgcccccgacccgtccaccgtgcgccctgtggcagttttgacacagtctgctgtgctttgtctcagtgcctcttggaaggagaagcaggactacgcgtttgcctgcgagcagatgaagtcgatccggcaggatctgacggtgcagggcatccgcaccgagttcacggtggaggtgtacgagacccatgcccggatcgccttggagaagggtgaccatgaagagtttaaccagtgccagacgcagctcaagtcgctgtacgccgagaacttgcctggcaatgtgggcgagtttactgcctaccgaatcctctactaca

SEQ ID NO: 629050 - DNA, 139 bp, Homo sapiens
cacctcgccaccaggaagagcagcaaaaccacctaccgggtggccgtattggaaattaccccctaaccttgcgcattagatataggaaccggaaggtttagctccaaaattttaaccaaggttaatttggcaaggctta

SEQ ID NO: 629051 - DNA, 228 bp, Homo sapiens
  misc_feature (44)..(44): n is a, c, g, or t
  misc_feature (135)..(135): n is a, c, g, or t
ggatcgaattagccaaataaaagccgattaattgagcacagtancaattctaattctaatgaatttgcaagtgccgaagagatggcagagattgttgacttgattgtgacgcaaaaagtggatggcgtctttgcngataatgacatgatggctgtccagctacaaaatgcgctacgccgggcaaacattcgggtccctgaggacgtgattgtggcaggtatgacggtt

SEQ ID NO: 629052 - DNA, 135 bp, Homo sapiens
  misc_feature (35)..(35): n is a, c, g, or t
ggagcttagaggcacaaggaggaagaagaggcaanatcatagcaaaaaataacaaaacgagaagtggaggatgacttgggtcttagcatgctgatctgactcccagaaacaaccagtatatttggaccaagccca

SEQ ID NO: 629053 - DNA, 367 bp, Homo sapiens
gcaaataccccatggataccaagtggaagactatacgaaacactaattcacaaagtccgaaatatttttagaaatgttaccgtaggtaccgtaactgttttctgagtgactcttgctagttcttcaatagttctgacacagtccaatccctactacaaagaacgcattctgaacttcacctaaactggaagacaggttctgtaactggctttagtttccattaccttcttacataatgtaattgatttcaagtccgtctatatctctttttttcctttctagtttggttttatagtccgtattcactggaaatatcctgactgtacaaaaaccactaaataccctacttccttattctttatgggtt

SEQ ID NO: 629054 - DNA, 399 bp, Homo sapiens
cctggctacttttttgtattttagtagagacggggtttcactgtgttagccaggatgatcttgatctcctgacctcgtgatccgcccacctcgacctcccaaagtgctgggattacaggcgtgagccaccaagcccagccagacatcattctgtatttgcaacccttatttgtggacatttataaaaaattagccaggcgtggtggcgggcgcctgtagtcccagctactcgggaggctgaggatggagaatcgcttgaacccgggacccgggaggtggaggttgcagtgagccgatatcatgtcattgcaccccagcctgggcgacagggcgagactccgtctcaaaaaaaaaaacagagagacagagtctgggtatgtggccctgtctccaactccg

SEQ ID NO: 629055 - DNA, 1173 bp, Homo sapiens
gaacaaggtgaaagagccggtgaagtgggcagaacaggcaggttccctcgaccagtgacccctgttcccagtgctaatgtgccccagtgccctgtagaactggcaggccccccgatggcttgcgaaccctaattatgggtgtgtcttggtgttggctacttggatggtgccttgacaagagtggtgcagagaaagtgcatgtgaccattgaacatctagggcctctgaactttctcctgtgtgtgctgcagctgtgcacgtggctgtgcatccatacgtttggtttggagcattgagatccttaatggtgacacacatcagtgacaccaacagccttctttctggtgcctgtgaacacttggtgctaccctagtgggttccaagagttatggccgagatactacagtttgtaaccttgatgagtggtaggccaacacatttgcaggctgacggtcaccttctatgtctaccaacacgctatccacccaatggtccctacacagacagggtgtgcatacgagggcccaactcattgattgatgttgacctattgagtgcagttgggcacagggcctttggcagatgagctgaaaggcccagaacccccaaagtttggaatgcagccacccaaagccctagagacgggtacagtggctgggagcaaagctatcagttgggtgccctccatcatgacccgactgcagttctggcgaccaggaatccttgcaactggggttcaaccctttacagaatatcccatcatgggtctaccggttccgtgaaaaacgctcgttaacgtactatccacagtggcgattccaagaagctgacgtacgggcggtgtgcatggagggggaatgacggtgactaattaccacaacccaagctggacaagaccaaatcaaaggacacgagactatggatggtgattgaaggcttcaaatggcacccaatcaggcaggagggcaacgacccaaatatagaaggaaggaatgagcagtaggagacaaagcagacaaggggcgcgagacagacagcagaggaagagaactacaacgcagacgaagcgaccgcgcaggcagaggcaagacaacaacgcaaaaccaaggagatagtcacacaacacagaagaatagagccaagcgaaaaagtggaacaagacatgcacacggg

SEQ ID NO: 629056 - DNA, 768 bp, Homo sapiens
ggagtctgacgctttcctcgttgtctcaaccacgctctgagcacagagaaggaggaagtaatggggctgtgcataggggagttgaagcgatgatacatagggagtgactccataattgtgcgagttatactggaactgaaatgcgcatcgagtctgtctgaaaaggttgatgctcgtcaggaattggttcacatctcatgtcttgtactatcatcttacgacgttctgatagaagaggaaggaccgagtagaatattgctccagaggcagtggtctgcagcttcaacagaggcatagaggttggctgaacggacaggccgccccatgagagttgtgggctgttatcgattcccagtcctcatataactgtgtgggcttcacatgttgatgttgcgcagcacaagccatgtacccgagatgatggatcaaggctttgtaaggacttatttgccttcctgtttcatagaagataagaacacaaatgactggcggtgatttaaaactgtggttccagaatccaatacaggccaacaagagttcagagtcccttcagtggtccacgagacttctggagttccagcacacggacattctccctttgaggggccacgaagggaacgaggcacaggtattgaggaagaatctgaaattcccaaattccatattggtgcctcatggtctactatcggcgaaaagtgttggcctttgaattccagaagaaaggttgcccaaaaatctctgtggccacggaggagacagaatgcgtat

SEQ ID NO: 629057 - DNA, 106 bp, Homo sapiens
  misc_feature (50)..(50): n is a, c, g, or t
ccctctgtgcgtgtgcagtgattataggctttcgctctaagattaaaaangccctagcccacttcttaccacaaggcacacggtacacccttccctacgaggccaa

SEQ ID NO: 629058 - DNA, 208 bp, Homo sapiens
ccaaatgaaaaccccccctttttccattttttttaaaacccttttggggggggggggggaaaaaatttttttgccccttttcccccccccaggagaaagatttatttttttttttctagggcctttccaaaaaacccccttttttttttgttaaaaccggccccccaagtttttcctccccaaaattaccctttttttttttttgtta

SEQ ID NO: 629059 - DNA, 431 bp, Homo sapiens
gcaggatgtcatcagaaatgcctttgcttgctttgatgaagtaagcaaataggcaccatacaggaagattactatgagagagctgctagacaagcatggagggatcggtttacagattaggagagtggatgagctgtacagagaagcacctattgataaaaaggggaatttcaattacatcgagttcacacgcatcctgaaacatggagccaaagacaaagatgactgaaataacttcaaattccagccaaacgttccttgttgccactttgggtattctgagattttctcttgcatgcccttagctttacagcttttgcatttcctgttgtatttattctcagccattttgggcatatgtatctttatactcagactggaaacgggactttctattaatatcatcttcagaatccaaatcaggcgatcct

SEQ ID NO: 629060 - DNA, 463 bp, Homo sapiens
aggattcataacggagattgattggcttgcactaaaggaaccgtcagcaggaaactgaattggctctcattcagtggggaaaatcggtcttaccatgaaatgcttatgagtaccttcaccgcccaattagaacagtatgctatctatccgatcacttaatgagctttgacttacaaaataactcttgaaacagtcctttaaacgcattctgcccgagtggttcaccacatatggtgatgccgtgcttactcatgcgtaagaatgaaggcagggatattcattactgtgatggaaatatgggaaaaccatcattcatgccatatgcacggataatagccaagctaatggccaattcccgcttatgattttggagaatggctcccttgtaatcatcgacatgacagatgacgaaacccctgaagtttcccactcgacacaatacattctgacttcatcagaagca

SEQ ID NO: 629061 - DNA, 364 bp, Homo sapiens
cacggtagattatagcaaatttttttctttattgtatttcctatgtttctcacttttttttttttcctgagagagtctcattctgtccaaccaggctggaatgcagtggcgccatctcggttcactgcaagctccacctcccaggttcgcaccattctcctgcctaagcctcccgagcagctgggactacaggcgaccgccaccacgcccggctaatattatacgaatttttttttaagtacagacggggttacaccgtgttaaccaggagggccttgaactcctgaaatcgagatccgcccgcctggactcccaaagtgcggggataacaggcgtgagcacccgcacctggccaccccggggg

SEQ ID NO: 629062 - DNA, 433 bp, Homo sapiens
tcagcctgcagtcaatgacctgtctttgcgacaccactctaaggaggaggcgaagtacttcttgacgctctcatcgtgggtaactccaccccactgtctccaggcagatattctcttccatgcgtccccaccatgctccacgtcacaccagccttccaagtcctcttccccacacggtacgcgactaaggttgcgccccgcgtgctcaggaagaagaactgctccagttggtgggctccttcctcaccgccgccctcggcacaggcccctcctgttggcacttgagaagcaacagcggggccccgtcaacaagctctttccagcgcaggcacaccaggcgcatgcttgcaaccagctcggccgccggcagtgcggccagcacgcgcagcagcgtcgactcgggcagctcgtccaggttagcggcggcggccgc

SEQ ID NO: 629063 - DNA, 105 bp, Homo sapiens
gctatactatttgtaccaacatgccagtggttgtacactatgagagacctgctgcggatcttgttacggcccggagagagatttagaccctctcccccgaattat

SEQ ID NO: 629064 - DNA, 264 bp, Homo sapiens
ggaccggtggagcagcccctgggctccctggacaggggagttctgaggctcctgctgctcccatccacctgtctgtcctggcataatgccaggctctgagttctgtgaccaaagccaggtggggtacctttccttccacccctgtggcacagctctggaatgggagggttggtagcccctcacatcagagcatcccacaaaggccagtaatggatcgctcggccgcagtcctactactgctttgtacgtcgtggttaatatata

SEQ ID NO: 629065 - DNA, 316 bp, Homo sapiens
tttttttttttgaaagaaagtaactcaatccatttgggtaatttttctcgaggcgaaatggagatagattacaatagaaactaatacaattttcactctcaagcacatattggatacagtggaatctgaactaacgtaagaataaaaaaaaaattggagactgtgacatgtattgctcagcactccaggaatattttgccccaatggagttttattctgtatttacctcattccagccacttccctgctgctattaccatcattatcctccctgcttataatggattcagtaatcttaatgcttggcttttgtccc

SEQ ID NO: 629066 - DNA, 823 bp, Homo sapiens
ccttccctccggaagagccaagaaggcttccgaagaccagagaatgccgcccaggtgtggcatgtgccgtgtccccggagtgccccagccgagcatggaggggctagcgatacccagaacgagatgcaccctgcccatgatggcaccccagggaacccgccatcctcgaggaccctccagtcgttcagagctggaagttggcagggtttcgtgccttgctagtaggcatcggcttcagagctctcaggtgctgctggcaggaaaatgcagggcgaggaggggctgggccatcagtctcgaggctcccgaggtgcagccccccactccactgcagggcccaggggggccaagaacagccacaagaactaacaaaagcgcaatactgggaacggaatcgtggaaagaaaccctcataggctttgggaacttacgaagaaatgcccgacatcccttctactaacatggcatctactaacgtggcatctactaggatgccacaaaacagacgaaatccttccacgtaaggctggacacgtgtcagggcggggtctcaaagctgggccacaggcagcatccacgggcaggccactgggtggcaggagacggagctggggaggagccggcgggaggggccggggcagatcccttaagcagaacggctcaactgttggtggtggcaaagcaggattgtggggacacaagatgcccccttgattcatcagttactaggatacaggggatggcacacaccggctgataacaatgtgaataagggcaaagaacaggacacacaacgcgggcgccaggcacaggccccggaggc

SEQ ID NO: 629067 - DNA, 362 bp, Homo sapiens
tcactccttggcaccccccaacttcctgcacacaatggcaaaaaggggcgctgggaaatccccccccagggtggaggtttcctgttgggtaccctttaaaactgctttgccttcatgttcaaacagattcagggaccaccccctcccccgcccgcaaggttagggcataaagttgtttccttcccaacccggacccaaagaccagcccttccctggtcaaagcctttccgccccctcctgactgttctggatgggcaactggtttgcactgcaccccccccggccatgtaactttcctgtccccatatgataaaacccttttgcatagtattactgacccagtaaaaagctatttcccggga

SEQ ID NO: 629068 - DNA, 131 bp, Homo sapiens
ggacacatgctcagctctgtaatcaaatttagcctaaggtgactccttacttaagttcagctaaaggttctctgtactcgcgaattataacagtggaggtgtaaccagaccataggctacatttgtgccaa

SEQ ID NO: 629069 - DNA, 602 bp, Homo sapiens
ccacccccgctctcacgaactgatagtgaatgaatatttaatgaggctgagtaaaagaaactgtgcgtatgcggaagaagagacgttatcgagagaggccagagagcgttcgcggcgtgagagagcagacatccgagacaggcacttgctggatgctccaaaagtatctgcagcgggtggtccaccaggagaagctcagcctgcctggaagatgccgagatcgagctgcagccgctcgggggccctgatgctggccttgctgcttcaggcctacatggaagtgcgaggctggtgcctgcagagcagccagagtcaggacctaaccacggaaagcaacctgctggagtgcatccgggcctgcaagccagaactctcgggcgagactcccatgtttcccgggaaatggcgacgagcagcctctgaccgagaacaccccggaagtacgttatgggccaacttccagttgcgaccgaatcggccgccggaacagcaacaagagcaggagcagcgggcgcagggcaccccgaggacgtcttaaggggcgaagactggggcccgctgcctgaggaggggcccgagcccccgcaggggttgcgcccggc

SEQ ID NO: 629070 - DNA, 558 bp, Homo sapiens
  misc_feature (16)..(16): n is a, c, g, or t
  misc_feature (490)..(490): n is a, c, g, or t
  misc_feature (502)..(502): n is a, c, g, or t
aagaatccatagcaangtactcagctctggcttctgaacaataggttagacaatgagaagtcctggctgttttagtttctaatgtaaatagggtcccttagtaaaagtgaattcagtcttacttaggatggattgggtaactacacatgagatggcttttacctttgctcaaacgagcgtttgggatcatctttgaggaatgaaaagcggtcgtgcattttcatcaggaaaagatacaagatgtgtataacatttggaaatgtgtctgaggatgaatggaaatgttctcattttattgaacgctaagaacaacaacaaaaaagaaatgtagggtgctactaaggatcttggatgccaagagatattttaaagccaatttgtaaaaacgataacccgtaaattctatttaaaattggaaaagtaggaccagaattttgaagtaagccagtttatctttagaatgatattgtgaaattggctttaaatatancattccgatccnatgtatttatggagtctaattcatagcctgttactgtcattccacacaggctaaaa

SEQ ID NO: 629071 - DNA, 690 bp, Homo sapiens
ttcggacgaggtccacttcttttcgtcagggtataccgactagggccgttcgcgcatttgacctattcatttttggcttcgcatctcacagagctgttatggccacaaagctttcactgctctgactccatgcataagggcacacatagactgtgcgctgtaacacaaccatgctgaaatctagcaggatcgacctgcggttatgcgttgatcactagatggctatgcccaataggtctactacttaacctccctggctgctgacacgaacagttgtcagagagtatgagaaactgtttgagtatagattgcgatgcttccactacagaacttggatgtggctctaggctaatttcagacaataaggcacgcttacgtccctgaccacaacttgctgaaagtgtcataggaacagtcttcctagacatgtgaacagcaactctaggcaccacagatttgcatatcgcctggagaccccgagacattacgttacaccaaattagtttacttgccatgtgatcttgccgcgagcgttctaaagatgttcaacagtcgttaacttctcttcacacatgtctgctaatagccaccgtcaacttactacggcctccctcacggtttccattcctcttcaatattgcgactcctcatggcaaccagtagattcccttcttttacgcttccttttct

SEQ ID NO: 629072 - DNA, 347 bp, Homo sapiens
gataagggaggaatcacagtggaggtactgaagatccgtaattactagtacaatgcatattgatgaggacagtaggggagaaaccgatttacagatgagttgacaagcaaagaaaaggcaaataaacaatttggtccaagaaatatatcacattctgtacaaggtcttcacttagctgtcgtcatttgtattaactcttcatagttgacttgaccaggtcaccaatcgagtatctgcttccctgctcatttcttcatctgcttcatctgtgaacttctctccacggtatgtcgtcacatggcgcagttctgcagcactagtatagccattgccatccttactcgtac

SEQ ID NO: 629073 - DNA, 365 bp, Homo sapiens
  misc_feature (8)..(8): n is a, c, g, or t
  misc_feature (30)..(30): n is a, c, g, or t
  misc_feature (91)..(91): n is a, c, g, or t
gcattctntcttttttttaattgtggtaanctctacacaacagtggtcaggcgtgatggtgcacgcctgtaatctcagcctcccgagtggntgggattacaggcgcccaccacacctggctaattaaagacagggtatcaccatgttggtcaggagatcgagaccatcctggctaacacaatgaaccccctgtttctactaaaaaaatacaaaaaattagctgggcatggtggtgggcgcctgtggtcccagctactcgggaggctgaggcaggagaatggtgtgaacccgggaggcggagcttgcagtgagccgagatcatgccactgccctccagcctgggtgacagagcaagattccgtctc

SEQ ID NO: 629074 - DNA, 125 bp, Homo sapiens
gtgactttgaacagagtgggaggaggtttgccttcagcaggttccagctggacttttcctttgagcttcccgcttttggggtgcccagatattttccgttcacagcttccatcaggatacatata

SEQ ID NO: 629075 - DNA, 452 bp, Homo sapiens
attttctccccctctgtgggttgtctgtttactttgctgactgttccttttgccgtgcaaaagctcttaagtttcattaggtcccagctatttatgtttgtttttattgcatttgcttttgggttcttggtcatgaaatccttacgtaagcaaatgtctagaagggtttttccagtgttatcttctagaatttttatagtttcagaccttaggtttaagtccttaatccatctcgagttggtttttgtataaggtgagagatgaggatccagtttcattctcctacattggctagccaattatcccagcaccatttgttgaaaagggtgtcctttccctgctttacatttttgtttgctttgtcgaagatcagttggctgtgagtatttgggttcatttgtggtttctctgttcaatgtgtttattgtctatttttatacacaaaatcatgg

SEQ ID NO: 629076 - DNA, 532 bp, Homo sapiens
gttcaccacaatctgcattgtctgtatgtgtggaaatgctcagattgtatcctgagcatcgttcgcctgttgcctgttcaatggctctatgagcttgtgtcctgtgccacatgtgccatcgtgggcgtgcctcgccacatcgcggattccatgtccctggtcacctttgcttttgcttggctcggtagcccacgggttggtgcccttggactgctccctgttgtgtccacagaatagcgtgaatcgctgccctgagtgaactctgaggctgcactggtgtccaacccttgttcccattcccatctatgtttccgtaatacatgattcataaatggagtttaactcacccaaggtagaatgaaaaataacgaaaattcaatttatatatacagtgatatattattaagagaaagattttacgtcgttcttgattacatgtaaaggtccttggaaaatctttctggtgggacagtgattcaattaaagatggttaattaaaaatggtgtgtggaggctgataaaatttaaagga

SEQ ID NO: 629077 - DNA, 994 bp, Homo sapiens
  misc_feature (295)..(295): n is a, c, g, or t
  misc_feature (953)..(953): n is a, c, g, or t
  misc_feature (961)..(961): n is a, c, g, or t
cctattctcggcacaggaggtgaagggtttatctcagacttggcccatgactgcgttgaaggacaggagggagcggctgtggctgtggctggaactctgaacgccggtgcgggcggccaggccctttccctgggtggtgacgacgcgaggaccagagccctgtctgcccgagggaagggcgaggggacactccccgtggcgggggtgggatcccggtagccggggctcagtgaccgctgctgggccaccgcctgtggggacctgaccttcctggggaaacccatgggtcaaaggngccgagaaatccaagcaccaagtggccgctagggcaggacgggcgcgttcgcagtggagaagctgggtgtgtccgtgggaaaggaaagaaatggaagcagaggctcttcaggggcacctgggaacgcagcctacactcttcccaggcctcctccctccgtccactgtgccgcctgggtcctgggacagcctgagggccgcaggctcccatgcaaggcccgctgggggcctgcttgtctggggctgaatttggactttatggggctatggctttaatttcacaatgaccgataaccagtgaactgaagccaggacagcaccgtgagcaccaagtcagagaattttcacgagggaaccaatgaacaggaacagagtgtgaggctgccccagctgcatcctccgggaggcgccttcccaagggagtgcaaggctgcctgctgtggccaggccaccaaagcaccttcttcaccgccaggcatcttttgaggcacgcgaacatcagaggccccagccacgtgctctggaggagaagctgagagccccaggccacaggcagggcagcctctgagggccggctcagggagagtggccggagcttctggcctggggcaggtgacccgttagaaactgcatgtgttgctctggcaccagccacagcnagagattntctcctatcacacagggaccccgccaacgcact

SEQ ID NO: 629078 - DNA, 357 bp, Homo sapiens
  misc_feature (249)..(249): n is a, c, g, or t
  misc_feature (304)..(304): n is a, c, g, or t
  misc_feature (350)..(350): n is a, c, g, or t
accaacaatatcccagaactcaaatattatgataagacagttcgtggggccacagagaagtaaaaaatcaccaagaagacagtaagagaatcaaacttccatattcatgatatccttttccccagtgtgcctgacaccaagtgtgtggaaaatttccccccaactcacagtttctacagtggaaaaagtgagactgaggtgaacaaccagcttctccacaatcttgagttttctggtgagaaatctttncctgcctcaatgcacaagaagtgtttgagagtacccagaagggagatgtgccctngaggaaagccagagacaaagtggttgaggttagagtgcctgccttntgtctgg

SEQ ID NO: 629079 - DNA, 197 bp, Homo sapiens
ccccctccatatgtagaggctcagtctttgcagggaagcagctggaagatggccgactcttttctgatgacaacattcagaaggagtcgaacctgcacctgtgtcctgcgtatgagaggtggtttgcagatcttcgtgaatagcctgaccggcaagaccgtcatctctgtaggtttgcgcccatgtgacatcagttc

SEQ ID NO: 629080 - DNA, 504 bp, Homo sapiens
tcgccacggcaggtgtactccctcatctttaatcaagggtgtgtgattataaaatatatatctggcacacaactgtactcaatagattttcaggtatttctcttccctttcccctgtatcaaaacttacaacgaaattcattgagctagattaaaaatcttactcataaccatacttaagcctatattttagaaactaaaatccactcaccttgatatactctgtggaatctggctcaaactgggcaaagcagagattgaggacatcaacatgcctgtcctggctatacatagtctaaaaccacacagcagagttagcatcacatgagaacactgaagttcagcacctgtcctgatgtcatgacaggcctgcccacccacatactggccactctgtgctcctcaagaagcataaagaaagaacacaggctttgtaattgtcacacctagattcaaattccagctaagccaattatgagagaaccctagtacaacctgccggtgg

SEQ ID NO: 629081 - DNA, 379 bp, Homo sapiens
  misc_feature (19)..(19): n is a, c, g, or t
  misc_feature (172)..(172): n is a, c, g, or t
  misc_feature (359)..(359): n is a, c, g, or t
cggacaccctcctgggaanctgggatgataaagatgagcttacgcctgtggccccctggtggtctgaaccacaagccccccgatggtcccaggaaaagatgggaggaccccgagaccagacgaactctgtccgacccctctgctcacccacctgggacccaccagggtgcanctggactccagggtccagcccacaagctgcatctaggctctctgggagaggagggacctggagggccaggagtcccagactcacgcaccctgggcaacagggaaccgggaatcggggccttctgctcctgctggcctgggagactctgtggggtcagcactgtactccgttgctgttttttataaanacactcttggaaaaaaaaaa

SEQ ID NO: 629082 - DNA, 146 bp, Homo sapiens
acagagcgatccccgtctataccgtgtcaactggagtttttacaactcacgtgaatttaactggattggggagcggggtgatctataacactcgtttacgccggcttactattgacttggagttaataccccactattaaacttct

SEQ ID NO: 629083 - DNA, 268 bp, Homo sapiens
  misc_feature (45)..(45): n is a, c, g, or t
  misc_feature (79)..(79): n is a, c, g, or t
  misc_feature (259)..(259): n is a, c, g, or t
tttttatacaaaaactatgggcagcagtatcaaagttgacattanttgtagggcatttgaaatgtttgttttgctctantatttgtgctattgtttgtgccgtaggtgagctctgttttgttgttaattaaccatttttaaatggtcttgctgagaaactataataagaaatctgggccaggtgcagtggctcatgcctgtaatcccaacactttgggaggctgaggtgggcagatcacttgaggccaggtatttgagnccagccttg

SEQ ID NO: 629084 - DNA, 369 bp, Homo sapiens
  misc_feature (6)..(6): n is a, c, g, or t
agaacnttcgcctgcgcgcggagtttcgtctgtggcgcgaaggcggtgagcgccactacgcgatgttctcccaggacgacaagcgcacgccgatcctgatcgaagaatttcccatcgccagcctgccatcaaccagttgatgccgcagctcaaggccgcctgcaagccagcgccgccctgagccataagctgttccaggtggagttcctcaccaccctggccggcgacgcgatgatcaccctgtgctatcaccgcccgctggacgagcattggcacaccgccgcaaaccagctggcgactgacttgaatgtcagcatcatcggccgctccaagggtaagcgcgatgtgatcggccatgactacgtggtg

SEQ ID NO: 629085 - DNA, 858 bp, Homo sapiens
  misc_feature (6)..(6): n is a, c, g, or t
  misc_feature (9)..(9): n is a, c, g, or t
  misc_feature (25)..(25): n is a, c, g, or t
  misc_feature (44)..(44): n is a, c, g, or t
  misc_feature (47)..(48): n is a, c, g, or t
  misc_feature (54)..(54): n is a, c, g, or t
  misc_feature (68)..(68): n is a, c, g, or t
  misc_feature (90)..(90): n is a, c, g, or t
  misc_feature (98)..(98): n is a, c, g, or t
  misc_feature (100)..(100): n is a, c, g, or t
  misc_feature (105)..(106): n is a, c, g, or t
  misc_feature (115)..(115): n is a, c, g, or t
  misc_feature (144)..(144): n is a, c, g, or t
  misc_feature (160)..(160): n is a, c, g, or t
  misc_feature (171)..(171): n is a, c, g, or t
  misc_feature (204)..(204): n is a, c, g, or t
  misc_feature (215)..(215): n is a, c, g, or t
  misc_feature (222)..(222): n is a, c, g, or t
  misc_feature (226)..(226): n is a, c, g, or t
  misc_feature (228)..(229): n is a, c, g, or t
  misc_feature (239)..(239): n is a, c, g, or t
  misc_feature (272)..(272): n is a, c, g, or t
  misc_feature (282)..(282): n is a, c, g, or t
  misc_feature (289)..(289): n is a, c, g, or t
  misc_feature (295)..(295): n is a, c, g, or t
  misc_feature (310)..(310): n is a, c, g, or t
  misc_feature (320)..(320): n is a, c, g, or t
  misc_feature (385)..(385): n is a, c, g, or t
  misc_feature (401)..(401): n is a, c, g, or t
  misc_feature (411)..(411): n is a, c, g, or t
  misc_feature (428)..(428): n is a, c, g, or t
  misc_feature (451)..(451): n is a, c, g, or t
  misc_feature (454)..(455): n is a, c, g, or t
  misc_feature (472)..(472): n is a, c, g, or t
  misc_feature (475)..(475): n is a, c, g, or t
  misc_feature (477)..(477): n is a, c, g, or t
  misc_feature (518)..(518): n is a, c, g, or t
  misc_feature (521)..(521): n is a, c, g, or t
  misc_feature (523)..(523): n is a, c, g, or t
  misc_feature (528)..(528): n is a, c, g, or t
  misc_feature (530)..(530): n is a, c, g, or t
  misc_feature (532)..(532): n is a, c, g, or t
  misc_feature (536)..(536): n is a, c, g, or t
  misc_feature (541)..(541): n is a, c, g, or t
  misc_feature (543)..(543): n is a, c, g, or t
  misc_feature (548)..(548): n is a, c, g, or t
  misc_feature (558)..(558): n is a, c, g, or t
  misc_feature (665)..(666): n is a, c, g, or t
  misc_feature (852)..(852): n is a, c, g, or t
gcgganagngccggtcctcagcgcncagcaccgccgatcccggnaanncggagngcgcaccgcaggcnggcggccgaagctcgcgcatcnaagcaatnantcttnnaactgctcnttagagaagggaagatgagtgagtagagntcgaagtcaagcaagnccttggcctcnaagaaggaaaaggacggcactgagaagcggggnaggggcaggcngcgcaanagcntnnggtgagtaangggaaagagctggtagggagtaagaaggagaanagcgaagtgnaaaaacntaaganaactcggggaagaanaaagggaagnaaaaaaaagggtgatgaaaagacccggaaaaaaaaaaaaaataaaggaaggaaacaaaggggaanaaacaaaaaaatgganaaggaggaanaggagggaatctcgaangagtcataggaggaggagaagtnaannatgagtgaagaatgatnatnantggaggagaagcttccttatgggaatggaaagatttgatangangnaaaancnanagcnccttncncaggnccaccatcancaccgcctctggccgccacccccatcttccacctgtgccctcaccaccacactacacagcacaccagccgctgcagggctcccatgggctgagtggggagcagtttnnccctggcctcagttcccagctccccccgcccacccacgcatacacacatgccctcctggacaaggctaacatcccacttagccgcaccctgcacctgctgcgtccccactcccttggtggtggggacattgctctcttggcttttggtttgggggcgccctctctgctccttcactgttccctctngcttcc

SEQ ID NO: 629086 - DNA, 400 bp, Homo sapiens
  misc_feature (367)..(367): n is a, c, g, or t
  misc_feature (395)..(395): n is a, c, g, or t
atgggttttcacagtgctttcccatacaatgtctggaatctatagataacataacctgttaggtcaggggtcgatctttaactaccaggcccagggtgtggcgctgggctgtctgcctgtggatttcatttctgccttttagtttttacttctttctttggaggcagaaagtggggataagacaatatgaggggtggtctcttcccttattgcaatgctatgaaagcaatacacattcagtagaaaccgttcgaatgcccatacagccattctgttttttactcttactgcattattcaatagatggcatgaaatatttaagactttattatgaaaataggaccttgtattaggatggttttgcatnaacagtagggcttaatgttaaggagtgnctcag

SEQ ID NO: 629087 - DNA, 941 bp, Homo sapiens
tcgcactctgattcttccgaccgttccggcgtcgcgatttctctgcacggttcgctactggaatgaatgagatcgccgggctggtcattgaacaagtggtctccgagtcagtgatgcaagtgcatggttttggatggggagctgacgtcatccctcggaggctcgtgttttccttccatcggtgcgaggcgactccagacaccaggtcggtcgtggggggcttgggtcagaaggactcctacgtgtgggcgacgaggcctcagagcaatcgtggcgattcttgactcatgaagtaccccttcgattgagcatggcgatcagtcacacaacgggggactgattcatggtgaaagatctggcaacacgacttgctttctacaacggagcttggtgcgtggcccgggaggagctgactcgaggttgctttcgtgttgctgaggtcccccttgaaagcccaggggccgatacgagcaggatgatagtatggactctgattatgtttcgaggaacgtttcaagccaccccgggacatgtgcagtgtgaccatccatgatcgctgtagccggtcaccttctgactgcgctacgtagtgggcgcgacccaactggtcattgtgcattgggacctcgtggagatggggtcacctctgcacggtggcccaatgcttacgagtggcttagtcccctgctcgcccaagtctatcttgagtctggatctgttgtggcggggacctgaccgatttatctcatgaagatcctcaatgagcgatggcttccgctttcaggcacactgcgatccgtgaaatcgtgccgcgacgtcagggagatgtgtgcttggttgcctgacttggcgggagagtggcaccggcggtcatctactgtctggaggaaaagcttcgaagtgcccatggcaggccttgcctggcatgacgggccggtccg

SEQ ID NO: 629088 - DNA, 107 bp, Homo sapiens
taatcgagctcggcccgcttctgcttctgcgcaagaccctgcttcctgcttctcgcttcctgcttctgccgcttcctgcttctccttttttagacgctcatcacgat

SEQ ID NO: 629089 - DNA, 448 bp, Homo sapiens
tggtgaagccaggacaaagcccgtgtcacaacctgatgcggctcaggacaaagccacggtcacctcctgatggggccaggacaaaccccgtgtccacctcctgatgttgctcagggaaacacccgtgtacaccacctgatggggctcaggacaaaccccgtgtccacctcctattaatgcacaggacaaaacgagtgtccacctcctgcctggagctcagggaaaaccctgtgatcaccacctgatggggcacagggcaaaccgaatgtaccacctcctgatgcggctcaggacaaacgtggtagtcagctcctgatgggacacagggaaaaaccccgtgtacacctcctgatggggctcagcggcaaacccgatgtacacgctcctgatagcagtccaggggaaaccccgtgaccacctcctgacggcgcgacacgaaccgcacaca

SEQ ID NO: 629090 - DNA, 112 bp, Homo sapiens
tagtaaataggtaggtggaggcatcatatagatcactccaggtgatggagggatcttctactattaggactttacgcaacgaaacgaaggcatcacaaatcatgaaaattat

SEQ ID NO: 629091 - DNA, 527 bp, Homo sapiens
  misc_feature (93)..(93): n is a, c, g, or t
  misc_feature (157)..(157): n is a, c, g, or t
cggggaagagcctgaattggggtccctccgtgtgataaattgccacccttgagcattggtaggaacaagctgccaaacgaggaagttgtaccnttccaggagagcgcttctgcaggtgttcatgatgatgttgacttatattacgcagattatgtgntttactatctttatgtacgccttgtttctggtaaacggatataagtgaagaacaaactttgaacatacttaatgtatttttatagaactttgtaaacgaaggagattctgttttagagtctgtccttttttatatcttgaagaaatctatgtatgatgctataaataaatcctattatttttctcaggaatctggttaggaattgcaggcaatgagattttttgcggggcagggatgggaatgtttgttcataaataattagacattttctatagatatttgacattctgcgaaagcaacaagcaaactgaagaccaactcctatgagaaatattatgatgtttatgtaataaagacatgtaactgtctc

SEQ ID NO: 629092 - DNA, 633 bp, Homo sapiens
acgaggatcccggtgttcccttgtctggggtaaatacgatacaaaatgattcttttgaatcctgaatccataaattacacttttttttttcaaattcacaaaattcacaggggggcggacggtgtaataaccactatggggaaacatcccgtaaaccggccggtggccaggccaagggagtgacggaacgggtgacatcggtttgagcagtgcttgggtggtggctggtagaatgccacgcgtgtgcatacacttggtacatcaggggtgaagggagggttttctagatgatggggggagggtaaaatggggattttttggtggttcctttgtggaggggggggtgggggtatagtactcagcttcggccctaaaataacagtgtataaaaaccccgtgaagtatggggtgggtgtgtacgtgtgagtgtgtgtaggtatacgtcgggcaattaaggcttggtcttcgggaacttagtgaattcttttctcttttccctccagaagtatcggtcacaagattggtaaataagagctctacttagttggtctaccatgaacatgtggcagcaaaccttatgcatctaatccctacaaggttacggaacggctttcagacttggcaggttaagca

SEQ ID NO: 629093 - DNA, 544 bp, Homo sapiens
  misc_feature (79)..(79): n is a, c, g, or t
  misc_feature (116)..(116): n is a, c, g, or t
  misc_feature (128)..(128): n is a, c, g, or t
ggtgcaggccccgtatcccagtccttggaagcttagccagaaaatgcttaacccagaagcgagttgtagtgacccagtngcccattgcatccattttggcaacagtttaaattccngttctccaaaangaaaaaaaaaaagccaaaaaaattagcttgggcatggtggcacatgcctgtagtcccagctacttgggaggctgaggcaggagaatagcttgaacccaggaggtggaggttgcagtgagccaagatcatgccactgcactccagcctgggcgacagagcgagactccatcttaaaaaaaaaaaagtctggggctgggcgcggtggctcatgcctgtagtcccagcattttgggaggccgaggcgggtggatcacaaggtcaagagatcgagaccatcttggccagtggcgcgtgcctgtagtcccagctactcgggaggctgaggcaggagaatcgcttgaacccgcgaggtagaggttgcggtgagctgagatgctacagcactccagcccggcagcagagcgagactccatctc

SEQ ID NO: 629094 - DNA, 229 bp, Homo sapiens
  misc_feature (41)..(41): n is a, c, g, or t
  misc_feature (43)..(43): n is a, c, g, or t
  misc_feature (131)..(131): n is a, c, g, or t
  misc_feature (153)..(153): n is a, c, g, or t
  misc_feature (216)..(216): n is a, c, g, or t
agggaggcctcattgacaagtaggcccatctttggcgcaantntggacctgggaatgtctccacctcggattctgatctgatccttagggggtcccctggccccacggacccgactcagctttagacactncagccaagggtcctccggacanttcctgcagctctttctggaccttcaggcacccccaagcgtgcagctctgtcccagcctttantgtgtgtgagagg

SEQ ID NO: 629095 - DNA, 175 bp, Homo sapiens
agagagagagaaagagatctattgtttgggagaaagtacaggaaaaaaacaagagtctttatctagtaatccagagaactcttggatttgtccaagagcgtcaaggtggtacctcttaagagtctgcaagaaacacagtcctgctgggcttgaggtcccccctaaagcagataca

SEQ ID NO: 629096 - DNA, 98 bp, Homo sapiens
gcggccgcctactactactactgctcgaattcaagcttctaacgatgtacggggacatgcatttggccaaaataaacaaatgctggtctgccaaaaaa

SEQ ID NO: 629097 - DNA, 908 bp, Homo sapiens
  misc_feature (676)..(676): n is a, c, g, or t
ctcgtcacagcacctcggaacccagaggcccggctctgatggtgacccccctggtgaggaaggcgatggcccctgcgaggacgatggcccgcgcccgcctcgccccggcggcatccctgccgtcggcttgtggcttctgtgcacgctcggctccagggcacccaggccgggccaccggccgcgcccccatgggctgcccgcgggtagccgactgcctgaacagctttacctgccggggtgcctggcttcgtgctggacaccaagcgccctcggtcagcgagacggagctaccttcctgggagtcccccaccgtgcgccggggctgggactgcgtgctgcgcctggttgcaaccacccagaacggtgcgaacttggcgctagttggagcgttgcagaccgacgcgcgggggagggacgccattcgccgcctgcttcctcatcaaattgcctctacgagcagaacttcgtgtgcaagttcgcgcccagggaggggcttcatcaactacctcaacgaggggaagtgtaccgttcctacccgcagttgcggacccaagggccttggagggtctgggatcccaaggctgggcaaggccatagaacttgaaggtaaaaccccaaggaaccctggttggctcgaggatgttggagaccacaagattggccgcctacttggcgnggtgaccactggctgtcagcggtagagcagggaaggcccaaacaggtggactgtgtggggctcacggcaggccctacctggtccagctggacaggtggttagttcgacccccagaggggggcacgtcagtcactgtgcgtcaccaggcgcagggatatgctcgctccatggtgggcctccgggctttccccctgttttccccggcggattcaagtcctagcgggttgcccac

SEQ ID NO: 629098 - DNA, 106 bp, Homo sapiens
tatgtgtaactgggactacaggtcatgccaccacacccagctaatatttgtattttttttaactgcaatcacccccctatttaatacctgttgggtaccgatgacg

SEQ ID NO: 629099 - DNA, 1354 bp, Homo sapiens
  misc_feature (231)..(231): n is a, c, g, or t
  misc_feature (1354)..(1354): n is a, c, g, or t
gctcagcagaggacaatgagtcggagaccaggtggggaagacgagcccttcagagcctgctccatcgcggagaggtccagcaatgcccatgggaacgcgggtggagcacgcggaagactccggtgttcctggttccgtctacatgcatgctggtggcaggccgacgtagcgtttaggtcgcatggaagaccgcaataccatgaatcactctgtgtgggaatagtaaccatncgcttgtgacagtccgatcaccaatgattccagatcggttcaatcaggtgggttgttgtctacgcaattcagttgcttgtaccccgtgcttaggacgcttccaccagtgcgaacttgagcgtcggaggtttgacgagtacggtagagaggttagccgtaggagtgggtgcccggcttgggggacgttctaagcagtctcaggtactgcctggagcggttggctcatcgtagacctattccctatgcttcagagaggtcccgggctacgggtgacacgacatcgacgagctggacatgctggccccagtcgaaagaagcgatgatctgagcccaagaaggccctgtttccttggccggggagcctggttccctagggttgagagacttggtaaccagacacgctccatgctcaagcaacaagcaccctggtcgactttgcacaatctacttgccatggggaacattgcgaacagccaacagaggacttgggaccttaaaccaaggcttgccgaggcttgccaaaggggcttctcatagcgaagatggccttcgcaagcgctcctgtgccctgcggcctcgtggcgtcacttgactccccccttttactagatgtcgtgggcaaaacccgaagtgcccccctgaagtcccaggagattcctcggcgcgtttacacatagagaggtgaagattgcccttcctccccagagaattgcttgggtaggggtgggaaggtttcttaccaaaggggatgtcaccccatttgaaccccttcgtttgcacggcctctccaagggaaacccccttggggaaggcccaagcgaatgcaagctagcctttaacccttcggaagcgaaggcttttaaacggaatacgtccctttgggggcccaaggccaagggaaacgccccaaagggaaacccatgaagcctttgtgttcaccgttccctgggaaacgagggtgtgccgggaagatccttcaaagccaggggggaacgctggagccctttccagggggcacagggatggggcctcccaggttggggcatggaggggtccaggatgggggctcaagcgtaattaaagaaacgtggaaggccagcagacaaaacaaacgtccagcacn

SEQ ID NO: 629100 - DNA, 134 bp, Homo sapiens
tgccacacattctgtgataccagaacatatatccagattctgtggcgagatgatgatgaagtcttcttggccttatgattgtggagaaatgtgctgtgatctggctgataaggtatcgatggggtgatgaggtc

SEQ ID NO: 629101 - DNA, 967 bp, Homo sapiens
  misc_feature (428)..(428): n is a, c, g, or t
  misc_feature (492)..(492): n is a, c, g, or t
  misc_feature (509)..(509): n is a, c, g, or t
  misc_feature (525)..(525): n is a, c, g, or t
agcggttctctcttcctcgggcgcgtgcctacggagcgtggcgacgccgatcgtcctgtctcgcgcatcgatggctcgccctcagcagcgcgcttgcgtggagcctcaatgatcgcgcgaacagaagtagcaacgcaagcaaggttcactccgggcgaccaggtcagaccgcatatgctcgaaagatggaagcgctacagctgtgcggaagaccctagaggcattgactacagggcttggtagaaggatgcaggggcgcagatctgtgatgcctcaaggactcggtttatggaaggcataggagagagacagacacagagagcacagtgcgtgtccaagtgggcttaccgggaagtgtccctggtgccactgacgtgccacggaggcatggacagtgcctgcgtgactgtgcaactgagatcttactngtgcgcgagatcgcctgcacaagtgtttcctccaagaaaccgccaagaggccagtgcgtggaanagagtctgcacctaganctggcgcatgcagagntgcaccaagccccaatgaccagggctggcgtagtgaagaacagtgagtaggcagttcatgtggcagcgtgttcctggtttaacatgaagtgtcaacagactgcgtcatgcatgacaacaacagcacttcctctgagacgtttgagcaatcgggattaataaggggatccgtatggctccatggggtgggaccgaggtgagcgacaggctttaggtccgccgtatgatgacggggtaacttggagaacgtgggggcgttaaacagacgcggacatgacgcggggaatccggggggggagaaaatcggccaggtcgggacccaagataatctgcccacatggtggagacacccacacaccttggagagaagacaccccaatggggaaccccggcggcttctggccacccggaggcccaaacagcctgggtacagggggggaaac

SEQ ID NO: 629102 - DNA, 419 bp, Homo sapiens
acaactcaggggcgagctgctaaagacctaccagggtaagatgctcaacacactcctccttgctggagcagctgagcgagcggcttagagtggttgtcccggctggcaaacctcacgcaaggcgaagaccagtactatctgcgggtcaccacggtggcttcccacacttctgactcggacgttccttccggtgtcactgaggtggtcgtgaagctctttgactctgatcccatcactgtgacggtccctgtagaagtctccaggaagaaccctaaatttatggagaccgtggcggagaaagcgctgcaggaataccgcaaaaagcaccgtgaggagtgagatgtggatgttgcttttgcacctacgggggcatctgagtccagctccccccaagatgagctgcagctcgcccctgagtt

SEQ ID NO: 629103 - DNA, 215 bp, Homo sapiens
gcggtgtggctgggaaaacccctgtgtggaggcacttctcgcttgtattgtgctttgctttatttacgtctggccctcattgcgtgtttttacaaaatcaggttagtgacaatcctatgacaagcaagtctcttggactcatttttccaacagcatgagctcacttgggctcttcgggcccacttccggtaattcatgcaaaatttaaacctttg

SEQ ID NO: 629104 - DNA, 174 bp, Homo sapiens
tatatgtttatggaggtaagatgctgagttggttccatacacatatgtgaagtgattaaatcagctaagttaacatattaatcccctcaaatacataccacttcttgtggagagaatatttaaaatcctttttttttttttgggaaaggaagcctgggggtgtggccaaggcgg

SEQ ID NO: 629105 - DNA, 461 bp, Homo sapiens
  misc_feature (2)..(2): n is a, c, g, or t
  misc_feature (13)..(13): n is a, c, g, or t
  misc_feature (390)..(390): n is a, c, g, or t
  misc_feature (404)..(404): n is a, c, g, or t
  misc_feature (408)..(408): n is a, c, g, or t
  misc_feature (430)..(430): n is a, c, g, or t
  misc_feature (449)..(449): n is a, c, g, or t
  misc_feature (454)..(454): n is a, c, g, or t
anttcggcacagngaaagtttacagcaactgtatagtgagtacagtcagattatattcctgttcctcagatttaagaatggggtcacattatagagcttctgtttgcaatgacatactcattctgccacagtcatcttctagaagctttattttcctgggatgtttgaaaacccaaaacacttatattgcagttgagtattgactctgcttcccaaattaatcccagatgtttggggatcacactagacaaaggcagttcaagtcactgagtaggagtaaaacctttgctggattcccttgcaggaagtgttaggaatccagtgatctttaagatcttttgcagctgtttgtgggtgggctcatgcctgttaatcctaggcactttaggngacctagggggggntccnttgagggccgggggttttgagnaccagccgggggcaacctnggcgnaacttgg

SEQ ID NO: 629106 - DNA, 661 bp, Homo sapiens
  misc_feature (491)..(491): n is a, c, g, or t
  misc_feature (587)..(587): n is a, c, g, or t
  misc_feature (645)..(645): n is a, c, g, or t
cggcacgagcagaagacaagagccaatattcccagaaacggagtggtcagatttccttaaaaaatgtgcagagattgtgtttctggagtcgagggctcaagttaaaagcaaacaaaataccacaaaatatataacaatttgtttttttggaggatttgcgattctgaatttggatccagttctcttaaatacacattgaacctcataggacatggctcttcaagtagaaatgtattaatagaagcctcatttatagctgttcaaagaattggagtgatcagtgctttacttattacttctgactaaactctgcaggtgcagcttggcaatcaacagagatccaaagtagaaagacagtttcatgaaaataacctgacctctccgactggttgactttgtgggaataaagactggtttatgctgatgcatgtttttagcaatgcctttcttcgtaccttggacatagttattatgcctgggggaagagagtnccacgaagctgggatgccatgagccaccccccttgctgggcaccaggttgatccctggcctgctctgggttgctgaatgcgatccttcaagcactngtggagatgctgtaattttcttgggcaatgtgagtttaacttggagaggttatgattngaggccctgcttgctt

SEQ ID NO: 629107 - DNA, 642 bp, Homo sapiens
aggattacaaagctcatagtccccccaaagcttcttctgctgtactttagcaaagtcttagcatacaaaatcaatgtgcaaaaattactagcagtcctatacatcaagtcaagcagagagtcaaatgaagaacacaatcccattcataattgctacacacagaaaaaataagatacctaggaatacagctaaccagggaggtgaaagatctctaggagatctctagaagaattacaaaacactgctcaaagaaatcagagaagacacaaacaaatggaaaaacatgtcatgctcatggataggaagaattaatgtcattaaaatggctatactgcccaaagtaatttacaaatgcaagttatccctattaaattaccaagggcattcctcacagaactagagcaaactatttcaaaattcatatggaaccaaaaaaagagccctaatagccaagcaatcctcagcaaaaagaacgaagctggaggcatcatgttacccaacttcaaaccatactacagggctacagtaaccaaaacagcatgatactgatacaaaaacagctcatcatttggagctatgtatcttcaatacccagatttctcagagtttaaatatggagaggcattgaatttatggaagcct

SEQ ID NO: 629108 - DNA, 137 bp, Homo sapiens
atcaatactatccttaacatctctcaaatatacccactaattcttccctcatctactggtgccctagacctaaacctacttatcacatctccctagacaacagtagtagacctcattcacatggagcaagtatttat

SEQ ID NO: 629109 - DNA, 329 bp, Homo sapiens
tgcacacgcttgcgctctttcactcggttggttcctcctgttgcctgtttctcttcctgccgcagcctcagtttcttctccaagtcttcgtcgtctagaagaagactaaccacctctattgggtttcaaggtatcttggtttgaagttcaccacttgaacatcacatcctgctgaatctcactcttctccttgtgctcttttgcaggaatgcgttcttcaatggtgccgtttcaccagcatgcagccggtaccaccagtaaccttgctgttgtcttgcccgtaagctggtgtgccatttggatcccaacccgtgcaagtttgcccaaat

SEQ ID NO: 629110 - DNA, 1373 bp, Homo sapiens
  misc_feature (701)..(701): n is a, c, g, or t
tgcaggcagtggtgaggagcgcagcgtggcggctgagcgggagtgcactggcctccagagcccgtgtgccaaggcggtgcctcgcgggcggcgacgtgagcctgggatctggtgcctcagctgttctgggtctggatgactgatggccatggtctccagctgggtgtggactgtgcccaccatgctgcctgaatggccaatgactgccatgtgtcctggtgtgactgtgacaatgcagtgacatgacatggtccggtgtgacggcgaggacagagtgaggctgcgtcctggccttcctgaacaccttaggctggtgtgggctgcggcaagaagcgggtctgtttctttacttcctccacggagtcggcacactatggctgccctctgggctcccagaacccacaacatgaaagaaatggtgctacccagctcaagcctgggcctttgaatccggacacaaaaccctctagcttggaaatgaatatgctgcactttacaaccactgcactacctgactcaggaatcggctctcgaaggtgaagcgagaggaaccagacctcatcagcccaacatcaaagacaccatcggaacagcagcgcccgcagcacccaccccgcaccggcgactccatcttcacggccacccctgcggcggacggttgaccaccagccaccacatcatcccaagagctgagctcctcnagcgggatgacgccgtccccaccacgctccctcttcttctttattcatcctatctgtctctttgtttctgagctttcctgtcttaccttttttctgagagattcaaagccgtccacgacatctgtatatcccccggtcccttctgaatttaacttggcactaagtcatttgcacatggctggacgtgtggagacggccttgagtctcggatgcgaggtgtgcgtgagatgtgagaccaccttggccagtgcctgacgcagggcccggacgaacctaccatactgggccgggtgactgggcgccggctgtgtgacacgaggacatcaccctgacctcgactagtctggaagctccgaacgacatcacggagcagccatacaagcgattccataacgccccatctcgactcatgatgacccgtaccacaacaagggacttcaggcagcgaacgcccctgggaccgtcaatccatcgacatacaacgcagcctgggtacccaaggcgacacaacaaacaaaacagaagacagaggggagcaggagcgcagcaacaaacaaaagaagtccccacaaaagggacgaccgacaagagacacacacgcagaaaacgcccgcgaataacaatggcaacaagaagggggcaccaaaacagcgcgcgccgcgcaaatgccag

SEQ ID NO: 629111 - DNA, 183 bp, Homo sapiens
agattgagaaactagagacaggaacaggaagtacgagtatattataaagggttaagtaaaacaagatatgcacttggaaaatcattgtcttttagatagtgcttgtgctttttgtttgtttggctggaatagagacagggacttgctctgttaccctggctggagtgcaatggagcaatttca

SEQ ID NO: 629112 - DNA, 1023 bp, Homo sapiens
  misc_feature (351)..(351): n is a, c, g, or t
agtgacagggatcattgtgcatattcaccaatagttgaaatgaaggaaaaaatgttagagggcagccagagagaaaggtcgggttacccacaaagggaagcccatcagactaacagcggatctctcggcagaaactctacaagccagaagagagtgggggacggtattcaacattcttaaagaaaagaattttcaacccagaatttcatatccagcccaacatcaaagacaccatcggaacagcagcgcccgcagcacccaccccgcaccggcgactccatcttcacggccacccctgcggcggacggttgaccaccagccaccacatcatcccaagagctgagctcctcnagcgggatgacgccgtccccaccacgctccctcttcttctttattcatcctatctgtctctttgtttctgagctttcctgtcttaccttttttctgagagattcaaagccgtccacgacatctgtatatcccccggtcccttctgaatttaacttggcactaagtcatttgcacatggctggacgtgtggagacggccttgagtctcggatgcgaggtgtgcgtgagatgtgagaccaccttggccagtgcctgacgcagggcccggacgaacctaccatactgggccgggtgactgggcgccggctgtgtgacacgaggacatcaccctgacctcgactagtctggaagctccgaacgacatcacggagcagccatacaagcgattccataacgccccatctcgactcatgatgacccgtaccacaacaagggacttcaggcagcgaacgcccctgggaccgtcaatccatcgacatacaacgcagcctgggtacccaaggcgacacaacaaacaaaacagaagacagaggggagcaggagcgcagcaacaaacaaaagaagtccccacaaaagggacgaccgacaagagacacacacgcagaaaacgcccgcgaataacaatggcaacaagaagggggcaccaaaacagcgcgcgccgcgcaaatgccag

SEQ ID NO: 629113 - DNA, 983 bp, Homo sapiens
  misc_feature (311)..(311): n is a, c, g, or t
cggttcggtatgggtgctgcgggcgctgctgttccgatggtgtctttgatgcttgggctgatgaggtctggtccctctagcttggaaatgaatatgctgcactttacaaccactgcactacctgactcaggaatcggctctcgaaggtgaagcgagaggaaccagacctcatcagcccaacatcaaagacaccatcggaacagcagcgcccgcagcacccaccccgcaccggcgactccatcttcacggccacccctgcggcggacggttgaccaccagccaccacatcatcccaagagctgagctcctcnagcgggatgacgccgtccccaccacgctccctcttcttctttattcatcctatctgtctctttgtttctgagctttcctgtcttaccttttttctgagagattcaaagccgtccacgacatctgtatatcccccggtcccttctgaatttaacttggcactaagtcatttgcacatggctggacgtgtggagacggccttgagtctcggatgcgaggtgtgcgtgagatgtgagaccaccttggccagtgcctgacgcagggcccggacgaacctaccatactgggccgggtgactgggcgccggctgtgtgacacgaggacatcaccctgacctcgactagtctggaagctccgaacgacatcacggagcagccatacaagcgattccataacgccccatctcgactcatgatgacccgtaccacaacaagggacttcaggcagcgaacgcccctgggaccgtcaatccatcgacatacaacgcagcctgggtacccaaggcgacacaacaaacaaaacagaagacagaggggagcaggagcgcagcaacaaacaaaagaagtccccacaaaagggacgaccgacaagagacacacacgcagaaaacgcccgcgaataacaatggcaacaagaagggggcaccaaaacagcgcgcgccgcgcaaatgccag

SEQ ID NO: 629114 - DNA, 1096 bp, Homo sapiens
cgaaccgccgagggagggagggaagcgttttttagaggacgttgggtgtccaaaacaaatttttgaacatgcagtctcaccctgacagcaagtgcattgaaaataccaaaagcctcttcctttcagaagccaggatgttggccactgaatattggagaagaaacttaatccagaatagcaggtacacagagctcctaactgggcaacaagaagaatactgacttggagactggggaaccgtaacggaaagggagtagagaaagaactgtttttttttaacagaaggagagagaacgctgatgaggggtgtcggtggagtttacaatctatttatacatgcagccgcggctggggagttgctgaggaaatcgagaagtataagcgcggctggtagcaagacgccagcccacgctatgtacccactaacaaatcaactgtgccgtatgtgacacgtcactcaccacacacctcccagccacgaaaagacgtatggtgtacatcatatagtgtattggatatgttccccaacgtcacagttgacggtatagtcaggacccgtcatattactatgagatatcactagagtcagataaattatccaacgtttgataacaatcagtctaactttgatactatttaccaccctactttcgttgcccgcggagcatatgacatacatactatagtaacacaatagttcgacttccatcaatgagacagagcaggaggggcacgttcagtctgaataccgtccacccaccacacacaatgatatgcgacggacacctgggttgtcaccccacgtgctcgttgtgtgtcgtctctgtgctcgcgaacacgtcgcccagcacccatgagagttatggcggagccagattgggaacgcagatcgacggccgatatgattgcctgaggttttgcaatcctctgctccctcgcagtgtgtcaccaccacatcttcacactccaatgcatatcttatatgatcaccaccacacttttttccaattagtatcgcacagcaccgtaagagattcgcatcgacagtctacaccaacactctcaccactatgtattgtaaccacacaacccgcgt

SEQ ID NO: 629115 - DNA, 332 bp, Homo sapiens
cgtctctacaggatcccggttgcgccatgtttcccccacagcctgcaatggtcaggcacagtcaggtcccactatggcctgcccaggtccatgtcgtcacagctctgtgctgagtccttcgagccaggctggcctggttgctcgtccagctgtccgtatgctgctgtcaccatcccttctgtctacagcgctcttgccctgatgcctagtgcgctagttgctgcgcctccttgtgttcgcatgttttatttcatcttttgagacctccctgtccattgcacttatatactgggttctgccccgtggtgctatacatggtctacttagtcttc

SEQ ID NO: 629116 - DNA, 892 bp, Homo sapiens
cccgaactgagacgaaaccggtctctgagcaccccttatccgcagacgccccgtggtggcagcccgggccactgtccccgaagatacccggccgaggtcacacccctcccggagctcccgttccgtctcccgaatgccccgtccgacaagggacaagagttccgggctccccacaccaagagtaagtgcccggcctgcaaaacggggaacggggcgggaacataagcaaaggcgggtccacaaaaacacctgcggagataatggaaaagcttgtcctttggaacaacaacccgcccctcggttttcccgcgacgcagccaaagtcgcctaccaaggcgaggcccgggtgtaccacgggttggccgcaccacaagggggcaaagcttatatcccccgggccccgataatgctactccgtgcacccccccccacaagatggggcgggggagactagatatctgcgcccaaaaagagcgccaaaggcgctaatggataggaaacaacccttgtctccctctcggcccaccagaggccgccaccactcccgccccaggggcaggccaagggaacaccccacttctcaaaagaggggccaccccgagaggccagttccaacacaggcggccagcagcacaaacaaagcgctcctcgctcgggaagccccccgggaacggttgatcgccgacgaccactgtttaggcgcacacacaccacacaggtgttgacacacggcccacgagagaccacccgagctgggcagcaaaacccaccgctgaggctgtgcaggcggcccccggagaccctgaggaccctccacttcggggataaacccccttttctgcccccaattttttatggggaaaaaaaaaaacccccaaatagggggcaaaaa

SEQ ID NO: 629117 - DNA, 612 bp, Homo sapiens
  misc_feature (29)..(29): n is a, c, g, or t
  misc_feature (38)..(38): n is a, c, g, or t
  misc_feature (57)..(57): n is a, c, g, or t
  misc_feature (148)..(148): n is a, c, g, or t
  misc_feature (188)..(188): n is a, c, g, or t
ttgaacccctcttgtcccctttccgcttnttagcagcntcacttggcaaatttaccnggggacattggcggatgtgcactgctactggacttctactatggagatgtcatctgggtgattctcagttttggaggtgggtggacttttngggagttaccgcagcagctgtcatctttttgaaacggganttcaaccacacagccaccattcgcaaggtggagggaaacttcaacccgtttgcctctccccaaaagaaccgacaatcagatgaaaacaaccttaacaggaccctgggggttccgagttcgactcgatcagcaaaaatacatgggctcctgttcctgagcaaagcgagcaagatcaggatagactgtcacagagctctgtaaatctgtcccccagcagtcccgcaaacaacttatcagtagtgacttacagtaaggggctccacgggccttacccttcggccagtcttaaacgggtgtcagcaagaagaaaaactaacaaaagacagaaggcctgactttggggggagagggcaaggggttcctctggattgcagaccacatcgcacggacccctggctcagacccccacctaccccccaatcac

SEQ ID NO: 629118 - DNA, 198 bp, Homo sapiens
catgccattgcatgcgtcagtgcttccttcctttgtattgctgaagtaatatccaatgtgtacccaacaacattgtatcagttcatcagctgctgaacatggggatgttgcattggatattatgaacaatgattctgtgggcatgtatgtgtgcataataacctcactgagaattcagtggactagtagtagtagtca

SEQ ID NO: 629119 - DNA, 80 bp, Homo sapiens
ctcttgtccaaatatcttcaccttccaagtctcaccggcggagcccacgaaccctgggggagggaaccaccgataaactc

SEQ ID NO: 629120 - DNA, 424 bp, Homo sapiens
accaggccagggtgtgacccattgctctgccatcaactctcaatgcaactggggggtgcaacttcatctctctgtgcctgtttcctcctccagaaaaacagggtttcctattgaccctcaagaattgttgcaagggctcattgagagaacaatttggccgggtatgatggctcatgcctataatcccagcactttgggaggctgaggcaggtggatcacctgaggccaggagttcgagaccagcctgaccaacacggggaaaccacatctctaccaaaaaatacaaaattagctggatgtagtagtgcacacctgtaatcctggctacttggaaggctgaggcagaattccttgaacccaggaggcagaggttgcagtgagctgagatcacaccactgcactccagcctgggcaacaagagcaa

SEQ ID NO: 629121 - DNA, 347 bp, Homo sapiens
catcccatagatataataatatgtcagctgggcgtggtggctcacagcactttgggaggcagaggcgggcggattacctgaggtcaggagtttgagaccaccctgaccaacaaggagaaaccccgtctctactaaaaaaacacacacacacacaattagccagggttggcggtgcatgactgtaatcctagctactcaggagactaagccaggagaatcacttgaacccgggaggtggaggctgcagtgagctgagattgctccattggactccagcctgggcaacaagagcaaaactctgtctcaaaaaccaaagaccataagaaggctcaagaaacaaaacatgt

SEQ ID NO: 629122 - DNA, 158 bp, Homo sapiens
tctgatgtcccaggctactcccgtaccccagacctggcccatatggagtagaagaaggaggggaattggcatggccaagcgagtggctacagtgaagcactgtggggtgctgggagcgcaacatgcacaataagcccctttagccaaaatcccaggat

SEQ ID NO: 629123 - DNA, 414 bp, Homo sapiens
agtaggatggctataatactatatatattttaaaatagaaaggaaaattacaagtgttggcgaggattgtggagaaattgaaacccttacacattgctgttgggaatgtaaaatggcgcggccactgtggaaagcagttcggcagttcctcaaaaggttaggcgtacagttatggtatgatccagcaattccacttctagttatatacctaaggtcacacaaaaacttgtacaccagtattcagagcagcactattcacaatagcccaaaggtagaaatacccaaatgtgcatcaaatgataaatggataaatagaatgtagtatatcctacagtgagaattgttcagccaaaaaaaggcgtgagatatcagtacctgctataacatggatgaaccttgaaaacattatgttaa

SEQ ID NO: 629124 - DNA, 366 bp, Homo sapiens
cggggaggctggacaggaagattgagttcagcttacctgacttagagggtcgaacgcacatctttaagattcacgctcgctcaatgagtgtggaaagagacattcgatttgagctgttggcccgcctgtgtccaaacagtactggagcggagattagaagtgtttgcacagaagctggtatgtttgcaatccgagcacggagaaaaattgctacagagaaggacttcttagaagctgtaaataaggtcatcaagtcttacgccaaattcagcgctactccccgctacatgacatacaattgagccccagggctctgagtgaaagaacttcctgtgcttttgtaacttgttgccaccgcacaaaaat

SEQ ID NO: 629125 - DNA, 487 bp, Homo sapiens
  misc_feature (325)..(325): n is a, c, g, or t
cacgaggactgttctcttgcccagcctggagtgcaatggtgtcatcttggctcactgcaacctctgcgtcctaggttcaagcgattctcctgcctcagcctcccgagcccctgggattaaaggcgcccgccaccacgcccagctaatttttgtatttttttttttttgaaatggagtttcactcttgtggaatgtgatggcacgatttcggctcccacaacctccacttcccaagttcaagtgattctcctgcctcagcctcccgtgtagctgggattacaggcacgtgccaccacacccagctaatattttgtatttttagtanagatggggtttcaccatgttggtcaggctggtcttgaactcccgagctcaggtgatccacccgcctcggcctcccaaagtgctatgattactggtgtgagccactgcgcccgaccttttttgttttttttttttttttgagacagagtcacgctctgtctca

SEQ ID NO: 629126 - DNA, 161 bp, Homo sapiens
tgaggatttccgactagtacaagcatactggatggttgcttcatctatgtggcgggcgcgcattgcgtctgggcgctttaatacccaggtgggactgccgacaagcgctacttcattggactggcagtccggctgcgacgggtgtggtagccggtattgtc

SEQ ID NO: 629127 - DNA, 420 bp, Homo sapiens
  misc_feature (26)..(26): n is a, c, g, or t
  misc_feature (50)..(50): n is a, c, g, or t
  misc_feature (152)..(152): n is a, c, g, or t
  misc_feature (187)..(187): n is a, c, g, or t
  misc_feature (190)..(190): n is a, c, g, or t
  misc_feature (222)..(222): n is a, c, g, or t
  misc_feature (384)..(384): n is a, c, g, or t
gtcgtccttctccctccctgaaggcngcctcgcttgcccagtgtgtcggncgccgcgaactagagtccactgacttttccgccaccatgttgcccgcctcactgcttcgtcaccgggcctgcgcgcctgatgcttcaggcgctgtacatacncgaggccgccgctgcaccatgcccccgccgcaggnccnggacagatgtcattcacctttgcctccccgangcaggtgttctttgacagtgccaacgtcaagcaagtggacgtgcctacgctgactggagcctttggatcttggcatcccatgtccccacactacaggtcctacggctgggctggtagtggttcacacaagaagactggaccacgactaagtactttgtgaanagcggctccgtcactgtgaatgccgactcctctgtg

SEQ ID NO: 629128 - DNA, 139 bp, Homo sapiens
atggacatagacagggacttcactgaggagtgacctttggcacacgactacgggaggctgacttgggacagctgttgggtgagacggtggggtacgatgaccacacgaccctgaacctgtttacccgtttactccctga

SEQ ID NO: 629129 - DNA, 1303 bp, Homo sapiens
  misc_feature (608)..(608): n is a, c, g, or t
  misc_feature (866)..(866): n is a, c, g, or t
agcggaattcgggggcgggtttgaagacgcgtcgttgggtttcggaggccgtggaaacatccgtatgatggttagagctgccgggctggcaggaatcgttctgtcacgtggggccgcgcggacagatcaagggaggcgccggcctgttagcgatgtgtgtccatggagttgtcaaatcgtgcattaccgctaggtagagccgagtctgctagcaggcaatcccggtgccttgcagaggctcgtatgcactatgtaacgtcgaccggtgcacgactcatcctggaggggtacctgtggtcaccatggtaagtaaaacctgattgcactgagggacacttcttgtctgcactgtgtgaaagcttgactgtctatcgcgaagacgtcctagtgcacgagcgtggtcagatctcacttcgagctcatgcagagtcgatcgagtgagattgacctgattcagctgctgttagcatgacatcgggcctcgcatgaatcgtccgtgggtgctatgctttttctcgcacgttctcgtgttctgcgtgtaactggttttgagtagaattcgacgtttacagattgggcatgggttctctatgcgaggcgaactcttnctatactcaacgataggggttgaaactgaattcccccattacttacttggtttaccccgcaggcgttctgtctgtacctgtcggttccgtcaaggttgtgccgtgggttttgcctaatgagcttcgtcatctacgctagtattggcgcaaaagcaaatctacaatgcacagttatcatcgggaagtcatatctagcccgtgaagtatattcccctttaacaaaaaggaattgaactccttacctggggtcccttttgngtaggtcgcaaggacatagtcccctcacattggttttcaagtccagtatcctttggtttggtttccttttgtggcctcttaatttcaagtccacttggaatgaagatgggcttgtaattacttagattcacagcgtggatagagtttttggcgaaaccatatggcggtagataaataacttagcgaattcaaacgcaagaatcggtaaataccgcgtgtccccggggagaggaaaatcagcgcttgtgtaggttaaccccgtgaggcggttttttgataacagccaaacctttcgcgtacaagttaacgggtttttgggagcaaaatcgcattatagggagaaactggggcccgtggaaaaccacttgcccttgaaacaataggggataccacgcaaacactacctttaaatttaaccctgagccgttgtaaagtaa

SEQ ID NO: 629130 - DNA, 823 bp, Homo sapiens
  misc_feature (570)..(570): n is a, c, g, or t
ctgtaacttccagagatattgccgccagtgtgggaatttatatctcccttcatagcttttagtgcggacattcacgaattcccaccctttagggtgatgctacttgagggagttccttgttcgctggttgaaagattgccttaatgcttgctgtccctgcggttctcttaaacggctcttcgagtctctcctacaggatcttgggattgtcaggtcaacgtgatttgcgtagtacttttcccctctagttgatctttgggaagagtaggtggattgctcataggtcccgtcaaagtctcctcaggaggaaacatgctgttgcccagcttgctgcatgttcccagctccggtcagctgacatggagtgtgcatgcccctagccatagcctctcccatagttcaacttgcattctttaacagggccactccacagggtcacgcagtggccatcacttacagtccgggtggagcaggcgcgggccgaacccgggaggagagtgtcggggatccgcgaaggagcctcctggggatggggcgggggatggacaaagcgctgcccccggctggacncgctctggctgcagcccggctggcatccggagctgggaacagcagcccgcggggtgcccgggtcagggctcaaccctagcgggtctctggcgaggccgggggcgcagcccgcggggcgccactcaggccgtccagctgccgcgcggtccagcgctgacccgagcccgggaggcagctgcgctctaaggtttgcgctcctgtttgcgaggtgtcttcatataacaaatgcgagcaataacaaacatccatagaa

SEQ ID NO: 629131 - DNA, 720 bp, Homo sapiens
ccaggtctactatgtggagatgaccgtaggcagccccccacagacgctcaacatcctggtggacacgggcagtagtaactttgcagtgggggctgccccacaccctttcctgcatcgctactaccagaggcagctgtccagcacatatcgagacctccgaaagggtgtgtatgtgccctacacccaggcaagtgggagggggaactgggcaccgacctggtgagcatccctcatggccccaacgtcactgtgcgtgccaacattgctgccatcactgaatcggacaagttcttcatcaatggttccaactgggagggcatcctagggctggcctatgctgagattgccaggcccgacgactctttggagcccttctttgactccctggtgaagcagacccacattcccaacatcttttccctgcagctctgtggcgctggcttccccctcaaccagaccgaggcactggcctcggtgggagggagcatgatcattggtggtatcgaccactcgctatacacgggcagtctctggtacacacccatccggcgggagtggtattatgaagtgatcattgtacgtgtggaaatcaatggtcaagatctcaagatggactgcaaggagtacaactacgacaagagcattgtggacagtgggaccaccaacttcgttgcccaagaaagtatttgaagcttgccgtcaagtccatcagcagctctc

SEQ ID NO: 629132 - DNA, 573 bp, Homo sapiens
  misc_feature (320)..(320): n is a, c, g, or t
gagcggcctgggagcccgcacccgtctctggtgccaggcgttgtcgtggggtcccaagagagcggggtggggaaggtgaagggagcgcggctggaaaaatggggattagggtggcggaacaggcacttgtcaggagtgaagagacagcggagagggtactgggctgaattctttcgtgccgagtcaggtccctccggttcccaactcacccggggtggagcaggcgcgggccgaacccgggaggagagtgtcggggatccgcgaaggagcctcctggggatggggcgggggatggacaaagcgctgcccccggctggacncgctctggctgcagcccggctggcatccggagctgggaacagcagcccgcggggtgcccgggtcagggctcaaccctagcgggtctctggcgaggccgggggcgcagcccgcggggcgccactcaggccgtccagctgccgcgcggtccagcgctgacccgagcccgggaggcagctgcgctctaaggtttgcgctcctgtttgcgaggtgtcttcatataacaaatgcgagcaataacaaacatccatagaa

SEQ ID NO: 629133 - DNA, 1033 bp, Homo sapiens
aatgtgcctagtaaaatcgcaagtgtgtgtatcaatggcttactaatgacttttcctgccgtgctggtacaacggtgctgcatgagatgcactctagattggagccttcacatcatagatattatgtgcttcagtgttagtaggtcatctagagacgctcggttatagtggaggtcattagccttcaggacgtaatatgagtattcaacagggtgtcacctactctataatctcatgcctcttggtacctctagcctcaagcttgatgagcagtaccgcacaacgtgttgaccgtgttgtcatctacatcaaataatcaacaggaacattgggaagagcgttattatccataataaatgcattagagccggctgcagcataggggtactataagtgttcatgctctcgtaagaacatctatgtagtacaaccttgatagtggctacaacccaggcacaacttgtctgccgtacataaatgcagtgtgtctatacctagtcggttataatctgactacgggtactctgcggcctttttgtggaagagaagtcgttcgtatccaactcagtgatttaccgcaagtatagtaattaggggtacgtattatgagcatggcggatcctcacgtacacctcgtaatagacgtggtgacgctcgcggtaggaagtccgaaagatgtgctcctgcctagtaaacggcatttatattgctttgagcaactcgttaatgcttacccatcaatctacttgaccttctcttgaatcacgtcagtacagtgcaatgtagtgcgagcgccatgcgaagctaggatgtagaagatagcgcagaagtaggtgaaccacatgggctcatggtgggtgactccgactgtacatcctcttgggatggtccgtcctggtgggaccttgggtccacactttcttccatagtacacctaggcagagtgtttccatgctaatgggttaaagaggtcatcgagtttgttccccacaattatcttgtatgaaaaccccctgcaataaaaccttgcgaa

SEQ ID NO: 629134 - DNA, 162 bp, Homo sapiens
aaaggccttgcatggtctaacaattgcccctgcgttactgtcacttttgggttgcaaacaggaagatattgatagcggcacagtagggttgataaatacccccaaagggtgctggtgacccagcgagcgcgatgcacgggttgccaccgctgtgaaatctct

SEQ ID NO: 629135 - DNA, 388 bp, Homo sapiens
  misc_feature (30)..(30): n is a, c, g, or t
ttggatcccacaaagcaatgattctaatancaaaaaataagaaaggaaagtgaagggatgtgtgtatggcccaggggcctgggagggtggggtgggggacagcctgtatccacaagccatccccagttcagtaacaagatggggctcgctgtctccccacaccccgtcagtgtctgcccagcacggtggagccacactgttcaacactgaaatatgtatcctcagtcccatttggtttcttctgaaagagacagtagaacatgctaacgttttagtaccagagaggagggagtccttgcacccaatcttgagcatcccactgcttaagcaggtgccaagccactcaggtgtgtcctgcagcaattagcttggcattacagtaacactt

SEQ ID NO: 629136 - DNA, 226 bp, Homo sapiens
gcttacccatcagcatacagggatcacttagaggccttgggcagcaactgggtggggaagctgacgaacttaagggcttcggtattggcaccagctgctaagcacattggacatgctggcaaaggagtaccggtacatgggtgccccattccggggcttgcttgccgagaacacaggagaggccaggcacaatcagtgccagcactcggttcattagcaccaggaa

SEQ ID NO: 629137 - DNA, 852 bp, Homo sapiens
  misc_feature (43)..(43): n is a, c, g, or t
  misc_feature (49)..(50): n is a, c, g, or t
  misc_feature (61)..(61): n is a, c, g, or t
  misc_feature (65)..(65): n is a, c, g, or t
  misc_feature (71)..(71): n is a, c, g, or t
  misc_feature (86)..(86): n is a, c, g, or t
  misc_feature (96)..(96): n is a, c, g, or t
  misc_feature (145)..(145): n is a, c, g, or t
  misc_feature (155)..(155): n is a, c, g, or t
cgaagaaaaaaaaaaaacagctaaacacttaaaaaaaaataanggaaanncctttatggtncacnccggancaagttaaaggggcngaacccacgngccgggggagaaaggccacctactcgttacgggacagcgctgcgcgganccacgcggcnggcagagcgcaacccccacagggcaccgcagacacgaccaagcaggccagccgacaaaagcaaggaaccaaacaaaaaacagaaagacacgacaggaagaccgacgacgcagaagcgacccagagactttttttttcaccaagacccaacccccaaagccaggagcgaggggactaacagcgcaccccctccaccagggccgacggaaaccccggtaaaaaccaaaaaacaagccagcatacatcgggagaaaacctactgttaaaaatcaaacaattagcaaatgtatatttgtcctccaacatacaagacacacacacaccggaaaacaaaaggctaaggaaaataatttccaaaaaaaaggaagaaaaacacacccggagattcgaatcaaagccgccgcacattcgcttgcccaagagcacacacacacacaacaacaaataacccacacccaaccaaaaacacctcacagcaacccccaccaaaaaagacaccaccgtcgcatcggagcctcctcgcaaaagacgacagacccaccaaaacccacagagaaagaacgggagaacgagaacgaaccccccgcacaaaaaacaacaaaacaccaaccgagcttacacccacgaacaaccgacgcgaagacgacggcaagacaaaaagaagacagaagagaaagcaagcacgcaagaagcaaaag

SEQ ID NO: 629138 - DNA, 305 bp, Homo sapiens
gtgtgatctagaggatccctttttttttttcggcttttcacatttcacattttaattggattaaacataagattaaataaattaatataatttcaaaaataatataacgggcataacaatggactctggataaactttcaacctaagggtatgtttaacagaggaaatgaagagcaacaatggactctatacatcagtaaagcggcaatgcattagaacacacccaaagcctcaaaattcccacaccctatgacttagcaattccaccttttacaaagtgtatcctaatttcttcccaacttggg

SEQ ID NO: 629139 - DNA, 131 bp, Homo sapiens
caaaaccccaggggggggggggcggggggggggggaaaacccccccccccccccccatccccccccgggggggggggggaaacttttgttttttgggggtttttttttttggaaaaaaaaggttttcccca

SEQ ID NO: 629140 - DNA, 123 bp, Homo sapiens
atgcacactggagtgagttcccgctcgtgccgcattgcttaatcgaattcgactacgaacgatgcaggtagcgggttcaatccctgtccctttctcagtgggttccttctccggtggcgtggt

SEQ ID NO: 629141 - DNA, 791 bp, Homo sapiens
gcagtagtcctcgaagaaggtacaagtgtcttctaaaatactgggttaaaaacaggcacagaagtttacagacagtattgggagtctttgactgtgcaaaatccacaggaagtgatgatgaacagcagtcaacgattcaagttgaagcaaacgaggtccttatacgtacagagttcgtcttctagccaaggaaatactgtaacccaggacgctgagtgacaacacagtctctttcctggcagcccaatggtgccatcttcgaaccttcactatcagttggaacagaggctgacagacttcagcagtgtctcagtctgggctgtgggcagctgtcagtcccgatgatctgatcgaaaatcgagattggttcaaatggatgcctcgaagttcacgttattaggcaaggtcaatatcttgtatgttccaagtcagagactctggagagagactgttatggggctatagggatccattagtgagctttggtgccgtgacccgtgttactaccacagttggtctgttatatccttacgacaatactgcagatggagtttatagagtttccaatggaacaagatagcataagtgaccgttgccataatcgacacatatcaaggtaaaaggaatctgtcctattgggagagtcactgcgacatgattaatggtacagatgcagcctcatttccaccgtttgtggagaaaagccaggtattgcagttctttcttcggatattggccggtcactctatgcgtgtattggaatccgacgttaatcgtgaaaggaatccctg

SEQ ID NO: 629142 - DNA, 336 bp, Homo sapiens
aacagtgatgctcaagggctctccaaaggaggcaggcttgtgtggaccccagagggactcctgatcaggttagaaggacgtggaaagaatactacctgcaagccgacgagagaggcctggagcagatccttccttcacggcactcggaagatgccaagcctgccatcttgattttagacttccagcctccagaactgagagacaacacgttgtttctgttgtttgagccacacagttggtagaactgttaaagtagctccaggaaactaattcagtgactaatgttttcgaacagtctttgtgcattttaaataaacatatttaatatattacaaa

SEQ ID NO: 629143 - DNA, 443 bp, Homo sapiens
taaggtttatagtatacatctttatcttattacagtctttgttcaactgatagtatattgccacttcacacatagtataacaacattatgtttcttcctttccagctttcatgttgttatcatacattttacttgtgcgtatgcaataaatcccaaaatacatggttactatttgtttttaaatagttaattatatttaaaagagattaaataataagaggaggaataccttacatatatacccatgtaattaccatttcctttgatcttcattcctttgtgtgaatctatgttttcatcaggtatccttttcctttggtggtaaattttttcagctttcgcaggtctgaaaaagtctttatttcactttctttttttatacgtaaaaatttaagacataacccatacatataaattacatatgtagtttattccataaacaa

SEQ ID NO: 629144 - DNA, 313 bp, Homo sapiens
agaggacggagaggtagagaagaacaactaatggcactaggtttaatacctggttgatgaaataatgtgtacaataaacccccaagacatgtgtttacctaggtaacaaacctgcccattctgcacatatacccctgaacttaaaagttttttgttttttgttttttttttaaataaggccaacagatgaacatctcaaggcaacccatattttaagtcattttactgtgaggaccctgacccaggaaagaaaagcaattgctataaaacaggtggcccactgatctgcaaggaacccacgcgggtaccgagc

SEQ ID NO: 629145 - DNA, 368 bp, Homo sapiens
agttacaacagctccagttacaacagctctcccaggttcatgccatccttctgcctcagcctcctgaggagctggtactacaggtgcctgacaccatgcccagctaatttttttgtatttttagcagagacggtgtttcaccatgttagccaggatggcctcgatctcctgaccttgtgatacgcccacctcgggctcccaaagtgctagaattacaggcgtgagccactgcacccgggccctctgatttttaaatgtgtaactaaattaagaaatttttaagcccaggcaggctgttctcaaactcctgacctaaagtgatctgtccacttcagcctaccatagtgctgtgattacacgcgtgagct

SEQ ID NO: 629146 - DNA, 334 bp, Homo sapiens
tcagtagcacatggggtgatgcagtgcctcccgggacacatgagctagatatagcttactggagtcggctagatagggctgggggcatgcctactggagacagttcgacagcaatgtctgccagccgggcgggagagctcctccaggctacagtcgggttcccagtcccagtccataggtagagcctccttcggatccgggcacgcatgtcgttctggtgtcctgggaggaacggtgaagtcctggaatccggcgagggagaaggtgccttctacgtccagcgtcgcggatcgcaggggactcctcgtcggagctcggacctgccggcagtgcc

SEQ ID NO: 629147 - DNA, 477 bp, Homo sapiens
acatgcagcaggaatgtatcaaccttgaccatgtactatcctgaagcaaaaaaacagcccgtaatacttgagcagtgcgtaatggtaatagcgagtttgtagtcaaacttgctagtaggtctgcttaaggatctagcccagtccggcggctgccgtctaccagcctccccatcagcgtaaggatacctacctactaggtacctataaggaagtaatagtcatcgctgtccgaggtgtcatacaccaggttgttggcgaacatactcctgaggaaccgcacgggctccagccacgactcgatgagcagcagggagatgcggagcacctctagattggatttctgttgcgttacctccatgttggagggtgtcggaatagagtctgagaagcaaaacgaggtctgggagtcatgcaggaatgaatactactggtcctttgggatataggttacttcaaactcctccttggtgcctctag

SEQ ID NO: 629148 - DNA, 101 bp, Homo sapiens
agctcggtaccactcgtgcaggaggggctgacttttccttttggagcgaacaggatcttttttatcttctttcaaagtagcccaaattgaaaagtaccctg

SEQ ID NO: 629149 - DNA, 419 bp, Homo sapiens
gagaatccccccctataccagaccaagacactatactcataccaacaggctacgacatgtatacattcttacgcatgccataataacaggacaactagctatgtgtcttacacctacacaagtctagaatgtagattacgctacaaatctaggtatacacagatgtgtacaaagagctaggtaggtaacaatctagaagcaatctgtgtacacgagtgccacaaagcattcaaaagaaaccaatttaatgccaccaaacataagcctgctatacctgggaaataaaaaatctcacacctaaatcctagcagagtaaacgattccaactagacatgtactgaataatccatatggcacatttatgactatagaagtatgtaattcataatacaggtataggtgtctggttgggaataggg

SEQ ID NO: 629150 - DNA, 100 bp, Homo sapiens
tcagtcttctcccatcaggtcatctgagtggccatttgatccacctaccacatagagctggcccatgagtacagccatttgaaatcgggctctgggtgtt

SEQ ID NO: 629151 - DNA, 503 bp, Homo sapiens
ttttttatgttacgaaaggatgggtgtgtgattcttccccacactacgccctcaagatctggcggggccgatgccatttgaagccaagggcgtgtggccgcaggtgctcctataacattaggggctctaaagcccagaaatgggggggtggtcctcccgccccaagaaagagacgctgacgataaggctgggaacattctaagggacaacttctcaataagggggcggaaaggcactcccccaaagttagaatattaccccaagggccctaatccatcgaagtttttctccttacatactgaaaagggtgcgcattgaaacgcactgcaaaggatccttacaagcactggtgtagagacattctcgcagcacttagatgctgctataggcgccttgtttggaactctactcatcttgcgaggttgcccagaggggaatcaaagccgtcacatggaaaagtgaacattggttctccaacccacggtcacgagctgaatcaatct

SEQ ID NO: 629152 - DNA, 520 bp, Homo sapiens
gtcccttgagaagatcaggaaacacatgtcataggctgtaagtagtgataagataattccattggggaaagagcccatttgttatgcatgctgcacagggcagatacatagtgtggtattatgcttgcaatgagctagatcctggtcccatagagggaaaaatattccttggtgggtaatgaaccttttgttcccctaggcacaaggagtgggactacgccaacataaatattggcgatcgttgtgagattctaagagtgtgtgtgcatcttgacaatattagaggaggctgagcccaagcaggcacattctcttcgacccctccctcattcagtctgctttggagtctactgaacatcaagcttgctatgagcaggatcttagagctgaggaattggcctcccaatccgaacaggtgttataatcctttcttaataggttgtgctgtggacccaatgtgagggctgtgctggtgtaaatggtgacatattgagctggggggatgctttagcggtgaggg

SEQ ID NO: 629153 - DNA, 327 bp, Homo sapiens
aaccagctacctcagaagtcagagcaggaagagcctgctttggacacgggagaaaagaagccagttgctaactacttcaagtgacagaaaccttcacttgaaaacaatgattataatatatctctttcttattcttccgacattagtaaccaaacacaaaatgaactgtcctttctgcgctcatattattcgagtgtgccttatctcttcatctactaaatttagatgtgatccttaatgtgtaataaaagattatatataagcatgatctatataaaaatatattcggcttataaagtctgcaccgtgtatgcctgtaggttaaga

SEQ ID NO: 629154 - DNA, 135 bp, Homo sapiens
ggcttttttgtcccccaacttgatgatgtatgaaggcttttggtctccctggtgagtggtgtggatggcatgccagtgcttacctgtacactgacttgagtgccagttgaataaaatgtgcacaccttaaaaatg

SEQ ID NO: 629155 - DNA, 183 bp, Homo sapiens
ttaatggaaatatatctacaaagtgtggtttcgttgattgtcttacatgataattttccctggtaacaacttagtaagtgattgttccccgctaagtgattgttcccggctaccggggaacaatcacttgaggtaaagagttcgacaccagcctggccaatatagtgaaaccccgtctctact

SEQ ID NO: 629156 - DNA, 887 bp, Homo sapiens
  misc_feature (69)..(69): n is a, c, g, or t
  misc_feature (75)..(78): n is a, c, g, or t
  misc_feature (80)..(80): n is a, c, g, or t
  misc_feature (92)..(92): n is a, c, g, or t
  misc_feature (531)..(531): n is a, c, g, or t
tcagtgtatgtggtagaagaccaagaagagatgagctaggaccatcacctgcctcacagcctgctggcngctctnnnngntgcggctctggnacatgctcacctgaccagaccagcccagccgtcctgtcctgccagctctgctgccacctctgacaggtgtgcctgcccccatctcttctgattgctgttaacaaatgactagctttgcacagacacctctaccttcagcactatgggattctagattaatgggggttgctactgaataattcagggacttgatcttgttaatgtccaaaatccatttcttattgatctttaaagatgtgctaaatgacggggggggccaaaggcttagttgtgaaaaatataatttttaaattatacattcaaggtagtggccaaatgtaacacatcaatcatggaatgatttctctgctaacagccgcctgtatgtttcaataaatccagccaaccatcaaaaacaagaaaaagtgggcgccatgggctaactaagttagctatgggnccgcttgcgtgtagtgagggcaaagaatgacgctgtttcaatgagcgaatcgactgcaaggttgatactgccagaaagtgtgcgctcgacttagagggggtaatatgtcttggatccgcgcaggggaatagccaggtctaagaaactagtacaggaccagatagagccgatactgtgcgaggtagcgaggtggcgagcagtattatgaccgccgtgctgaaacctcgctcgactgaatgcgggcgcggagggaccatacggacgcatgaaaagtatctacgttgtcgctccgcgaccggactggacatattcaggaaaacattaggaatgcgtgctgcggcccactgcgagttaag

SEQ ID NO: 629157 - DNA, 342 bp, Homo sapiens
gtctctctatctgtgtcaatatatgtaagtgtctgcctgagtgtgcgttagtctgactgtcacctaggaatacttggtgacatcagggaacagtataatgctcaggggactgttaacatgcaagatcagctcttttgcatcatctgcagagaccactgcctctcattccacatggggacaaagccaaagtcaaggccctagcttctgtccttcaccccattgctcatcctgtctccagccccttgggccaccttcctgttctcacatcccctagatgcccccaggcctcctccccttgcctccactcccagagtgaggtcttctctaagcagcccatgtaat

SEQ ID NO: 629158 - DNA, 206 bp, Homo sapiens
aggatttcgcagatcggatctgatgggcgatctgcgccttgatcacatcgccgcggttgaccgccgggaagttggagccggtggcccagttcttggcctgatgctcgatataaatgtcgaattcaccggccttgaaggcttcaaaggccacgtcgctgtcgcgatagaactccacttcgaccttgtcgtagttatagaaaccctgg

SEQ ID NO: 629159 - DNA, 227 bp, Homo sapiens
  misc_feature (2)..(2): n is a, c, g, or t
  misc_feature (5)..(5): n is a, c, g, or t
  misc_feature (123)..(123): n is a, c, g, or t
  misc_feature (142)..(142): n is a, c, g, or t
  misc_feature (169)..(169): n is a, c, g, or t
  misc_feature (185)..(185): n is a, c, g, or t
  misc_feature (188)..(188): n is a, c, g, or t
  misc_feature (197)..(197): n is a, c, g, or t
  misc_feature (199)..(199): n is a, c, g, or t
  misc_feature (208)..(208): n is a, c, g, or t
  misc_feature (212)..(212): n is a, c, g, or t
  misc_feature (216)..(216): n is a, c, g, or t
cnganttgcagtgagctgagatggtgccactgcgctctaacctgggcgacagagtgagacaccgtctcaaaaaaaaaaacaaaaaacaaaaattatccaggtgtggcggtgggcgccttgtcnggcaaggcgaatctctttnaacccgggaggcggaggtttgcaagtngagccaaagtcaaaancantttgcactncnagcctgggnaaanaagngttaatttcca

SEQ ID NO: 629160 - DNA, 217 bp, Homo sapiens
gggctttcgggtccgcgcccagagatgggctccaaaggcaaagaagcgcgtgctgctgccacccgcacgcccagtgagaatctgaattcggtgcggaagtcgtgtacatctgccgaacccgtcctcagtatgaatggagccgaagcattacaaagcgcagtgtgcaacgggccagggcacgtctagcgagtgtacctgccagcgggagactgacggg

SEQ ID NO: 629161 - DNA, 232 bp, Homo sapiens
  misc_feature (156)..(156): n is a, c, g, or t
  misc_feature (208)..(208): n is a, c, g, or t
  misc_feature (225)..(225): n is a, c, g, or t
tggtgccggactacgatatgtacacagactaacactgatatatgggatcataaacaagtaaaacacttaacatattacttcaatatatcgaatatcaatgtatcgaagttatagtacgtgtgtaacaatgaatccagaccaatgtagcgattagantattagtgtgtctgcttgtccttcacatgatcacaggatgaagctccctttngtaagaaacatcatggncacactg

SEQ ID NO: 629162 - DNA, 116 bp, Homo sapiens
  misc_feature (108)..(109): n is a, c, g, or t
gcaaagttttgcttcttcatctcaaggggacactccatattttaacaacttttgcttgaggttcaatctaattgtcagccaagtgagaaattggattcatgatattgnntacccgt

SEQ ID NO: 629163 - DNA, 180 bp, Homo sapiens
gggtgacccactagtctccttcaactggtaatcccctcagtaggcaactgcaggggttcgccactgactggagagcagtggaaggtctgcgccaggaaggaggctttacagaggctttttttcgcctgcacttcggcagagtcattttcgaggcactctagacagatcccatgcgtgcca

SEQ ID NO: 629164 - DNA, 238 bp, Homo sapiens
tctagaggatcccgtggacatttccacgagtcacccatgctggatgagtggcttgatctcggctcatgacaacctccatctttcaggctcaagcaattctcctgcctcatcctgagtagctgggattacaggcatgagccactgcgcctggctaatttttgtgtttttactagtagagggggtttctccagtgttggccaatgctggtctcaaactgcctgacctcgtgatccaccca

SEQ ID NO: 629165 - DNA, 240 bp, Homo sapiens
aggtaccccaaaaaagttggaaattaaaacaaaacaaacattaaacaattgaagcacccttgtgaaattgcaaatgaggtcacttcttttaccttttttggggtgggcagggagggaggattaaatggggttgggcatatcaaactaaagatgacatcttatttttgcattgacattaatgtagcggatatattttgatgattatactccattagatttaattctaggccaggatgttac

SEQ ID NO: 629166 - DNA, 149 bp, Homo sapiens
aataagccagacacagacagacaagtacagcatgatctcactcataagtggagtctcaacacaaaagctaatacacacatttcaacaaggttaatagcatacaggcagagagtagacacatgttaccagagactaagacaggaggacga

SEQ ID NO: 629167 - DNA, 466 bp, Homo sapiens
gggcacaggtgagtgtgcatgtgtatatagtacgtttatgttaactgcgtggtaatattcattaaactttaccttatacctaacctttttaactgatgaaataatataatagatatctcacccagtataacaaatccacttagaaatgctaaagagatcctgcctaaaatatctagatttttttttattttcaggatatgccctaagtttttatatttttctcttgcttcccattattgtagctgaatattacgctgacccattgatctagaaatttttacaaagaaaatatgatttcctatccaataaataagttccttcatgaagaattatttttaagtgcatctttgtttcctgatattaaattagtagatttgtacaataatgagcaaattaatattgtggtgcctgggcttttttctcttttcttatgtatacctattcattatctgatctctgcgttctg

SEQ ID NO: 629168 - DNA, 1349 bp, Homo sapiens
  misc_feature (6)..(6): n is a, c, g, or t
aaaggnccggcccttgctttcatcctgtggcctcccaccaagcactgcctcagctgtggcaggctatgctccaggggtcggaccgatacctggagagccgtgatgcctctcgactgagtggccgggacccctcctcatggacagtcgaggatgtgatgcagtttgtccgggaagctgatcctcagcttggaccccacgctgacctgtttcgcaaacacgagatcgatggcaaggccctgctgctgctgcgcagtgacatgatgatgaagtacatgggcctgaagctggggcctgcactcaagctctcctaccacattgaccggctgaagcagggcaagttctgaaccaggagaggcagcctagacaaccaagtggcagcaggtgggggcattcttctaggaatgaggggcatcagcccaccccaggcacctcagtggggttccgggccacctcaggactccaagaggctgtgtggagccaccactcctagccacagctgccatgataagtccttccatgaaggactgaggagggagagtgggggtccagggctggtgctgctcttccctcagctctgccggggctctaaggtccctctatttatttctcaaccctggctggcctctcaccaggagtttaggctgaatgccttccacgtgatggaggaaaaggccaactctgtcctggtcttgctgtggcaccccatcgccccacagctcgtaccttctcaccagattcccctgaatccaaactcgtggtgcaaacctctaccttttttacaaaaagatcttattgttaatttattgtttctggcacttgggcaaaccctgtagttaatactcctcccacactagacactgggtttcaggaggagggagactgccctgctttggtcccagagaggccctctgcagataggcgtggcccctcttcagaggacactaccctagggcactttctctttgaggtggagagacccataaagccttgaccacatcactccatatggggaggagaaggatccctgtcaccttctcctctcttcacggggcccttttgcagccctaggcctcatctgtgggaagggagtccctggcttatactgcccccaccacagctccttgccctggccagaactgctgtcgaagaaaatcaggccggaaggccaagaaggcgctaagggggatgggagggcaggttttccaggctggagtcggttccacccactcgcctgtccacaggcttccttgtaagcaagtcagcagcacagctactcacgctgccatctggacttattttatgtcaatctgtttataaataaaaaccaatatagataaaaaaaaaaccaa

SEQ ID NO: 629169 - DNA, 1207 bp, Homo sapiens
  misc_feature (6)..(6): n is a, c, g, or t
aaaggnccggcccttgctttcatcctgtggcctcccaccaagcactgcctcagctgtggcaggctatgctccaggggagatcgatggcaaggccctgctgctgctgcgcagtgacatgatgatgaagtacatgggcctgaagctggggcctgcactcaagctctcctaccacattgaccggctgaagcagggcaagttctgaaccaggagaggcagcctagacaaccaagtggcagcaggtgggggcattcttctaggaatgaggggcatcagcccaccccaggcacctcagtggggttccgggccacctcaggactccaagaggctgtgtggagccaccactcctagccacagctgccatgataagtccttccatgaaggactgaggagggagagtgggggtccagggctggtgctgctcttccctcagctctgccggggctctaaggtccctctatttatttctcaaccctggctggcctctcaccaggagtttaggctgaatgccttccacgtgatggaggaaaaggccaactctgtcctggtcttgctgtggcaccccatcgccccacagctcgtaccttctcaccagattcccctgaatccaaactcgtggtgcaaacctctaccttttttacaaaaagatcttattgttaatttattgtttctggcacttgggcaaaccctgtagttaatactcctcccacactagacactgggtttcaggaggagggagactgccctgctttggtcccagagaggccctctgcagataggcgtggcccctcttcagaggacactaccctagggcactttctctttgaggtggagagacccataaagccttgaccacatcactccatatggggaggagaaggatccctgtcaccttctcctctcttcacggggcccttttgcagccctaggcctcatctgtgggaagggagtccctggcttatactgcccccaccacagctccttgccctggccagaactgctgtcgaagaaaatcaggccggaaggccaagaaggcgctaagggggatgggagggcaggttttccaggctggagtcggttccacccactcgcctgtccacaggcttccttgtaagcaagtcagcagcacagctactcacgctgccatctggacttattttatgtcaatctgtttataaataaaaaccaatatagataaaaaaaaaaccaa

SEQ ID NO: 629170 - DNA, 197 bp, Homo sapiens
cagtcatgagcttcttgccgtggtggcggccgtgcatcatcatggagtaagggaggcgctccacaatgggacactgagcttagcggaagcgtgtgggggcataccgccctggactgtgaggcaggtacttggcatacttctccttcaatgcaatgtaatcctgcggggaaatgccttgatctgccatcatcggtgtc

SEQ ID NO: 629171 - DNA, 763 bp, Homo sapiens
  misc_feature (6)..(6): n is a, c, g, or t
aaaggnccggcccttgctttcatcctgtggcctcccaccaagcactgcctcagctgtggcaggctatgctccaggggtcggaccgatacctggagagccgtgatgcctctcgactgagtggccgggacccctcctcatggacagtcgaggatgtgatgcagtttgtccgggaagctgatcctcagcttggaccccacgctgacctgtttcgcaaacacgagatcgatggcaaggccctgctgctgctgcgcagtgacatgatgatgaagtacatgggcctgaagctggggcctgcactcaagctctcctaccacattgaccggctgaagcagggcaagttctgaaccaggagaggcagcctagacaaccaagtggcagcaggtggagagacccataaagccttgaccacatcactccatatggggaggagaaggatccctgtcaccttctcctctcttcacggggcccttttgcagccctaggcctcatctgtgggaagggagtccctggcttatactgcccccaccacagctccttgccctggccagaactgctgtcgaagaaaatcaggccggaaggccaagaaggcgctaagggggatgggagggcaggttttccaggctggagtcggttccacccactcgcctgtccacaggcttccttgtaagcaagtcagcagcacagctactcacgctgccatctggacttattttatgtcaatctgtttataaataaaaaccaatatagataaaaaaaaaaccaa

SEQ ID NO: 629172 - DNA, 1309 bp, Homo sapiens
  misc_feature (6)..(6): n is a, c, g, or t
aaaggnccggcccttgctttcatcctgtggcctcccaccaagcactgcctcagctgtggcaggctatgctccaggggtcggaccgatacctggagagccgtgatgcctctcgactgagtggccgggacccctcctcatggacagtcgaggatgtgatgcagtttgtccgggaagctgatcctcagcttggaccccacgctgacctgtttcgcaaacacgagatcgatggcaaggccctgctgctgctgcgcagtgacatgatgatgaagtacatgggcctgaagctggggcctgcactcaagctctcctaccacattgaccggctgaagcagggcaagttctgaaccaggagaggcagcctagacaaccaagtggcagcaggtgggggcattcttctaggaatgaggggcatcagcccaccccaggcacctcagtggggttccgggccacctcaggactccaagaggctgtgtggagccaccactcctagccacagctgccatgataagtccttccatgaaggactgaggagggagagtgggggtccagggctggtgctgctcttccctcagctctgccggggctctaaggtccctctatttatttctcaaccctggctggcctctcaccaggagtttaggctgaatgccttccacgtgatggaggaaaaggccaactctgtcctggtcttgctgtggcaccccatcgccccacagctcgtaccttctcaccagattcccctgaatccaaactcgtggtgcaaacctctaccttttttacaaaaagatcttattgttaatttattgtttctggcacttgggcaaaccctgtagttaatactcctcccacactagacactgggtttcaggaggagggagactgccctgctttggtcccagagaggccctctgcagataggcgtggcccctcttcagaggacactaccctagggcactttctctttgaggtggagagacccataaagccttgaccacatctctcttcacggggcccttttgcagccctaggcctcatctgtgggaagggagtccctggcttatactgcccccaccacagctccttgccctggccagaactgctgtcgaagaaaatcaggccggaaggccaagaaggcgctaagggggatgggagggcaggttttccaggctggagtcggttccacccactcgcctgtccacaggcttccttgtaagcaagtcagcagcacagctactcacgctgccatctggacttattttatgtcaatctgtttataaataaaaaccaatatagataaaaaaaaaaccaa

SEQ ID NO: 629173 - DNA, 316 bp, Homo sapiens
aaaaaaaaaaaaaaaaaaatcttaaaaacggggcccctcctgtgaaccccagacgaaaatgaaaaaggaggcccggttccggctcttctcttgcttttttttaagaaaagttcccctctgtaacccaggcctgaatgccagtggcgctattcggctcactgcaacctccacctcccaggctcaagtgattctcatgccccagctgctcaagaggctgaggtaggaggatcacttgagcccaggaggttgaggctgcagtgagccgagaccatgccactttattctatcctgggcaacagagtgagactgtatctca

SEQ ID NO: 629174 - DNA, 692 bp, Homo sapiens
  misc_feature (6)..(6): n is a, c, g, or t
aaaggnccggcccttgctttcatcctgtggcctcccaccaagcactgcctcagctgtggcaggctatgctccaggggtcggaccgatacctggagagccgtgatgcctctcgactgagtggccgggacccctcctcatggacagtcgaggatgtgatgcagtttgtccgggaagctgatcctcagcttggaccccacgctgacctgtttcgcaaacacgagatcgatggcaaggccctgctgctgctgcgcagtgacatgatgatgaagtacatgggcctgaagctggggcctgcactcaagctctcctaccacattgaccggctgaagcagggcaagttctgaaccaggagaggcagcctagacaaccaagtggcagcagtctcttcacggggcccttttgcagccctaggcctcatctgtgggaagggagtccctggcttatactgcccccaccacagctccttgccctggccagaactgctgtcgaagaaaatcaggccggaaggccaagaaggcgctaagggggatgggagggcaggttttccaggctggagtcggttccacccactcgcctgtccacaggcttccttgtaagcaagtcagcagcacagctactcacgctgccatctggacttattttatgtcaatctgtttataaataaaaaccaatatagataaaaaaaaaaccaa

SEQ ID NO: 629175 - DNA, 404 bp, Homo sapiens
ataaacagctttattagaccgctcagaatgactggagcaggaaccagtaactaaatcctgtcatacatgatgccatgacttgtgggcattactattcttttaaaatgaacactatgagaaatcggccaggcgcagtagtggctcacgcctataatcccagcactttgagaggccgaggcgggtggatcacctgaggtcaggagttcgggactagcctggccaacatagtgaagccttgtctttactaaaaatataaaaatcaggcgtggaggcaggtgcctgtagtcccagctattccagaggctgaggcaggaagatggcttgaacccaggaggcggaggttgcatcgagccaagatggtgccactgcactccagtctgggcaacagagagagactccatctc

SEQ ID NO: 629176 - DNA, 725 bp, Homo sapiens
  misc_feature (6)..(6): n is a, c, g, or t
aaaggnccggcccttgctttcatcctgtggcctcccaccaagcactgcctcagctgtggcaggctatgctccaggggagatcgatggcaaggccctgctgctgctgcgcagtgacatgatgatgaagtacatgggcctgaagctggggcctgcactcaagctctcctaccacattgaccggctgaagcagggcaagttctgaaccaggagaggcagcctagacaaccaagtggcagcaggtgggggcattcttctaggaatgaggggcatcagcccaccccaggcacctcagtggggttccgggccacctcaggactccaagaggctgtgtggagccaccactcctagccacagctgccatgataagtccttccatgaaggactgaggagggagagtgggggtccagggctggtgctgctcttccctcagctctgccggggctctaaggtccctctatttatttctcaaccctggctggcctctcaccaggagtttaggctgaatgccttccacgtgatggaggaaaatcaggccggaaggccaagaaggcgctaagggggatgggagggcaggttttccaggctggagtcggttccacccactcgcctgtccacaggcttccttgtaagcaagtcagcagcacagctactcacgctgccatctggacttattttatgtcaatctgtttataaataaaaaccaatatagataaaaaaaaaaccaa

SEQ ID NO: 629177 - DNA, 197 bp, Homo sapiens
gacatacagacaagcgaaggatctccaagtcaagcgtttctctccgcgtcacttgccgcttgccatccgtggtgatgtagcgttgggttctcttctccaggcttccgtcgctgggggtggtgtgatccctcgcctccgccaatctctgcttggccagtggggccgccggcaactacttagtgggtagctatcacccg

SEQ ID NO: 629178 - DNA, 398 bp, Homo sapiens
cacaagtctcacactgttatgtgggaaacctctttgctaacctggtcatgtattttgagatcggccagttaccagttcaaactgttcagtcctcccgctccatatatggtcgaaaatgttgtgacgcaacatttgtatcaccaaccagctgcacgtaccttcctaaagagcgtagaaaatggtatcaagtgccgggcgtggcgcaatggtcatgtgttcagacattattgggaagcttagcgggccggctcttaaggtctaaagttcactaccaatttgtgtgatcatggtacaggcgcgttctagttatccataggttactaagcctggtgtgttggctggctcttagagtcccaccagctaaagagtgtatggcagtatgatcgcgtgaatgtggg

SEQ ID NO: 629179 - DNA, 348 bp, Homo sapiens
gagaattagatattccctttcttctttacccagaattttctttttataaataaaaataggctgggcacagtggctcatgcctgtaatcccagcacttttggaggctgaggcaggaggatcgcttaagctcaggagttcaagaccagcctgggcaacatagtgagactgtaccactacaaaaaataaaaaaacttagccagatgtggtggtgcatgcccgtagtccagctactagggaggctgaggtgggaggattacttgagcccaggaagttgaagctgcagaaggttgtgatcgcaccaccacactccagcctgggcaacagagtgagactcactctctctcaagc

SEQ ID NO: 629180 - DNA, 1402 bp, Homo sapiens
gcccagataggggagcggaggtggcggcggacgagaggtagcggtggccttgagtagtcttccagatctcctcgagctcgaccactttagccggcaccgatcccacttcccatcacccctatcctactctatccattccttcacctacccctatcccatatttaacacctataccacagatacaggtgacgcggcaggggagatggcatacacagctaaccgcgctggtgccccacagcatcgtcgtcagcaggccattcaacgcaacagcatcaacaggctgtgcgcacaggagaacaaccaacgagagctcggccaggcgcgggggctacaggcccagggcccttggcagatggagcaataccatcagctcagtagtacagctgtcacactcggcagagacgtcacaggttgcacgcacgaggcgcagtccgggcctgcggcggccacattcgagagccactaggggaacatctgacgggacctgccgcatggaaggaggctcgaccatccccacaggaaccacacgacgcaatccccgaatagacatactagcgcaaatcagaccgacccatacgctcccaaatgacgcgccgggcacgcaagcaccgacacgaacaacgggaaccgcccatacgccccccaatgcccgacgcgaaccggccacaacgaaccggggggccaagccatgcaaaaccagacaacgaggaggacacccgaagcacgagaattacaggaaaacgggacccgagccgcacccccacagcgactaaagagataaagaaaaagccaccactagagccggaacgagacaaaacaacaataacacacgatcgagactgacacgagcgcacccggtgaagcaccagcagcgaagaccggccgcacacgtggccaccgatgcggaaccagcgaacgacaaacacatcacaggaacagagcaagcagcgggcaggcacgcgcgggacttccggcaaagaacgaaaccccgaaacccacagaacggggtgaacaaacagaccaccagcggtcagaccccccacggacacagcgcacaaagcagagaaacaccagacaacacgacacccaaggcgcgcaaatcacccgccagacacgcggccgcagccaacccacgcggcgcgcagccccgacggaacagaaacacacgcgggaacaacacaaccgcagccacggcgagagcggggcggggccggaagcccacggcgggcgcgacgagcgaccgcgcacaaagaacgcagccaagcgcagccaccgcggcgccagcgccacacgagcccaggcagcaaaggagggaacacagaccgcggctacacggggcacggccccggcgccacggaccgccgaacacagcgcaagccgccgcacggccacagaccgccaa

SEQ ID NO: 629181 - DNA, 856 bp, Homo sapiens
ctaatttttctatttttgtagagatggggtttgccatgtgcccacgctggtcttaaaactccttggctcaagtgatcctccagcctcggctcccaaagtcctgggattacaggcataagccatcacaccgggctaatttttctatttttgtagagatggggtttgccatgttgcccacgctggtcttaaaactccttggctcaagtgatcctccagcctcggctcccaaagtcctgggattacaggcataagccactgcgctcggcccagtattcatcagagaatactggggccgaggtcgtggtcacactgtaccaggccaaaattagtgtcagaccagatcagatggtcctatttaatagccttgactcctgagatatgggttaagctcacagagctgggtcccaggcaaactaactgagtctaagccccaggtggtggcacctgcccaacctctgcatggccaaccctcacagaggcaggaaattcctccttcctgatgctgcaatcagtcctagtcagttcagaatcgggggtcatatggcagattacaaaggcatcttcaaagaagctgttatagattcatgcacggttcccttaggaaggtaaaaacttctgacttatagacggcaaatggtttccaggaagaattgcacgctcacctaatagtggcaatgagcggtgaaagggtccgctggtaacaacctatggcagctgtaaagtccagagcggtatggggcacctacccaggccttcgtataacccgatattgccgccgggacctgttctcaacacaacgggtggggcccgctccaccggcggcggagttccggggggaacctccccgctcaaaaaa

SEQ ID NO: 629182 - DNA, 557 bp, Homo sapiens
  misc_feature (474)..(474): n is a, c, g, or t
tgggcctcacgaattcatagccaaattctatcatacttacaaagaagagctggcaccaacactgctgaaactataccaaaaaattaaggcggtggcgactcctccccgactcattctaggaagccagtatcactcgataccaaaatctgccaaagaaataacaacaacaacaacaacaacaaaattacgggtcaatatccccattgaagcaaaaatcatcaacaaaatactagcaaaccaaatccagaagcacatgaaaaagttatttcaccacattcaagtaggttttattcctgggatgcagaattgattcaacacatgtaaatccataaatgtgattcaggatgtaaagataattgagaacaaaaaccatatgatcatgtcaatagatgtagaaaaagctttcagtaaaatccaatatcccttcatgataaaaaccctcaacaaactaggcatcaaaggaacataccgcanaacaataagagcgatctatggcaaactcacagcgaacatcatactgaatgaataaaagctggaggtattctcctggtacggat

SEQ ID NO: 629183 - DNA, 236 bp, Homo sapiens
acggggtaacaacgtgatacacaacatgagcactggctgagcaggtaggtccctgttttaggaaaaccagtgtcaaacaaattaccaaacacatgtgaagacttccgtagtttgatactctaggaattcctctgtttgctgctgcaagtaaaaccagcccgccaccgtgagaatgcaggactccattggtgaaggagcagtcgtttatttaactgagggttttttgatctggggcg

SEQ ID NO: 629184 - DNA, 149 bp, Homo sapiens
ctaacaggtttccccaccttactgtagacaccgtctgtcttacggcacgaagcccaggacctccgtagggctcacagtgcggcttctagagaagatgcccgccacaggtgctctctgctccatctcagtgagacccgtagaggtgtcgt

SEQ ID NO: 629185 - DNA, 1055 bp, Homo sapiens
tggtttgagcaccctctaaggaagcagtctttattggctttttataaagtgaacacttttttgaaaaacacgttgcaacaggtttgaccacaatgtgctcagctccctttttataagtgaaattccgtggggagaaaagtcaaggaccttagggagcagagcaggtggattgcacaacacagaatttacctagtgagctcacttttgtgctgagccaagtgacacggccctcactgtgcagccatttccaagaaagttatcttggcctcacggataaagtgcaaagtaaacaaaattaccacacgtgctttattttgaaacaaacaaagtggtgacggtttgccataatacgtggccctcattgttgcagaaaggacacttgggggggctcagaccaatgtgaccacaagaaaaataaaacacctatacaccaggtctgtgtgttacacggtgggacttttaataaaggccccacactctctgctggatatctcgtggagacaccgtttcaccgtgtgggacaacccactataacgcgtgggttgtgaaatcacaggacgcgtttttacccccgtggaaaaaaccagtttaagattaaaagtgttattccgtccttgctcactattaatttcccccccaaagagagaagagccccacccaatatttagaacacgaacatattaggagcgacaaaaaatggggcaagcgcagcgggcctgtgtctggttttaacccccgacgggttgtatttttctcccagggtgcacagccccgtgtgggggacacatgtgcaaatctcacgcgcggcggcacccacaagacgtgtgaaagaacatgcgtgcccccctgtgtagcgtgttgggatatattcccccccacaagggggtttacccgtagcatctcttgttttggtcgtgccaaaaagctgggctacaataatttcacccaacaagacgggggtttgtgcaaaccaaaagcagacgaaactttttcacttaataactataaaagggggtattatcccccaaacaaaaagcgcctcctttgaaaaaaca

SEQ ID NO: 629186 - DNA, 426 bp, Homo sapiens
ctcgtgccgaattggcacgagcccacttaagtgatcttcccactttaccctcccaagtagcttggactacagatgcacaccactggctaattttttacttttaatagagatggggtctcactatgttgccctggctggtcctgaattcctgcatagaaaaaggggtagaagtgtgagacaggcagacattaaggggtccccttaactgcagcctggtgaaattctgaagcagagaagccagctaaggtatgctcagactccggtcttgcagaaactgagataataaatatgtgtaatttaaacctactaagtttgtgtcaatttgctacacagcgaaacctatataaagtgtggggaaacaatggaacattgttaatctcagaagggacatgaccatttcctactttggttttcccggtgtgttgg

SEQ ID NO: 629187 - DNA, 223 bp, Homo sapiens
ggctctcctgggagtgaggttgcgcgcttcgcctctctcttccctctgcctggcctgcctgcacttctaacggcgcgggcccactctggacccagctggcgccagagcggaagctgcctgccggcggccccccacttgagagatggatgagctgcaccaaaggggaactgttgacactcgggccctttcaggatggtgcttgttggggtaccgagctcgcata

SEQ ID NO: 629188 - DNA, 152 bp, Homo sapiens
tacggtgttgctggtcatctaagatctgcgatcatgctgtagaagtctttgtcttacagatctggcagggatctgtgcttgggccgtttagagcatgtgacatgtgtgagaccagagacagcagattgaactgtggagaaaaacccaaaaag

SEQ ID NO: 629189 - DNA, 778 bp, Homo sapiens
agcggggtgagaggctggagtgagcggtaactacccctggctgctgcacagctcggctgctccttcccgctccctcacacacctggcctcagcccgcaccggcagtagaagatggtgaaatgaaacaacttactacgatgtcttgggggtcaaaccaatgctactcacggaacgaattgaacaaaggcttataggaaactggccttgaagtaccatcctgatcagaacccaaatgaaggacgagcaagtttcaaccatgatttctcaagcttacgaagttctctctgatgcaaacgacaacgggaattctctgagcaaatggaggcgaacacggccaattacacgcaggcgtggagcaggtgtgcggctacacaggctcacccatggacactctttgactattgttacactctgcgactgagcgcggcacggattgccgacgacgacaatgtgcagcgggtcaccacacttgttcggctccccctccagagctacttcgagctacaccccctcagacacgcacctttctaagttaactgtgttggcacccaagcacccaccttggcctccttggcccgacaatacacccaggtaggacatccggactaactaccacagtgctcggcacaccggctacagcaccgccacctgtgacacacaccaggcggctcacaacgctcagcaaccccggcccggataccccccaacacatgccactcatgtggttcccctggcacaaatgcgcccacactatacgcgacacctccgcatacaacga

SEQ ID NO: 629190 - DNA, 100 bp, Homo sapiens
ctgctcttatcaaatgatcacacatcttctcatcttctcgtttgtctgcagaatactgggcacgcagggactcaaattccgcatgtctgtgaatatcttc

SEQ ID NO: 629191 - DNA, 119 bp, Homo sapiens
ccattccgatcacggcgaggctaggacgtcctagcagtgctactgaagaggcagaggagtcgtttgaatttgtggtggtgtccctcactgggcagacgtggcactggcgaggctaggac

SEQ ID NO: 629192 - DNA, 822 bp, Homo sapiens
  misc_feature (3)..(3): n is a, c, g, or t
  misc_feature (7)..(7): n is a, c, g, or t
  misc_feature (11)..(11): n is a, c, g, or t
  misc_feature (38)..(39): n is a, c, g, or t
  misc_feature (49)..(49): n is a, c, g, or t
  misc_feature (55)..(55): n is a, c, g, or t
  misc_feature (64)..(64): n is a, c, g, or t
  misc_feature (80)..(80): n is a, c, g, or t
  misc_feature (86)..(86): n is a, c, g, or t
  misc_feature (119)..(119): n is a, c, g, or t
  misc_feature (132)..(132): n is a, c, g, or t
  misc_feature (138)..(138): n is a, c, g, or t
  misc_feature (142)..(142): n is a, c, g, or t
  misc_feature (157)..(157): n is a, c, g, or t
  misc_feature (185)..(185): n is a, c, g, or t
  misc_feature (192)..(192): n is a, c, g, or t
  misc_feature (208)..(208): n is a, c, g, or t
  misc_feature (210)..(210): n is a, c, g, or t
  misc_feature (216)..(216): n is a, c, g, or t
  misc_feature (259)..(259): n is a, c, g, or t
  misc_feature (261)..(261): n is a, c, g, or t
  misc_feature (277)..(277): n is a, c, g, or t
  misc_feature (291)..(291): n is a, c, g, or t
  misc_feature (299)..(299): n is a, c, g, or t
  misc_feature (332)..(332): n is a, c, g, or t
  misc_feature (335)..(335): n is a, c, g, or t
  misc_feature (348)..(348): n is a, c, g, or t
  misc_feature (368)..(368): n is a, c, g, or t
  misc_feature (389)..(389): n is a, c, g, or t
  misc_feature (396)..(396): n is a, c, g, or t
  misc_feature (418)..(418): n is a, c, g, or t
  misc_feature (429)..(429): n is a, c, g, or t
  misc_feature (432)..(432): n is a, c, g, or t
  misc_feature (443)..(443): n is a, c, g, or t
  misc_feature (457)..(457): n is a, c, g, or t
  misc_feature (474)..(474): n is a, c, g, or t
  misc_feature (477)..(477): n is a, c, g, or t
  misc_feature (488)..(488): n is a, c, g, or t
  misc_feature (508)..(508): n is a, c, g, or t
  misc_feature (511)..(511): n is a, c, g, or t
  misc_feature (535)..(535): n is a, c, g, or t
  misc_feature (739)..(739): n is a, c, g, or t
  misc_feature (742)..(742): n is a, c, g, or t
  misc_feature (780)..(780): n is a, c, g, or t
tcngtanacanaaattttattcaattttaaaaaaaaannaggactttanacaaanctttacccnaaaacaaagcaaatcngtccanctttaaaccaaattctgagagtagccaacttcnattttcagcagcnggcaanagcncccccaatgagttcnactgacatttctattttcttcatcccanatggtanaaaacaaaaccaatcnanaccccntgaaaagctttatgtggtcatttgagttttacaaatggtttcncnaatggtatgccaaaancatttatgtgttcnccccaganagctttactgtaacatacagcaatgtttatccnggngagtgagtcttcngtaaacagtcaaccaatgcnctatgttatggaaaccaagcnaaatgcnattgaaacaatccacaggttcnaacctggaaanacnaggaaaacaanctggatgcattaancacagcaatatgaaganccnccccaaaaaanacgaggtgaatggctacccnaanacaagttttacttttcttgaaccnataggcctgtcatttaagtcaatgacagccgccgtggcttcatcccgagactcaaaggccaccatggcttcacctgtgggcatacctttttcattgtattttaaacacactgagcctgggattacttgatagccataaaagaaatctaaaatctcatcaatagacacagtaaagggcatgttttgcactttaattactgtcggnccngggttttccagaactagatgcaaagccaggggggaccnccaatatggattgggccagggccggggccggtggccggggca

SEQ ID NO: 629193 - DNA, 438 bp, Homo sapiens
ccaattccaggtgttgactcttagatggtatttctggaccttccctgagccaaaggggagccaactgccctgaagggatcatcaagatagtacctctatgagtctgcaagaaccacagcctcactggactaggggtgccccctaaagcagatacagcttagatcacaacacccaggttcttccaaatatctgaaaagccttcccaagaaggatggctaccaataagcccagacaatgaaaactataataaatacctagctcttcaatgccaagacacagaaaatatacatatatatatatgtatacatatatgtgtgtatatatatatatacacacacacacgcacacacacacagagagagagagagagagagagagagagagagagatggaatttaactcttgcctggaccacaggccaagacctgtgaaagaagg

SEQ ID NO: 629194 - DNA, 745 bp, Homo sapiens
aagaaggccaatggtgaaagaaggtggctccgtgcccagctgtcgtgaagaagcaggaggctaagaaagtggtgaatcccctgtttgatgaaaatggcctaagaattattgtgcatttggacatgtgactatccatgcccaaaatgatgaccatcaccactgcatttgtgaaattggcccctgctatatcatgtgtttgcaagctgtgcatgagatgccatacctctataatgctgtgctgaaatgtgcctccatgctgaattaaaccaggatatcaaccacaatgtgcgcctgagacactgagacaaaaacagtgcatacatctatgcattgcgttaaatgcattgtgcgccacaaaatgtacagtgagcgcatgatgaacaagatgcaactgatgaatgacaagcatgatgaacttgtattgtgccactgtgggcctggagaacatggacatgggcgttgcttgtgaccaaacaaatgtggtgaccgagtacacccaaagccggaaaggcaatgtacaacaacgcattgtaccgtatatggatggctaagaggaaggtatacaaccgaccgtggatctacacacacacattagtagttgggccagcacacaaaaaggcaaaaaaggcaatcaaaggcattgtggtttgtgatatgaattttggccaaccaaacaggaactggttagagccattccccagagtctggacaagcattgtgtgttggtcatatccgttagccaatg

SEQ ID NO: 629195 - DNA, 363 bp, Homo sapiens
atttgatttaatctttagagcttctatagaaggccaatttaccaagaggggaatgtttcctgaaggtatttatgggtagatagtacagcataatggttggaaggtctaagggtaagattagagccatactacgtggtctcaaatcttatctttaagatgaagctcataatgacttaccactatggctgctgtaagggtaacttaacctataaaagaccttagacacacagaagtactgcatacgtgtttgctactatttctctcaaggatatttttagtctagacaggagcctagcctcaggatatgtcgaaaggccttctcagtgtgctcatgtcccagcacactcttttttttttgtgcta

SEQ ID NO: 629196 - DNA, 679 bp, Homo sapiens
gattattgttagatccgggcaatagctcagggctggtggcgttagacccatatcctgtggaggagtatcatgagtactggtgatcctgtagaattttaatgcaacttctacttctatgtggggcccaggattcagcgggtgtagctgaaatacatttgactactgagcttggcgcattctgagatttggggttgaattaatggggcctgagtgctagcattattggtcttgagtgacaacgtttacttactgacgtatatcccccgtatggatcactttggctggggttgatagataatggttgtcctccacacacgtattttttattgaaactgtagacttttttgtcacaaggctcctacactactgttttccatgtcacgcaatatgcttattttataaaacaatttgcttaacaccttgcatctgtcctcatttttctcattgttaatcccctcttttcattacgctctacttccttatatgatacggtctaatcactactgtacgacaatgcctcctctcagtcccccaacatttcccacatgtctgttattactatttatacaaactccgtgacagatgtatataccaatttacagatacctctctgattcaatttagtttacacttgcatagaaacgagaaagaaagaaaacaataatatataaatataata

SEQ ID NO: 629197 - DNA, 570 bp, Homo sapiens
tcatccattcagggttcattcattcaggtaaccaacatttctgagcagggcacttcgggggtgccaggggcggggacccagagtggaattaaaccatggtccctgggcctggaaaagttattactcattcactcagcagattcaccaagccctacgggtgtgcatgggcggggcaagggggggtgtggggggtagaggagagcgttgctggcagggggagccgggggggatgtgaactcggggacggggcacccacaagggctcagggggcccaaacccttgaaatccgtgaaaccgggggggtcccaagagctagaaactcaggaaaccccgagggtgctcgggggccccggcgtctcgggggctccgtggggcagaccccgtgtaatttttgcaattctccctcccccaggctcttcctctggacccctaagttatggcccggtcacctctcccaggcccaggccggagatctggcagggtgtggccgcctgggggttctatgtattatagcaagttctgatgtcacatatgtaagggactttttaaatatatgtgcctttgcctact

SEQ ID NO: 629198 - DNA, 257 bp, Homo sapiens
tacgcacataacttagtagtaatctgaaaccatcagcgctagcgtcattcgatccaattagccctaggctgtacgccctccacctgctaatcattactgtcaggtccacctactcatgcacctgagtttgaagcgccacccctggcaatatcgaccatataaccttccctctacacttctcatcttcacaattctgatcctactgactatcctagaactcgctgttcgcttcatacattgccccctccaacctagtg

SEQ ID NO: 629199 - DNA, 128 bp, Homo sapiens
ttaaatcaaaccatatcaagttggtgtctttcagtgttgtataatataggaatatctcacaggatctgatggttgtgtaaagggcagttctcctgcacatgctttcttgcctgccaccacgacacagt

SEQ ID NO: 629200 - DNA, 449 bp, Homo sapiens
cagacaatggagagttttgaagggcttaaagagaatcacagcgaaatggggggaaactttgaaccactgtagacttgttaaatagttgtgatcaaaaggctgaccgaagaatagacagtaaagaccaggattagaaggtcttagatgaaaatgagagagttactgggaacagaggccaaggttagtttgttttgtcatagcaaagaatgttgctgcatggtgcccctgtccaggagacgtgtgaaattttgaacttgagggtgatgacttaggtagtatgtggtgaaatgaacttctaaggagcaaagctcaagaggtgtcctgcctgcattgaactacctatgctcttatgtgtgaccaaacaaatgacctcaagttgaaatttgtgtttaaatgaaaagctgagcttaaaagtttggaaaatttgcagcctggccaagtggcaaaaa

SEQ ID NO: 629201 - DNA, 100 bp, Homo sapiens
  misc_feature (3)..(3): n is a, c, g, or t
tgnaattcgtcaatcatggtgactcctcctcaccctcaccgcgccggattcatccggttgacgagcaccaggaggaacggcgctcccagcagtccggtga

SEQ ID NO: 629202 - DNA, 507 bp, Homo sapiens
  misc_feature (385)..(385): n is a, c, g, or t
  misc_feature (441)..(441): n is a, c, g, or t
ttataaatgagattcattttttgcatcctttctggcttgggaagtgtcttcccgtttcaaccggatatggtgctcattgcagcggatttcaagtcatgctcagacaggggtgttcggatactgcatccgtgtcgttcagtttcgctattcaattcaccccttagttgctttacgacgcaagcactgcctgactttagtctacagggaaataaaagactctgccagcaacagctgatcgtagggggcttgctgtaatgtgtgtttcagattgtcaagatgctcctggctggccacgcccaggtagagaaagcgggcaccttgccgcagcgcccggttcaggctgacgcgcaaaggcaggtggccgatacagcaaaagcagcccggngcaatgcgctgcacatgcactggtgacaaatcactgagaggcatgccgccagtggngagcccctccagaatcacggcagcccgcggatgctgcaggcaattttccgcaatccagcgttctct

SEQ ID NO: 629203 - DNA, 336 bp, Homo sapiens
tgagacagagtcttgctctgttgcccagaatggagtgcagaggtgtgatctctgctcactgcagcctccgcctcccaagctcaagcgatttcccctgccccagcctcccgggtagctggaactacaggcatccaccaccatgcccggctaatttttgtattttcagtagagatgacatttagtagagatgtcatttagtagagatgacattagtgggccaggctggtctcgaactcctaacctcaggtgatcctcccacctccacctcccaaattgctgggattacaggcgcgcgacttgtgcccggccacagtgtctttacatacttcccatcat

SEQ ID NO: 629204 - DNA, 336 bp, Homo sapiens
  misc_feature (336)..(336): n is a, c, g, or t
atgatgcgaagtctgccttactacaacacacccatatggacaccgttgacttaaagcgcttataagctatacagaacgacaccaggctgactaactttagtgcactgaggacaggatgatgccttctcgccaagactgatgttgcgaggactaagcgatattacttcagggtagatgagagaacgttgatgtaactgaaggaggagagcatcagctgagagctacagaagacagacgagctacctaagatcagtgcaacgaacttaccaatcctggcgagagctgctggactacgagagaaccttacatcacctcttttgaccacagccctgtgtn

SEQ ID NO: 629205 - DNA, 326 bp, Homo sapiens
  misc_feature (34)..(34): n is a, c, g, or t
  misc_feature (38)..(38): n is a, c, g, or t
  misc_feature (79)..(79): n is a, c, g, or t
  misc_feature (97)..(97): n is a, c, g, or t
  misc_feature (103)..(103): n is a, c, g, or t
  misc_feature (158)..(158): n is a, c, g, or t
  misc_feature (191)..(191): n is a, c, g, or t
  misc_feature (218)..(218): n is a, c, g, or t
  misc_feature (284)..(284): n is a, c, g, or t
  misc_feature (305)..(305): n is a, c, g, or t
  misc_feature (310)..(310): n is a, c, g, or t
gcgcgcagacccgctgggcctgcggcgcccgccnatgnagcagcagcaacagcagcagcagcagcaacagcagcaacancagcagcagcagcaacancagcanagcagcagcagcagcagcagtcctcaccctctgcctccactgccagactgccagntgcagcgaacctggtatctgcttcgcggccgtncttctacccttcaggcactgtagacancagtcaggctccgggatcgtacagcggcgccatcactccactggagaagacgtgaagccatcgatntcacagtgcaagttgagtttnaagcngagaaggccacgcttc

SEQ ID NO: 629206 - DNA, 176 bp, Homo sapiens
tttgtcgttgtagcttagaacactagagattttatgctggaagtcagagagatcgggacatctgtgcagctgtctcatatactccagttcatctttgagaaggtggtttcactgtgcacaatatgggtctgtattttaacatcagaaagctcgactccagagaagaaactacagtg

SEQ ID NO: 629207 - DNA, 191 bp, Homo sapiens
  misc_feature (5)..(5): n is a, c, g, or t
  misc_feature (29)..(29): n is a, c, g, or t
  misc_feature (31)..(31): n is a, c, g, or t
  misc_feature (47)..(50): n is a, c, g, or t
ctggnttaaacttaatctaaatggaaccngnctatcaagtattatannnntttcacattattgaagttcctatatttcaagagttaaaagtggtcaataaggacagaaacacagtttgttcttgaaatataggaacttaaataatgtgaaactggattaaacttaatctaaatggaccactctatcaagta

SEQ ID NO: 629208 - DNA, 622 bp, Homo sapiens
accgttcaggctacgcaagacatcgggaaaaataaaacactgtctccacattacgctggaacgtgtacgccccttgtgtgtctcctcaggtcgatggtagcgaagtctctggtaaagggtaccattgtgtgcacacgacttagatcaatgcctgtcagagccttacaacaagcgaatagtagtcttaatcaacacagagggatcttttgctgggtctggtccatccaacgaaggagaccagatgtccgtccatatgggcactagcttcatccttgctgtacatgcctcactcaaaaaattaacaagtctagcaggatgttggaatccatctcgaagttcttgtgggtcctcagcaagagcacatgacttatgatataaatcttccatactagggctagcccaatcagcattacctttgcactgtataaagtggtcagcatctggtggatcaagaatggccatatatttttctaaggactctacttctctgtgcattacataaaactggcagtaaatttcccagctgacatggtcttgacaaagggaaagcatccacccatgtaacttgagcatcaacaaagtcactaggtatatacaaattttgatacggcgccttagttca

SEQ ID NO: 629209 - DNA, 315 bp, Homo sapiens
gactctagagatccatctcgtcgatctgagcaatgatcgccactcgctccaagtgtggatacaggcatgagcactgagccgttcctttataatttctatcaagtcatattctacaaaggggtatttggatgattcttactttatgaattttttcaaaggccaagaaagcgatggtataacacacagaaatcagagaataggagagctagtgagtagagcttccagttggagattgggttcattaccttacctacttgtcaaccacatctcaagatatgatgacagttaccaggtcttggaaagattgcggcgttg

SEQ ID NO: 629210 - DNA, 158 bp, Homo sapiens
gaatagcctgcaaggatcacacattcagactgtagtgtctgtggagttttaggagtgaaggggtgacctttctggtcttagcactatccatcctctcccactatccgatctggcatcccacgcagttgtcccctagcacttactggacaggcacaggg

SEQ ID NO: 629211 - DNA, 155 bp, Homo sapiens
tgcgacatccaactaatataccaactgtatccctaaaattagtgctgacaatatgaggcgtccatcgagccacccacagaatgcacttcacacatttgcacagccattctggtgtatccacattttcacgaattgactgcaggctgctcattaca

SEQ ID NO: 629212 - DNA, 264 bp, Homo sapiens
ctgggcgggcagggcaaccgcgcccgccaaaaaaacaaaggccagggggtttttggccgcagcactttccagcgccgcccggtcctcacacaaaaaacttttctagctttgcgggtgcggctttaaacgactggccctgaatttttttttccccaagatccccaaacccttttttggagtttggattggaacccctttccggtaacacaaataaggtttatacattgcgattggttgatcttttaaattttttattaatttaga

SEQ ID NO: 629213 - DNA, 345 bp, Homo sapiens
  misc_feature (216)..(217): n is a, c, g, or t
  misc_feature (237)..(237): n is a, c, g, or t
gtgtaacctgctgcagagcagtgggatgtcaataattaaacactgctttatccaaactcaagttatcatgggaagtattatcgagtttcacttgcatttgtactcttcgttgcaatacaagtaaatattcatgtctgggtctccgtttaactcctctgggtgaaaacgttacggatttaacgaacgaagcttatgttgaacacttggaacgtgcanncttttaggtgagctctttcnccaagcactttatttcaatacgaaaaaaaataaatcagcaatttaaaaaatatttaaaaaaatgtattggggtttagtttatctgaaaagggttgaaattattaatag

SEQ ID NO: 629214 - DNA, 173 bp, Homo sapiens
ggcaggggacaaagagcaagggggttttgggtatttgcttcccttcccgtttttcctttgcccctggaaaggaatgtgggggcccccttttttggaaatggacccccccccttttctttttctggaaataaaccccaaactttccccctttcaaaaaagggtttatgccccca

SEQ ID NO: 629215 - DNA, 388 bp, Homo sapiens
agaaccttccatctgccgcggctggagctcgctgctccagccggtggctcgtattccaaccttccagcctgcgatctgtggagaatcaatctacttactctcttgcgcaatacataccttgtggcgagctcacgcagcaacatttaaccatgcggccacgtgtgcacatccaggctgttcagcgtgccaacgacatcggcgccacttctcgcgcggccctcagcgctcatcccgccatccggcccctgcctcctacgaccctttctgcgcgctccgctgctccgaccccccagtccccacccgtcccccgccgccactcttcgcgtccccgactccctctcgcttgtctcacccccctctcgcggtcccccgtccttcgttgtgcccg

SEQ ID NO: 629216 - DNA, 368 bp, Homo sapiens
aagtatttgtgtatccaaacatatcacagtaaaagtaccctataaaagataaaaaatgggccaggcgtggtggctcacgcctgtaatcctagcatgttgggaggccgaggcgggcggattgcttgagctcaggagttcgaaaccagcttgggcaacatggtgaaaccctgtctgtactaaaaatatagatataaaaaaactagccaggcatagcagtgtgcacctgtagtcccagcgactcaggaggctgagacaggagaattgcttgaacctccccccccccccccacagtgagagcagataaatttatggcaattttagcctgggttttccatgtcctgtcagtattcaaaaccataagtttcttt

SEQ ID NO: 629217 - DNA, 293 bp, Homo sapiens
cctcagtgtcagtccagcaatctgagatatcatgtgtctgagtgagtatgtgctcttgagtgtgctgccttgttgtggattgcgcatggctgagtccacatagagcacagtgcatgatgagctgaggttgtagcgattaccaggtcattggatacctgtaggttgctgcgcagatcagacaggaaagtgacttggtgatcgagttttaagataggaatcccaaaccttttttgaactgaggtggcattactcccagtgcaaattggttgggaaatcccggggagcaattgtta

SEQ ID NO: 629218 - DNA, 969 bp, Homo sapiens
  misc_feature (901)..(901): n is a, c, g, or t
aataaaaattaaaaatagatgtagatgctatgttgctgaggctggcctcaaactcctggcctcaggtgatcctcccgccatgacctccaaaaccacagggattgtaggtgtgagcactgcacccagccttatgtttttttctacataaaaaacagcacaggattatcttccagagctaataaatatgttcaaataaccacaaccccattaaggaaaaatatcactgggcagcaaataatcaatccagaccaatatgatcacaattgctgtgaaggtgagaaaagttcatttttattatgtttccccaagagacgcactctattgttctcttgaaaacacacagctcatgtcctcctttagaacacacatcctctttaaagtaacatacaaacatgccaaaacaaggtaaaaaattacatctgaattctcacatttcaaatatatatgaaatatcaaataaaaatttatttttacaagaatttaggggaactactacatagctataaatgtaatatatatgttaactaagtatcatagataaaaaccatgctcccttcagcagcacgtgtaataatagatacaaagattgaaaggtaaaagatttaggatgaaaagaatcctctcttaaaaaggaaaacaaaattatatgtatgtgtatataacagttataatatccatcacacagctttatagaaacagcatctattcaaaaataccagtatttccaaaatatttaaaataatatttaaagtaataataatatttaaataaataaatatatttaataaatatttaaataaataaaataatatttaaataattctatacccatgtttttcaaaataaaccaataaaatagatagtatatattagacgtgttaaggtaataatattatcctgnagaaccatggttttaaaaaaatccaccaaccttggaaatttcctccaccaaaatttccaaagtccacc

SEQ ID NO: 629219 - DNA, 908 bp, Homo sapiens
gtcgctcattacacgtgtgtgacaatttggcccgacaccgtgccggacgatccaacctgcggtattctcacttccggtgtcattttcccacaccggcaactacatggggctagcgcagggttaccccgcgaattttacctttgtgtcgcggcttcccttgacaactgggatttttctgcgtgaccgggcccctttgttcccgccacttccggtgggaggatctggggcttccccttttccaggaagctacgcgtcccacggtctaccagcctcctcctcgggggccccacattctacaggagatccatgaaggcaatttgctctaattttgcgagctgtgacacatacttggacgagcaacccctttggggacctatcccacagcttctgtgaggatgacctcccctctttcgccccacccctcattggtggttggcgccccccctgtggcgcccagttccccagtacgctgggctcgcctcccttgatctcctggggccgcgggggtcgcgcccctccccctcatcaggtgggtacggaagcgtgttcctcctgtcctttggcgaggccccccatggagcaaaagtctccctggcacccctcggtgctggagcttacagccccagcgatcaggtatagtctgtcgccccccccctcatgcccctgagagcggtgcttgggcccgcttctggagctcgccaccctttgtgggccaccaggtgtgtactcaccccttcttgggttgccagcagcgttagcttcggctgttctagccgccacgcacaccgggtgaccagcacggtttgttggcgcggcactcgagtggcgaccctcgttcgcccgctcggcccccccaatgggcctttgcccccctcccccacaaaaaaaatttttgcccccaacataac

SEQ ID NO: 629220 - DNA, 1165 bp, Homo sapiens
  misc_feature (701)..(701): n is a, c, g, or t
  misc_feature (891)..(891): n is a, c, g, or t
  misc_feature (1084)..(1084): n is a, c, g, or t
  misc_feature (1090)..(1090): n is a, c, g, or t
  misc_feature (1100)..(1100): n is a, c, g, or t
  misc_feature (1102)..(1102): n is a, c, g, or t
tgtcactttctacacggcggcggatcgggtgttgcatccttggagagagctgagagctcgagtacagaacctgctaaggccatcaaacctattgatcggaagtcagtccatcagatttgctctgggccggtggtactgagtctaagcactgcggtgaagaagatagtagaaaacagtctggatgctggtgccactaatattgatctaaagcttaaggactatggaatggatctcattgaagtttcaggcaatggatgtggggtagaagaagaaaacttcgaaggcttaaagctctgaaacatcacacatctaagattcaagagtttgccgacctaactcgggttgaaacttttggctttcgggggaaagctctgagctcactttgtgcactgagtgatgtcaccatttctacctgccacgtatcggcgaaggttgggactcgactggtgtttgatcacgatgggaaaatcatccagaaaaccccctacccccaccccagagggaccacagtcagcgtgaagcagttattttctacgctacctgtgcgccataaggaatttcaaaggaatattaagaagaaacgtgcctgcttccccttcgccttctgccgtgattgtcagtttcttgagggctccccagccatgcttcctgtacagcctgcaaaactgactcctagaagtaccccatgagtcaattaaacntcttttcttcataaattccccagtttccagtagttctttatagcagtgtgaaaacagactaatggacccttctggttgaaggaatgtagccattctgcttgtttaagtatttcctttctattcatctctatttcccgggaggtgtttatccaagtgcaataggagatattggtgactgcagagtcccctnagtgttctgctagtaaatagttgaaggttgatcagtgatctccagcattttcagtctggcatggaaaagcccccatgtaactggtaaaggtatcagtaagcaccaggaggtatctaaatccaccaggagccataggcatcatgttgatgtccatttaccagtcttcctggcaagattctctgaattgtactgncttgcnaaaagagtangnagggggatgatcccagtggctcacgctgtattccaagacttgggagacaatccgggtaagatc

SEQ ID NO: 629221 - DNA, 594 bp, Homo sapiens
ctccggcacaaggctggagttcggtggcgtgattcttggcctcaaatgcaaactccgcctcctgggttcacgccattctcctgctcagcttctttattagctccgactacagggctgtgccaccacacctggacagtttgtttgtttgtttgattattgagatagagtcttgctctgcctctcaggctggaatggagtggcaggatcagggctccctgcagccccgacctcccaggctccagcgatcctcccgcctcagcctcctgagtagttgggagtagagatgcctcccacatcgcctggctaatttttgtatttttgtggagaggggatctcgccacgttgcccaggcttgaagccagatcaagcaattgggttccttcggatttccgaaatagaccccaatattctgcctttaccccggaggatgcagatgtaccttctctcaggccgatgacctcaggcctccacggtccctggagctctaggaaaggtgagcgcgatctcgcgcccacacccagtgctctgggtcataagcctggatctggaaaaacaaacgccctttgagaagcgcaagcggggatcctctaagtc

SEQ ID NO: 629222 - DNA, 1008 bp, Homo sapiens
  misc_feature (544)..(544): n is a, c, g, or t
  misc_feature (734)..(734): n is a, c, g, or t
  misc_feature (927)..(927): n is a, c, g, or t
  misc_feature (933)..(933): n is a, c, g, or t
  misc_feature (943)..(943): n is a, c, g, or t
  misc_feature (945)..(945): n is a, c, g, or t
ccaagattcaagaggccgacctactcgggttgaaacggctttcggggggaagctctgagcctcactttgtgcactgagatgccagaccttagattttgtgatgactcctcaaccgtttagatctcggttatctcagagggatcatcagctttttaagaaaattttgagagaaaagcaagtgaagaaaagagtagtcagtgcccaacatcacggatctctcactgaacacaccatgcctggtattctctcacagtgatgtcaccatttctacctgccacgtatcggcgaaggttgggactcgactggtgtttgatcacgatgggaaaatcatccagaaaaccccctacccccaccccagagggaccacagtcagcgtgaagcagttattttctacgctacctgtgcgccataaggaatttcaaaggaatattaagaagtaaacgtgcctgcttccccttcgccttctgccgtgattgtcagtttcttgagggctccccagccatgcttcctgtacagcctgcaaaactgatgagtcaattaaacntcttttcttcataaattccccagtttccagtagttctttatagcagtgtgaaaacagactaatggacccttctggttgaaggaatgtagccattctgcttgtttaagtatttcctttctattcatctctatttcccgggaggtgtttatccaagtgcaataggagatattggtgactgcagagtcccctnagtgttctgctagtaaatagttgaaggttgatcagtgatctccagcattttcagtctggcatggaaaagcccccatgtaactggtaaaggtatcagtaagcaccaggaggtatctaaatccaccaggagccataggcatcatgttgatgtccatttaccagtcttcctggcaagattctctgaattgtactgncttgcnaaaagagtangnagggggatgatcccagtggctcacgctgtattccaagacttgggagacaatccgggtaagatc

SEQ ID NO: 629223 - DNA, 725 bp, Homo sapiens
  misc_feature (16)..(16): n is a, c, g, or t
  misc_feature (261)..(261): n is a, c, g, or t
  misc_feature (451)..(451): n is a, c, g, or t
  misc_feature (644)..(644): n is a, c, g, or t
  misc_feature (650)..(650): n is a, c, g, or t
  misc_feature (660)..(660): n is a, c, g, or t
  misc_feature (662)..(662): n is a, c, g, or t
ggagggacctggtggnagatgattggctcatggcggctgacgtccccctgctggttctcgtgatagtgagtgagcgctcatgggatctggttgtttagaagcatgcagcacctcctgcttcactctctctgtctctcctgctccaccatggccagaaacgtgcctgcttccccttcgccttctgccgtgattgtcagtttcttgagggctccccagccatgcttcctgtacagcctgcaaaactgatgagtcaattaaacntcttttcttcataaattccccagtttccagtagttctttatagcagtgtgaaaacagactaatggacccttctggttgaaggaatgtagccattctgcttgtttaagtatttcctttctattcatctctatttcccgggaggtgtttatccaagtgcaataggagatattggtgactgcagagtcccctnagtgttctgctagtaaatagttgaaggttgatcagtgatctccagcattttcagtctggcatggaaaagcccccatgtaactggtaaaggtatcagtaagcaccaggaggtatctaaatccaccaggagccataggcatcatgttgatgtccatttaccagtcttcctggcaagattctctgaattgtactgncttgcnaaaagagtangnagggggatgatcccagtggctcacgctgtattccaagacttgggagacaatccgggtaagatc

SEQ ID NO: 629224 - DNA, 617 bp, Homo sapiens
  misc_feature (20)..(20): n is a, c, g, or t
  misc_feature (564)..(564): n is a, c, g, or t
  misc_feature (600)..(600): n is a, c, g, or t
agcggggaacaatcacttgnaacacacacttaagataatttccactattaacaagtgaaaactctgtttcaaaggatgatgaccaaaagatcaatcatgtgtaagtatgtaactacatacgaggtacagagtatgttgtttattcttcatttacataaattgacctttttaatgtgggaaaggttctaaatacattcttcaaaagaagttctgcaatagacaggatctgaaacagtaggttagtgattaatgcttaaaaatcactcgtcttcatttagtggcgtttccagatgtaaacccaaaaatgtgagaaatgaaaagcaaagtaattacacactaacatttttagacaacaggctggttgcatttcacatgcaccttatggctttatacatctcaacagggaagaggaggcagccctgaccatgttctcagaaaagattaactgtaagtaaaccaaccttaacaaatttcattgttaccctcctaaataacttattttacaagcattttccttttaaactcaacccttatacaagagatagggggtaggggaatatcagncatatataatatctttagcagcagaagagattaaancaaagatcaatcaatct

SEQ ID NO: 629225 - DNA, 1229 bp, Homo sapiens
  misc_feature (579)..(580): n is a, c, g, or t
  misc_feature (585)..(585): n is a, c, g, or t
  misc_feature (1229)..(1229): n is a, c, g, or t
tgtcactttctacacggcggcggatcgggtgttgcatccttggagagagctgagagctcgagtacagaacctgctaaggccatcaaacctattgatcggaagtcagcccatcagatttgctctgggccggtagtactgagtctaagcactgcggtgaagaagatggtagaaaacagtctggatgctggtgccactaatattgatctaaagcttaaggactatggaatggatctcattgaagtttcaggcaatggatgtggggtagaagaagaaaacttcgaaggcttaatgatgtcaccatttctacctgccacgtatcggcgaaggttgggactcgactggtgtttgatcacgatgggaaaatcatccagaaaaccccctacccccaccccagagggaccacagtcagcgtgaagcagttattttctacgctacctgtgcgccataaggaatttcaaaggaatattaagaagaaacgtgcctgcttccccttcgccttctgccgtgattgtcagtttcttgagggctccccagccatgcttcctgtacagcctgcaaaacttgtgagtcaattaaacnnctttncttcataaaaaaaaaaaaaaaaaaaaaaaaaaaaaaaaaaaaaaaaaaaaaaaaaaaaaaaaaaaaaaaggggggggggccgaaagaagacactcccccgtagagggcgccagacatctgcagtccgcaccaccaccaggattgtctagtagaaagaaggagggcgccccaaatagaggagcggcgcgccgattaatataacacaggaagacagcgagcaggcggccggcggtgtaaaaaaacaacacgcgcgggagaaggaacgaaaaaaccgccgcactacgcgggaggagaccttccgggagaaaagagatcgcccactaccgactctctcgcggggggggggacgaaccaaaaattagtgtgggggaacaaacaactctccctccagacgagagagatattatagagacgccccagcagaaggggagaacattatttaaaatctttgaggaggaggtttgtaaatatggtgggtgggtgaagcaaagagaggccagaagaataagttgattgagcgcgggcggtggaagcaaaaaatgttggtgggcacgaccagcaggggagttgttgtatttgtggagacaaacagatgtttttagaccgggcgacggctgtggtgatgatattaatatagcgggagn

SEQ ID NO: 629226 - DNA, 3635 bp, Homo sapiens
atcttgagatcatttatggttttgcaattcaacctgaaaaatgaagtcaaagcttttatcaaaacaaagcatgtttagtgctctctgtctcactgtcttttagatgccagaccttagattttgtgatgactcctcaaccgtttagatctcggttatctcagagggatcatcagctttttaagaaaattttgagagaaaagcaagtgaagaaaagagtagtcagtgcccaacatcacggatctctcactgaacacaccatgcctggtattctctcacagtgatgtcaccatttctacctgccacgtatcggcgaaggttgggactcgactggtgtttgatcacgatgggaaaatcatccagaaaaccccctacccccaccccagagggaccacagtcagcgtgaagcagttattttctacgctacctgtgcgccataaggaatttcaaaggaatattaagaagtacagaacctgctaaggccatcaaacctattgatcggaagtcagtccatcagatttgctctgggccggtggtactgagtctaagcactgcggtgaagaagatagtaggaaacagtctggatgctggtgccactaatattgatctaaagcttaaggactatggaatggatctcattgaagtttcaggcaatggatgtggggtagaagaagaaaacttcgaaggcttaatctctttcagctctgaaacatcacacatctaagattcgagagtttgccgacctaactcgggttgaaacttttggctttcgggggaaagctctgagctcactttgtgcactgagtgatgtcaccatttctacctgccacgtatcggcgaaggttgggactcgactggtgtttgatcacgatgggaaaatcatccagaaaaccccctacccccaccccagagggaccacagtcagcgtgaagcagttattttctacgctacctgtgcgccataaggaatttcaaaggaatattaagaagaacctgctaaggccatcaaacctattgatcggaagtcagtccatcagatttgctctgggccggtggtactgagtctaagcactgcggtgaagaagatagtagaaaacagtctggatgctggtgccactaatattgatctaaagcttaaggactatggaatggatctcattgaagtttcaggcaatggatgtggggtagaagaagaaaacttcgaaggcttaatgatgtcaccatttctacctgccacgtatcggcgaaggttgggactcgactggtgtttgatcacgatgggaaaatcatccagaaaaccccctacccccaccccagagggaccacagtcagcgtgaagcagttattttctacgctacctgtgcgccataaggaatttcaaaggaatattaagaagaaacgtgcctgcttccccttcgccttctgccgtgattgtcagtttcttgagggctccccagccatgcttcctgtacagcctgcaaaactgactcctagaagtaccccaccccacccctgctccttggaggacaacgtgatcactgtattcagctctgtcaagaatggtccaggttcctctcctccttcctgatgtctgccattagcattggaataaagttcctgctgaaaatccacatctcccctgggtccggtgttctggaagtgagagagacaatgtcacacttcaaggaggcagctctctagacaggaaggttattcacgtcccatgtcaagtctagctagagttcagagcaattgagaagtgcaattttatctcctgcctttcattctataccctgcttctgaaccatcgtgttcaactgtgaaactcacactttggtgaccctgactccaaaacttaatacacccaaggtcagccccagtgatctgcttcatagcaaggactttgggtgggtcttcccagggagtagggcaccctcagagaatgtggctttggacttcatcacagctggggccttttgtgtcacttcagatctaaacttgtaaccgtgctagatctgtttctaatgtgacaacatcacgaaccacgagtccagaagcctaatccataatcctacctcctcatgacgaagtctcatgctctgtgctcaacatggttagctgcacaagatgtaaaccaaagcttcactgaaccctcgacccaaatcggtaactcaagtgcatcaatcataatgaacctccccgaactcagtatttatgattatttttgaggcagggtctcactctgtcgcccgggctggagtgcagtggcaggatcagggctccctgcagccccgacctcccaggctccagcgatcctcccgcctcagcctcctgagtagttgggagtagagatgcctcccacatcgcctggctaatttttgtatttttgtggagaggggatctcgccacgttgcccaggcttgaagccagatcaagcaattgggttccttcggatttccgaaatagaccccaatattctgcctttaccccggaggatgcagatgtaccttctctcaggccgatgacctcaggcctccacggtccctggagctctaggaaaggtgagcgcgatctcgcgcccacacccagtgctctgggtcataagcctggatctggaaaaacaaacgccctttgagaagacggggactccccaggatacccctctctcccctcgtccagcctccagcccacccgattcctccccacatcctccacctccccaggccccacccacctcctccaactcctccagggaaacccaagccctgcagcgcatggaacagaagaagtggaaccgatacttccggaacaaggctatctgagagcagttcttcctggccctcgggttcatgtaacggcataactggaaccaaagctcactgagcaagggtatatgagagcgggtctcctcgtacaggaagtagaagatgttttgtttgggggcctcgtcgtcctcctccatgtcattggccagatagctgaggacagaaatcaggttgctgctcaggggcaccaccaggagagacctccggctgaggtcagcttcccagagaggaaggtaagggaccgtccctagctcaggactggcacccaccctgcagagagccacgccttcctcaggagggctctgctggacagagacctgatcaagggcgtctcccactccttcaggatggagacaaaaacccaactggtggccgagagtggtggcttatgcctggaatcccagcacactgggaggccgaagcaggaggatcacttgaggccaggagtttgagacgggcctgggcaacatagcaagaccctcgtctctattaaaaatataaaaaatacgccaggcgcgtggctcatgcctgtaatcccagcactttggaaggctgaagcaggtggattgcttgagaccaggagtttgagaccagcctggtcaacacagagaaaccccatctatactaaaaatacaaaaatcagcctggtgcggtggcacacccattagtcctagctactcaggaggctgaagcataagaattgtgtgaacccaggaggcggaggttgcagtgagccaagattgggcccctccattccagcctgagagacacagcaacactcttgtcttgataaataaataaataaataaataaa

SEQ ID NO: 629227 - DNA, 3735 bp, Homo sapiens
tgtcactttctacacggcggcggatcgggtgttgcatccttggagagagctgagagctcgagtacagaacctgctaaggccatcaaacctattgatcggaagtcagcccatcagatttgctctgggccggtagtactgagtctaagcactgcggtgaagaagatggtagaaaacagtctggatgctggtgccactaatattgatctaaagcttaaggactatggaatggatctcattgaagtttcaggcaatggatgtggggtagaagaagaaaacttcgaaggcttaatgatgtcaccatttctacctgccacgtatcggcgaaggttgggactcgactggtgtttgatcacgatgggaaaatcatccagaaaaccccctacccccaccccagagggaccacagtcagcgtgaagcagttattttctacgctacctgtgcgccataaggaatttcaaaggaatattaagaagaaacgtgcctgcttccccttcgccttctgccgtgattgtcagtttcttgagggctccccagccatgcttcctgtacagcctgcaaaacttacagaacctgctaaggccatcaaacctattgatcggaagtcagtccatcagatttgctctgggccggtggtactgagtctaagcactgcggtgaagaagatagtaggaaacagtctggatgctggtgccactaatattgatctaaagcttaaggactatggaatggatctcattgaagtttcaggcaatggatgtggggtagaagaagaaaacttcgaaggcttaatctctttcagctctgaaacatcacacatctaagattcgagagtttgccgacctaactcgggttgaaacttttggctttcgggggaaagctctgagctcactttgtgcactgagtgatgtcaccatttctacctgccacgtatcggcgaaggttgggactcgactggtgtttgatcacgatgggaaaatcatccagaaaaccccctacccccaccccagagggaccacagtcagcgtgaagcagttattttctacgctacctgtgcgccataaggaatttcaaaggaatattaagaagaacctgctaaggccatcaaacctattgatcggaagtcagtccatcagatttgctctgggccggtggtactgagtctaagcactgcggtgaagaagatagtagaaaacagtctggatgctggtgccactaatattgatctaaagcttaaggactatggaatggatctcattgaagtttcaggcaatggatgtggggtagaagaagaaaacttcgaaggcttaatgatgtcaccatttctacctgccacgtatcggcgaaggttgggactcgactggtgtttgatcacgatgggaaaatcatccagaaaaccccctacccccaccccagagggaccacagtcagcgtgaagcagttattttctacgctacctgtgcgccataaggaatttcaaaggaatattaagaagaaacgtgcctgcttccccttcgccttctgccgtgattgtcagtttcttgagggctccccagccatgcttcctgtacagcctgcaaaactgactcctagaagtaccccaccccacccctgctccttggaggacaacgtgatcactgtattcagctctgtcaagaatggtccaggttcctctcctccttcctgatgtctgccattagcattggaataaagttcctgctgaaaatccacatctcccctgggtccggtgttctggaagtgagagagacaatgtcacacttcaaggaggcagctctctagacaggaaggttattcacgtcccatgtcaagtctagctagagttcagagcaattgagaagtgcaattttatctcctgcctttcattctataccctgcttctgaaccatcgtgttcaactgtgaaactcacactttggtgaccctgactccaaaacttaatacacccaaggtcagccccagtgatctgcttcatagcaaggactttgggtgggtcttcccagggagtagggcaccctcagagaatgtggctttggacttcatcacagctggggccttttgtgtcacttcagatctaaacttgtaaccgtgctagatctgtttctaatgtgacaacatcacgaaccacgagtccagaagcctaatccataatcctacctcctcatgacgaagtctcatgctctgtgctcaacatggttagctgcacaagatgtaaaccaaagcttcactgaaccctcgacccaaatcggtaactcaagtgcatcaatcataatgaacctccccgaactcagtatttatgattatttttgaggcagggtctcactctgtcgcccgggctggagtgcagtggcaggatcagggctccctgcagccccgacctcccaggctccagcgatcctcccgcctcagcctcctgagtagttgggagtagagatgcctcccacatcgcctggctaatttttgtatttttgtggagaggggatctcgccacgttgcccaggcttgaagccagatcaagcaattgggttccttcggatttccgaaatagaccccaatattctgcctttaccccggaggatgcagatgtaccttctctcaggccgatgacctcaggcctccacggtccctggagctctaggaaaggtgagcgcgatctcgcgcccacacccagtgctctgggtcataagcctggatctggaaaaacaaacgccctttgagaagacggggactccccaggatacccctctctcccctcgtccagcctccagcccacccgattcctccccacatcctccacctccccaggccccacccacctcctccaactcctccagggaaacccaagccctgcagcgcatggaacagaagaagtggaaccgatacttccggaacaaggctatctgagagcagttcttcctggccctcgggttcatgtaacggcataactggaaccaaagctcactgagcaagggtatatgagagcgggtctcctcgtacaggaagtagaagatgttttgtttgggggcctcgtcgtcctcctccatgtcattggccagatagctgaggacagaaatcaggttgctgctcaggggcaccaccaggagagacctccggctgaggtcagcttcccagagaggaaggtaagggaccgtccctagctcaggactggcacccaccctgcagagagccacgccttcctcaggagggctctgctggacagagacctgatcaagggcgtctcccactccttcaggatggagacaaaaacccaactggtggccgagagtggtggcttatgcctggaatcccagcacactgggaggccgaagcaggaggatcacttgaggccaggagtttgagacgggcctgggcaacatagcaagaccctcgtctctattaaaaatataaaaaatacgccaggcgcgtggctcatgcctgtaatcccagcactttggaaggctgaagcaggtggattgcttgagaccaggagtttgagaccagcctggtcaacacagagaaaccccatctatactaaaaatacaaaaatcagcctggtgcggtggcacacccattagtcctagctactcaggaggctgaagcataagaattgtgtgaacccaggaggcggaggttgcagtgagccaagattgggcccctccattccagcctgagagacacagcaacactcttgtcttgataaataaataaataaataaataaa

SEQ ID NO: 629228 - DNA, 895 bp, Homo sapiens
taaaggtttctgcatgatggtttatttaaaatattatgactctggatgtaaatacatatgggcttacattaagtgtatgattatccatataaagtgcctcaattaacaatatttagttcactcctttaaacaccttttggttctaataagcataatagtaaatattttactctcatgtggaagtgtttaaagctgttgtgaactcttgattgtgtgaagaaatttacgtgaaaaattaacttagaggttaactacattcaaacaattactatgtgttgtgcaagtgctgctcagatttcctccagtggcaaaattagttcgcatagtggtctatgtgcccgaactttaataggatcacaggttattagtggtgcattatataaacctctctcatacattacagtgaccaggtgtttgggcaccgtgcaactttgcttccaaacacattttacaacactttgctgcgaacattacaattttcacaaaaactctttttaacaacattacctttttaagataaaaagtactccgtggaggcatattacaaaattcattttataccaggcccttcattctctatgggcttggactcttataattctccaagaataatccgtgtgcccataattttattacttaaaagggctataattatatattctcctattaaacaaaactattttctaagttcaaatgagtacatcaattgtgtcccataaacaacttagtccccatctgcctgtagtctcatgggttaaaatccaagtatttatcaagtttctataattctgaatcagaacgggtaccgcacaaaacagaacagaacacgggttagcccatttaagttaaaagccttgtgccttttacatattgggggcatattttataataaatt

SEQ ID NO: 629229 - DNA, 238 bp, Homo sapiens
gatcgacatcctcccaggccccaaggacacacacactctgtcctttccatgggccatggctctgggagctacccacagaagggataggaggctcaaactgccccaaggccccagagttttcaggtcggggagttagggatggaacatgaaaatgacatgcttgttaaatacatcactggctgtgaccacaaggctgagggggcctccttgctctggagggggttttcattcatccttg

SEQ ID NO: 629230 - DNA, 3415 bp, Homo sapiens
tcgaggcccagccttcgccgatcgtggcaggtagaaatggtgacatcactgtgagagaataccaggcatggtgtgttcagtgaaagatccgtgatgttgggactcgactggtgtttgatcacgatgggaaaatcatccagaaaaccccctacccccaccccagagggaccacagtcagcgtgaagcagttattttctacgctacctgtgcgccataaggaatttcaaaggaatattaagaagtacagaacctgctaaggccatcaaacctattgatcggaagtcagtccatcagatttgctctgggccggtggtactgagtctaagcactgcggtgaagaagatagtaggaaacagtctggatgctggtgccactaatattgatctaaagcttaaggactatggaatggatctcattgaagtttcaggcaatggatgtggggtagaagaagaaaacttcgaaggcttaatctctttcagctctgaaacatcacacatctaagattcgagagtttgccgacctaactcgggttgaaacttttggctttcgggggaaagctctgagctcactttgtgcactgagtgatgtcaccatttctacctgccacgtatcggcgaaggttgggactcgactggtgtttgatcacgatgggaaaatcatccagaaaaccccctacccccaccccagagggaccacagtcagcgtgaagcagttattttctacgctacctgtgcgccataaggaatttcaaaggaatattaagaagaacctgctaaggccatcaaacctattgatcggaagtcagtccatcagatttgctctgggccggtggtactgagtctaagcactgcggtgaagaagatagtagaaaacagtctggatgctggtgccactaatattgatctaaagcttaaggactatggaatggatctcattgaagtttcaggcaatggatgtggggtagaagaagaaaacttcgaaggcttaatgatgtcaccatttctacctgccacgtatcggcgaaggttgggactcgactggtgtttgatcacgatgggaaaatcatccagaaaaccccctacccccaccccagagggaccacagtcagcgtgaagcagttattttctacgctacctgtgcgccataaggaatttcaaaggaatattaagaagaaacgtgcctgcttccccttcgccttctgccgtgattgtcagtttcttgagggctccccagccatgcttcctgtacagcctgcaaaactgactcctagaagtaccccaccccacccctgctccttggaggacaacgtgatcactgtattcagctctgtcaagaatggtccaggttcctctcctccttcctgatgtctgccattagcattggaataaagttcctgctgaaaatccacatctcccctgggtccggtgttctggaagtgagagagacaatgtcacacttcaaggaggcagctctctagacaggaaggttattcacgtcccatgtcaagtctagctagagttcagagcaattgagaagtgcaattttatctcctgcctttcattctataccctgcttctgaaccatcgtgttcaactgtgaaactcacactttggtgaccctgactccaaaacttaatacacccaaggtcagccccagtgatctgcttcatagcaaggactttgggtgggtcttcccagggagtagggcaccctcagagaatgtggctttggacttcatcacagctggggccttttgtgtcacttcagatctaaacttgtaaccgtgctagatctgtttctaatgtgacaacatcacgaaccacgagtccagaagcctaatccataatcctacctcctcatgacgaagtctcatgctctgtgctcaacatggttagctgcacaagatgtaaaccaaagcttcactgaaccctcgacccaaatcggtaactcaagtgcatcaatcataatgaacctccccgaactcagtatttatgattatttttgaggcagggtctcactctgtcgcccgggctggagtgcagtggcaggatcagggctccctgcagccccgacctcccaggctccagcgatcctcccgcctcagcctcctgagtagttgggagtagagatgcctcccacatcgcctggctaatttttgtatttttgtggagaggggatctcgccacgttgcccaggcttgaagccagatcaagcaattgggttccttcggatttccgaaatagaccccaatattctgcctttaccccggaggatgcagatgtaccttctctcaggccgatgacctcaggcctccacggtccctggagctctaggaaaggtgagcgcgatctcgcgcccacacccagtgctctgggtcataagcctggatctggaaaaacaaacgccctttgagaagacggggactccccaggatacccctctctcccctcgtccagcctccagcccacccgattcctccccacatcctccacctccccaggccccacccacctcctccaactcctccagggaaacccaagccctgcagcgcatggaacagaagaagtggaaccgatacttccggaacaaggctatctgagagcagttcttcctggccctcgggttcatgtaacggcataactggaaccaaagctcactgagcaagggtatatgagagcgggtctcctcgtacaggaagtagaagatgttttgtttgggggcctcgtcgtcctcctccatgtcattggccagatagctgaggacagaaatcaggttgctgctcaggggcaccaccaggagagacctccggctgaggtcagcttcccagagaggaaggtaagggaccgtccctagctcaggactggcacccaccctgcagagagccacgccttcctcaggagggctctgctggacagagacctgatcaagggcgtctcccactccttcaggatggagacaaaaacccaactggtggccgagagtggtggcttatgcctggaatcccagcacactgggaggccgaagcaggaggatcacttgaggccaggagtttgagacgggcctgggcaacatagcaagaccctcgtctctattaaaaatataaaaaatacgccaggcgcgtggctcatgcctgtaatcccagcactttggaaggctgaagcaggtggattgcttgagaccaggagtttgagaccagcctggtcaacacagagaaaccccatctatactaaaaatacaaaaatcagcctggtgcggtggcacacccattagtcctagctactcaggaggctgaagcataagaattgtgtgaacccaggaggcggaggttgcagtgagccaagattgggcccctccattccagcctgagagacacagcaacactcttgtcttgataaataaataaataaataaataaa

SEQ ID NO: 629231 - DNA, 2716 bp, Homo sapiens
tgtcactttctacacggcggcggatcgggtgttgcatccttggagagagctgagagctcgagtacagaacctgctaaggccatcaaacctattgatcggaagtcagtccatcagatttgctctgggccggtggtactgagtctaagcactgcggtgaagaagatagtagaaaacagtctggatgctggtgccactaatattgatctaaagcttaaggactatggaatggatctcattgaagtttcaggcaatggatgtggggtagaagaagaaaacttcgaaggcttaatgatgtcaccatttctacctgccacgtatcggcgaaggttgggactcgactggtgtttgatcacgatgggaaaatcatccagaaaaccccctacccccaccccagagggaccacagtcagcgtgaagcagttattttctacgctacctgtgcgccataaggaatttcaaaggaatattaagaagaaacgtgcctgcttccccttcgccttctgccgtgattgtcagtttcttgagggctccccagccatgcttcctgtacagcctgcaaaactgactcctagaagtaccccaccccacccctgctccttggaggacaacgtgatcactgtattcagctctgtcaagaatggtccaggttcctctcctccttcctgatgtctgccattagcattggaataaagttcctgctgaaaatccacatctcccctgggtccggtgttctggaagtgagagagacaatgtcacacttcaaggaggcagctctctagacaggaaggttattcacgtcccatgtcaagtctagctagagttcagagcaattgagaagtgcaattttatctcctgcctttcattctataccctgcttctgaaccatcgtgttcaactgtgaaactcacactttggtgaccctgactccaaaacttaatacacccaaggtcagccccagtgatctgcttcatagcaaggactttgggtgggtcttcccagggagtagggcaccctcagagaatgtggctttggacttcatcacagctggggccttttgtgtcacttcagatctaaacttgtaaccgtgctagatctgtttctaatgtgacaacatcacgaaccacgagtccagaagcctaatccataatcctacctcctcatgacgaagtctcatgctctgtgctcaacatggttagctgcacaagatgtaaaccaaagcttcactgaaccctcgacccaaatcggtaactcaagtgcatcaatcataatgaacctccccgaactcagtatttatgattatttttgaggcagggtctcactctgtcgcccgggctggagtgcagtggcaggatcagggctccctgcagccccgacctcccaggctccagcgatcctcccgcctcagcctcctgagtagttgggagtagagatgcctcccacatcgcctggctaatttttgtatttttgtggagaggggatctcgccacgttgcccaggcttgaagccagatcaagcaattgggttccttcggatttccgaaatagaccccaatattctgcctttaccccggaggatgcagatgtaccttctctcaggccgatgacctcaggcctccacggtccctggagctctaggaaaggtgagcgcgatctcgcgcccacacccagtgctctgggtcataagcctggatctggaaaaacaaacgccctttgagaagacggggactccccaggatacccctctctcccctcgtccagcctccagcccacccgattcctccccacatcctccacctccccaggccccacccacctcctccaactcctccagggaaacccaagccctgcagcgcatggaacagaagaagtggaaccgatacttccggaacaaggctatctgagagcagttcttcctggccctcgggttcatgtaacggcataactggaaccaaagctcactgagcaagggtatatgagagcgggtctcctcgtacaggaagtagaagatgttttgtttgggggcctcgtcgtcctcctccatgtcattggccagatagctgaggacagaaatcaggttgctgctcaggggcaccaccaggagagacctccggctgaggtcagcttcccagagaggaaggtaagggaccgtccctagctcaggactggcacccaccctgcagagagccacgccttcctcaggagggctctgctggacagagacctgatcaagggcgtctcccactccttcaggatggagacaaaaacccaactggtggccgagagtggtggcttatgcctggaatcccagcacactgggaggccgaagcaggaggatcacttgaggccaggagtttgagacgggcctgggcaacatagcaagaccctcgtctctattaaaaatataaaaaatacgccaggcgcgtggctcatgcctgtaatcccagcactttggaaggctgaagcaggtggattgcttgagaccaggagtttgagaccagcctggtcaacacagagaaaccccatctatactaaaaatacaaaaatcagcctggtgcggtggcacacccattagtcctagctactcaggaggctgaagcataagaattgtgtgaacccaggaggcggaggttgcagtgagccaagattgggcccctccattccagcctgagagacacagcaacactcttgtcttgataaataaataaataaataaataaa

SEQ ID NO: 629232 - DNA, 237 bp, Homo sapiens
caagatcaacaggagaagtgatagcatagcgttcgtgtaaattatgtaatgcaaaatatttttaatctatcgccttaatactttcatatgaggtattattgggaatgatagagccttacgtgcccccaccttaccccctatatatgtacccccatacttgacgatgtactgaaggctttagtgactccctggagagtgggatggaggcaagccagggactatacctgatacactgta

SEQ ID NO: 629233 - DNA, 483 bp, Homo sapiens
cctccaggccccccttagaaacatcttccaaagcaaagggaggcccgagaactcagggggtcacttgcccccattccgggaggagatgccaagaaccaggtcagccttccctgcctggtcaaagggttttattccaacgacattccgtgtgagtgggaaaacaatgggcaaccggaaaaaaataaaaaaccccgccttccgtggtgggatccggcgggtccttttttctttaaaaaaagctccccgtgggcaaaaacaggggggaacaagggaaagtttttttattttccgttaagcaatagggtttggccaacccctacacgcaaaaaaacctttccctgttcccgggtaaaaaagtgggaggggcggcaaaccccccctccccggggtttttcggttgcccgaggaaggttgggagggaccccgtttaaaaactttccagggccccaggaaggaaaaaaaacacccccccctgccctggga

SEQ ID NO: 629234 - DNA, 871 bp, Homo sapiens
  misc_feature (173)..(173): n is a, c, g, or t
  misc_feature (193)..(193): n is a, c, g, or t
  misc_feature (195)..(197): n is a, c, g, or t
  misc_feature (303)..(303): n is a, c, g, or t
  misc_feature (344)..(344): n is a, c, g, or t
  misc_feature (361)..(361): n is a, c, g, or t
acgatctctatggtgaaacggcaggtcccattaaatctggggagcggctatagagtaacatttcgttagacgggtctcactactttctgaagaatggaccatattcattctccatttaatgccattctcctccctatactgcctgagtaccacctcttccaagaagtcatctntgactactccatcctcatcncnnnaggcttttctctcaatggtctacatcactgactttccacatagcttagctgttcttatgtctttctcacaaataagttttcatacctttgttcttcaacataaatnggggcctctcagcctgagggagacagtttagggagtaccanaatacacgtagtatcanaaaagcagtcccaggccactggagcttaccagttattgaatccttgcttctgcgaatccattgttttgaaggttggtgggtagttgcaaactccttgatgcatctgctgtgctgttgcatcctccctcctgtctatctcccctgcgtatgtaccactgtcgctatggtcacggtactgagcaccagggttgctaggttgcacaactttaagggggtgccattcgcaacctgcctgacacgaatggtgctccctggaattatgcattgcaacatctgcacgtgatcctgtcgaacaccagaaaattctactccagtggcaatggggaggctggtccctggcttgcttaaagaacccgcttttttattgtgtaacattatatacctttcaggacatttgacaagatatatttaagcatttgttaattttgtattattaaatatgtgtgtttataaagaaatagattatcctgaaataaagagaaaacgttggcagtgttctgtggtggccta

SEQ ID NO: 629235 - DNA, 187 bp, Homo sapiens
ttttgtaaattatttatgttttctaaacgaaatttaccggtataggttgatgaacgtcatgtgttttccgaaaagactggtaaatattttatttattgttcacatggtcaaaaatttcaccgacgtgaaaccctgcgacttagctagaacctcattttttaaagattaacaacaggaaataaattgt

SEQ ID NO: 629236 - DNA, 319 bp, Homo sapiens
  misc_feature (22)..(22): n is a, c, g, or t
  misc_feature (101)..(101): n is a, c, g, or t
  misc_feature (105)..(105): n is a, c, g, or t
  misc_feature (126)..(126): n is a, c, g, or t
  misc_feature (132)..(132): n is a, c, g, or t
  misc_feature (148)..(148): n is a, c, g, or t
  misc_feature (156)..(156): n is a, c, g, or t
  misc_feature (161)..(161): n is a, c, g, or t
  misc_feature (186)..(186): n is a, c, g, or t
  misc_feature (188)..(188): n is a, c, g, or t
  misc_feature (220)..(220): n is a, c, g, or t
  misc_feature (223)..(223): n is a, c, g, or t
  misc_feature (228)..(228): n is a, c, g, or t
  misc_feature (241)..(242): n is a, c, g, or t
  misc_feature (244)..(244): n is a, c, g, or t
  misc_feature (246)..(247): n is a, c, g, or t
  misc_feature (253)..(253): n is a, c, g, or t
  misc_feature (255)..(255): n is a, c, g, or t
  misc_feature (292)..(292): n is a, c, g, or t
gggggattctttttcccagggncggggaaacattaatttgtttttatattttactatttttttgtgtttttttgtttttaaatcaataagtcatctaggantagnattatgtttgatagaaatggnatttgntaggtaaataaggttnaaagtttnatttnatttttttatttattttatattttncnatgttttttttccataatatttaagtttttcnatntttanatatttttcttcnntnanncacaantntcttttcatggtccctgatcaattttaaacagttggnacaccggtggcactgtgaactgcgttc

SEQ ID NO: 629237 - DNA, 855 bp, Homo sapiens
taacaacatgttcatttaatttccatcaccagggggcatacccttgggggtgtaaaacggtactctacacccggtgggctatttatctgggggttagacttctgggagacttttcagatagacttgaagtctctggccttgcctggggaattactgggctgcccaaggaagcactggagaaggcgggggtctccttgcccttgtggtcctgctatggcgcatttggattggagttcctacgtatcggctggtcagagggggctggatagtggttgggcccactccattcctcaggttttttggaagcgggggtctttaagggagagcctttggttccgggaacttccttgacgggtcccttttcccttctggggtggtctggggaacctcttgggtgtagatgggtgggttgttggacacatgggctggaggctcggggtttcctggacatcttcggcagaccagggtctcgggaacagtgcaaatccagatccaccgggtctcccgcgagcttcccccaggacacgtgaaggaaggccagcaggctagaaacggtagccgcgacatttacaagcaaattggggctgcagagcccggatccccaaatcacacctcacactaccatacgggatccccatccaggaagaatcgcaggcaaccccgtgggggaaccccagggaagtaaacaaccgaaggtcagaatgggccgtggacaggctgggagatgaagggcgccaaagatggggaacctgccaatactcccaaacactggcctcggcaccggaggcccagggagtcccttcaacggtaccccgtgaaacacaaagggcggacgaaaaggggaaagtggcccgg

SEQ ID NO: 629238 - DNA, 828 bp, Homo sapiens
  misc_feature (406)..(406): n is a, c, g, or t
  misc_feature (467)..(467): n is a, c, g, or t
  misc_feature (748)..(749): n is a, c, g, or t
catgcagcgcagggcgtggtacgaggacgctacgttccgcgtatcatagaagaagctgatcacctgttatgatcacgcactgataatcattgtccttatctgcttcctagtcctgtatgccattttcctaacactcacaacaaaactaactaatactatcatctcagacgctcagagagatagacaccgtctgaactattctgcccaccatcatcctagaactcatcgccctcccatccctacgcatgctttacataacagacgaggccaacgatccgtcccttaccatcaaatcaatgggccaccaatgggactgaacctacgagttcaccgactacagatgactaattttcaactcctacatactttccccattattcctagaaccaggcgacctgcgactccnttgtcgttgacaatcgagtagtactcccgtatgaagcccgcattcgtataataattacatnacaagacgtcttgcactcatgagctggtcaacattaggcttaaaaacagatgcaattgccggacgtctaaacccaaccgcttttacccctgcacgacccgaggtatactacggggaattgctctgaaatctggggaggaaaccacagtttatgcccactcgcctagaaataattcccctaaaaatcttgaataaggggccgcatttaaccctagaacccccctttgagcccgaaaaaaaaaaaaaaaaaaaaataaaacttgttggcggcctttggccagnnggcctaaaatacggcagttaataaaaagggcccgaataggcctacttggccattcccccttaaaagggcggtgtttaat

SEQ ID NO: 629239 - DNA, 1884 bp, Homo sapiens
  misc_feature (1348)..(1348): n is a, c, g, or t
cgcaggcaaaggcttggggggccggggcgcggctgtgcagctctcgccggagccgagcccagccgagcgtccgccgctgcccgtgcgcctctgcgcctccgcgccatggccggcctcaactccctggaggcggtgaaacgcaagatccaggccctgcagcagcaggcggacgaggcggaagaccgcgcgcagggcctgcagcgggagctggacggcgagcgcgagcggcgcgagaaagctgaaggtgatgtggccgccctcaaccgacgcatccagctcgttgaggaggagttggacagggctcaggaacgactggccacggccctgcagaagctggaggaggcagaaaaagctgcagatgagagtgagagaggaatgaaggtgatagaaaaccgggccatgaaggatgaggagaagatggagattcaggagatgcagctcaaagaggccaagcacattgcggaagaggctgaccgcaaatacgaggaggtagctcgtaagctggtcatcctggagggtgagctggagagggcagaggagcgtgcggaggtgtctgaactaaaatgtggtgacctggaagaagaactcaagaatgttactaacaatctgaaatctctggaggctgcatctgaaaagtattctgaaaaggaggacaaatatgaagaagaaattaaacttctgtctgacaaactgaaagaggctgagacccgtgctgaatttgcagagagaacggttgcaaaactggaaaagacaattgatgacctggaagagaaacttgcccaggccaagagaagagaacgtgggcttacatcagacactggatcagacactaaacgaacttaactgtatataagcaaaacagaagagtcttgttccaacagaaactctggagctccgtgggtctttctcttctcttgtaagaagttccttttgttattgccatcttcgctttgctggaaatgtcaagcaaattatgaatacatgaccaaatattttgtatcggagaagctttgagcaccagttaaatctcattccttccctttttttttcaaatggcaccagctttttcagctctcttattttttccttaagtagcatttattcctaaggtaggcagggtatttcctagtaagcatactttcttaagacggaggccatttggttcctgggagaataggcagccccacactttgaagaatacagaccccagtatctagtcgtggatataattaaaacgctgaagaccataaccttttgggtcaactgttggtcaaactataggagagaccagggaccatcacatgggtagggattttccatccagagccaataaaaggactggtggggnccgggggtggctattgtgggaagtcataacccacagatagatcaacctaagaatcctggcccttctccactctccaccatgcaggacaaacatcttctcaagcagtcaacgtagaatgcttgggaaatagtcataattacccacatatagtaattaatagatggtaattaattgatccttgatgtgatgttcttttgcatatttccttcattctaaagttgttccctggccgggagcgttggctttcgcctgtaatcccaacactttgggaggccaggacagatcacttgaggtcaggagttcgagaccagcccagccaacatggcgaaaccatgtctctactaaaaatacaaaaattatggtgacgcctgcctgtagtcccagctactcgggagggctgaggcaggaggatcgcttgaacccaggaagtggagactgcagtgagccgatatcgcaccccagcggctccagccctggtcgacagaggtgagagctccatctcaagaaaaaataaaaataaagttgttctctgaaga

SEQ ID NO: 629240 - DNA, 1159 bp, Homo sapiens
agcggccggagtgcagcagtatgcaggtccagctgcctaccctgctgcctatggtcagataaagccatgcctatgaccttcaagccagcgctccgaggaaaaaccctccagtcatgcagggggagaagatgatcccagaagaaggcaggaagcgcgagaacagcgaagccatatcaatggcccagtgaatgataatgggacttccaaacgcataagcagataaatccctcgccatacagagcatcctgtaacggacgactacccaagcaagcatcgcggagtcggccagacgcaatatccatgatagatcagacaaccggggaactaatggagaattaggactgacaagaaacatgcgaatatagcagagccagaattagcgcctaaatcaccgcagatactataaacaccaatcaaataacatgacccgactattggacgaccaaatacctgcacacgagagtcaatgagatctggaatcgaattgaatctgaaacgatgaatgcaaaaggcatcatcaacatagaacaacaacattaaaacagaaaattaagcctatgaaagagaaccagcgcaaaagaggcagatgagcggtccagaaaaaacaaagcaatgcaagaagagcgacgcgaggagcagcaatatcaattgggaaagctgataatgtcagaaatcatatttgattatggactcactattaaattctttatcgaataaaatgctaaaacattattatggcatgctaatgattgatgcgggaactgcacactacaataatagaggctttgacataaacgaaatttatatgaacagcacaggctgggaaaatacactgcacggttacgcttgcgagcaaatatattttgcattgctggtttatatattgcgaagggtataaacagcgagtggtaagttccatccatcgatattatccagagacccaaagaaagagtagacgcgaaatgtcacggccagtgtttgagatgaaaaggaaaccgccagatctaagaacccttggaggagcgccctttggaaggctattgtggcgcgagaactccccaccgaggaactttcctctggaaatatcgttgcagaaactcgaatatttcgcgagcgtttaataaaacctgtgttaaaaaattccttaatggtatccccg

SEQ ID NO: 629241 - DNA, 129 bp, Homo sapiens
tgtgctgtacgcatgcacgtttggtactgggctgtcttctcaccttattgatcagtactgcagaatccattctgcagaaggaacaatttccgcaacccttctgctactggtggacacttgtattccagt

SEQ ID NO: 629242 - DNA, 1957 bp, Homo sapiens
  misc_feature (29)..(29): n is a, c, g, or t
  misc_feature (36)..(36): n is a, c, g, or t
  misc_feature (38)..(38): n is a, c, g, or t
  misc_feature (40)..(40): n is a, c, g, or t
  misc_feature (42)..(42): n is a, c, g, or t
  misc_feature (1421)..(1421): n is a, c, g, or t
cggcccctgactgccgcggcccccacagngcccgcngngnancccacgtcccccacgccagcgcccagccatggaggccatcaagaagaaaatgcagatgctgaagttggacaaggagaatgccatcgaccgcgcggagcaggcggaggcggataagaaagccgctgaggacaagtgcaagcaggtggaggaggagctgacgcacctccagaagaaactaaaagggacagaggacgagctggataaatattccgaggacctgaaggacgcgcaggagaagctggagctcacggagaagaaggcctccgacgctgaaggtgatgtggccgccctcaaccgacgcatccagctcgttgaggaggagttggacagggctcaggaacgactggccacggccctgcagaagctggaggaggcagaaaaagctgcagatgagagtgagagaggaatgaaggtgatagaaaaccgggccatgaaggatgaggagaagatggagattcaggagatgcagctcaaagaggccaagcacattgcggaagaggctgaccgcaaatacgaggaggtagctcgtaagctggtcatcctggagggtgagctggagagggcagaggagcgtgcggaggtgtctgaactaaaatgtggtgacctggaagaagaactcaagaatgttactaacaatctgaaatctctggaggctgcatctgaaaagtattctgaaaaggaggacaaatatgaagaagaaattaaacttctgtctgacaaactgaaagaggctgagacccgtgctgaatttgcagagagaacggttgcaaaactggaaaagacaattgatgacctggaagagaaacttgcccaggccaagagaagagaacgtgggcttacatcagacactggatcagacactaaacgaacttaactgtatataagcaaaacagaagagtcttgttccaacagaaactctggagctccgtgggtctttctcttctcttgtaagaagttccttttgttattgccatcttcgctttgctggaaatgtcaagcaaattatgaatacatgaccaaatattttgtatcggagaagctttgagcaccagttaaatctcattccttccctttttttttcaaatggcaccagctttttcagctctcttattttttccttaagtagcatttattcctaaggtaggcagggtatttcctagtaagcatactttcttaagacggaggccatttggttcctgggagaataggcagccccacactttgaagaatacagaccccagtatctagtcgtggatataattaaaacgctgaagaccataaccttttgggtcaactgttggtcaaactataggagagaccagggaccatcacatgggtagggattttccatccagagccaataaaaggactggtggggnccgggggtggctattgtgggaagtcataacccacagatagatcaacctaagaatcctggcccttctccactctccaccatgcaggacaaacatcttctcaagcagtcaacgtagaatgcttgggaaatagtcataattacccacatatagtaattaatagatggtaattaattgatccttgatgtgatgttcttttgcatatttccttcattctaaagttgttccctggccgggagcgttggctttcgcctgtaatcccaacactttgggaggccaggacagatcacttgaggtcaggagttcgagaccagcccagccaacatggcgaaaccatgtctctactaaaaatacaaaaattatggtgacgcctgcctgtagtcccagctactcgggagggctgaggcaggaggatcgcttgaacccaggaagtggagactgcagtgagccgatatcgcaccccagcggctccagccctggtcgacagaggtgagagctccatctcaagaaaaaataaaaataaagttgttctctgaaga

SEQ ID NO: 629243 - DNA, 140 bp, Homo sapiens
ccagtggccccagcggccctcggggccccaataagatgctgctgatgatggcgctggcatgcgccagcccattcccggaggaggcaccggggccgggcggggccggtgggcccggcggcgacctcggcggggcgcggccg

SEQ ID NO: 629244 - DNA, 2487 bp, Homo sapiens
  misc_feature (1951)..(1951): n is a, c, g, or t
ccataacgcacaaattcttaaaagcatgtgtgtccacatagtaatttttggtccttatttttatttttatttttcagttaatggatattaaagatacaactttattttgttttttttgagacagggtcttactctgtcacccaggctggagtgcagtggcgtgatctcggctcactgcaacctccacctcccaggttcgagtgagtcttctgcctcatcctccccagtagctgggactacagctgcatgccaccaagcctggctaatttttgtatttttagtagagacggggtttcaccatgttggccaggctggtctcgaactcctgacctcatgtgatccacccacctccgcctcccaaagtgttaggattacggatgtgagccaccgcgcccggccttcctaataattttgatagccttccccagttcagggattcttcatttgttctgataggaaaaagctagcgtggcttcccttttcctctcggttgaggcccgtttgacccgttctcaatattccttccaaagagcaggcatcgctggaaaactcgccttgcctcgtagccctggcaggacctaggggacaggttctgacaaggaagagccctgggtgggtcttaagaggccattcatttcttaccaattctgagtcactgaataaaaccacttcccccagtggggcccctcggtttcttcacctgtataatgggtgcgatgtgtgaggatgaaattgcagtaaaataaaaccgtggcagtaagagatgcctttctctggcacatcccacctgctgggcataagcggcgccaccctctggagttacagcctcaaggcagtccggctgaaggtgatgtggccgccctcaaccgacgcatccagctcgttgaggaggagttggacagggctcaggaacgactggccacggccctgcagaagctggaggaggcagaaaaagctgcagatgagagtgagagaggaatgaaggtgatagaaaaccgggccatgaaggatgaggagaagatggagattcaggagatgcagctcaaagaggccaagcacattgcggaagaggctgaccgcaaatacgaggaggtagctcgtaagctggtcatcctggagggtgagctggagagggcagaggagcgtgcggaggtgtctgaactaaaatgtggtgacctggaagaagaactcaagaatgttactaacaatctgaaatctctggaggctgcatctgaaaagtattctgaaaaggaggacaaatatgaagaagaaattaaacttctgtctgacaaactgaaagaggctgagacccgtgctgaatttgcagagagaacggttgcaaaactggaaaagacaattgatgacctggaagagaaacttgcccaggccaagagaagagaacgtgggcttacatcagacactggatcagacactaaacgaacttaactgtatataagcaaaacagaagagtcttgttccaacagaaactctggagctccgtgggtctttctcttctcttgtaagaagttccttttgttattgccatcttcgctttgctggaaatgtcaagcaaattatgaatacatgaccaaatattttgtatcggagaagctttgagcaccagttaaatctcattccttccctttttttttcaaatggcaccagctttttcagctctcttattttttccttaagtagcatttattcctaaggtaggcagggtatttcctagtaagcatactttcttaagacggaggccatttggttcctgggagaataggcagccccacactttgaagaatacagaccccagtatctagtcgtggatataattaaaacgctgaagaccataaccttttgggtcaactgttggtcaaactataggagagaccagggaccatcacatgggtagggattttccatccagagccaataaaaggactggtggggnccgggggtggctattgtgggaagtcataacccacagatagatcaacctaagaatcctggcccttctccactctccaccatgcaggacaaacatcttctcaagcagtcaacgtagaatgcttgggaaatagtcataattacccacatatagtaattaatagatggtaattaattgatccttgatgtgatgttcttttgcatatttccttcattctaaagttgttccctggccgggagcgttggctttcgcctgtaatcccaacactttgggaggccaggacagatcacttgaggtcaggagttcgagaccagcccagccaacatggcgaaaccatgtctctactaaaaatacaaaaattatggtgacgcctgcctgtagtcccagctactcgggagggctgaggcaggaggatcgcttgaacccaggaagtggagactgcagtgagccgatatcgcaccccagcggctccagccctggtcgacagaggtgagagctccatctcaagaaaaaataaaaataaagttgttctctgaaga

SEQ ID NO: 629245 - DNA, 2159 bp, Homo sapiens
tatatatatatatactatatatgtataatatataacacgagctggcaccctgcctctctgtgcccaggcccagcccctggatgaccatggcaccacatcagacagatgctgtcacgtgtcaagcacatggactccacagggagacacgtgtgcggacaaccgactcccctgcctacacactatcacaccgaagaacacccggcatcatatccctgacactcggactgcacacgacgagagcaagaggcgacacaccccacccagaactctacccacgcccccgccccccccctggccaccaacggaccacaaacaacacaaacacacacaacacacgggcgacgagacaccgaacaacacaaaccacagccacacccacaccacacgccaagcgcagcaccccccacacgcgccctccaccagcgccgcctaccacacccagccacgacacccgtgcgcccaacacaccacaagcgcgccgccacccccccacgccaacggcgcccgcgtccgcctccatctcaacaaaacagagccataagcagcccccgccagaccgcaccgacgcaaaccctccccaaccaccacacaccacggcacccccccccacgacaacagagcgcgacacccacgcagactgcgccccaaccgcccactcacgcgcccacaacccccaacacacccgagcaccaccgccccggccaccaaccccccatacacccgcgcaccatacccaagagaggaagccacacgccggcaccaacaaagcgaaaacaaaaccagcgacatacaaccaacaacacaccaccacaacacacagacacaacaacaacaacaagacgacccagccaacgactcccagacgacacaacaccgacgaacaaccacacaacgaacaaccccgccgagcccccagccacccacgcaccacacatcccgacaacacaccacccgcgccacacaccccccgcacccgcggccacgcgccacacaccagcacacaacaaccgggggcacccgcggcccccgccactaccacaccacccccgcgacacagacgccacccaacgcagcccaccaccacccacaccacccgacagcaccacccaaagaaaagcaacgagcgcaacgcacatacaaaatcacgccccccccccacagcgcccaaccacccccccccacacccacaacacacaacgacgaaaccaacagagaacacaagacccaaaacaaaacaagacaccaccccacaaatgaagcggtcacaaaccgaaaccacacacaaccccccgcaactaacaaacaacaaccacacacgccgacctgcccccacacagacgacggaccccccacagcgccccgacgcaccccagcccgacgccgccggacacgacccaccagccgcaacggaggcatggagaacagccacacaccgccagcacccatgccccacccccgcccccgcgccccgcagcccgcccgacacccccacacgccacacaccagcgcccgacccagccgccgccgctaccgcgcccaacccagacaccgacagcctgaccggaccgcgcagaccacgaggcgcgaggagaacggcgacaggcaacgacagagacccagcaacgcgcaacggcgcgaacggagcacgggacggcggcgcggcgcgcggcgaaggcgagggagcacgacggcaccagccagctgcagcagccgcgggccggacccagcaggacggacgagacggccgccagctcgcccgacaaccggagcggacggcagcgacgacacgggcacgcgcccacgcgaccgcacacgacacgaaaccggaccacgcgcaagcggcaacagacgcagacacagacgcccagccaagcccgaccaacagcgagcgcagcggcaccgccggcgcgaagcgccgaactggcaaagaggaccaggagagccgcgacagcgacgaagcgcagaccgcacgcgagcgcgaagccgggagacacaggcagcgacgcccggcaagagcgcgaccacagggccgcccgaagccgcagacagcagcaggagccagcgccgcgaccacgacgccagccgagccaaagcaggaacggcgacgcacaaaagaaccgaagcgccagcaggaccagccgccgagcaaccacagctct

SEQ ID NO: 629246 - DNA, 810 bp, Homo sapiens
ggcgctgaaagtcaatgacattgctatcttctcttttcctcgccaggagtgggtcctattatccagcggacatacagagcctggggaaggggacacgtgccgccttctgaaggtgatgcctacctcagtggtatgcgtgccaagaagatcgcacagtacagattgccatggtcgaagagttgcaccagcatggtctctactcaaaggctgttgacgcctggggtcattctacaggctgccggagctctggtcgcatgtagtgagccgcgcgatgagtcgtgagccggggacctgtggggcaccagaggttccaggagagaagctacaagtggcaacaggtccgagtcgttgatataccggaaaaacgacttgtacgaataaacccattgtagagaacactccagagctttcgccgaaatggaggtagggaggagcataatgttgtatgagtggctagaagttctttagtgctaatggtgcgcctattttaaagtcaaggcggaccggttgtccccccccatcctgtgcgtttagacgcgagagaactttgaaccgaacaggaatcgaccgtactgggactttgtttactttgggctggaaagtttaccaaacccagacttgactaagtactaattcgaacgccctcacgaggctggctacgccgtccggctgccactgatgaatcctgtaaagattcagccacgatgtccaagctggacgagaggtccctccctctgaaagtcgtaccagtggcctgtctatttgactcctcggcaatccgccagactcactccgtaacgggccgtcgct

SEQ ID NO: 629247 - DNA, 194 bp, Homo sapiens
accctacacaactataactactccttatattaatactggtgggccgtctgtcttgttaacgagttggatatatattagacggtgtgcctctgcttatgtaagttcccagagggccaggtccctgtataactttccccactctagttaggaatagggaaacgctggttgttctttggcactggcgaggctaagga

SEQ ID NO: 629248 - DNA, 1891 bp, Homo sapiens
  misc_feature (1355)..(1355): n is a, c, g, or t
cgcaggcaaaggcttggggggccggggcgcggctgtgcagctctcgccggagccgagcccagccgagcgtccgccgctgcccgtgcgcctctgcgcctccgcgccatggccggcctcaactccctggaggcggtgaaacgcaagatccaggccctgcagcagcaggcggacgaggcggaagaccgcgcgcagggcctgcagcgggagctggacggcgagcgcgagcggcgcgagaaagctgaaggtgatgtggccgccctcaaccgacgcatccagctcgttgaggaggagttggacagggctcaggaacgactggccacggccctgcagaagctggaggaggcagaaaaagctgcagatgagagtgagagaggaatgaaggtgatagaaaaccgggccatgaaggatgaggagaagatggagattcaggagatgcagctcaaagaggccaagcacattgcggaagaggctgaccgcaaatacgaggaggtagctcgtaagctggtcatcctggagggtgagctggagagggcagaggagcgtgcggaggtgtctgaactaaaatgtggtgacctggaagaagaactcaagaatgttactaacaatctgaaatctctggaggctgcatctgaaaagtattctgaaaaggaggacaaatatgaagaagaaattaaacttctgtctgacaaactgaaagaggctgagacccgtgctgaatttgcagagagaacggttgcaaattcggcacgggtctcagcctctcttgagtgtagacagacgtgacaagtgagcgactggaagagaacgtgggcttacatcagacactggatcagacactaaacgaacttaactgtatataagcaaaacagaagagtcttgttccaacagaaactctggagctccgtgggtctttctcttctcttgtaagaagttccttttgttattgccatcttcgctttgctggaaatgtcaagcaaattatgaatacatgaccaaatattttgtatcggagaagctttgagcaccagttaaatctcattccttccctttttttttcaaatggcaccagctttttcagctctcttattttttccttaagtagcatttattcctaaggtaggcagggtatttcctagtaagcatactttcttaagacggaggccatttggttcctgggagaataggcagccccacactttgaagaatacagaccccagtatctagtcgtggatataattaaaacgctgaagaccataaccttttgggtcaactgttggtcaaactataggagagaccagggaccatcacatgggtagggattttccatccagagccaataaaaggactggtggggnccgggggtggctattgtgggaagtcataacccacagatagatcaacctaagaatcctggcccttctccactctccaccatgcaggacaaacatcttctcaagcagtcaacgtagaatgcttgggaaatagtcataattacccacatatagtaattaatagatggtaattaattgatccttgatgtgatgttcttttgcatatttccttcattctaaagttgttccctggccgggagcgttggctttcgcctgtaatcccaacactttgggaggccaggacagatcacttgaggtcaggagttcgagaccagcccagccaacatggcgaaaccatgtctctactaaaaatacaaaaattatggtgacgcctgcctgtagtcccagctactcgggagggctgaggcaggaggatcgcttgaacccaggaagtggagactgcagtgagccgatatcgcaccccagcggctccagccctggtcgacagaggtgagagctccatctcaagaaaaaataaaaataaagttgttctctgaaga

SEQ ID NO: 629249 - DNA, 284 bp, Homo sapiens
  misc_feature (2)..(2): n is a, c, g, or t
  misc_feature (14)..(17): n is a, c, g, or t
  misc_feature (34)..(34): n is a, c, g, or t
  misc_feature (50)..(51): n is a, c, g, or t
  misc_feature (71)..(71): n is a, c, g, or t
  misc_feature (98)..(98): n is a, c, g, or t
  misc_feature (124)..(127): n is a, c, g, or t
  misc_feature (159)..(159): n is a, c, g, or t
  misc_feature (184)..(184): n is a, c, g, or t
  misc_feature (206)..(207): n is a, c, g, or t
  misc_feature (210)..(210): n is a, c, g, or t
  misc_feature (233)..(233): n is a, c, g, or t
  misc_feature (242)..(243): n is a, c, g, or t
  misc_feature (264)..(265): n is a, c, g, or t
tnataatgtaaatnnnntgaaaaactagattaanatatataactgcttgnnatggtttataattatataangtgcaatacaattcctgcatctttaanatgtctgcagaataactgtgaatttnnnngttattggattggccgtaacttttagaaaaanatcttgttgatgataatgtgatttncgggaggtcattaattgctttnnctnttttaaatgtagacttatataantacctgttnntatatagcttgagtaattgtnntatgattgtataccactaa

SEQ ID NO: 629250 - DNA, 1136 bp, Homo sapiens
cgcaggcaaaggcttggggggccggggcgcggctgtgcagctctcgccggagccgagcccagccgagcgtccgccgctgcccgtgcgcctctgcgcctccgcgccatggccggcctcaactccctggaggcggtgaaacgcaagatccaggccctgcagcagcaggcggacgaggcggaagaccgcgcgcagggcctgcagcgggagctggacggcgagcgcgagcggcgcgagaaagctgaaggtgatgtggccgccctcaaccgacgcatccagctcgttgaggaggagttggacagggctcaggaacgactggccacggccctgcagaagctggaggaggcagaaaaagctgcagatgagagtgagagaggaatgaaggtgatagaaaaccgggccatgaaggatgaggagaagatggagattcaggagatgcagctcaaagaggccaagcacattgcggaagaggctgaccgcaaatacgaggaggtagctcgtaagctggtcatcctggagggtgagctggagagggcagaggagcgtgcggaggtgtctgaactaaaatgtggtgacctggaagaagaactcaagaatgttactaacaatctgaaatctctggaggctgcatctgaaaagtattctgaaaaggaggacaaatatgaagaagaaattaaacttctgtctgacaaactgaaagaggctgagacccgtgctgaatttgcagagagaacggttgcaaaactggaaaagacaattgatgacctggaagagaaacttgcccaggccaagagaagagaacgtgggcttacatcagacactggatcagacactaaacgaacttaactgtatataagcaaaacagaagagtcttgttccaacagaaactctggagctccgtgggtctttctcttctcttgtaagaagttccttttgttattgccatcttcgctttgctggacatcgcacgctaactagtgtataactgtgacccaattctatcttttcaggatacccttgagcaccggactctatatcataccttcacgcccttgctcgtagtggcaccagcgttactacagctattatatatctattcattacgatagcacattatttctattggtcagtcagggtac

SEQ ID NO: 629251 - DNA, 177 bp, Homo sapiens
gatctctgtggcaggaaaaaatggttcctgcacactgagagcttccagtctagcaacaaaaacatcagaaatcccacacccgtattaaacataaaaataaataacagatgatggtcccagtgatcaaggaaaggtaatggatgtgatgaacctaacaagggccctgaccttgtgctg

SEQ ID NO: 629252 - DNA, 1116 bp, Homo sapiens
cctcgtgttcacccagggcggtgagttacaattggcgcaaatctccgcccacttacaagcctccgtctccgtgggtttcacgccattctccgtgcctcagcctctcaagttagctgggactacaggcacccgccactacgccccagctaatttttttattttatttatttttttggaaaagtgtgagagtctttggtctctctgtgtgtcccccagaggggtggagagtgtacaaggtggtggcgaactctgtgtgtgctctcacacgtggaaacctctcccgccctcctgggtgtttcacaccgccatatttcttcgtgtgctcccacacgccccctctcaaaatatacacagtggcgcacatatatatgtgcgcgcgccccgccacacacacacacccgcgcgcggtatatatatttgtgtgtgtagtttctttatagtacatactaaacacgagggtgtattctcaccacacactgtgtgtataaccacacaagatatagtgtctctgtgtagatatatctctctctaaacctcttgtgtgtatatctctcgcgcgcgccctctctgctgggctctctctcacacaaacactgtcgtgtgtgagatatattaacagcgcgcgtcatgtgatacacccacaccggcgcgcgccgcgcgccgcgccacacgacgaaatactattattttgtgtgtagtatttttttctataaatataaaaaaaacacgggcgggtgttcacacgatgtgtgtgtgtctacgccacgagtgagatgtgtgtctctctctacatctctctctctgtgagaccctctccacccctctctgtgtgcgcacaaatatatctctcacacgaacacacacaagtgggcgcacaatatatatatctctcaaaatatattctatagccgcgaggtatctctcccccctataatatactatggtgacaaatcctctcaattcatatattaaaatctttcctccagatattacaccaccccgaggtggtttataaaaccctctcgtgttttttaagatacacctcctcctggcgacacaaacacaaccaaccccccggaaaaactcctatacacccccccccccccccttattttc

SEQ ID NO: 629253 - DNA, 796 bp, Homo sapiens
  misc_feature (98)..(98): n is a, c, g, or t
  misc_feature (171)..(171): n is a, c, g, or t
  misc_feature (190)..(190): n is a, c, g, or t
  misc_feature (198)..(198): n is a, c, g, or t
  misc_feature (204)..(204): n is a, c, g, or t
  misc_feature (220)..(221): n is a, c, g, or t
  misc_feature (233)..(233): n is a, c, g, or t
  misc_feature (250)..(251): n is a, c, g, or t
  misc_feature (255)..(255): n is a, c, g, or t
  misc_feature (258)..(259): n is a, c, g, or t
  misc_feature (275)..(275): n is a, c, g, or t
  misc_feature (317)..(317): n is a, c, g, or t
  misc_feature (331)..(331): n is a, c, g, or t
  misc_feature (358)..(358): n is a, c, g, or t
  misc_feature (361)..(361): n is a, c, g, or t
  misc_feature (369)..(369): n is a, c, g, or t
  misc_feature (374)..(375): n is a, c, g, or t
  misc_feature (378)..(378): n is a, c, g, or t
  misc_feature (393)..(393): n is a, c, g, or t
  misc_feature (397)..(397): n is a, c, g, or t
  misc_feature (427)..(428): n is a, c, g, or t
  misc_feature (441)..(441): n is a, c, g, or t
  misc_feature (504)..(504): n is a, c, g, or t
  misc_feature (560)..(561): n is a, c, g, or t
ggacattagctagcgctcgctctactctctctaacgggaaagcagcggaatacaagagactgaactgtatctgcctctatttccaaaagactcacgtncaactttcgctcacacaaagccgggaaaatttattagtcctttttttaaaaaaagttaatataaattatagcnaaagaaaaggaacctgaantttagtancacagntggaacaatccgcagnnggcggcggcagntggcgggagaagaggtnnaatntannttgattatctgtggtngtggtgtcgctagtctcacggtgatggaagctgcacattttntcgaagggaccganaagctgctggaggttggttctcccggnagnagcccgangcaanncanggatctggggatctncgantatcccaagatctgagtgggacatactttnngaaggatgtgcantgttcaaatcataagtgtgacaaaaactgacaagcaggaagcttatgtactcagtgagagtancatgtttgtctccaagagacgtttcattttgaagacatgtggtaccaccctctgcnngaaagcactggttccctgttgaagcttgctagggattacagtgggtttgacgtcacttcaaagcttcttttagtcctcgtaagaatttcagtgaagccttctcaccaagggtacccacacccggaatttccaggacgaaatagagtgccttaatgcaatttttcccaaatggagcagcatattgtatgggacgtttgaaatctgatgtggggacgtatatactctggattcccaa

SEQ ID NO: 629254 - DNA, 880 bp, Homo sapiens
tgagtttgtgtgatgagatgttgcatcattttggtccctttcttgaatcagacttgtgattgggggagagcaacttcagggcttctccatagaccttgaccattataagcagaccttattctccctacacttccactccataggtaaataaactggtgaagccacacacacccaatgaacattttctccccattgtggtagttaagttccacccagttgtgcttttgatacgcagaaatatctaaatgggatttggagtcctccagctatagaatgtgacatgcgcatacccaacgtgacctatctataatattttctgagttggtttcctatcataaatacttgttttccacagcctttggtctctcagactcttgctaacataatgtacgcttatggacaatacctgtcgctgaataaggagcaatgagaaccaaacactaatttctctggagcagcatggtctctgcaatggcattatcctgctagtgatttctcatcttgccttttctaacctaatgagaatgtcccagattcattacctggcatgtcaaagtcctagagccagaatatatcttaattcctctgtatctttgctccctcattcactagcgccactgtctaatgaagaaagttctctaaaaccttgtatgcatcagcatagaattgtacgcacgagggggtgcatgaacatccttctggggatatgatggcccttgtcccccggccattttttctctagaaagggttgtcctgccccgcagcatcacagtcacacacctgtgggttacccagcagcacgaccaaccacaatgggtagagcccacaccacgtgttacaaccttgcgccgatcaacgatcatcggatagtgccccattt

SEQ ID NO: 629255 - DNA, 482 bp, Homo sapiens
tgacatagcacttgagacagatcataaaatacacattaattattatagagactaggtctcactttgtcaccaaggctggagtacagcagcactatcatagctcactacactccaacctgggcaacaaagtaagactctgcctttcttttttgagacggagtctcgctctgtcgcccaggctggagtacagtggtgtgatctcggctcactgtggccttgacctcctggttgtaagcaatcctcccacctcagtctcctgagtggccaggactacctgcgtgtgccaccacacccagctaatttttttgtgtttgtagagacagagtttcactgtgttgtccaggctgtcgtgaacttctgagctcaagtgatccaccccccttggcctcccaaagtgctgggattacaggcatgcaccaccgcccctggcctgcccattttaaattatgttattgtttgctattgaaacttctaaaactagg

SEQ ID NO: 629256 - DNA, 1054 bp, Homo sapiens
  misc_feature (5)..(5): n is a, c, g, or t
  misc_feature (8)..(8): n is a, c, g, or t
  misc_feature (14)..(14): n is a, c, g, or t
  misc_feature (22)..(22): n is a, c, g, or t
  misc_feature (41)..(41): n is a, c, g, or t
  misc_feature (68)..(68): n is a, c, g, or t
  misc_feature (81)..(82): n is a, c, g, or t
  misc_feature (88)..(88): n is a, c, g, or t
  misc_feature (119)..(119): n is a, c, g, or t
  misc_feature (159)..(159): n is a, c, g, or t
  misc_feature (185)..(186): n is a, c, g, or t
  misc_feature (216)..(216): n is a, c, g, or t
  misc_feature (261)..(261): n is a, c, g, or t
  misc_feature (334)..(334): n is a, c, g, or t
  misc_feature (337)..(337): n is a, c, g, or t
  misc_feature (389)..(389): n is a, c, g, or t
  misc_feature (392)..(392): n is a, c, g, or t
  misc_feature (411)..(411): n is a, c, g, or t
  misc_feature (417)..(417): n is a, c, g, or t
  misc_feature (428)..(428): n is a, c, g, or t
  misc_feature (438)..(438): n is a, c, g, or t
  misc_feature (441)..(442): n is a, c, g, or t
  misc_feature (455)..(455): n is a, c, g, or t
  misc_feature (480)..(480): n is a, c, g, or t
  misc_feature (531)..(531): n is a, c, g, or t
  misc_feature (538)..(538): n is a, c, g, or t
  misc_feature (599)..(599): n is a, c, g, or t
  misc_feature (618)..(618): n is a, c, g, or t
  misc_feature (642)..(642): n is a, c, g, or t
  misc_feature (646)..(646): n is a, c, g, or t
  misc_feature (651)..(651): n is a, c, g, or t
  misc_feature (659)..(659): n is a, c, g, or t
  misc_feature (661)..(661): n is a, c, g, or t
  misc_feature (663)..(663): n is a, c, g, or t
  misc_feature (668)..(668): n is a, c, g, or t
  misc_feature (712)..(712): n is a, c, g, or t
  misc_feature (714)..(714): n is a, c, g, or t
  misc_feature (724)..(724): n is a, c, g, or t
  misc_feature (809)..(809): n is a, c, g, or t
  misc_feature (866)..(866): n is a, c, g, or t
  misc_feature (870)..(870): n is a, c, g, or t
  misc_feature (898)..(898): n is a, c, g, or t
  misc_feature (903)..(903): n is a, c, g, or t
  misc_feature (909)..(909): n is a, c, g, or t
  misc_feature (913)..(913): n is a, c, g, or t
  misc_feature (937)..(937): n is a, c, g, or t
  misc_feature (975)..(975): n is a, c, g, or t
  misc_feature (1045)..(1045): n is a, c, g, or t
taacntgntaagtntttgtttnttttaacatggtagggttntgacctcaaatatttgttaggtctgcnactcaaatgaacnnacagcnggacaacgtatgaaccttgaagatgcctctnctagtccagtttagggtccaatgcagacagttccatactntcatccccaagcccctcaagggcctnngccaatctttcattttatgccaagtcctcnaaaacgcatcagggtattacatcaacttgtacagaatatcaagancttatcttctattttaggttccatgtcaaataaagccgagttaggttgtccaaacaaactcaccagacaggtnacntaagaaagtgtaccacaacaaatttaaattttgaacaaaacacatctctccnccnttggtctcacacagaaatnaaagtntccaaaaacanaaaaaaaaancannctccagccctccnccagaatcacgagtcccagccaggncggcccacccacaccccccgtcgaagtctgggcctttcttcagtagtggcngcatggngtcgtcttccagaattaatgcagcccctccagcacctccagagcgcggagagctccaaccntgagtctcaggtgtcacanacagacccaaagttccagggagcnatcnggtcncacaagananancaaancacctcaaaaatttagaaataaccaccaaagcccgggaacaaangntacttctgcnagagcttacaatctaggccctaattcctgtatgtgagagcattttcaaacaaaattacttcccaaacaaaaacacgttaacaatngaaactcatattgaggtcatcaaccacagaccatagcagaaaacgtattttaaagtnaganagagcatagacaggaaaaaagagaaaanaaaangctctntggnttcggcttctccagggtgtcagcnaatctccaccagttgaccagaatccattggctggaaancgccgaccgcgctcacgacgactcgctcttctctattcgccgggaccagcgccaccagcatctctgccancttcgcaat

SEQ ID NO: 629257 - DNA, 166 bp, Homo sapiens
  misc_feature (114)..(114): n is a, c, g, or t
aggaattatcattaaacttgggtactaattttcaacaaagagtgaaattccacacatatatttccaatacttaacagagtagtaatatgtaatttaaaagtatatatttgtggncgggcgcagtggctcacacctgtaattctagcactttgggaggaccaggcgg

SEQ ID NO: 629258 - DNA, 1054 bp, Homo sapiens
  misc_feature (5)..(5): n is a, c, g, or t
  misc_feature (8)..(8): n is a, c, g, or t
  misc_feature (14)..(14): n is a, c, g, or t
  misc_feature (22)..(22): n is a, c, g, or t
  misc_feature (41)..(41): n is a, c, g, or t
  misc_feature (68)..(68): n is a, c, g, or t
  misc_feature (81)..(82): n is a, c, g, or t
  misc_feature (88)..(88): n is a, c, g, or t
  misc_feature (119)..(119): n is a, c, g, or t
  misc_feature (159)..(159): n is a, c, g, or t
  misc_feature (185)..(186): n is a, c, g, or t
  misc_feature (216)..(216): n is a, c, g, or t
  misc_feature (261)..(261): n is a, c, g, or t
  misc_feature (334)..(334): n is a, c, g, or t
  misc_feature (337)..(337): n is a, c, g, or t
  misc_feature (389)..(389): n is a, c, g, or t
  misc_feature (392)..(392): n is a, c, g, or t
  misc_feature (411)..(411): n is a, c, g, or t
  misc_feature (417)..(417): n is a, c, g, or t
  misc_feature (440)..(440): n is a, c, g, or t
  misc_feature (444)..(444): n is a, c, g, or t
  misc_feature (446)..(447): n is a, c, g, or t
  misc_feature (466)..(466): n is a, c, g, or t
  misc_feature (468)..(468): n is a, c, g, or t
  misc_feature (482)..(482): n is a, c, g, or t
  misc_feature (489)..(489): n is a, c, g, or t
  misc_feature (497)..(498): n is a, c, g, or t
  misc_feature (504)..(505): n is a, c, g, or t
  misc_feature (513)..(513): n is a, c, g, or t
  misc_feature (538)..(538): n is a, c, g, or t
  misc_feature (541)..(541): n is a, c, g, or t
  misc_feature (544)..(544): n is a, c, g, or t
  misc_feature (547)..(547): n is a, c, g, or t
  misc_feature (581)..(581): n is a, c, g, or t
  misc_feature (589)..(589): n is a, c, g, or t
  misc_feature (598)..(598): n is a, c, g, or t
  misc_feature (600)..(600): n is a, c, g, or t
  misc_feature (604)..(604): n is a, c, g, or t
  misc_feature (615)..(615): n is a, c, g, or t
  misc_feature (642)..(642): n is a, c, g, or t
  misc_feature (646)..(646): n is a, c, g, or t
  misc_feature (651)..(651): n is a, c, g, or t
  misc_feature (659)..(659): n is a, c, g, or t
  misc_feature (661)..(661): n is a, c, g, or t
  misc_feature (663)..(663): n is a, c, g, or t
  misc_feature (668)..(668): n is a, c, g, or t
  misc_feature (712)..(712): n is a, c, g, or t
  misc_feature (714)..(714): n is a, c, g, or t
  misc_feature (724)..(724): n is a, c, g, or t
  misc_feature (809)..(809): n is a, c, g, or t
  misc_feature (866)..(866): n is a, c, g, or t
  misc_feature (870)..(870): n is a, c, g, or t
  misc_feature (898)..(898): n is a, c, g, or t
  misc_feature (903)..(903): n is a, c, g, or t
  misc_feature (909)..(909): n is a, c, g, or t
  misc_feature (913)..(913): n is a, c, g, or t
  misc_feature (937)..(937): n is a, c, g, or t
  misc_feature (975)..(975): n is a, c, g, or t
  misc_feature (1045)..(1045): n is a, c, g, or t
taacntgntaagtntttgtttnttttaacatggtagggttntgacctcaaatatttgttaggtctgcnactcaaatgaacnnacagcnggacaacgtatgaaccttgaagatgcctctnctagtccagtttagggtccaatgcagacagttccatactntcatccccaagcccctcaagggcctnngccaatctttcattttatgccaagtcctcnaaaacgcatcagggtattacatcaacttgtacagaatatcaagancttatcttctattttaggttccatgtcaaataaagccgagttaggttgtccaaacaaactcaccagacaggtnacntaagaaagtgtaccacaacaaatttaaattttgaacaaaacacatctctccnccnttggtctcacacagaaatnaaagtntccaaatagagagaatatttttntttntnnggctcttctccagattttngngtttcagataggtnggaaatnaaattttnnagttgnngtttggtntttttttttgttgttgttgcttggngtngtnttnaggtttttttgtagattttttagcaaatacagtnttggagtnatttaaatntntgtntaatgtgttanatatagaacaaaaagttccagggagcnatcnggtcncacaagananancaaancacctcaaaaatttagaaataaccaccaaagcccgggaacaaangntacttctgcnagagcttacaatctaggccctaattcctgtatgtgagagcattttcaaacaaaattacttcccaaacaaaaacacgttaacaatngaaactcatattgaggtcatcaaccacagaccatagcagaaaacgtattttaaagtnaganagagcatagacaggaaaaaagagaaaanaaaangctctntggnttcggcttctccagggtgtcagcnaatctccaccagttgaccagaatccattggctggaaancgccgaccgcgctcacgacgactcgctcttctctattcgccgggaccagcgccaccagcatctctgccancttcgcaat

SEQ ID NO: 629259 - DNA, 346 bp, Homo sapiens
cgaagccttcctttcatcccgaagttcatcgacctttgccaacagccagacgcaaagaaaagaagttccgggccataaaagtaagaatttcttctgccaatttcatataagtatttttctcaaaaatgtctcttcatggtcatgaaaaccagtgcacttcacatcaacctctggtctcaccaatcggggaaggtttgggttgtcatctttgtgtcgcaagaagcattcatttctctcaggttcttgttttgcacaacagtcagccatttcaccataggtctcacaaagagtcgcaactgtgcataatgtgtctccaaagagtgtataagtaatgtgccctcgtgcc

SEQ ID NO: 629260 - DNA, 316 bp, Homo sapiens
  misc_feature (152)..(152): n is a, c, g, or t
  misc_feature (193)..(193): n is a, c, g, or t
  misc_feature (208)..(208): n is a, c, g, or t
  misc_feature (216)..(216): n is a, c, g, or t
  misc_feature (231)..(231): n is a, c, g, or t
gccagtgagggatgctggtggactgtgtgcccctggtggaggtggacgacatgatgatcatgggcaaaaagcctgaccccaagtgtgttttcccctatgtgcagtcgctctacaaccccctgggacgccccgaactgggcctgcgcggcaanaatgtttagcctgcccgcccgcatggccagccagtggcaanctgccgccccccctntccgggcnccgtttcctgcctgngggtccgccccccgctgccctgtttgttgggaccccctcccccccccatacacacgcagggttttgataaattattggttttcca

SEQ ID NO: 629261 - DNA, 173 bp, Homo sapiens
ccctaatggaatccattatactgagtgagtcttctgatatacagcagtggacagtcacaaagaagaataatcttaattaaccagccagataccttttattcattaaagtttttttgatttccataagttattggcgaacagtgtggtatttggtacgatgagtaggttctata

SEQ ID NO: 629262 - DNA, 489 bp, Homo sapiens
  misc_feature (46)..(46): n is a, c, g, or t
  misc_feature (290)..(290): n is a, c, g, or t
agcggggggggctaggctctctgaggaggctgccacagtgaagcanccgtgacaagtggtgcccgaccaggacctgaacgaggaaggtctgccagagcagagaaagtgaaactgatcagacgaactacgaacccctggacgggagagtctgccggcggagaatataaggagatggacaaaccgtgtgggtgccctccaggtgtgtgtgaccatggaacgggagaccggagggatccatggtattcaaccgtgggcctgttacctccagtacgagccatgagccagcggantctgaatgcaaagacagaacaagggccgaccggagtcacaatgacatccaaccccataacatggggacagatcaagaaaacgacacaagaagctgagaaactactggagcgccaggtcaggcaaaaacccctgactccatgttcttggccatgctagctgtagtgtcctgtgcgtctataggatcgggtgaaccaccaa

SEQ ID NO: 629263 - DNA, 374 bp, Homo sapiens
tctgagcggtttcttttttcctggtgctttcagttactgtcacactggacatccaggattgtctctcccatcacttctctcaggcatctcagtgcaacggttaggtataacaatgtacacggactctcaaagctgagccccagccctcatcattctctggaattccactcacatgtgatgccacttgacaggacagtgaagaggtacacagacttagcatgtctgcaacagacccgcccaaggagcctgcaatcatgaacaaataaagcagaccctccccagcctagctttctccatttgagtgaacggcatttttttttttaatttgtagagatgaggtctccctatgttgctcaggctagtcttgaaatccc

SEQ ID NO: 629264 - DNA, 1282 bp, Homo sapiens
ggtcaactctatgtatcagctctggatcctcgtgggccctggacaacacaagtggtcttgaccctctaccggtgccgggtgatggtggagttgcccgctggatcctgggcctgtgcaatgatgctcagtcgtgtcctgtgacgtgggcttgctgcttccgacgcatcctgactcacttcgtttccatgctctcgcgtcccagcacatcttctagcagtggacctgggttctaagacggacggatgagtgatcatagtccgtggacgaacgttcgctgttcctgatagcagatcatattgcagccgtaccgtgagagtgattctgacctgacagcttggagacgcatacagataagttacctaccacgcgattctggatgctaacgcagtcatatatcgatctcatgctaacggccatgcaggacaggtccgggaaggctgcggagctcaagctcaagtgacttcatgagtgcagcacggggaacttagcctgggctcgctgtgcgcactgacgtggcgacagtcagtcagagataggtgcagtctgttgctgcctgatttctcaccagagtcgagcacaagcgtcaagggaagtcggggagtacgtgagcatggcgcgacagggatgccctgaccaggttgcaaccccgatccacgtttccgctttcttgtgaactgggttacagcgccacgaattacactagctgtagtcacgaagttgggtcagtgaccgaccaaggagtatactgcaggtgctgtgaccgcatgtgcgacgggggcaagtggcttggcgtaaacctgggggcccaactgttggtattagcgttgaaaaggcggggccatgtccacggcgaggcagacaccgtcgtgcggaccccaagaagtgaaggccgtactggcattggccgaggacgaataggcgctggcccgaggaaggcaccgttggcaaggcccggcgggcaggagccaaggagcaaagtgcaagacccccctggcgcaagcagttgtagggcctttacgaaggactcttacagaggtccaccaggccgagaacgagcacaagggggagcgcccaataatccccgtggttcggaaacacgaagccccgcagttgggtcttgtgaagcctagaaggctgttcccacataaggactgggcgaacgcactttggggccctgagacatatggcagaggagacgcaatagtgtgttgagaaaagcctttcattgagagagatagacatgtgaaattcatcgccccaggagagatctgtgagcgaaatt

SEQ ID NO: 629265 - DNA, 1020 bp, Homo sapiens
  misc_feature (1017)..(1018): n is a, c, g, or t
  misc_feature (1020)..(1020): n is a, c, g, or t
ggctaagagaggcggggtaattggcgaggggtccttccacactgtggagcttgtctttcactcttgcaataaatgtgctgctgctcactcttgggtccacactgctttatgagctgtaacactcaccgaaaagtctgcagcttcactcctgagccagtgagagcataagcccaccgggaggaacgaacaactccagacgcgccgcttaagagctgtaacactcaccgctaaggtctgcagcttcatcctgagccagtgagaccacgaacccaccagaaggaacaaactctgaacacatccaaacatcagaaggaacaaactccagacgcgccaccttaagagctgtaacactcaccgtgagggtccgtggcttcattcttgaagtcagcgagaccaagaacccaccaattccggacacatcttggcaaccacgaagggactttcgcctatcgccgagcagtaagaccatcgcctatcgccgagcggtgagacaatcgcttatcgccaagcaaatcgaggccatcaagctacagatggtcttacaaatggaaccccaaatgagttcaactaacaacttctaccaaggacccctggaccgacccactgcacttcccctggctagagagttcccctctgaaggacactacaactgcagggccccttcttcacccctatccagcaggaagtagctagagtggtcatcggccaattccaacagcagttggggtgtctgtttagaggggggatgggaggtgacagtgtgctggcagtctcacagcctcgcttgtctcgggaactcctctgctgggctccactttggcggactgaggagcttcagcatgtacattgggagccttctggggcagcgagcagtcctcagtcggaggtggggaggcccggaccggtgcgggtggcactggttgtgggtgtgggccgccaaggcccgcggaggtccgccggggggccggggcacatcaggagggcgcccctgcgcctcccggccggctcgttctgctnntn

SEQ ID NO: 629266 - DNA, 947 bp, Homo sapiens
gacgagtgtgatgtggatgtgtttccctgacggccgtaactgttgctgcgcggaacgccgtcatgtccgtagttcctgtcgtcacaccccaccgcatggtcgcttgccgggatgtgctctgggtggcgtcggctgcgaccgtctatcgctaaggattgctaggcagtattacccccttccgtcaggatggatctacgcgttgcggagagaactgtctcctcccccatcttcagtcctgttggcctcgtgcactcgtggattggtcacgtggcatcgcgccttgtgctatgcaagactcttatccgactgtagatgccaggatgcccgaattgtggtcacattgttgtggctctccgtcatctggggacgggtgagacagaccctcgactagatcatgggtagagagagcgggacgaacgcgtcatgggagaacttatacctgttgatcgttccaatgtaacgcaggataagggacagcctagtagctaggagtagatcgacgcacacgtgaaagaagtaagtaagtaatagtcacgacaccaagaacgtgggcacaaggacgtagtccacttccttccctaagtacacgatgcctctgacaagtcgatggcgcacgtatggtatgattgcctgttgagacttgtgccccgcaggttttccagagccgcaatgggagcaggagtctgacttcgcttcgcgcctcttgacggtgtctcagtctaccatcatgactagagtgctccgcatgggctccccatctaaactcttcccaggttgtgtgttacctggagcctattttatgtgcgaatatatgaatagcgggatggtctgcagtacgactgtgttagacttgtcaacaactgcgacgtatgatacgactaaccttccgagaaggaccaacaaaccattggggcccaagattgtattgactaatgctcgtaagtaaa

SEQ ID NO: 629267 - DNA, 209 bp, Homo sapiens
agactgagcaacacggggagactcatctctacaaaaaattaaaagaaattaattgggcatcatggcacgagcctgtggttcccgctactcgggaggctgaggtggggggatcacctgagcccaggaggttgcgacttggagtgagctgagttcacaccactgcacccgatgccttgatgacagaagtgagactggctcaaaaaaaaaaa

SEQ ID NO: 629268 - DNA, 598 bp, Homo sapiens
  misc_feature (223)..(223): n is a, c, g, or t
gcaacggacgacttctatgacgacccgtgtttcgactccccgtgactgcgcttcttcgaagacctggacccgcgcctgatgcacgtgggcgcgctcctgaaacccgaagagcactcgcacttccccgctggctggtgcaccctggtcccgggctgcacgtgagtgacgagcatgtgctgcgctgcccatgcgggcaccaccagtgcgggccagtgcctactgntgggcctgcaaggcgtgcaagcgcaaagaacaccaactgccgacctgacgcaagggcgccaccatgcgcgaagcggtgccgcctgagcaaagtaaatgaggcctttgagacactcaatgcgctgcactgtcgagcaatccaaaaccagcggtttgcccaaggttggagatcctgcgcaaaagccatccgcgtatatcgacgggcctgcaggctctgctgcgctgacaggactgccggtgccccctgtgcgccgacagaacgcacttctattgcgccgggcccgcgtgaccccggtgcgtggatggcgagcactacagccggcgactccgacgcgtccagaccgcgctccaactggtccgacggcatgatggacta

SEQ ID NO: 629269 - DNA, 325 bp, Homo sapiens
gtagtataacctgtcaattatacttaatgtaaatacatgtcgcaccagaatattcacgggtttaagaaagcatgaaataaaatgtacgtctgttactagattatgctttcacatcgtcagtaagataattagatatcctgaaaaaccacgcatagcagccaagaatacatataatgaaaaaaaaaaggatctaacataatgaccttacaaaatggaacttacataataggtcactgtcctccagagatggcacatgaaatcacacaagcaaagagcctctacaaagaaaatagtgcatatgattaaagaactggaaacctcaaac

SEQ ID NO: 629270 - DNA, 732 bp, Homo sapiens
gctttgtgtgagcacaaaagccacgtgccaagccacctggcccgattccacagatgtatgtgcggccagatgacttccccaggagtgtggagggggtggtgaggaggagcagctgggctctctaccgcctctcctcacagaagtacctgaaactaggtctggggcaccgtcccaatgacagcgcctatggtcagccaagggtgggctaggcgaggggaccgttgtaggcaagcttatgtcgcaaagggagccccgcaatgcacaggaagccaacaagaggttcctcttgtttcccctcgcatcagcattctagcctcttcgtcatagctgctccgggctgagggactaaaggacatctcgcgtcgtttgaggggcatggccagtcgtggcaggccggcttcagcgtccgtgtcagggagagcgtgcagcctaaatgggcgacttgtccgatgggagcataacagaggagcgtccctggggatcgtgggaccatgctgccctgcactccacgactttcgttggggctctaagttctggaaggtgtgtgcacagagggtggtcatgggactcgcatgcagctctcagcactggggtgggagggcgttggcttgtccagaatggggacgtgggggcagcacccctgccaggcgagagcgcagacaccgtgtgaggggaccagcagcctgggttgcaaagcagagaatgatcctggtctgacggtgaagagggaga

SEQ ID NO: 629271 - DNA, 207 bp, Homo sapiens
cccttcataatgtgtgccaactccatcctgtgtgctaagggactgagcttgagtctgaatctgttctgaatccagctgccatgtgctagaaattcagatggcagagaaacatgttgacttgcaccttggacaagtgcagtcccagcaaaactcatacggatgagccaaatccacaggaataaaacagccaggttccttctacaggat

SEQ ID NO: 629272 - DNA, 306 bp, Homo sapiens
tggtgatgcatgtaatcccagctactcgggaggctgaagcaggatgatagcttgaacctgggaggtggaggttgcagtgaactgagattgtgccactgcactccagcctgggtgacacagcaaaactccgactcaaaaaaaaaaaaaggtggaagaaaattttttttctttatccgggtcccctctgttcccaataattttatcaccattaaccttccacctattgtttcaaagacgccctaattttgggggcacatcaggtgggcaagaagaccaattttcctcaaagatcaccaccaaaatttc

SEQ ID NO: 629273 - DNA, 186 bp, Homo sapiens
caactgttttggatgggtacggggtttggtctcctttggtgtgaagaaaatattttagaactacaggtgatgtttgtcacaaccttgtgaagatactaaatgcctttgaaatgtgtgttttaaattggctcattttatattatgtgaatttcacctcaattttttgcaacagaggctccttcaggg

SEQ ID NO: 629274 - DNA, 136 bp, Homo sapiens
aactggtagttcacgtcactatcctagtagattgtttcttggtgatgtcagaactttccagttaattctccctcacttaattcacgtacattgtttccattaagtaatctctcatcatccacctccttaatgataa

SEQ ID NO: 629275 - DNA, 116 bp, Homo sapiens
gcaagttcttgaaagataagtctccttgtagtaccccaattccttacttaagttgtaccttaatggtaacctggacttcccaacaaataccccgtggggtgggaaatttttaaagg

SEQ ID NO: 629276 - DNA, 117 bp, Homo sapiens
ctggagtacattcgtcagtacagtgagaagccacatggaaaggttgtttttttgttttctgtttttgagacagagtctagctctgtcacccaggcagactagcagtggtgcaatctt

SEQ ID NO: 629277 - DNA, 624 bp, Homo sapiens
  misc_feature (6)..(6): n is a, c, g, or t
  misc_feature (8)..(8): n is a, c, g, or t
  misc_feature (18)..(19): n is a, c, g, or t
  misc_feature (150)..(151): n is a, c, g, or t
  misc_feature (159)..(160): n is a, c, g, or t
  misc_feature (165)..(165): n is a, c, g, or t
  misc_feature (169)..(169): n is a, c, g, or t
gctacnangccggcagcnncggagctgcccgcgccatgtccgcgcacaatcggggcaccgagctcgaccttagctggatctccaaaatacaagtgaatcacccggcagttctgaggcgtgcggacacaaatccaggctcgcagaaccgtnnacaacagnnagtgnccangcgctgctgggctccctgaaacgctgtacacctttatagatcttactacacttccagcgtgatgattacattcttccaacattttcaccagggcctcttgtcaataaaagggccaaataccccaattccggggaacgactcctcttaaaaagcgctttataacattatttgcattgactacacacgcgcatttacctaacaggccgccggaccggtcgtaaaactacccgcccgggactgttggtagctcgcctgttaaacagccacctctacgggcttgcaagcgcttgtaacataatctccttgtggcgcactcaaggtgcgcccgcttgggcatttcccatgcttggaccaggccctccacttttgaacgaacaccgaatttagcaacgacgaatcacgcctcggagctgctgcgaccgactcgcaagctaccagcaaactcgacgtcgcgc

SEQ ID NO: 629278 - DNA, 251 bp, Homo sapiens
agctcgccccgcgttggttcttgcagtactgtctctctgaaggatagcaggagctcagactcttagagccagctgtggcttcggacccaaggcctgacctaggctgctatcctgatattgcaggaggggcctctcttccagagccccaccctgaagggttagcccttgagccaaatctttgtgccgtcatagtgcccagccaggcttttctagactaaattaagcaataagacggctctaagtctgactga

SEQ ID NO: 629279 - DNA, 740 bp, Homo sapiens
  misc_feature (6)..(6): n is a, c, g, or t
  misc_feature (8)..(8): n is a, c, g, or t
  misc_feature (18)..(19): n is a, c, g, or t
gctacnangccggcagcnncggagctgcccgcgccatgtccgcgcacaatcggggcaccgagctcgaccttagctggatctccaaaatacaagtgaatcacccggcagttctgaggcgtgcggacacaaatccaggctcgcagaaccgggaaaaaagagaaggcaagcttgtttgcttcctgaaagccgtgaccttattagagacttacacaccttttgggggaggaacaacttttcaacaattataaggggcttgggttaaagcccaaaaaccccatccgggggaagttctttaaaaggctttaaaaaggccggaaaaaggggtttttaccacggcccggttgtggttttcttccccccgggggggggtgcttttaaaaaaacccaaggggtgggggggggaaaatccccggggggaaaaggggcgccgggatttttcccccggcggaaccctttttttgaaacacctttaaaaaatacaataagtgggtgggagaagggggctccaaaataaccggggggtttaacacaaaaatttttgggtttctaacccgccggggagacccccctctgaaaaaaaaaaatccagttttcagggggggggtgggaggggggccttattaaaaaatttattggccggggggaggaaggggggttcttttatatgatgtttattaccgcccttttaataacaaggggggggaggaaaactatttttttaacaccctctccgggaaaaa

SEQ ID NO: 629280 - DNA, 258 bp, Homo sapiens
  misc_feature (42)..(42): n is a, c, g, or t
gatccctgaatttcgtagatctataccatataccaccaaganccataacagcggatattacactaataatgtagaatttctagagctgaaaggctagacaccatgtacacttgagcagaatgggggctggaaaacctaccagtttcttgactgttccatgctctcacagaaaggtatataacgaaaattaaatattttccttttttatacgatcttagaaattaccttactggaataactggactttacaggctgtgg

SEQ ID NO: 629281 - DNA, 841 bp, Homo sapiens
gtagagtgacctgaatacgtacaagaaggttggataaccatgtcgacggaccgagcatatgaacagatggattgtagcattctttaaatctatctactgaaatgtatttgacattcacgcagaatattcggtccttcatctttatagaatagtggcactatctatggtacagtttaaagccatttaatatgtcttatccattgataattcatacagataagtaggtctcattcatttgacagttatcaaagatgtactttccacagttcccctcacattaatggcaattttgatagttttatggctttttactgttagactaatcaaaaataactttaaaaggaacaaagaaactccaacatttcacattatgcatagttatgtagccatttcaccagtttctttaagatgtgtaaactcattgtcctcgatagttcaattatcatccatcaaaattataccaggagattcttttaagatacctgagtaagcagagttcaaaacaattggtggaaacaagccaaatagtaacaatgcagcaacactacaggttagtaattctttccccaatgctaggaaatcccgaccagattgcacgtctgacggagaaaaccaggtcggctccaggagacaaccgaccgccttgtgcaaggcgtggtcacgtccaccaccaatctgcgacgcaaggacccgcctagcaccaacatatcaaggcgaaaacagcatcccccaacagggagcagccgagcgaaacgggggtcgcacgacacgaaaggaccagaaaaaagcagggacaggcatgaaaaacgaaagagaacaacaaaccagcatagccccccta

SEQ ID NO: 629282 - DNA, 420 bp, Homo sapiens
aacccatattgtgaaaaacatgatttaaactttagaaaataatacttttaatacttgagagataacatgatgcacacgttgcttgtatggtctgactttccatggactaagaccctctgtgcatcattggggctcggtgacatggcgtaacctgctactgaggtgtggactcatatacaaaatcacactgtatgttggtccacagaggcagcatgctctcattgtcgtatctctctccctgatgaagcctttgcctattgttacacatttggctttacaatcttcattgacaaatagttcggcaaagagtagaggagcacggccacgaagagcagcaggataagcaggaacagcaagccgatgatgacccacttaaagcggcgccacacgatgaacttcatggtcttacggttacaagta

SEQ ID NO: 629283 - DNA, 138 bp, Homo sapiens
cagcgtttcagaagcatgcccagaacagaaagtagtcaacaagctcatacagtacatgatctcactggtgcagtcaaaccggatcctgggggctgaagagaaagatcccaccgtatgctgaacgacagatggcctcag

SEQ ID NO: 629284 - DNA, 398 bp, Homo sapiens
tttaaaacaaaaccaaccaaacaaagaaagggttttagggcagtaaggaaccgaggtaaagtacacttggaagagggtcaagcaggtgacttgagagagtcaagtgcactgtttgatcttggacttggggtttgataggttggcatccttccggggcttgcgttaactttcccctggttcttcccttggggtggtctgtccgcatgcgcagtggcctgccagcgctccggaggggcctcatgcgcagcgtgtttactgaagtgcgcatgctcacttgaggcattcttcctttaccagtcaaatgctcccaggtcatatgccagttaaactccaccatgttgcctcttagtgcacatgcttgagcccactcgcccagctcctgagatcttatcaggaag

SEQ ID NO: 629285 - DNA, 345 bp, Homo sapiens
gtggggagccatgccccaagaaatgccggatctgccacatggatgaggtcacccaaatattctttggctttgaggatgagcctgatgcccgctttgtgcacttggaagactgcaaccacatctttgaggtgcaagccctataccgctacatgaatgaacagaaggatgatgaattcgccatcatattgaaagtctgccctatctgccaggtgcccatccgcaaaaacttgaggtatggaactagcataaaacagcggcttgatgagattgaatttatccttggaatgatccctggcttatctagggaaatagcatcctacccggaacggattaagggccctgttg

SEQ ID NO: 629286 - DNA, 128 bp, Homo sapiens
acctaaagcatcctgtaggtctaactaggtgtagccagccccatactagaaatcacattgtatagactatctaatgtaacccaaggtccccaggcaaacaacgacactacctactttggcatgatatt

SEQ ID NO: 629287 - DNA, 417 bp, Homo sapiens
ctccttccttcttcctcccctcctgacgtgcatttcccccgtcccatcttctttccttgcatccttcctgttcatgtatttttttcgtaaagtttatatcttataaagtagtaaaagatacaaaaataccctagctctttaaaaattgatttcagccaggtgcagtgactcacatctctaattccagcactttgggagccaaggcaggaggattgcttgagcccaggattccgagaccagcctgggaaacatagtggacccccccctcaccaaaaataataataactaatagtaataatcataataataataatgggtgtggtagtgcatgcttttagtcccagctactcaggaggacaaagagggaggattgtatgagaccggcctgggcaacatagtgggaccccatttctacaa

SEQ ID NO: 629288 - DNA, 452 bp, Homo sapiens
  misc_feature (311)..(311): n is a, c, g, or t
  misc_feature (405)..(405): n is a, c, g, or t
  misc_feature (434)..(434): n is a, c, g, or t
  misc_feature (443)..(443): n is a, c, g, or t
ctatttataaaatacatataactacaggtttataattttttcatctctatgggaaatctgtcaatatcattagcccctattttatcaaaattatggaaaatgttattaccatatattactctgctatcattattgggtttattttctggggtttttttgggtattcttttttccaaagtacaaaatttgttcaagagatgaaaatgggacctgctccatggaagtccccaagcagaagcctgtgttaactaagtcatcaaattctctgctttggataaattgttactgccatcattcagagacaaaaaganaaacaatttattatacagaaggcaatgacttcattttacattcctactccatttttttgtcaagcattttctaaggtccaccgaatccagcttnaaaacatgttcaggattcatttcagcctntaatttcangggttaaaa

SEQ ID NO: 629289 - DNA, 298 bp, Homo sapiens
cgtcttcaactgcggctgaggcataaagaggtataatgctatttttttttccttctcttttttttttttggagaggaaatctcactctgtggcccagaattggagtgcaagggtgcgatctcggctaattgaaacctccgcctcccgggtccaagtgatcctcttgcctcagcctcccaagtagctggaatacacaggcgcccacaatcagcgcccagttaatttttgtattttaagaagagacggggttcccacaggtgggcctgggttgatctcaaactcctaaccgcagtgaaaa

SEQ ID NO: 629290 - DNA, 83 bp, Homo sapiens
agcggggggggggactgcaggggcgccggcgggcggatcgagaggaaggtcgtgggccatggtgccggcactgcgcctcggga

SEQ ID NO: 629291 - DNA, 396 bp, Homo sapiens
tctgactagtgattatgcgagcggagcccgagtaacacacgtcggcggggagcggataacggctacatctcaccgcagcgtagagttaagtcacagcttctccccacaatatggcaagtttagggtggagagtcgcaaagaaaaaacacaagaaaccccaaataataataacaacaaaaacaacaataacaacggtaataataataataataataataaaaaccctaagggatgtatgaacgggtttaaactaagtaggccaggggatcatgggtccggattggcatacatctctacggtaaataaaacctcgttttaaaactgggttcatacaccccttaatacagttaaaaatcatatatacctcaaccttttttccttcggaaggcgaggata

SEQ ID NO: 629292 - DNA, 298 bp, Homo sapiens
tctacaggatctgtgctgctccaaagaaaggtgcagcaaaaagtcaaaaaggcagaaatgaaatccacaagcagacagcccggtgccacaccccgggctcgtagttaaagatcgacccctgacctaatcagttatgttatctatagattccagacattgtatagaaaagcactgtgaaaatccctgtcccatcctgttccgttctaattaccggtgcatgcagcccccagtcacataccccctgcttgctcaatcgatcacgaccctctcacgtggaccctcttagagttgtgagccc

SEQ ID NO: 629293 - DNA, 442 bp, Homo sapiens
atccctgcagtccctcggagaccatgatgagtgagcgagtgaggaggtggcagacgcatctggagctgaagcttcattctctgttctgattggacgagggggctgggggctgctttattgagctggggatgggaatgggtgtcctctgcacatactcacctgtgttgaccctgccatagtccacaaagatctgcagcatgacagagcccagcaggtacccgaaagccggtccaaatacagagatggcaaataagatggagatgtacaggggcgagttgctgggctctgagaagtcatccacataggagatcccaaatggctgaataggcactgtcccgatgccagccagcagctgggcaaccaccatcaggccccacatgctgctggtctccttctgggggttctgggtggtgctgtggcactgactgggaggcaggtctgc

SEQ ID NO: 629294 - DNA, 339 bp, Homo sapiens
  misc_feature (7)..(7): n is a, c, g, or t
  misc_feature (22)..(22): n is a, c, g, or t
  misc_feature (40)..(40): n is a, c, g, or t
ttcctancctcctaatccctancctttttttttttctttnccctggagatggagtcttgcctcactcgtcccaggctggagtacagtggtatgatctcggctcactgcaacctccatttcccaggttcaagcgattctcctgtctcagcctcccgagtagctgggattacaggtgcacaccactatgcccagctaatttttgtatttttagtagagctggggtttcaccatgttggccaggctggtctcaacctcctgaccttgtgatccgcccaactcggcctcccaaagtgctgtgattacaggcgtgagtcaccgcgcccggcacccgttatataa

SEQ ID NO: 629295 - DNA, 302 bp, Homo sapiens
tcgcttagagccttaacctgatgtcctgaagagagttcagtggggtaaggtccagtatgtggctaacaaaggtcactttaccttttccagctggagttcataaagtcttgcagccttgtttccttgtggggctgacagtctggcatattttcaaagccagtgcattcaacgaatacatgtaagatcccacaccatgcagggctaggccgatgaacttgggctactcataaaccatgtaatatcctacaagcattcacatcaaccttgtgaatcagtgtcttcattgtatggtattacttttt

SEQ ID NO: 629296 - DNA, 1023 bp, Homo sapiens
ttcaagcctccaccacacactagccgagcccccgttaatcagcacgaggggagacctggtgatactggcggggctcttggtcagcctcctgatgctccctctggctgtcaggttgccctggcttcagcgcttgtgatgtttcttcttcctcactgccctccacatctacgccaaactacctgctgcggtcctgagccctggtcatggagaccttgaacgaaggcctggctccggctggtcctgaagcactacctttcagaagtgtgtgatgagtgtaactcagaaccgcaaacttgacatgaccaattactgcattggatgacctgactggtgagacagagtatatcttggccagactcctgtcgtctataccctgggtggtccccattaacaccgacttgtgtctcacagatgtctttgagctgcagcagcgtggttgaggggcaccaaagaatcctacctcctctgctgggaccatgtcacaaacaccagtgtacaggtacgttctgaaccatgaaggcaggccccaagaccatcctaagggccgacacacatgggctgatgcttggtggccctgcagggagatggaccccttccagcagagctggaggagctgaggaaccgggtgcgggcaggtcctaagaaagagagctgggtcgtcgtcaaggagacacacgaagtgttggacatgctgttcccaaagttcttgaacaggactgcagcgatgccggctggaagaccgagaagcaccagctacacgcgtgtctgcactgccgcggccacatggctcctgtctcccgaacagaaggtcttgtgagcagcccacgacggtaggcccaatcccagtgcatgaaccttgagcaggaccccttgggtcacaggcagcgacagtggcacaggcagcttcacttatcacttagggcacctgagcaggattggccagtccctcatcggacatcatgcaatccatgcaattgccccgtgcacatgaggcctgcaacaggacaccggactttcaccact

SEQ ID NO: 629297 - DNA, 178 bp, Homo sapiens
ggcttggctggaatccaggactgtattttcatggagaagaacctgcagattcttccatcctcagggggccatggcccacagctctgcatctgcatctgagcttctcaagactcctggagcatggcgggaatggggcgtacatcgttgctctgtgctgacgggctccgtctcggagatt

SEQ ID NO: 629298 - DNA, 119 bp, Homo sapiens
atcagtttgagcaacagtttcacaagctactttggacatcaggcatcctggctgaaggtgggcatcaagggacagcatcactgatttggtcacaaatcttataagcgtggccagaagga

SEQ ID NO: 629299 - DNA, 896 bp, Homo sapiens
tataaggcacataactgcctttttacccttaggaacagacttttatgcccttagacactatgcttgtgggccatttcatgcagtgacatctaattgaagaacagaaatgccagaaacctatggccattacgccgtagaaggacggacagcgtgttataggatacttgaacacggtcgtggtgacatcactggcccttgcttcaatcgcgtcagactcagaagtatgtgtactagcaagttttgtatgctgtaccacaaaattttaggttaggtcgaattctcaaatacggaatccatgaagtaagcgaggatcatgctgtacttgagctatattgtctatgagctgtgacatttatctacctggtttatggaactagacatttattgctgaatcatgctccagttattcgagtgaggttttaaagtatcctatgtctgaaatataacttgcctgcgctaattgtgtggtaactttgcttttactgtttccacagtatttgcaggtctttgctcacttcactcagtaatactgatgcacttacctagtgtgccagaattttactaggcacaatccatgaatcaaaatacaattctcttgcaccatcattaataaatgcttaaatgtccttataacctgtcgggagtcccagtcatggaaaagtttgcatacatggccgtggcatgccgggtcaccacttgtatccaaaatgtttgataacgggcgtagcgcagggaggaactcagttgacctgtacagcgagttgcatgtaccaccatgttacaaaactcctcgaggcctgccatgcgacttagaatacacccacttagcggaatgttgggggcaacaaggggatatcaccagggagtccccagccacacggaggtaaattgtccca

SEQ ID NO: 629300 - DNA, 262 bp, Homo sapiens
ggcagaggttgcagtgagccgagattgtacttgccgcactccagcctgggcgacagagcaatgactccgtctcaaaaaaaaaaaaaaaaaaagaaaaaaaacacagttttattccaggcctcagggatttgtgaaacaaattttcaggaaaattaagcagtcccttgtcaacattcccaaaattcataagaaattagggccccatggggttaaacccaaggagatgttgtaaacagcagattcagccccaggggggatcacg

SEQ ID NO: 629301 - DNA, 1517 bp, Homo sapiens
  misc_feature (1240)..(1240): n is a, c, g, or t
gcgacactcgcgcttgtgttgcgccgcccattataatgcctccgtggggctgtgttccgtcgtccttccgtagttttttcctgtgggcgctcgtggggcggcgggtgtccaggtctgcgccaccgcggagccctgctttctgcactcctttgggccctatctttttcggtggttcaccctgattgtggataccaactggttttgtctcctacatcataagtacgcgtggctctggttgattcaccggcttcccacggacattttctcccccggggagtgttgttgcttcgcggaatcgacccaaccagcgtgtgttctccgttgcttgggagtgaagtgcccttggggtcgtttccgccgccattgggctcctgtctccgccccttcacgaccccccgtttttggtgtgtagccacccggttgagttgtgttgataggaaccccgagtccgccgggttgccgccccagaggtccttctgcgctgtgcttgccgcggcagggggtggttccctccttggtagtgtcccccagcaggaattgtgcgcgcccattgtttttgcgtaccccctgtgggcgccgggatatatatatgggctcacacaaccggttgggatatgtgagtgttctgtgccactgcgcgttttcttgtgggggccccccacagcataggggtcgtaccacgagttgaaactgagttggggaggccacagccgtggttgcaccctgccttggagaacggcccctcttcggaggggcgcttggtcccccccggagaagtggtttgttggccccacacttatagcgtatacacatatggtatatacaaaagccttctctgttgcgtcgcaacagatttgtggcgttttcacacatattgcccccgggagtctctaaggcattgccagacacgcgccgtgtgccaacacagggcacatgcaccgcaggttcacacgcacaaagagatggtgtgttgcccccttgttcgctttggggtgcctagatccacggtcttccccatacccacgagcattttccgagagcgtggcccctctcttggtaatgccccccccggggcacacttggtcgtgcccacgcggctgttcaccacatgtgggccccacagttacatcactgtgccagctcccgcacacccacagcttgccaggcacccatggaggcactcgtcgagtttgaaggcccctggcgccacgggcgccaagtttcacaagtttgcctcggnccgccacgagagagttccaccacttcttccaatgagagttggggctttcaccccatgttccactgctgagtgaaatttgaagaacactggtgcgctgaagaatgcggctcactcccacgatggctcgtggggtctcagtagcactcccccgttcctggccctctggaaccaagtgtcgggcccctgcaccttcactgaagggcttcccatgtgctgccccccttttaatactccacccattcatttctacttcctgtcccaaagaaaacaaaaaaaa

SEQ ID NO: 629302 - DNA, 1793 bp, Homo sapiens
tgtctgtcgctacgctgtgttggtggtccgtcgctgctgcggctttgtcttcgtgcgtgtgcgtgctcggtcatcgttgtgttggtttggtcgtcgagccatctgtggtagcgtctttctcggttcttcaggaccgcatcagtgggggggcgtctctgcgtgctcagccctcgtttgggtagacctcgtgcgtccgttgtggtcgctcactttgtcgttttgctcgagcagttgtgtggtgcgtgtggtaggcccgttcgtgttgttgtgtgtctgctcgcttgtgtgtttgtatcacctcactcggttgtgtttctcgttatcgtcagtggggaggtctggtctcttcgtatcggcttggttgtgttgggtccaccgacgtgtgtcgatgagtgttttgtgtttctacatagcgttgtgttctattcaatacttacgtgtgtggggggctacctatcgcccctccgttcgtttgctatgtggagtttgtgtgtgcggtgttggtggttgtggttgcttcgttcgtcgggtgtgtgtttcctccgtgtcccgcgtgtggtttgtgttagtgggtggtgggaacacccccgtgtgtatacgaggttgattttcgcagcttgtttttgttgttgtggcagccaccgatgtggtgttgcgcgttgccgtcgatgatggcaagcaccagctgtggttggggttgggcgtgtgccagcatctggtttctgactcgccggctggtaatgtccccccccttggtgggccgctcggggtggcctcttcggtgccactagtgtgtttgctcttcgtccccgcgggggagagtccaccgttcatgtgcgtcaactgccgcttggcgtgcgacagcggcgtcatcgctcgttgggttgcagctcttcggtgttggcccccctcttctctgtggagtgttcgtctttccgtcgcttgtgttgggaggtgtttctataaagaggtttcttcttgtcgagggtatgtgggggtggttgtgcttcgttggtctcccctgcgccgccgtttctcctcaatcggcagcacgcccgcgcgcgcccacgtaggtgtgttgtttgtgtgttctcacctgtgtgtatttgtggtgtgtcccccacaatacccacactctgtgtgtgggaagaagagtattgtgtgtgtctctgtgtggagatatctgtgggcgtgtgccgctcacactcttctgtgggagagagatagtgtgtgcgcacgctctctcacattgcgcacacacactctgtttcgcaccactgtgagagagagatgtgtgtgccccccttgtcgcacaccggtgcgcacacacaccgtgtcacattgagctcctgctgttctcgccaccgccgcccgcggtgtgttcgcttgtttgtgtgttgtataaagagtgtcacacctcgtgtctctccacactgtcactcccactcctcacgcgccctctctcacggtgcgcctcttctaactctgcccacacgtggcccacaagccacgcagacccactcggggtgtttctctctgtctcgccacagcgaaatttgggtgctgggaacacacacacacaaaggggagatatagaaattctggtgtgaaggtgtgaagtgggcacaccccctatgcctaaccgaaaaggcccacatcttttgggccccctgagactgccctgggaatttttcacctttgcccctcccttcccttagggccaatatacccccccggaccccctgggtattttagtgacctttttttatatttaaagaattgtaaattgccca

SEQ ID NO: 629303 - DNA, 774 bp, Homo sapiens
  misc_feature (13)..(13): n is a, c, g, or t
  misc_feature (87)..(88): n is a, c, g, or t
  misc_feature (94)..(94): n is a, c, g, or t
  misc_feature (97)..(97): n is a, c, g, or t
  misc_feature (104)..(104): n is a, c, g, or t
  misc_feature (111)..(112): n is a, c, g, or t
  misc_feature (223)..(223): n is a, c, g, or t
  misc_feature (244)..(244): n is a, c, g, or t
  misc_feature (262)..(262): n is a, c, g, or t
  misc_feature (267)..(267): n is a, c, g, or t
  misc_feature (392)..(393): n is a, c, g, or t
  misc_feature (494)..(494): n is a, c, g, or t
  misc_feature (672)..(672): n is a, c, g, or t
  misc_feature (679)..(679): n is a, c, g, or t
  misc_feature (687)..(687): n is a, c, g, or t
  misc_feature (741)..(741): n is a, c, g, or t
attatgaatgtgntgggaaggtgaagaaagaaaatggaaaaaaagttatatgtaggtggtgaaaaaaagataagaatggtaaagagnnaaaagngtnaaatganaggaatnnaaatgtaaagataagtgaagaataaaaaaggaagtgatggatgaatgatgaaattaagtataaaaaaaagatataaggttgaggggggggaaggagagaaaaatgaatganaaaaaagatttaaaaaaaganatgataaggaataagggnaatgnaggaatgaaggggaataaaaaaatgggatatgaggtgatataaaggtgagagatgggataatgagaattgaaggtgaaggaaaaatggggattaaggataaagggatgatgaatggaggaaaaanngaggagggaagaggtattaatgattaattaaaaaggaaaggataagtgatggtgataaggataagaattaaaaaggaattaaataagtataagtggaaganaagggatattgtaaatgtatttgtgaatgtagaaaaggtatgaatgaaagggaaaaaaatgaaatttgaagtataggaagattagagatggtgaggagatgatatagagatttatgaaaagatggaagggaaaaaaagggtagtaataagagtgaaggatgagaaggggaaaggagangtgattnaagttttnataatttgaaaatttaattaaaataattgtaataggataaaggaagaaaaagtnaaaaaaagggaagtatagatatataaatgaaaa

SEQ ID NO: 629304 - DNA, 468 bp, Homo sapiens
gaattccccccccccccccccccccggatgtggtttttggttttgggttttttggttttagagacagggtctcgctctatgacccaggctgaaatatagtggaacaatcatcactcactgcagcctctaacttttgggctcaagtgatcctcccacctgagcctcccaagtagctaggactacaggtgcaagccaccaagccccactaattttaaaatttttggtagagataggggtctcactatgttgcccagactggtcttgaacccctggattcagggggtcctcctgtttctgcctctcagagtgctgtgattacaggcgtgagccaccgtgcccagcctctctgaactgtctttaacacattaaaaatatttactgagcatctatttcatctaaagaactaatcttgataaaaccagccagatgtttgctccatgagctgaagagcccttggaggggttactg

SEQ ID NO: 629305 - DNA, 1959 bp, Homo sapiens
  misc_feature (775)..(775): n is a, c, g, or t
  misc_feature (809)..(809): n is a, c, g, or t
  misc_feature (821)..(821): n is a, c, g, or t
  misc_feature (839)..(839): n is a, c, g, or t
  misc_feature (871)..(871): n is a, c, g, or t
  misc_feature (904)..(904): n is a, c, g, or t
  misc_feature (908)..(908): n is a, c, g, or t
atttgccgtgctgtttatttacaaataactgcgtcttcttttcagaaaagttaagtggtgtgacaacacattgctcgagtgtcttctcccccattgtacacgatatttacaagagatctggcactatttctttggcctttttttaagcggcgctagatatcctccatgctcttcatgtgttcactaactgttatccttttacccccactctagtgtataaagggtgtaataaaagatacgtgttgcctcccccttagtgggtgggaagaaactccttttcgtcagactctttaagtgtgtggccactaatataggcaaattttgtcctttccactggggggaaacgtacatttgcaggttgcgcgcgttctaaagccgtggtaaccttttcaggggggcccctagttcattcctggatgtgacccaggtacatggaaatgcgccgttggcttcgtgccttcctctggcccaatgcccagaaatatggtgtggcctgggaaccttgggggataaaaagcgtaaaaaggatgcgggaaacgattgcaccagcaaggagataacaagtaatttgaaagttttggggaaacttctagagtctgggcaaaagatgcagtgggtcttgttcttccttattgtgtgaataacactcccgagttacacaaaaagaaaaataaggtggccaccttacctttaatagttgaaatgatgataatcctaattatataaaaatatatatataaacacacatatatatagtgatttctaaagattgttnacttttgtgttctgttttactgtactaagaactngtcctttctccntgaatcaaagtaggacangcatcatcctcctaattttaaatgttggctcngattttaaagtggtgcatttgattccagcctgntaanggagagtttgcaaacacacagcggcccacagcttcacgtggtggtgtgcagtgtgaggcagctccttggctttcctggttttacaacaagctagagattttcaaagctacacttttgagtaaaaacccttattaaaagaaaaacatgattaataaaaaaaaaaaaaaaaaactcgagactagttctctctctctctctccaagaagcgccagcgaaccagaggcccgttaagtttcatctcagaacatcggcctaaggtttggctagcagctctaaaaagggcaccgcgggtgcgaccttttggaggtgcacccatagcctgccgaggcagcactaagtgactcgccgcactgacggtggccaccaggtcgctcaagaaaggttgccactcgcgaacgccggcactgcctccgagggattacgcaatctccggggtttacgcgccggccggcagcacagccgctacaacccgcagactagcacttgaagacgccatcttctccggattaccatttctccacaagacgccccacgaaggcgacccatagggttctgggggtccctcgccctcaggggcacagagaaaccgcgaacaccgagccggctgcgttctatccccggggtaatcgcagaggacgcgacacgccccagacagcgacagcaccgacaaaggggaaacacccggagctccgagcaccgagaaatcgcgaaaacccacctcgtgcgacacattgggcacacaagtgggacgtgcccacagtagcggccctcttaaagaccagtgccacacgaaacaggtgctcccacgctggacacttacacccgctgctagtctttcgggcaacgtttcccccattaaactgaaaaattaaccaaaagccaccaacataacacacgtctataaccacaattccagagtggcggagtttttatcaatccttggccaggcccgggacctaacgaggtctcccaaaacgctttggggcgcataccacgcttatggaacaactccctaggggcccttcggggctttggtgctcatccggtgaga

SEQ ID NO: 629306 - DNA, 449 bp, Homo sapiens
acaacagttactaccttatctcagctgtggggacgctccaccccagccggacagctggagggggtgggggcgggggcggggctgcgccccgccctcaattccatcccctctgtcactccgcccatccccggctacctacaacagctaaaaccccagccctcaatgaagcactcgcgtatcgcgttgtaggcctgaacctcattcacggagcctggacgtctgggtggaaccctgccccttaccacgccttgatggccgcgggaatctggtgctggcggcagccggtgcagccccggcgagccctgtgcctggttgacctcgtccggctcttcttgaatcatgctgggctgccacctgctcagccacacccgccttggtgtgacgcctggtctcagcagcggctgcgtgtcgtggcagccatcacatctccagcaagtctcctggcctct

SEQ ID NO: 629307 - DNA, 1993 bp, Homo sapiens
  misc_feature (809)..(809): n is a, c, g, or t
  misc_feature (843)..(843): n is a, c, g, or t
  misc_feature (855)..(855): n is a, c, g, or t
  misc_feature (873)..(873): n is a, c, g, or t
  misc_feature (905)..(905): n is a, c, g, or t
  misc_feature (938)..(938): n is a, c, g, or t
  misc_feature (942)..(942): n is a, c, g, or t
atttgccgtgctgtttatttacaaataactgcgtcttcttttcagaaaagttaagtggtgtgacaacacattgctcgagtgtcttctcccccattgtacacgatatttacaagagatctggcactatttctttggcctttttttaagcggcgctagatatcctccatgctcttcatgtgttcactaactgttatccttttacccccactctagtgtataaagggtgtaataaaagatacgtgttgcctcccccttagtgggtgggaagaaactccttttcgtcagactctttaagtgtgtggccactaatataggcaaattttgtcctttccactggggggaaacgtacatttgcaggttgcgcgcgttctaaagccgtggtaaccttttcaggggggcccctagttcattcctggatgtgacccaggtacatggaaatgcgccgttggcttcgtgccttcctctggcccaatgcccagaaatatggtgtggcctgggaaccttgggggataaaaagcgtaaaaaggatgcgggaaacgattgcaccagcaaggagataacaagtaatttgaaagttttggggaaacttctagagtctgggcaaaagatgcagtgggtcttgttcttccttattgtgtgaataacactcccgagttacacaaaaagaaaaataaggtggccaccttacctttaatagttgaaatgatgataatcctaattatataaaaatatatatataaacacacaaatctttagaaatcactatatatatgtgtgtttatatatatagtgatttctaaagattgttnacttttgtgttctgttttactgtactaagaactngtcctttctccntgaatcaaagtaggacangcatcatcctcctaattttaaatgttggctcngattttaaagtggtgcatttgattccagcctgntaanggagagtttgcaaacacacagcggcccacagcttcacgtggtggtgtgcagtgtgaggcagctccttggctttcctggttttacaacaagctagagattttcaaagctacacttttgagtaaaaacccttattaaaagaaaaacatgattaataaaaaaaaaaaaaaaaaactcgagactagttctctctctctctctccaagaagcgccagcgaaccagaggcccgttaagtttcatctcagaacatcggcctaaggtttggctagcagctctaaaaagggcaccgcgggtgcgaccttttggaggtgcacccatagcctgccgaggcagcactaagtgactcgccgcactgacggtggccaccaggtcgctcaagaaaggttgccactcgcgaacgccggcactgcctccgagggattacgcaatctccggggtttacgcgccggccggcagcacagccgctacaacccgcagactagcacttgaagacgccatcttctccggattaccatttctccacaagacgccccacgaaggcgacccatagggttctgggggtccctcgccctcaggggcacagagaaaccgcgaacaccgagccggctgcgttctatccccggggtaatcgcagaggacgcgacacgccccagacagcgacagcaccgacaaaggggaaacacccggagctccgagcaccgagaaatcgcgaaaacccacctcgtgcgacacattgggcacacaagtgggacgtgcccacagtagcggccctcttaaagaccagtgccacacgaaacaggtgctcccacgctggacacttacacccgctgctagtctttcgggcaacgtttcccccattaaactgaaaaattaaccaaaagccaccaacataacacacgtctataaccacaattccagagtggcggagtttttatcaatccttggccaggcccgggacctaacgaggtctcccaaaacgctttggggcgcataccacgcttatggaacaactccctaggggcccttcggggctttggtgctcatccggtgaga

SEQ ID NO: 629308 - DNA, 256 bp, Homo sapiens
attaatttgcccccctttacccaaaatgtatagcttagtcaaaggtttctattggggagagtatggggattgaatgttgttcccttaaaaaattaaaaggactaatgtaattgtcttaccccggcatgaattgaaataccccccaaagccccttcgttgttttatgatttttaaaatcgtggaaaaaactggcctttgcaagatcttaaattttctaaaattatttcttaaggattaaaaatcttttctggtttta

SEQ ID NO: 629309 - DNA, 369 bp, Homo sapiens
ccggaccggtgttcctttgtctaaaccctgctgctgggttctagggtatccttgagcttttgctcaaaacatcgtgtacaggctgggtgtggtggctcatgcctgtaatcccagcactctgggaggccaaggcgggaagatcacttgaggccaggagttcaggaccagcctgggcaacacagtgagaccttgtcttcacaaaaaaatcaaaaaatgagctgggcatggtggcgggtgcctgtggtcccaggtacatgggaggccaaggcaggaggatcgcttttgcccgagaggtcgagcctgcagtgagctatgattgcaccaccgtactccagcctgggttacagagcgagatgctatctcaaagag

SEQ ID NO: 629310 - DNA, 230 bp, Homo sapiens
tagctggtcctggcgcgttgggtatgcttagtgtagaggtgcaggattgcaagcccacctggctacagtgccgacagctacatctccaactgaccctgatcacgaagagccacaccaatgatgccgcacaaagagcctctcaatgggccacactaagggccaccccaagagcctcgcaacgagccacacgatgagcccacaatgagccccccaatgagccaccccacgag

SEQ ID NO: 629311 - DNA, 1337 bp, Homo sapiens
gggctgagctctacactggcaacagctcagcagcttccaagggaatgacccggccatctcgacggagccaaagccttcgccccaccaagaccgagagctccctcaaactggctgcaagacccagcttttgtggcctcagcctacattccatgagagcctgggcagcattgcaaggcgatgatgacaagatctactttttcttcagcgcagcactggccaggcaatatgagtgctattgagaacacccattgtgtcccgcattgcccgcaatctgcaagggcgatgagggtggagagcagggtcgctacagcagacgctggaactaccttacctcaaggcaccagctagctgtgctcacggccctgacgcatggacttaccccatatcaacgtgctagcaggcatagtcctctcacgctagagcacccagaaccccaggacctggacgtgccaccccttactctatggggtcttcaccattcccagatggcacccacggggacactacagacgggctctgccgactggtgtctatcaccaactgcaggctgtgcagagacgtctacacgccggcactcttacacggaggtgaaacccgaggcagcacacagcagggggtacacccgacgaccccaagccgggatgcccaggagccccgggcctggcacgcagcgcaatcacccaacaggggccacgagcacaaagggaaggaaccacacgtcacaaccactgcaaagacgaccccaaaacccgcgcatgctgaaagccagccgatcaaaggacacccacatccccgcatggcaacggggcccaggtcccgaacacccacacaagcagctgcactgcagacccccagcgcactccgcgaacacacacagtgaccagcataacaaccagagcgccaggcgaccctgcaccaccagacccatccgagcggcacaccataccctagggcacactagaagagcacagcacgtgcaacccacaagagcaaaaagacccaagcgtaggacccaccggggggggcacgaacaacaatgaaacgcgcacaggacagaaactaacaccagcggagagaccacacgccgtcacaaagaacacgccatcagagggaacaaccacacacgcaggagcaacacgagccacagaggagcaccaaaccggacgcgcataacaagaggcccatagcccagtggaacggatacgaacacggaggaacaacccaccggcaccacagggacgaaagaacacgaagaaccagaaacacaaacgaggcaacagagcgagacgacaaggaacgaacacagaacgcaacagaccagatacacgaaaagaaaa

SEQ ID NO: 629312 - DNA, 720 bp, Homo sapiens
aaaggctcaccccacttttttttatttgaaaggggggggacttttcctccccaggggggcaaagccccaaaaagcggcccttcatttgaagggggaacccaagttaacaggggggccacaattctttcaataaaaactaccgttccacagaccagagggaaatttcaattcccgggggcccctcctggaaaacaaacctgcgttttttgggggcaaaggggtaattgccctgaaccctaagggggcgttggccgtaatttgatgctggtggagaccccaaaaacaccttctggaaaaaatggccaggggtccctcaaacggggttgaaaaagcggtcagggttacccaaaaggagccggaccccttcccaacggccttccaaaaacaacaggcggaggggaattttgtttgggacactgaaaaacaggaaaccccgttttgcacatggaaatttaaggcgcggcataaatgaaaaaaggggttccttccatttggcccagagcttttttggtttcggaacaccaccagtgtttaggggatgcgggaacccaacacaaggggtttttggaggtcatttttatccatgaaaccacactttttctttttaatagggcacgagaaccaaactcctttgttagggttttagaaacagtttactggcccctgggggtgttgtgtggccaaaaaggaccgttccaaattttgcccagcagggggggg

SEQ ID NO: 629313 - DNA, 120 bp, Homo sapiens
catattccacgattgcctggccaggcattctgggcatcgtttcttgcacagggtgcacatacaaatcgtcatgtcacacacattgctgcacatttctcttcgttcccagcagcgttgttt

SEQ ID NO: 629314 - DNA, 289 bp, Homo sapiens
  misc_feature (239)..(239): n is a, c, g, or t
  misc_feature (247)..(247): n is a, c, g, or t
ctgcatgttctctctgttgttggagcctggagccttgcatctctgggcacatgaaggggtccactctccatgccatgcatgggacctatggaaggggcttccatggcacaaaggccccctcttccagaggaccccccggatctgggtttccttttttttttctgttatcagggtgtactctaggggaccagcattgggatgcggcggtaacgctgagggcttcgcggtggtgctatcanttacagcnctgggtcttgacgtatactatgcacagagttgtccccccccc

SEQ ID NO: 629315 - DNA, 167 bp, Homo sapiens
tctctcagtacaaagtaactactacgtacacacaaaatgcttgtgaatgtaataatttccctggctcatccaacgcgcaattgcacactacttcaaagacaattttgtgcaagtgtacatgaactgagaaaacagctctccaagtttcaaatcctgctcttacatta

SEQ ID NO: 629316 - DNA, 931 bp, Homo sapiens
ggcagcacagctcccctcaaacagtcgtttccaagaacaattgacatgggttacaacaaagcggggaacctccctccagagggtcccctcacatactggggttaacgaaatgaggggcccgcgatgacaaataagaggagatggggtaggcctccgctccccaacaccggtagaagtgggcgacgcccgccgccctccgaaattggggcccggtgctccccccttacaatggctccccttttccccactcgtgtaaaggaaaaaatagtttcacaagcgacatgcgtagcagttttccataacacaacgttggatgggagcacctttttgaacgacccgactttgtcacgcacatatggtcccagcaaggggagttgtctaaaagaaagataccaccgactgcgctaggaaaggtttcaaaaagaatggggccaccacacacctaaggagaagatttctcagacgggttgacaaaaaaagtcacacttaccccatacgcgttgaatctcgccccgggagttcttaagatactttaacatttgtggagctcttgtggaggcttataaattaatttcgtagggactcttatctcaagtttgaaaatatcatgtaaatgggaaagattccccgcaactgtttaatggaaccacacactgggaattctagtcaggcagtagtgtcagctttaaagaagacttgtacaaagaaatttaaatacccaacggtgttcaatacagaggccgcatttattgggggctttcgagaaaagggagtggcttgcctccgacagcagtgttggaatgaaccccagcttggtggtagctataaatcaagtactgcccctattttcaatataatgaagttagtgttaccgctaaattataggggacccaaaaacaataaaaacacaagggaacaccccaaaaaaaca

SEQ ID NO: 629317 - DNA, 428 bp, Homo sapiens
cctacacaaaaatctttcctaagactcggaaaaaatactggatggatattcgtacatgacacaagaataaggcaattccacttcttatgtatatgaaagaggaaagatttttgtaaactacaaaagtcacgattgaccataacctgaaagcaaaaaaaactaaaagtaggttggggattaggttgtatctctttgggcgagctgcaaagtagccaaacctgactaccaaaggtaagaatgtggatacacaaatgtcacctaccccaccctgctttgttgaggtaggggacgaggaggacaaagtggagtgtggagggaggagggggccaggcaggtgtggaaagccagcaaggttgtctgaaatgtctgttgtcagaacagggcttccccttctctgtcatgaaaacaggatagaaaaagcttgtggc

SEQ ID NO: 629318 - DNA, 934 bp, Homo sapiens
cgcacagtgggggggccaaacaccagtggtggagaacaaaagaccacggggtgtccacacacgaattgtaacaccggtattaaccacaacagggttgacccccgacgtctgtggctcgaggaaaacacccaccactcgctttgcgggaggtcacccagttgggtgtaaaaaaggcccccctgcggctgaatgcccgctagggaatccctcagatcctggggagcccacctgcggtgacgacctgcctaaataatcccatatgtcctgcggggaaccactcgcccagcaacaagtgtctagcgaggtggcgccgcaacctccacagccggtggataacaaaaatatgtagtgggctcctgcgaaagcacccgctctagacaaccgaaagagggcgttaacaccagcgggaaatctctcctgcgggggtctaatactgagggcggaagaaattggcttaagacaccggcaaatagacgaatcgctgttggcaacaaacaccacgcgtggcctcacgagaacacctctcctccgccaacaaccgaccgagacaaaagtggtgaacaaaaaaacaacgaattgttcggtggagaaaaacacgcgggctcctctccgcgcactcgcagagtccacagcccccggggcccacgctggaagattatttcctccactgcactcccgagagagctttgtttaaaagagctcgcctctttccactaaatacacaatgattgtcaacaaagttcgctcttggacaaaacatgtgggtggagcaggaacggtggatgcctgagttcttcaagtggggagtgtaataaaatcccacaataatctggtgtgcggtgaaccccctgtgtttcttctcttttgaggcgatcaatctgggatagggaaaaaaaataaaagcaaacaaacccaaaacaaaaaaaaacagaca

SEQ ID NO: 629319 - DNA, 779 bp, Homo sapiens
  misc_feature (74)..(74): n is a, c, g, or t
  misc_feature (82)..(82): n is a, c, g, or t
  misc_feature (88)..(88): n is a, c, g, or t
  misc_feature (95)..(95): n is a, c, g, or t
  misc_feature (98)..(98): n is a, c, g, or t
  misc_feature (102)..(102): n is a, c, g, or t
  misc_feature (106)..(107): n is a, c, g, or t
  misc_feature (110)..(110): n is a, c, g, or t
  misc_feature (115)..(115): n is a, c, g, or t
  misc_feature (124)..(124): n is a, c, g, or t
  misc_feature (142)..(142): n is a, c, g, or t
  misc_feature (152)..(152): n is a, c, g, or t
  misc_feature (156)..(156): n is a, c, g, or t
  misc_feature (163)..(163): n is a, c, g, or t
  misc_feature (177)..(177): n is a, c, g, or t
  misc_feature (185)..(185): n is a, c, g, or t
  misc_feature (187)..(187): n is a, c, g, or t
gtgagggtgggccctaataagtacaagtgaggatcaagccacagttgtttggctctttcatttgctagtgtgtnatgtagtnaatgtnaagggtnctnactngagnnctnatagnaaggcgctncgttcgaaaaggtcttangagttactancctnacatttnatgaccattttccntccgcttngnagaagccccaactctgctgtgcatttttccattgtatttatggcagttggcgtatctgacattcagttctggcggtaggtttaacgcatgcttacgttcactttcttgtaaaccatcaaaggtacaggtcatctagcactaaagcaccaaaactctctgagggcataacagctgcttgaaacgacgaggttaccattggactattaaggagttaactgaaataactcccatagcaatagtgtcatatcacttatcatcttcccccttcctctgcgggacgtggaacgaacttgctctgacatgtatatctgaaaagaggcctggtaggtaaaccaggccctggctctttaccagcagtcatctctatcattgctctggcggaccagccacgaacaaacaaacaatcccggggcacattggcgtagactcagtgctagtgcaaaaatggtggcagaatccaactgatttattatctggctgcacattcgtaacgtcattaatgaaccgcgaacttaacggaggaagccttaatgcgctggctcacaaactcagatctccgcactgggtatccttagcctctagccaggatgac

SEQ ID NO: 629320 - DNA, 1106 bp, Homo sapiens
ccgagcgcttccggtgcgtgtggtatggaacgccgtggactccgggcactgcctgcagacctactccctgcacacagaggcagtgcgggccgcccggtgggctccctgtggccggcgcatcctcagtggtggctttgacttcgcgctgcacctaacagaccttgaaacaggaacccagctatttagtggtcgaagtgactttagaatcactaccttgaaattccatccaaaagaccacaacatctttttatgtggaggcttcagctctgaaatgaaagcttgggatataaggactggcaaggtgatgagaagctacaaggcgaccatccagcagaccttggacatcctgttcctccgggaaggctccgagttcctgagcagcacagacgcttccacccgggactcagctgaccgcaccattattgcctgggatttccggacctctgccaaaatctccaaccagattttccacgagaggttcacctgccccagcctcgccttgcacccgagagagcccgtgttcctggcacagaccaatggcaactacctggcccttttctccactgtgtggccctaccggatgagcagacggcggcgctatgaagggcacaaggtggagggctactcagtgggctgcgagtgctccccaggcggtgacttgctggtgacgggcagcgccgatggccgggtcctgatgtacagcttccgcacagccagccgagcatgcacactgcaggggcacacacaggcctgtgtcggcaccacctaccaccccgtgctgccctccgtcctcgccacctgctcctggggaggggacatgaagatctggcactgagctttttgtcactgaaccttcccgatgccagctgggctcttggactcccctcttcctcaagggtagatgagaggaacgagcacagaggttggctgtgggtcctgggtaccaccttctgagcctcagtttcctcatctgtaaagtggggagaaaagtctgtttgcctcaggagtgtgaggactacactagtgaaagcgcctggcgggcagccggcgatgcccaataaatgtgtgttttgctgtttgttaagtgatttcagcaaaaaaaaaaa

SEQ ID NO: 629321 - DNA, 890 bp, Homo sapiens
  misc_feature (47)..(47): n is a, c, g, or t
  misc_feature (57)..(57): n is a, c, g, or t
  misc_feature (254)..(254): n is a, c, g, or t
  misc_feature (310)..(310): n is a, c, g, or t
  misc_feature (328)..(328): n is a, c, g, or t
  misc_feature (332)..(332): n is a, c, g, or t
  misc_feature (336)..(336): n is a, c, g, or t
  misc_feature (340)..(340): n is a, c, g, or t
  misc_feature (343)..(343): n is a, c, g, or t
  misc_feature (349)..(349): n is a, c, g, or t
  misc_feature (356)..(357): n is a, c, g, or t
  misc_feature (367)..(367): n is a, c, g, or t
  misc_feature (371)..(372): n is a, c, g, or t
  misc_feature (375)..(375): n is a, c, g, or t
  misc_feature (385)..(385): n is a, c, g, or t
  misc_feature (387)..(387): n is a, c, g, or t
  misc_feature (398)..(399): n is a, c, g, or t
  misc_feature (452)..(452): n is a, c, g, or t
  misc_feature (494)..(494): n is a, c, g, or t
  misc_feature (504)..(504): n is a, c, g, or t
gtagctggcaccaggagccgtgggcaagggaagaggccacaccctgncctgctctgntgcagccagaatgggtgtgaaggcgtctcaaacaggctttgtggtcctggtgctgctccagtgctgctctgcatacaaactggtctgctactacaccagctggtcccagtaccgggaaggcgatgggagctgcttcccagatgcccttgaccgcttcctctgtacccacatcatctacagctttgccaatataagcnacgatcacatcgacacctgggagtggaatgatgtgacgctctacggcatgctcaanacactcaagaacaggaancccnaacntgangantctctngtcggcnngaggatggancttnnggntctcaagatntnttccaagtatnncctccaacacccagagtcgccggactttcatcaagtcagtaccgcatttctgngcacccatggctttgatgggctggaccgttgcctggctctancctggacggngagacaaacagcattttaccaccctaatcaaggaaatgaaggccgaatttataaaggaagcccagccagggaaaaagcagctcctgctcagcgcagcactgtctgcggggaaggtcaccattgacagagctatgacattgccaagatatcccaacacctggatttcattagcatcatgacctacgatttcatggagcctggcgtgggaccacaggccatcacagtcccctgttccgaggtcaggaggatgcaagtcctgacagattcagcaacactgactatgctgtggggtacatgtttgagggctgggggctcctgccagtaagcttgttgatgggcattcccaacttcgggaggagcttcactctgggttcttctgagactgg

SEQ ID NO: 629322 - DNA, 1089 bp, Homo sapiens
tcagcccccgtccccgaagactgctggattcccgttggcagagcggggttgggttctggacagatgggacagatgcatgctaccgcaggtcactgggggagcttgtgagtctgctgctgcttccaaggctcatccctatgtatgtatcagcattccttgtgctgagtcatagtccattgtatggacataccgcagttgtttatccagtcacctgtggatggacgtttgagttgtctccagttttggctgttatgagtaaagctgctgagaacgttcatgaacaggtgatgagaagctacaaggcgaccatccagcagaccttggacatcctgttcctccgggaaggctccgagttcctgagcagcacagacgcttccacccgggactcagctgaccgcaccattattgcctgggatttccggacctctgccaaaatctccaaccagattttccacgagaggttcacctgccccagcctcgccttgcacccgagagagcccgtgttcctggcacagaccaatggcaactacctggcccttttctccactgtgtggccctaccggatgagcagacggcggcgctatgaagggcacaaggtggagggctactcagtgggctgcgagtgctccccaggcggtgacttgctggtgacgggcagcgccgatggccgggtcctgatgtacagcttccgcacagccagccgagcatgcacactgcaggggcacacacaggcctgtgtcggcaccacctaccaccccgtgctgccctccgtcctcgccacctgctcctggggaggggacatgaagatctggcactgagctttttgtcactgaaccttcccgatgccagctgggctcttggactcccctcttcctcaagggtagatgagaggaacgagcacagaggttggctgtgggtcctgggtaccaccttctgagcctcagtttcctcatctgtaaagtggggagaaaagtctgtttgcctcaggagtgtgaggactacactagtgaaagcgcctggcgggcagccggcgatgcccaataaatgtgtgttttgctgtttgttaagtgatttcagcaaaaaaaaaaa

SEQ ID NO: 629323 - DNA, 1043 bp, Homo sapiens
agcataagctttccctgtcaacatttttcctacatgttcatgagtctgtggatgtgaacaaagcactaggagaagcaaaggtcacgaataactggcggcgatgcaaggaacccagctatttagtggtcgaagtgactttagaatcactaccttgaaattccatccaaaagaccacaacatctttttatgtggaggcttcagctctgaaatgaaagcttgggatataaggactggcaaggtgatgagaagctacaaggcgaccatccagcagaccttggacatcctgttcctccgggaaggctccgagttcctgagcagcacagacgcttccacccgggactcagctgaccgcaccattattgcctgggatttccggacctctgccaaaatctccaaccagattttccacgagaggttcacctgccccagcctcgccttgcacccgagagagcccgtgttcctggcacagaccaatggcaactacctggcccttttctccactgtgtggccctaccggatgagcagacggcggcgctatgaagggcacaaggtggagggctactcagtgggctgcgagtgctccccaggcggtgacttgctggtgacgggcagcgccgatggccgggtcctgatgtacagcttccgcacagccagccgagcatgcacactgcaggggcacacacaggcctgtgtcggcaccacctaccaccccgtgctgccctccgtcctcgccacctgctcctggggaggggacatgaagatctggcactgagctttttgtcactgaaccttcccgatgccagctgggctcttggactcccctcttcctcaagggtagatgagaggaacgagcacagaggttggctgtgggtcctgggtaccaccttctgagcctcagtttcctcatctgtaaagtggggagaaaagtctgtttgcctcaggagtgtgaggactacactagtgaaagcgcctggcgggcagccggcgatgcccaataaatgtgtgttttgctgtttgttaagtgatttcagcaaaaaaaaaaa

SEQ ID NO: 629324 - DNA, 659 bp, Homo sapiens
cagctgatctagaggatcccatgcgcgagctccatcaaatcctcaacatgagtactattcgcaagcctgctgtctgctgagttgtctttttttttattaggaaatgaagtctggctctgtgtaactcaggctagagggcgagggcttgatctcagctcacggcagcgtccgcctcctgagtacaagtgattctctggcctcagcctcccaatgtagccggggaccacgggctatccgccaccactatcgggctaagtttctggattttaagcagagagggggtaccaccaggcgggccaggctgggccgggagctcccgacctcaatgtgatctgcccgtctcgacctcccaaggcgtggggtattacaacccacccatggcctcaggcaaaggacaggtgggctttcccaaaatttaaggtcagaaataggcgttggctaactaaacacagattcaaaatagtgcttatgtccgagcactggggaaggccaagaggggaggatcactggagcccaggagttcagggccggccggggcaacatagtgagacccggtctctatgtcctaaaaaggacctagtaacagtatattcacatgaacacttatgctatcatttcttcctaagcccagtgtaagataagacatattggatggacgc

SEQ ID NO: 629325 - DNA, 965 bp, Homo sapiens
ccgagcgcttccggtgcgtgtggtatggaacgccgtggactccgggcactgcctgcagacctactccctgcacacagaggcagtgcgggccgcccggtgggctccctgtggccggcgcatcctcagtggtggctttgacttcgcgctgcacctaacagaccttgaaacaggaacccagctatttagtggtcgaagtgactttagaatcactaccttgaaattccatccaaaagaccacaacatctttttatgtggaggcttcagctctgaaatgaaagcttgggatataaggactggcaaggtgatgagaagctacaaggcgaccatccagcagaccttggacatcctgttcctccgggaaggctccgagttcctgagcagcacagacgcttccacccgggactcagctgaccgcaccattattgcctgggatttccggacctctgccaaaatctccaaccagattttccacgtggagggctactcagtgggctgcgagtgctccccaggcggtgacttgctggtgacgggcagcgccgatggccgggtcctgatgtacagcttccgcacagccagccgagcatgcacactgcaggggcacacacaggcctgtgtcggcaccacctaccaccccgtgctgccctccgtcctcgccacctgctcctggggaggggacatgaagatctggcactgagctttttgtcactgaaccttcccgatgccagctgggctcttggactcccctcttcctcaagggtagatgagaggaacgagcacagaggttggctgtgggtcctgggtaccaccttctgagcctcagtttcctcatctgtaaagtggggagaaaagtctgtttgcctcaggagtgtgaggactacactagtgaaagcgcctggcgggcagccggcgatgcccaataaatgtgtgttttgctgtttgttaagtgatttcagcaaaaaaaaaaa

SEQ ID NO: 629326 - DNA, 260 bp, Homo sapiens
  misc_feature (196)..(196): n is a, c, g, or t
catctgtggtcaggtgatgcagtggtgccatcttgtgctcagtgtaacctttgtctcccgggttcgagtgattctcctgcctcagcctcccaagtagctgggattacaggcgcctgctacaacacctggctaatttttgtatttttagtagagatggggtttcgcctgtgttggctagtgctgacctctgaactcnttgacttccaggtgttcttgccttgcgcttgtgcctcccaaagttgctgggtttaccaggtgtg

SEQ ID NO: 629327 - DNA, 824 bp, Homo sapiens
  misc_feature (57)..(58): n is a, c, g, or t
  misc_feature (195)..(195): n is a, c, g, or t
  misc_feature (412)..(412): n is a, c, g, or t
  misc_feature (491)..(491): n is a, c, g, or t
gcccccggactacgcacctcttgcttgttcctcctgagtatgttatgtgaagttttnncgtgctcgcatcgacgtctgttggcgcttggactcagcagtcgtatcatacacaacggttctatgtactttgagcacgacgacatcatagcatttaggattgggtctccgtctgattgccgtatacgcgtataacantccgcgagatggaatatcacaagagcaccatcttcttgttactttggcatccctggctccacagccagtgacaaggtcgtgatgccttggtctgctaggactggcattactccagtacccgacgcccaacactcgctttgatctatactcttggtggtcttcacacttaagcaagtatattggcgacgctactaaccacgtccagccagcaacttangaaccaccatagaatttcgcaaacactctggatgacgatacccaacagtcgagcattgtatggcaacacgtgggatccnttcccacaaactcatgatgcaagatctaggaagcacacgggtattgagtggtaggcagagatcctggagattccgcagcacaaacagaacagcttgcatcaaacctactttgactctttatacaactaagattgcgagaagcttaagttcagtgcggatggcaggtgatgagcactcagccaactcggtttgcttttagtggaatttgcagaccaaaattctgtaccaagggcccttgcttctaatggagttatgtatggagacaggccactgaaaactaaatcactccaacaatgcaatagtaaaaccccctgagatgacacctcaggctgc

SEQ ID NO: 629328 - DNA, 762 bp, Homo sapiens
ccgagcgcttccggtgcgtgtggtatggaacgccgtggactccgggcactgcctgcagacctactccctgcacacagaggcagtgcgggccgcccggtgggctccctgtggccggcgcatcctcagtggtggctttgacttcgcgctgcacctaacagaccttgaaacaggaacccagctatttagtggtcgaagtgactttagaatcactaccttgaaattccatccaaaagaccacaacatctttttatgtggaggcttcagctctgaaatgaaagcttgggatataaggactggcaaggtgatgagaagctacaaggcgaccatccagcagaccttggacatcctgttcctccgggaaggctccgagttcctgagcagcacagacgcttccacccgggactcagctgaccgcaccaacctaccaccccgtgctgccctccgtcctcgccacctgctcctggggaggggacatgaagatctggcactgagctttttgtcactgaaccttcccgatgccagctgggctcttggactcccctcttcctcaagggtagatgagaggaacgagcacagaggttggctgtgggtcctgggtaccaccttctgagcctcagtttcctcatctgtaaagtggggagaaaagtctgtttgcctcaggagtgtgaggactacactagtgaaagcgcctggcgggcagccggcgatgcccaataaatgtgtgttttgctgtttgttaagtgatttcagcaaaaaaaaaaa

SEQ ID NO: 629329 - DNA, 241 bp, Homo sapiens
gcacgagacttatagcctgctacatacctaggccatatgatatagcctcttattcctaggctccaaacctgtacagcatgttattgtagtgaatactgtagacaattgtggtacagtggtaagtatttatgtatccaaatattatctaaacatagaaaaggtacaataaatgatacacctgtacagggcacttaccaatacagaagcatgaccatttatatagaaagttttaaggaatctc

SEQ ID NO: 629330 - DNA, 231 bp, Homo sapiens
ttagaggaccctgtggagaaaagcaggcacgttggctcacactgagcacctgtaattccggcgcatgggagactaaggtgggaggatggcttgtggccaggagttcgagaacagcctgggcaacatagtgagacctgcccccccatctctacaaaaattaaaattaaaaaaattagccaggtgtggtggcgcatacctgtagtcccagctgtactggggaggctaaggcag

SEQ ID NO: 629331 - DNA, 81 bp, Homo sapiens
  misc_feature (73)..(73): n is a, c, g, or t
tgagttagcatgagatagtatcaaaattgagggccaagtgagggtgaggaaaagcagcaaaagatggggagcnccctgagc

SEQ ID NO: 629332 - DNA, 336 bp, Homo sapiens
ccaggcataaactgaacactggtcagacaagagccacaggagtgtctgccaatataaacaagtttcccatgtgaaggactccttggcaaatgatcagacaactaagcattaggtcacctgccaggtaaaagaaatatcccctgaaaggcacactgtaaacatctatgtccagctctccttcatttctatcacggtagggttgttgctagctgctctggcgctggagccccagtttgagctgggggctctcaaaacccttgcacactgttagagaagccaaggtaggcggatcacgaagtcaggagattgagaccatcctggccctggtgccctgtt

SEQ ID NO: 629333 - DNA, 314 bp, Homo sapiens
  misc_feature (295)..(295): n is a, c, g, or t
ggaccccacattgcaggactacaacagaagcatgttctagcagcactaatggcggcactcaccctcccaaagtacctttatataacagcattttggcaaacgtggtagtagtcatatctcagactttcttgtgaacacctgaacactggggaggttagactaagcatctttatgagggggtatctgtactaccgggcactgtttaacagacattggccgcagaatatctttggtatgccaggagtcaaacagcagtcatcatgccagctgctcttcaagatggcatcactcttancaatcctgccagatgttgg

SEQ ID NO: 629334 - DNA, 120 bp, Homo sapiens
catggatttgctggtgcagtacaactaggcttaatagggactcgaattcgagctcgaattcgagcctcgaattcgagcaagcttctaacgttagaagcttgaattcgagccgtctcaaaa

SEQ ID NO: 629335 - DNA, 149 bp, Homo sapiens
gtccctccaggcaggtgactgaggccgtgaaggtggcattgacgtcgggtacgcacatcgactgtgccatgtgtacagatgagatgagtggggtgcatcagagagctcaggagcagtgtgagctagagctctcatcgtcacagctttgt

SEQ ID NO: 629336 - DNA, 107 bp, Homo sapiens
catggatttgctggtgcagtacaactaggcttaatagggactcgaattcgagctcgaattcgagcctcgaattcgagcctcgaattcgagattcaagcttctaacgt

SEQ ID NO: 629337 - DNA, 186 bp, Homo sapiens
atgtcaagaactgagaatgatcatgaagggagccggcacatgatgagggctgactaattagagatccatgacctcccagacccctgaaggagatccggcgcataagccaaacctaccagcagcaatatggacggagccttgaagattacattcgctctgacacatcgttcatgttccagctgagtg

SEQ ID NO: 629338 - DNA, 240 bp, Homo sapiens
atcagaaatatcccgatgagtgcagccagttattgaaggttcagtttgttcaacggttaaagtctagcggtgatatgagttctagccggaggaaatgcgggttggtttctatatacttcaattcctccctgtacgtaaggtcaagagatataaggcatcttcacaaggtgctttcccccgtaagaatatgatgtcaaattagtatatagacccactccctccctagaacagggtttgtta

SEQ ID NO: 629339 - DNA, 337 bp, Homo sapiens
ttattctgaactttctaggcaggtacgtgttggagatactgctgtggctagctgaggtgaatgttcaaatggaatatggcactatcaagcatctggcgacagaaacctaaagccctggttgcctcagtgtcatgagtgaagcatagaatgcagaggggcccggttgccccaatgtcaaaatcgtgttttcgagtacttaagcacaagacaagcaatcagtgaatatctcaaatctgaactagattgtccaactccatctctgtggcaccttcatagatggtgcccacctgccttggcagtgatgaccgacactgcgaacgctgtgctggcagtgtgt

SEQ ID NO: 629340 - DNA, 151 bp, Homo sapiens
atattataacgtgtgtgtcagtgacaatatgtatgtctttggttgttagttatatactgtctacctttgagatgcaaggtaggtggtgtcacagatactctcaaactttatgaatacggcgtaccgagcctcgcaatttcgtagatcatgg

SEQ ID NO: 629341 - DNA, 101 bp, Homo sapiens
cagcagagtgctgatcttgctggaaaacagctggaagatgggcgcaccctgtctgactacaacatcctcaatgatgccagtactggagctcggatgttcgt

SEQ ID NO: 629342 - DNA, 194 bp, Homo sapiens
tcatgctcggacctctccctactgtatctagactggagtgcagtggtgagatctctgcttgctgcaacctctgcctcccaggttcaagtgattctcctgcctcaggctcccgaatagctgggattactggcgcatgccactacccctggctaattttccatttttattagaggaagtaggatacagtagggaga

SEQ ID NO: 629343 - DNA, 591 bp, Homo sapiens
tgtagctgatccgtgctaagaaaaaagcttatagctacaggtgactatttaaaaaaggagaatttacttcaaataatctgatgatgcatcttaaagaattagaaaagcaagattaaaccaaacccaaaattaataaaagaaataataaagatcaaagcagaaataaataaaattgaaatgaggaatacaaaagatcaatgaaacaaaaagttgttttgaaaagttgacaaaactttagccagaccaagaaaaaaaagagaagatccaaataaaatcagagatgaaaaagaagacattacaactgacatcacagaaattcaaaggatggttagtagttactgggagtaattacatgtcaatacactggaaaatctagaaaaaaatggacaaatttctagacacatacaacctaccaagattgaaccacgaagaaatctaaaacctaaacagaccattaataagtaacgagatcaaacctgtaataaaaagttttccaataaagaaaacctcaggacctggtggcttcacttgctgaagtctacccaaacatttaaaaaagaactaataccaatcctatttaaactactctga

SEQ ID NO: 629344 - DNA, 295 bp, Homo sapiens
  misc_feature (25)..(25): n is a, c, g, or t
aggtgattagaggatctcgggagcnttacctaggagaaggtgaagggagatggggaggggagatgagataccccaaaattagatttgaagtctaacgatcaagagataaaacctcttgcacgggaagctgggtcattgtgacttgtacttctgtgttttctataaatagaatggtaacaactaccatgattagggagctggactaaggggaagctaggggttttcttactctaactggtagcctttccatggtcctgtgagatggggaattcctaacttaacagatggggaaatg

SEQ ID NO: 629345 - DNA, 338 bp, Homo sapiens
gatgatgcaaatcctcagattcttgcagccttcagaagacttgatggtctggtagaaccaccaacaggatacattgaaagcctgcctagggtagttaaaagacgagtaaatgcttcaaaaacctccaagttaaatttgcacagatagaggccaaattctatgaggagtacatgatcttgaaagggagtatgctgttctctatcagcctctatgtgataggcgatgtgaaattatgaatgcatttatgcacctacggaagagatgtgatggacaccagatgaggagatgagatttcggaggattgaaagaaaggccagattgagatgagaaaaggatga

SEQ ID NO: 629346 - DNA, 405 bp, Homo sapiens
gtcccgttattactctgccatccaggagtatccaatcaccctgaggctcaccaatagtctaaatagagaaaccaccggaacccaatatattcacagcacctgcttattaccattttactgggtctctattttaccctcctaccagcctcagagtacttcgagtctcccctcaccatttccgggcggcatttacgggtcaacattttttgtagccacccggcttccaccgaagcttcacgtcaattattgggtcaactttcctcactatttggttcatccccccactaatatttccctttacaacccaacatcactttgggtttgaaacccccccctgaaaactggcattttgtagaattggtttgactatttttgtaagtttccatttattgatgagggttttta

SEQ ID NO: 629347 - DNA, 851 bp, Homo sapiens
  misc_feature (64)..(64): n is a, c, g, or t
  misc_feature (83)..(83): n is a, c, g, or t
  misc_feature (93)..(93): n is a, c, g, or t
  misc_feature (106)..(107): n is a, c, g, or t
  misc_feature (111)..(111): n is a, c, g, or t
  misc_feature (114)..(114): n is a, c, g, or t
  misc_feature (182)..(182): n is a, c, g, or t
  misc_feature (189)..(189): n is a, c, g, or t
  misc_feature (227)..(228): n is a, c, g, or t
cctatcaatcactgattcatgcccctcgaacccagaaaacacgggctaagagctaacgtcaaanatttttctctacaacccancgctacatcnacagcaaagttgnnaaancanttcagaaggcgaatggctctccttcgatgtaactgatgctgttcatgaatggcttcaccataaagacnggaaccngggatttaaaataagcttacactgtccctgctgcactnntgtaccatctaataattacatcatcccaaataaaagtgaagaactagaagcaagatttgcaggtattgatggcacctctacatataccagaggtgatcagaaaactataaagtccactatgaaaaaaaacagtgggaagaccccacatctcctgctaatggtaatgccctcctacatacttaggttacaacagaccaaccggtggaataagcgtgctctaggatgctgactattgctttagaaacgcgccaggatacttgctgtctacaaccaatcttctctgatataaaaggcatatatgctggagtggatacacgaacccaaaggatgcgacaccaatttctagagatggagctatgcccgttttcattggagttcatactactcatgtcacgcagggtttagagtttctataatatcctgcagttaaaagtgtcgtgtttcatccctagagttccagcccccaaatatacaaaggcttctaacctctctgtacttacttgggcaagataactgaaacatggtactaagtaatttattagcgcggtttcatgcgtgcttaatgcttctaaacatatttatgaagagttgcaaagatccgaaccgacatcgttgcgtgattt

SEQ ID NO: 629348 - DNA, 260 bp, Homo sapiens
gcgcgtagttcatatcctggctccaggacgtggatacaagtatgaccgcatgaagacttgcctcctcatgcgcgcaggatcacgaggccgcgcgcctctaaggccgtgcagagaatggagtggcaggtgaaggtgcaggaactggaccccggtggagagaagtccctgtgcgtgaactgagggtgccctcatatcaaacgtgctcattgatcgtacgtcaatgagcgactttgtagtggtgtgccggcgatgacaccgcg

SEQ ID NO: 629349 - DNA, 1685 bp, Homo sapiens
tgatttctgtttgttgtttgttgttgttagtttgtttgagggagtgaatgatggtgaaattgtgtttgagtgtatttagttgagggtggtgtgatatgaggtgtggtgtgtcgttgtagatgtttatttgttgatattgtgttaagattgatttatggattagagttgtagaatatgtgaattgtatattgtagatgtgtcatgttgatgttgtgtttggttttgttgttgtatgggtgggcttgtctcggttgtggcttcttgcgttcgtgttggaggttcttcttgttggtttggggggttcctgcgtggcgtgtgggactttgttgtgtttgccccgcggcggggtgggtttctcggcgccccagctggttgtgtcgatgctgtccccctgtagtggggtgtgtgatggacgcccgctatgccgggtgttttttgggggtcctccaccacgtatttggtggtgaccctttcttgaagggtggtcctcccccccacacaggggtggtggggagccaccacagagaaacccccacgggcgcttttgtttgtgaaaacccgcgctccgcgcccccccttgttgatcgtatattttatcccgcggggcttcctaataaagggtgttttcctcagagggccccccttgtgggggtgggggcgcgacaaatttcttcgcggccacccctacagagtggaggtgtaataataaaccgttatgagaatatagtgttgtgtctccgcccgttggctccatagtgagttattaggagagtggtggcgcacagacagcacagcgggttgttgtcctcactcgaggagagaacgccgcttctcttgtttcacactgtagaaaaagtagtgtgaagacacaacacagcagtgtgggtggtgtgttttttgtgagagacacacttgtgttgtcacagcggtgatgtgttgttatatgttgtcacagagagaggagagtgtcacacacaatgtttcacagtccccgagagtaacactactctgttgatgagagagcgctgttgtcacacaagactctctctgatgatactcccgctgagagtgagaggatctctctctctcacactttctctgtgagatagagttgtgtgagagatatgtgagagagtagagagatatactctgagatatgtgtgtctccccgtagtagttatttgagggtcacagagagtgacacacagcggagagtagtgttctgttttgcacacacatctcagcggcgacatctctctcagagacacacacacagcggtgtccccctgcatattgtgtttgtgcacaccaccactgtacacacactctcatcacatctctcgagaggagacgacaagagagtctctctctcccgcttttagagccacagcaacaccccacttgtgataatggagagagatttgtaaaactttcttatgccaacattccacagagagggagtaaaatttcttgtgctcttttaactcttaaaattaggagaaattttttttttaaaactataaaaatacctgaaattgttccgcaaccacagtgtttatattccccgcacactgtgtgtagttatgaggtgttgttgtgaatagacactccccctctgcgagagagaaagggtacacccacaacccctggataaaatgtggaaataaaattataaaattcaccca

SEQ ID NO: 629350 - DNA, 863 bp, Homo sapiens
  misc_feature (69)..(69): n is a, c, g, or t
  misc_feature (95)..(95): n is a, c, g, or t
  misc_feature (105)..(105): n is a, c, g, or t
  misc_feature (118)..(119): n is a, c, g, or t
  misc_feature (123)..(123): n is a, c, g, or t
  misc_feature (126)..(126): n is a, c, g, or t
  misc_feature (194)..(194): n is a, c, g, or t
  misc_feature (201)..(201): n is a, c, g, or t
  misc_feature (239)..(240): n is a, c, g, or t
ttgcttgtttttgtcgaatgtgtcctcacccgcctgcgttcttttgtctgttcctcactatcacacatntcacgcatgttcatccttcaacccancgctacatcnacagcaaagttgnnaaancanttcagaaggcgaatggctctccttcgatgtaactgatgctgttcatgaatggcttcaccataaagacnggaaccngggatttaaaataagcttacactgtccctgctgcactnntgtaccatctaataattacatcatcccaaataaaagtgaagaactagaagcaagatttgcaggtattgatggcacctctacatataccagaggtgatcagaaaactataaagtccactatgaaaaaaaacagtgggaagaccccacatctcctgctaatggtaatgccctcctacatacttaggttacaacagaccaaccggtggaataagcgtgctctaggatgctgactattgctttagaaacgcgccaggatacttgctgtctacaaccaatcttctctgatataaaaggcatatatgctggagtggatacacgaacccaaaggatgcgacaccaatttctagagatggagctatgcccgttttcattggagttcatactactcatgtcacgcagggtttagagtttctataatatcctgcagttaaaagtgtcgtgtttcatccctagagttccagcccccaaatatacaaaggcttctaacctctctgtacttacttgggcaagataactgaaacatggtactaagtaatttattagcgcggtttcatgcgtgcttaatgcttctaaacatatttatgaagagttgcaaagatccgaaccgacatcgttgcgtgattt

SEQ ID NO: 629351 - DNA, 277 bp, Homo sapiens
  misc_feature (7)..(7): n is a, c, g, or t
  misc_feature (76)..(76): n is a, c, g, or t
  misc_feature (120)..(120): n is a, c, g, or t
  misc_feature (130)..(130): n is a, c, g, or t
  misc_feature (138)..(139): n is a, c, g, or t
  misc_feature (159)..(159): n is a, c, g, or t
  misc_feature (161)..(161): n is a, c, g, or t
  misc_feature (167)..(168): n is a, c, g, or t
  misc_feature (171)..(171): n is a, c, g, or t
  misc_feature (189)..(189): n is a, c, g, or t
  misc_feature (194)..(194): n is a, c, g, or t
  misc_feature (222)..(222): n is a, c, g, or t
  misc_feature (255)..(255): n is a, c, g, or t
aaaagtncttcatggtttttgtataataaaaaccaaaaaagtgacattttaaactaattagtgctttttgctttcnagatcttttgctcacaattcactgcaactgagggggtgtgaatntcattatgcnataaattnngggccccagttggctggggngntttggnngcnaacctgccttgggggggnttggnagatgtgtatctttcgcaaacttttaanacaacgtaagtgtgagataagaacatatttganggcactgtttgggaaggggtgt

SEQ ID NO: 629352 - DNA, 155 bp, Homo sapiens
tgtaattggggtcgttataggaccgcacctgtagcttcatgtccatgggcacgatgcgcatcacgtggttcatgccattgatcagtgtcagtacggcgatcgggcttggcggccttgagcaggcgggcatccttgacctctacctgaatgtcgtg

SEQ ID NO: 629353 - DNA, 359 bp, Homo sapiens
ctgcagtttgtatcactcgttcttgatgttatagccatcatatctcgcgagtgcctgtcggcaagtgaggtattcccttagtgttcagcgcctccgaatttgtggtggatccgcttaaagctcatttgctgctttctctcatgtcactcgctcttattcttgctcgttttggctgtagtgaagcgtgcgcggcaggaacaggttgcccagtctaccctcccttagcatggacctactcccaccctggatcctccgtacacctaaccatctcctccttacatctagcatgtgtctcctctatcttagggcgccatcaatttcatcacaacaattatcaatataaaaacccctgccataac

SEQ ID NO: 629354 - DNA, 270 bp, Homo sapiens
agaggatcccccagaggcataggaggatgtagggagaacggagttatgcttgagacgtggggacaggtacctagaggaggggtgcgtgcccgtgtctggggtctgtcagggaggcgatcccttgggtcttgggaggctggcactgctgagggttgggctggctgaggcccaatttctgtgggaggagctgacttcgcggtccatggcatcggcggtctcagtggcgtcctccagctcgcgctgcagtttccgggcgggaggcgttggccc

SEQ ID NO: 629355 - DNA, 203 bp, Homo sapiens
gggaaaaggagcggagcagggaacctcaaggcggtctgcaggagggagggcccggaaggagggagggggcaagccacttggccccgcgctttcaggagctagagaggtataagaaccttattctggccaacttgcagcaggagggtcttctcttcccttacaagcagcagccacctttttacaattcttcccttccctactgg

SEQ ID NO: 629356 - DNA, 231 bp, Homo sapiens
agagcccaaactgtgcctgagggctgatgcatccagaccttgtaaacattcacctaggtgtaacataaccagaaaggctgaaggaaggcttttggccttcccagcttcccaagtaggggcctcatgtgtatctggcggcctgcaaagcccaaagcagagagctatgatgaataaaatattcttattgcttttctaaaataactcctttaatatgggactgtttggactctg

SEQ ID NO: 629357 - DNA, 1361 bp, Homo sapiens
gctgcatgctcacactaacctcgcaggatccgacagacgttctcttgagcgtgtgtccccaggtcatgtctccgggtcctgagcacccgagagggaggtcgaagggctgtgattcgtaggagtctgcagaagcaagcgagctcgtccgtgctcatgtgggatgtggtcgtgaacatggtcaaggcctgcgtgaccccacagccccttaagtcctctagcagttgtgtgggcctcggtggctagcggcgagcatggacgacaggctaggagtgggtgccagacctcattcttctgactagccttctagctattaggaggaacttccgtaccatggtgggcccgagtgtgacgtgatgaccggatcccgtgactagaacttagggccattgtgatccctcatcttacctttggaagggatgcgttggcttgccacgatccaactttaatctttgcgtccacttgctctccccttacaagtttccctgagcgggaaggcgatccggtcgtgcacgtcgcgagacactacaggcaccgtcgcatggggcatcaagtgaacggttagcagatcggtttacgtacacttgatcccttgaaggtgccaaaccttgtttggggcaccctcaacgcttcgaactccaaggggcgcaccattgtatcgggcatagcaagatggttgcacgcttctgtgggcataggtatctaggggacttaacaagcctggctgtggcagtgaaccagctggtctggcgaaaaggaataggttatgcccctaggttggtactttacggtccatcaattaaggggataatcttgcatccctcgcgtcggtctatcgccgacacccgagggccggatgccctgtcaccgtgcgagggacaccgccgcatgcaatgtccatgcccagcagcatgccggccttcttttgggtggcacggtgctcagaggagtgttggatcttttccccaccacggtggaactcacccactggcttataatgtggttacccaaggggtaccccagctggacaaaagccatagtgggcagttgtgtggaccgcggagtgtcacgcaccttgtgataattcttctctatactgtcgtggccccgacgcagctcgcagtgggactgcgcagggtcccggattcgaaataggcagtaccatgacgggcagtctgctgacgactttcggtgcaaatgtcgctaggctgcctgtatcatactttattagcgcctatgacgcctgcccactgaacaaagtaacacaatgctgtgagacaccgcggcttcaaatgttcaatcaagcatgacaatcccaggtggtactacacataggagtggtgcctaccgatgcgcagattgaa

SEQ ID NO: 629358 - DNA, 137 bp, Homo sapiens
  misc_feature (1)..(1): n is a, c, g, or t
  misc_feature (65)..(65): n is a, c, g, or t
  misc_feature (74)..(74): n is a, c, g, or t
  misc_feature (83)..(83): n is a, c, g, or t
  misc_feature (86)..(86): n is a, c, g, or t
nttgttttctggcttttgtgggtgggtaaaatctgtttgtaattaatggtatttctactggcctnttccggggngggccaggnccncatttatggtttctgggggtgtgtactgtaattctttgtttgggatagtgg

SEQ ID NO: 629359 - DNA, 352 bp, Homo sapiens
  misc_feature (11)..(11): n is a, c, g, or t
  misc_feature (63)..(63): n is a, c, g, or t
  misc_feature (66)..(66): n is a, c, g, or t
  misc_feature (85)..(85): n is a, c, g, or t
  misc_feature (150)..(150): n is a, c, g, or t
  misc_feature (157)..(157): n is a, c, g, or t
  misc_feature (181)..(181): n is a, c, g, or t
  misc_feature (243)..(243): n is a, c, g, or t
  misc_feature (257)..(257): n is a, c, g, or t
  misc_feature (290)..(290): n is a, c, g, or t
  misc_feature (328)..(328): n is a, c, g, or t
  misc_feature (333)..(333): n is a, c, g, or t
cttcctgtaantggggaacagaatgtaaaaaaatccatccaagtggccaccgataaaagaaanaanaaaatgcatttacactcanaaaatcagtcaactcacatgcaaaaggagaagcgtctccaatcggagcttagggccaaaaattanaaatggnagagacttgagctatccataaganaattttaaaaatccttccactggacactccccttcattaaaaaagtatgcaaaaaatcttgntataaatggaaaanaggggtgtggctctctccctgggacatgagggnatagctaaaattccctggggggaattaaagcctggacnattgntcctccctttcaggacaaa

SEQ ID NO: 629360 - DNA, 443 bp, Homo sapiens
atcgcccaatataggaacttactaactacacccttcccatttacgaatcaaacataactgtaaacttagtataacagtaaggcatgagtaatcctctgctagttagaacagataggtctagtattcttcaggaaacctcttactatacctgaaggcaacaggcactatgagtaggaggtctcagctgtcagtagagaattagctagaccggctggggagtaggggcacttaatttccactagaagagaaatttatatactggagcaccaactctaatctctactagcaagcagcctgtacaattcctttatacaaacaacaacagaaacaataacaagaaatatatacctggtatcaatagtggcgactgcctgtgtactgtgcataaagagttgggggagagtaggagagggctcaatcttacaactggagtaattcttcag

SEQ ID NO: 629361 - DNA, 1079 bp, Homo sapiens
  misc_feature (555)..(555): n is a, c, g, or t
ttattcttttctatatatttagttataaatctttctctgggccgggcgtggtggctcacgccagtaatctcagcactttgggaggctgagacaggcgaatcacgaggtcaggagttcgagaccagcctggccaacatggtgaaaccccgtctctactgaaaatacaaaaaaaaaaaaaaaaagagaaaaaaaaatcttaatcgggaatctgcttaaacccaatatatttatgggatcattggccaggttgaaatctttggaagaagaagtggttccagagtattaagggtgcagtgaaacaactttggggaaatcatggccttgggtcacaagagaaatttttaagtgctcttaactcttccatagaagagaaagagccaatttattattattactattgttggggcataaatttaccattaagccatttgtaattaaccattcgaggggtctcaaattttacaccgtgtgccttatacctcaactttggaggggccccactttttctaaaattattctcagataccctcttgtgggacatataagagaagcgcntctggacatatattctccctagaaatgtgccttttaaggctctcttataggaaaaggctccaacgcttttataacacgagtgatactcggtgccaaacgcaaaaaacccttttccaatatatgtgtcggggggaactataaaattcgttggcgacccacttcgggggaattatatatacctttccagggtgggacagtacaaacgggggggggatttttgggcacaaatttttgggaaaaggggggcacaatatgggataggcataattatatatgatttgttaaaccaagttgtgcatctctaggaaggtgtgtgaatataacatctattaaagagacagtcttttttataaaacgtggggattaaaaaagggcgccacacatgggaggtccattatttggtgggagattaacaccaaaagaagttgtgttgtgatataggacaaacttttatagaaaaagcctgtgtggtggggggacaagaaaaatgttggtaaacctctaaaggtgttagacattaaccg

SEQ ID NO: 629362 - DNA, 788 bp, Homo sapiens
  misc_feature (143)..(143): n is a, c, g, or t
cactagaacatgattgcgcaagtacccttggagccctcgaaaagggttttcccctgtgaagggcacctcctctctccggtaccatcattttccacgtagttcacctcttgaaggggagtaaaaaatatttggtgcggtgcggngggacttggaaccattgatcaaaaggtccaaagttgcagtaaggaccgtgtccaagagttccattgaacagcatgctgtcacaagttcatgccagtgcatagtcttcttgatggatgcccaaagagtagattctaaatgttctcgctccaaatgaatatgtcaggtaatgcacatgaattagtgtgattagccacttccacgatgaagacatgtttcagagcctcatggtgtatgccagatatatatgcagtctgtgtcaatttaaacagtaaatacaagttttgtattcatcaatatgcactcatatttatacccaagagcaagcgttttatgagataacttatgttatttcgccatttaatagcaacttcaggctggacatggtggctctcacttgtaatcctagcgcttttgcaggtagggtggcaggtagcagattgcatcgcattaggacagactggggaacatgcagaaactctgtctctacttaaaattaacggggcgtggtggcgtgtgcctactgtagtcctagctctctgggaaactgaggtgggaggatcacttgaccccaggaggtctaggatgcagcgagccgtgaccatgctcgtgtcaatgcattccagcttgggtgagagagtcatgcc

SEQ ID NO: 629363 - DNA, 704 bp, Homo sapiens
gccttgctctcgcccctactctttctggtgttagatcgagctaccctctaaaagcagtttagagtggtaacaaaaaaaaaaaaacacaccaaacgctcgagccacaaaagggatgaaatttcttctggacatcctcctgcttctcccgttacgggatcgtctgctccctaaagtccttcgcgaagctttttattcctaagaggagaaaatcagcccccggcgaaatccgtgctggattacaggagctggggcattcgaccttgggcgacactggactggcctatgaatttcggctacacttaaaagcaagctgggtctctgggcgatataaataacgctttggactgggaggaaccacgcttgccaaattgcaagggactggggttgccacgcgtccatcacctctggtggcacgactcgcagcaaccgacaacgatattctcccagctctgccaacagaaggtgaaggccgcacacttgcggacccattgtctcgaatcttcaacgtcacatcaaggctgcatgtaccacacaccacacatctcggcaccgctaccccacaagatccataagaacacccacaacactttctccgaacgtctcaccgtacaatgcaaacctcctcccgcacacaacaggccccaccaccagcaactcacgcaccaactcaaaccggccatatcgccacatgacatcgcacctca

SEQ ID NO: 629364 - DNA, 1856 bp, Homo sapiens
taggcgttgatgcgcgttcgtggcagggctgacagattccgatcaagaccgacaacgcccatgggcggcccgtattcaggacatcgacggttcggaaatcatccgccgtatggaaatgggtcaggttgccgtcgttgccgggttccagggcatcggccctgacaaccgtgtggcaacgcttgggtgtggcggttcagacacctctgttgtcgccatcgctgccggtgtgaaggccgatcgctgcgatatttatacagatgtcgatggcgtctacaccaccgacccccgcgtagagccgaaggacgcgtctttcgaagatttccttcgaggaaatgctggaaatggcatcgcttggtgccaaggttctgcaggtgcgctcggtcgaacttgccatggtgcacaaggtgcgcactttcgtgcgtcgagctttacggacccagatgcgccgggcatgggtgatccgatcaacccgcccggaacccttatttgcgacgaggatgaaatcgtggaacagcaggtcgtcacaggtatcgcctttgcgaaggatgaagctcagatttcgctgcggcgcgtggccgaccggccgggcgtttcggcagccattttcgggccgctcgccgaagagcacatcaatgtcgacatgatcgtgcagaacgtgtcggaagacggctccaagaccgacatgaccttcaccattccgacgggtgatgtcgataaggcgctgaaggtgctggacaaggtcgagggcgagatcggcttcgacaatatccagtctgaaaccggccttgccaagatttcggtgatcggcatcggtatgcgcacatgcaggcgttgccgcacagccttcaaggcactggccgaaaagggcatcaatatccgcgccatcacaacgtctgaaatcaagatttcgatcctgattgacggccctatgcggaactggccgtcgtacctgcacgcggtctatggcctcgacaagtaagcagccagctcagattccattttgaaacataattgtatgcagggccgcgcagccgaaagggtgcgcggccctgcaacattttgcgagcagcgactatttgttctggacgcgggtgtcaaaaatgctcacaaagggattggcgtaacttcgcgggcgggtattgggaatcggctggcggaacgcacgtcagcaattttgaaggagcccccgacgatcatgcgtgagctgacaaccggtccccgcgtactgctaaagcggttgcgcgaattgatggcagagccgctggaaccgcaggcgcgcctcgaccggatcgttcgtgaaatcgcccagaatatggtcgcggaagtctgctccttctatatattgcgcgctgacggcgtccttgagctttacgctaccgaaggtctcaatccgcaggcagtccaccttgcccacttcgcctcggtcagggtctggtcggcacgattggccgcaagcgcccgtcccctcaatctgaccgatgcgcaaagccataccgctttcgcctatctgccggaaacgggcgaagaagcctataattccttcctcggcgttcccgttctacgcgctggccgcactttgggcgttcttgtcgtccagaacaagaccaagcgggcatatcgggaagacgaggtcgaagcacttgaaaccaccgctatggtccttgccgaaatcatcgcgaccggcgacggtctgcgtcgggcccgtccgggcatagagcttgatctcggtcgcccgatgagtgtgacaggacaggctttcaacgacggtatcggccttggccatgtggtgctgcatgagccgcgcatcgtcgtcaccaatcttttcaacgaggatagccaagccgagctgaaccggc

SEQ ID NO: 629365 - DNA, 172 bp, Homo sapiens
  misc_feature (60)..(60): n is a, c, g, or t
  misc_feature (120)..(120): n is a, c, g, or t
  misc_feature (138)..(138): n is a, c, g, or t
  misc_feature (145)..(145): n is a, c, g, or t
tgagacagcctctgtctatcgcccaggagcatgatttcggctgactgcaacctccacctnccgggttcaagagagtctcctgcctcggcctccgggtagctgggactataggtgcacgancaccgcaccctggttaanttttgtntttttggtagagatgcagttttcacca

SEQ ID NO: 629366 - DNA, 1214 bp, Homo sapiens
ttgtcttgtgtcagtgcctttgttttaatttggcactgattgcctgctggatgttgtgatgctttgatgcgatgcctggctagatggccatgctgcctgcctgcctgcctgccgcctctgatgcctgggcatgcaacatgccccggcatgctggtgctgcatgtgctccatgctgctgccgtgtgccctgggcctggcctgcatgccccctgactgcctgtgtgtgctgcctgcctgccttgcctcctgcacctgtcctgcctgcctgctccctgtgtgtgcttgttgttgtcttgctggacttgctccctgtgcctggattgtgtaccagttgatgctcattgcctgatgcctgcctgcttgccagtccctgtgatgctgagcaagctgatgctgatgctgctgctgtggatgtgtgatgggaatgtgctgtgctggcttgtgagtgaggtgagtgtgatgtgagggatgctggggaggtgagtgcttgctggtgtgcttgtgtttttgctgtgtgtgtgccttgccctgtgtgcggggggcgagaattattccataattgtggagatgcccaaccgaatgtttgccaaaaactttgcaggcagtggcggaattttgcaggcatggttttgcttgcctggcttgctgcccggttgccctttaaaagcctggcttgccctgttgcctggggcccctggaatgtgggcgttccctttgaggctttgcttctgcctgccgcaggtttccggtggaggtggcgggatgaagatcgggacctgagtggactttgatgaactttggccagctttctttgcctttcccctgtgtcctggcccctgggcgactttacgccctgggttgtagccccccccagaacccggcccgcccaaggaaagacaaaacagcaggagttttttaagaaaagagaatctaaaaagaaatgcccgcgccttttatattgagccacacattaacttccacactttcccagtagcatatctttgggagagaagattcccattccgcttcaccctacaggtattcagatagaggccatagcgaggtcctttctcatctgtatatagcacagagcgggtgatatagagcgaatttacagcgcgggtccgagtactataaagaatttagatattatagagcagataagagccaacatttaagatctggtgagagtttagtaagtcgcccatgtatag

SEQ ID NO: 629367 - DNA, 104 bp, Homo sapiens
  misc_feature (75)..(75): n is a, c, g, or t
  misc_feature (95)..(95): n is a, c, g, or t
cctggttgatcttctcatggagtgtgtagtgatgtctctgtataactgaattgaatattggctgcctgctaggtngcggaagtctcctgccaganaatatcacg

SEQ ID NO: 629368 - DNA, 103 bp, Homo sapiens
tgaactaatcttatagagttcaactgaggccaggcacaggaatcacacctgtaatctcagctactcgggaggctgaggcaggagaatggcctgaactcgggag

SEQ ID NO: 629369 - DNA, 898 bp, Homo sapiens
  misc_feature (31)..(31): n is a, c, g, or t
  misc_feature (71)..(71): n is a, c, g, or t
  misc_feature (80)..(80): n is a, c, g, or t
  misc_feature (201)..(201): n is a, c, g, or t
  misc_feature (215)..(215): n is a, c, g, or t
  misc_feature (256)..(256): n is a, c, g, or t
  misc_feature (267)..(267): n is a, c, g, or t
  misc_feature (271)..(271): n is a, c, g, or t
  misc_feature (274)..(274): n is a, c, g, or t
  misc_feature (327)..(327): n is a, c, g, or t
  misc_feature (341)..(341): n is a, c, g, or t
  misc_feature (433)..(433): n is a, c, g, or t
  misc_feature (439)..(439): n is a, c, g, or t
  misc_feature (441)..(441): n is a, c, g, or t
  misc_feature (446)..(446): n is a, c, g, or t
  misc_feature (448)..(448): n is a, c, g, or t
  misc_feature (453)..(453): n is a, c, g, or t
  misc_feature (503)..(503): n is a, c, g, or t
  misc_feature (728)..(728): n is a, c, g, or t
  misc_feature (734)..(734): n is a, c, g, or t
  misc_feature (780)..(780): n is a, c, g, or t
  misc_feature (787)..(788): n is a, c, g, or t
  misc_feature (794)..(794): n is a, c, g, or t
  misc_feature (808)..(808): n is a, c, g, or t
  misc_feature (820)..(820): n is a, c, g, or t
  misc_feature (836)..(836): n is a, c, g, or t
  misc_feature (869)..(869): n is a, c, g, or t
cgcgggtccccgggtctgcgcagtgtgcggncctgtcgcgcgcgtccgcggccggctacgtgtcgcgcggncggcgcggngggtccgttgccgcgccgcccctggccccgccatggggcctcctgtcggaccgcggttgcgccggcgccgcgctctgcccgcctagctgctgcgcctcagcgcgccgttgtgcgtgctganctacgtggcgggcntcgcctggttcttgtgcgctggttttcccgccgctgacccngcgccctttcntgtnggngagcgccatgggctccaccatggtggaggagcagtttgcgggcggagaccgtncccgggcttttgcncgggcacttcgccgcccgaccgcaagaggtcgggggctctgccagtggcgctggcttgaacgggcgatgcggtcagttgggctgggggtctncacgcngngtttntnccggnaactgcccttcccagatgagacccacgagcgctatatgagtgtcgggcancaacgtgtacggcatcctgcgggctccgcgtgctgtcagcccgagtcgcttgtgctcaccgtgccctgtggctctgactcttccaacagccaagctgtggggctgctgctggcactggctgcccacttccgggggcagatttattgggccaaagatatcgtcttcctggtaacagaacatgaccttctgggcactgaggcttggcttgaagcctaccacgatgtnaatgtnactggcatgcagtcgtctcccctgcagggccgagctggggcaattnaggcagnngtggcnctggagctgagcantgatgtggtcancagcctcgatgtggcngtggaggggcttaacgggcagctgcccaacttngactgctcaatctcttccagaccttctgc

SEQ ID NO: 629370 - DNA, 252 bp, Homo sapiens
ttcttcagagccatcctcaaagctggttattgcacgaggtagggcacagatggttccagttttctttcacaaagggttagggaggtgccagcgagccccacaaatgagtccctctgtaccatggcaaccacaatttaaaaggggcttttgtccacccctgtagactacccccgccacgcagatttataccgtaaagcgaatgattttaggggttggggcccaaacgatctcaacctatattcaaactttaaa

SEQ ID NO: 629371 - DNA, 278 bp, Homo sapiens
  misc_feature (211)..(211): n is a, c, g, or t
acagatattgacgcgctacggggccactagctaaacgtcaaaaccacatgagatctattgttgctggcgcaaggcttttacggtcttactgcggggtatctcatagtgggtgacacgtaaggattctctacagtggcttcgcttaaatcgcgctgtctttttacggtgacgaaagctaatatcggcggccttacacggctatcaggtatgntcgaatagcgcggtctagcggtcccaaacgatgggagatacacaagagaggcttagtcagagggccc

SEQ ID NO: 629372 - DNA, 180 bp, Homo sapiens
gtcccagttgctcgggaggctgaggcaggagaatcgcttgaacccgggaggtggagattgcagtgagcccagatcgcgccactgcactccagtctggcaacagagcaagactccatctcaaaaagaaaagaaaagaagactctgacctgtactcttgaatacaagtttctgataccactg

SEQ ID NO: 629373 - DNA, 360 bp, Homo sapiens
  misc_feature (275)..(275): n is a, c, g, or t
gtggatgatctagaggatctcgggagccttacctgactatgctttgtctcagccactttttaagaataaatagctgggcaggtgggggagtgctagtcacggaatgaaactgtaagccggaacaggtgtgaggaggggaggcgataaaaagattatagggtggaggagtggaggctgaggaagaattgggacctagctcagcctgtcgaggaggggagaggtcagatgggtctgtagaaaaggaagattagaaagactcagcgacacttggggtnggtactgaggggacaggcgggagggaaagaaagaagatttgggaggagttgcactgggcacagagactaggaggggactgatgtg

SEQ ID NO: 629374 - DNA, 195 bp, Homo sapiens
tcaggaaaatcaggcgtgagcaccgtgtctggcccggcctacgtaggaacagttgtgtccagcggtgtgcttcttgaagagtagatccatgaggcgcagatggtgagggtgcaggctgtctgcacactagagccatggcaccctgggcaccgggagaaacgccactccagactctgccacgtgtggccttgacag

SEQ ID NO: 629375 - DNA, 800 bp, Homo sapiens
  misc_feature (7)..(7): n is a, c, g, or t
  misc_feature (33)..(33): n is a, c, g, or t
  misc_feature (52)..(52): n is a, c, g, or t
  misc_feature (54)..(54): n is a, c, g, or t
  misc_feature (59)..(59): n is a, c, g, or t
  misc_feature (69)..(69): n is a, c, g, or t
  misc_feature (100)..(100): n is a, c, g, or t
  misc_feature (147)..(147): n is a, c, g, or t
  misc_feature (149)..(149): n is a, c, g, or t
  misc_feature (192)..(192): n is a, c, g, or t
  misc_feature (214)..(214): n is a, c, g, or t
  misc_feature (233)..(233): n is a, c, g, or t
  misc_feature (240)..(240): n is a, c, g, or t
  misc_feature (300)..(300): n is a, c, g, or t
  misc_feature (310)..(310): n is a, c, g, or t
  misc_feature (330)..(330): n is a, c, g, or t
  misc_feature (349)..(349): n is a, c, g, or t
  misc_feature (373)..(373): n is a, c, g, or t
  misc_feature (376)..(376): n is a, c, g, or t
  misc_feature (391)..(391): n is a, c, g, or t
  misc_feature (397)..(397): n is a, c, g, or t
  misc_feature (404)..(404): n is a, c, g, or t
  misc_feature (414)..(414): n is a, c, g, or t
  misc_feature (419)..(419): n is a, c, g, or t
  misc_feature (423)..(423): n is a, c, g, or t
  misc_feature (434)..(434): n is a, c, g, or t
  misc_feature (447)..(447): n is a, c, g, or t
  misc_feature (457)..(457): n is a, c, g, or t
  misc_feature (461)..(461): n is a, c, g, or t
  misc_feature (488)..(488): n is a, c, g, or t
  misc_feature (499)..(499): n is a, c, g, or t
  misc_feature (509)..(509): n is a, c, g, or t
  misc_feature (539)..(539): n is a, c, g, or t
  misc_feature (567)..(567): n is a, c, g, or t
  misc_feature (614)..(614): n is a, c, g, or t
  misc_feature (787)..(787): n is a, c, g, or t
tagcagngcaaaaattttatttctgtttccccnccccaccactttacaagangnaaaantttacttaanccaccggattctccttttttaaagaaaagtnatcagtcatgtcaaatgtgaggaaaaaaacactaatcaattaaaaananccgtccctcttccccactgctacagcaaatttaggataaatcnacagcattcacttactttagcnggttctgatactgaggaanacttttntatttgagaatcaacacctaaagacttggctaattgtacagcatttgaatcatcactganaagtgttccnagagccacaagaaggctaanaggggcgtctagggcttgnactacttccaagattgggctaatnagngacaaacattgggcnttcccntcaaggntaggggcggnagganaacnaacagaatagntcagggccaatgnagccagagcnatgngaatgttcttattgccccctgatttcngttctattgcntgggacatcngggattcccccggggacatcatgagttttnggccggcctggccaacaaaacaattgcnaaaagtcctgagagcaagcagctggtttgctggctttcctttagggntcagaagattgataagatgactgctgaactgagccccttccttttcattgcagaagttctcattcacactggggggtttaattgacaaccgaagaatgtcaagtgcaggaaagacaatatcttcaggacagttaatagctttccacaaaatctgaagttgctggactgtgggnttttctgaagaac

SEQ ID NO: 629376 - DNA, 489 bp, Homo sapiens
cgatacacttaggtcatatgctgtttcaggggactgagtctggctctgttgcccaggctgtagtcgcagtggctggtcacttcggtctcactagctacctctgcctccgcgggttcaacgcgtttctcgctgcctcagcctcctgaagtagctcgtgactacagtgcgtgcaccaccactgcccagtctaattttttcgtaatttatagcagacatcggggtttcactggtattacgccatggatggcctcatatttccgtgaccttagtgatcatacctgccttgtgcctcccaaatgagctgggattacagtgcacagaaccacgcgcaccttggccaatcgagcaataaactatcttttctattttaccccaatttcttattaattcacacttcaaaaaagcatttcctggaagtatttctaagtgtgatggtttgtaatatataacaaatgacaagatgtaattagattataagaaaagcatctg

SEQ ID NO: 629377 - DNA, 414 bp, Homo sapiens
tatcctagtccttacagatgaacagaggcgtatatctccaaattaaaaacaaaaaaggctaaaaaattgggcttgaggtctccaccagcccgtgtgtgcgaggattttcaggacacgattatcacgggcgactacttgggaatttatccccaagaggacaggtccatcgtgtgaagaatgagtctacttcaaaggggacaggaagaacaaagaggtgaggtggaagatgggtccccccagggtctacaccagggacagaatggttgcctgctgctctggagtctgctccagcaagtatcgggcaaagggctgctccatcttcactgtgataagattctgtggagtatggctggagccatgggtctcttcccagaaatacagtgtaacctggaacttcggtaccaactcagatta

SEQ ID NO: 629378 - DNA, 393 bp, Homo sapiens
  misc_feature (17)..(17): n is a, c, g, or t
  misc_feature (84)..(84): n is a, c, g, or t
  misc_feature (159)..(159): n is a, c, g, or t
  misc_feature (271)..(271): n is a, c, g, or t
  misc_feature (375)..(375): n is a, c, g, or t
  misc_feature (381)..(381): n is a, c, g, or t
  misc_feature (391)..(391): n is a, c, g, or t
cattgggtttttcacanaactagaagttagatgaaatgatatttaaagaatattgtttaaagaatgtctgaatatcaataaagnttaattaacctttaattttaaaaagtaatctaaaatttcttacctggtagggctgaaaggcactatcttcagttnaaaaatccagttgcttatcttcaaggaattctactgcagtgactgaactgggtatatttctttcaaccagaggtttgaaagtctgccaagaaaaaaaaaatttctaatgatnattttctgggtagtatcctgaaattatgaaggaacacacaccaatacaatgtatcaatgtcattatcactacagagtcttagggacctaatattaattttcacncgtccnaatccatcancc

SEQ ID NO: 629379 - DNA, 215 bp, Homo sapiens
ctttttatttgctatcagtattatttgccatctttttatgctaatttggagggttacttttaacattagtttatagggatctacagtcttatctcgaaattttcattcctcttgtttacgatgtctctccctcctgtattctccctttactccttttgacaatttcttcttgtcctaatttcactatctccttgtgtctctgtcctcgattaggc

SEQ ID NO: 629380 - DNA, 601 bp, Homo sapiens
tcgcaggttaaaactgcttttttattatttttttaacataaaaaattcttggtagtggacatgtggccattggatgtttttatgactaagagagttcaggctcaatcttttacagaatgtaaatgtccccctatgcatgcacatgtaatccttatcaaatttttcctaaaacactaaaagaagatcccttatctgaactttcttttacagtttttttactttcgccatcaggcactggaccatctggcctgtaaaaaagatctgggcctaaaccttcggatatcattttgttgcttattgccatcactggaacacccacttgaaccattccgagatatccggcatatcttggatccttggctacagataaaatatttcctgctgaaacttcactttcctgtagtccagagcctggagtactgacccgcgggggttgctctgaagtggcttcaggatgtgctccatttgtgacactggagacattaaaaggagatccttcaacggagacaccctctaggcctgggatagatgacccctttgcatctacaatattggaagttggttcaatttggtggataccaaaggaaaggtccgccatgtt

SEQ ID NO: 629381 - DNA, 385 bp, Homo sapiens
  misc_feature (71)..(71): n is a, c, g, or t
cattttgacaatgtgtcttgcctctcaatatattgttgtagacattatgagacgtattaccattttacacnctagtaatagagataaataccataattcaaaatgaaacatcacatcaagagacaactgctttcgatgactccagactgtagaaagactcatcaaagccatctgctggcacctcttctgtctacttctcctgttcgctggggccttcctgggaactttggctgccttgttgttggtctgtggccttctaagtcacctggggcggacatccattcttgacaatggctgcagtgaggggcatcactgggagaggaaggaggacgtgtgttcgagagatattgattgatgccatccctggctgtttccacattggcag

SEQ ID NO: 629382 - DNA, 1577 bp, Homo sapiens
agcggaggctacaatgctggctgtgctgtgctgtgcggtgacctgtgacctgtgacgcgctgggcgtgtgctgtgtgtgtggtgcgctgtgtgctcatgggtgctgctggagccaatgggatgcctggcaatgggtgctgtccatgggtgctgctcatgacctggccatctgcccatgctcctctccctgcagacacaatgatggtgaatggatgacccatgtactatgacacctctgtgcgcgttgaatggccctaggatgctgatcccctgtgtagtgattgattctaacgacatcgtgtcccttattcgtgaacatgctttggcgtctgccatcaaaatgcgtatcctaccctctgtggagcaaatgtagacgcgctgtgactttgaatgtgcgctgagtggacatggtctacaaattcttctagttacttccactacggtgacattagcttgatgtgtgtggcatattctcacgtatttgcctaggatgtagaacaacgcggtaaattgcatccctatttgcacccagtggtgtctgtcggcagaaaggccagggcgccagcatattcaacgacgttacaatgtgaatcgggcttccatgagtcctgcaccgacgccaagaccattatccgtatccattatccaactccgtcaaatgtatcgtagcccttccttaacctataagacaatgtggatacacagattctagggtgactagacactaggagacttgtggcgatcctgatgaaagttgtggtctctaactaccacccgagggaacgtgtcaacagccaatgtgcgcatcaacggacacatcatggctatgtgcataacccactaccgcagaaggttgtgagcattacactagagttaagtatccatctccggttgtggtacacacacgcagacacttttcttaactgtatcagtataaccttatggtgcgaagtcggtacgcaccgcgtaacacttgctaaaccctcattttgtggtggttcactcactctatcgctccaagagtgatcacactccacacactcttgcgttacacaagtatctagtggcttcggagtagcgagcaactagtatggtcattgatatagatgtgcgtcatcggtgctgggacagtattgcgtcggagaacagcgacgaaaacggtgggcgaaactatccggcaggtatggcgctacagacatacgttctttgcccgccctgtccttagttgattagtcaaccaataggtgagtgtctcacggtaggtcagtagaatatttgcagtcagcgagagtactccaaccgacacttcgccctaacgacagctgctcactctagtatgtgcacgtcctaggcggcgtccattttgtcgagtaatataacaagggctcaagcgataactcacgactagacaacagcaccgggggtcgtgtctgcaacacactagtccagagcgtagttagtttctcatcatggtgtgtctatccacagcttacgtggatgtgactgactcagtccgaatctaatagacacgctcaagatgtgtcagcacgcagctagcgtcgacgcataacagatct

SEQ ID NO: 629383 - DNA, 888 bp, Homo sapiens
ctttcaatctgtgtgattcattaaatggaccattgatgataagaatacacatgtatgtttctgtgcacatgacagtgtgtgtgtgtgtgcacgtacatactgtatagtcttaaaaatagcattatactggccaggggtggtggctaacgcctgtaatcccagcactttgggaggccgaggcgggtggatcaactgtggtcaggagtttgagatcagccaggccaacctggtgaaaccccgtctctactaaaaatacaaaaattagctgggcgtgatggtgggcgcctgtaatcccagctacttgggaggctgaggcaggagaatcacttgaacccgggaggcggaggttgcagtgagccgagatcgcaccattgcactccagtctgggcaacagagtgagattccgtctcaaaaaaaaaaaaggaaagggaaaaaaaattagattataccttttccttgtttcaaccgccttgaaatttttgaacctccaaattcggtggaataatccaaacaaattttttacgtctaacacataatttacttctaatagcactagtatacttaaaaagcctcagggtataataatcttccttaaacaaggctaaacaattccgctgcggctaattttaacccacttttgttctctagcttgagaaaccacctaggggcctatttcactggggtgtggttcccccagggcctacactggcgtgcacataaaatatttggagaaatgcaccgggattgttaacacactcggtttggttaccattgccacaacttacagcgccgggattatgaactcgggaagaactatacattaacccaaagcacgggggggcgacacaagatcctatattacccacttgttgttccacttcgtttaaa

SEQ ID NO: 629384 - DNA, 402 bp, Homo sapiens
gggggttttctgggccccaattccctttttaagggttccccaaaaaaacaattaaatttttccaaaacccccaggaagtggggtaaaaaattttaaaaaaaacccgtttttttcccccccaccccccaaataagaccccccccctccccttttgggtggggggtattggaaattccaacccctccttcccaaggcccccctttttggaggaaaccggtgccattttccttttaagggttcccaaaaagggggggggcccccccccaaggcccttttttggccaaggaagcaagggaaaaccgtttgggcccctaacccatggggtttttttccttttaaaaggggaagaattcttttccaagccccccggccccagtttttaaaaaaaaaggggggggggga

SEQ ID NO: 629385 - DNA, 201 bp, Homo sapiens
cgccagtacttcgacgaggccaattaaatctgtccatacttcgagatagctgctggcgatacattgtctgcggacatcagggacctgctagttaatgaagttgtcataacaccactgaaccgatacatgatttagtataaaagcatggtagacgttcagcagtgtcagatgatctccatctatgtgggcaaatctcatcta

SEQ ID NO: 629386 - DNA, 455 bp, Homo sapiens
gagcgggggggccgccgtgagaggtcatgatcaggaactcagtctacggcaaatgaccggaagctctttccaggatgaacggatgcccacagaggcctgcggggtgggggcatcgctgcactggagagactgaggagttaccgctagtgatcggggacagctaatggtgtcaggtgcagcagaggtcctaccattgtctggttctagcacccgtctcgctaccacagaccatttgctgggatgacacgtgcaggccggtgacacacggccgacacctgccccaaagcgggccgcccgagacgtccactccaagcctgagcatcacacagaagttccagtgggcacctcgcgtgcctgctgtgaactgcgttgccctcggaatgttgccggaacgaggacatgcaggaccttggatttggagccgacgacaagacgagaaaacattcacaagcggg

SEQ ID NO: 629387 - DNA, 1534 bp, Homo sapiens
tacggactaggcccctatatcttctgcattatgaattaagctagaagataactttgcaatgagagcctaagctaagaccccctgaatccagtactgagctacctaagaactagcttagaaagagcacgacccgtctatgttagcagaaatagtgtgggaagatttatagtgctaggaggcgactaaatcctaccggagcctggtgcatagctgggttggtgccaagtactagaattcattagtgttcgaagctttataatgtgtgctccacatgaaatcctctcttaaacgtcccacttgctaatactttaagcgtggttcacgtccagagacggaggtaaacagacctacttctggaacaagcgtaagggacacaaaacaccgcttgctcaggagaatggaggtacacacagacacttgtgcaccagcctctgagtagtctatgggctcgtaatgaatgctagtctcacgcgaagtttaatgcaacaggacagcttccaaggcgtcgaacgaagccatcttaccgtagaaaagagttcccgataaaacgatttatatagcttcgtaagcgtcacatgcatcgatcgcccatagtttggagagcaccacattcataattgccacctctctataatgatatgcacacctcaacttgattaagtaattagagttacagcgactgtaatacaccgatgtatcatacacttcccggctattaacgccgtagctgcttcacgtatttcaaataccatctcgacacctttgcaccaatgtcaactattgccccaagttattcctacatagtccaacctcgagatccatatgtgcaattcaattggagcgctatcaaggtggtcagacgccagatcaacatggggccattgtccttctagtgcaacgggacacacgggtgttacacacgaataagaagttcaacaccacgggaaaaacctcccggggcaataaatgcttgtgagccccccgggaccctgggtgattaccccgacaagagcaatcatttctcaccctcatatacacagatcctagccaaagggtagtatacggaacgaggcacacccggccgtggtctccaaaggtgaaacaccatttgttttacaatatcagggacccgccagaggagtaatccagctttaatagaccgaggggcagacacgaggagtgacgagcaatacaatgcaaagcaatgagttatcccctgttactaccaaatacgggacaccctggaatgtttgaaaatgggcgcccaccagagagggattacgcgaccgagcacaccgttcaactctgttgtaagccacgacggaaaattgttgccctggccccggtcgtaatgaaggcgacgctacttataccaccgcatgtagacatgatagaccctcatggaggcgtaagtgagtaaatactgacgaaagactaccatacgagacccacacaggtcgtctatagatgaagcaacgtgctcgtatacattatcgtggagcaagcgacactatgcaataagcacaccgtcata

SEQ ID NO: 629388 - DNA, 453 bp, Homo sapiens
cgcttgactctgtcagaggttggatgcctaacagatcacgctctggaagatccaatgactctgcggacacgggcactcagctgagccctcagccctcatggcttacccgatgctcagcggtgcagaggagccagctggggagcctctgtgtatcgctttatattaacttatggctgaagttctccaagacgcccagagttgaattcctccagagctctgtgcagaccgtccaagcaggggatggcagagaggtccttgctagcaagaaacttacaggccaggctggtctcctgctccaggatgctggtgagcatgcaccgtccccgcagggcacaggggtatcctttgaaggtgtcaagggacaccttgagtccgtgccagacacttagggattggagaaagtgcaaccccagactactgccatctccggaactcggggggttgttcaactgt

SEQ ID NO: 629389 - DNA, 1566 bp, Homo sapiens
agcgtactgtactggcgctgcaagggccactgtaggggatctgtaagctcgctgggtctcgcggctgcggccctagcgcgcgccagggtccggcagataaatcagtaccgcgagatcccctgggaacgggatagcagtagcttgccagatgagtctcacgccgcgatgctggatgcacacgtctcgagcgctgctcacctagacgaaaatactagggatactaaggaaataagaggcaggcagcgagacctctgggttcaatgcatacgacgcagaagaaccaaaaagttgacgtacgggacgttacctgaggatgtcaaggacaatgacaatactgcatacctgggcggccacgttatactaggacgtatcatctgatcaaagcatcttcacctctccgaacatgcgagcacctcacgacctacgaaggaattaatctgcacgacactttggagctcttcaagtactcagggaaaaggtgatgcgaccggacacaaatacctcacggccacaaaatcggcgccaagcactggcggcaaaagggctatacagacgaaggtacgaccgaccccgaggaagcgcacaagcggagacatgcacgcccagcaagcagcatgctgacatcacgcacgccgagtacaccaggatccgcaaagaccagaagataggacagcgaaccgcagccacagacggccagatgcggcagaacaatcccaggtgctgagaaacctaccgaatgaggatgaaaagaaaaaagaagacaccgcacaataacgtgagtagcaagcacgggagagaatccacctatgaaagctttcagaacaataaccacgcacaacttaaccacacgaacaaacacagcctcaaccccaatccacccgcacagccgtaaagtagaggtaagacatgagcgtggccgtgtggtcctctctctcccccttcctctctcgccgacaagaaaggcacaaaggatgagacacgaacagacaggagaaaaaccttaaaagcagacaaacgaggaacaagcagcccaccaactgcaaagacgaggagaaacgaaatgacgggagagaaaaaagagacgtcaagaagaggggaaaagaggcggaacaggagacagagaaaaaggagagaggagggaaagagcagaagaaggaagcagggagacagagcgcgacaaggaaacgaggaaaggaaaagagagaaggagagaagcagaagcaagagagagagaggaaagacagaagaggagaaaagcggagagagaggcgaagaagagaaggcgaaacaagaaagaggagagggggagaggagcaggcagaaaaaaacacgaaagagaaaaaaagaaaaaaaagaaaagaaacgaacaaagtaaaaacagaggaaagaaaacaagggaacagaaaaaagaccaaagagaagaaaaaaaaaaaaacagaagaaaaaaacaagaagaaaagagacgacgaaaaaaagaaacgaaccgaaagacagaaagaagacaaagaaaaacagaaactaacacaggcagacgcaaaaagcaaaagagaaaacagacgaagaagg

SEQ ID NO: 629390 - DNA, 683 bp, Homo sapiens
caggcagagaagtagaaccaattgcgtgccacctagtggccagcctaacaaagtcagggtagcatacttgagaaaacggtcatagtctgctttcctgtcgtggttaaaaatgcctattatcaagccacctaactccttacttttccacaaaaaaacacaaccacatatcttaagcaagccctcctccacagtcataatccaaatacttgaatacagcaaccaaagtctgtcttgttaaacacactacttctcatgaaactttcctctgcctattttaaggtaggtttgcccggtcctatggcccagtagagatgacacaggagaacacggaaacatccaaaatgttcactggttcagagtgtgtacacagtaatttcgatgtctgttgcctcaaatacctcctcgatcatcgcagatacattttcccattgcagacgatcaagaccacatccaatcctgggcatggagaggtcagtgactccattctttcagacaatgagacttcattgcctctaaactcttctgtaagttttcataagttggcttgtgcgaagcccttttctttgtaatcaagtaatatgtatatcgcccatctctcttcagaacagccacttctccagatttctttcggtgatttacaagttctggcacccctccaatttcttcttaagaggaagctatcc

SEQ ID NO: 629391 - DNA, 423 bp, Homo sapiens
catgcagagatttagattcactttgtctggggtggcatttccatgaacgcttcttgggtggtttaattgtacaaccagggtcgagaatcacagctctaatgaaagttcttctacataggaaggagaggttgaggagatggaggatccctcaagctgtccaagcacaaagagattggttcctacaatgagaacagaatgtacacgcgagctgcttgcacaatgcggtacctgtacctacggggttgctcatgcattatctccattaccaagatctatgtgggacgtcagaaaaacgtttttatgcccagccacttcagccggagcttccagagtgtgcccagccgattcctcaagccctggtgtgactgaatggtggctgaccacagatggcgagcgctgacaccctagggacatagagattgg

SEQ ID NO: 629392 - DNA, 3331 bp, Homo sapiens
gctttcttttctccagaggagccaggaagagagctgtgaccagcagcgtcccttattcgcttggccttggttcctgtttgcactggctacagcagggcactggcccctactgtcaccgccacctacacaaagaccctatctctgagcgctgcagcctactgttcagccccaggtttgaggatggatgccctggacgcttcgaagctactggatgaggagctgtattcaagacagctgtatgtgctgggctcacctgccatgcagaggattcagggagccagggtcctggtgtcaggcctgcagggcctgggggccgaggtggccaagaacttggttctgatgggtgtgggcagcctcactctgcatgatccccaccccacctgctggtccgacctggctgcccagtttctcctctcagagcaggacttggaaaggagcagagccgaggcctctcaagagctcttggctcagctcaacagagctgtccaggtcgtcgtgcacacgggtgacatcactgaggacctgctgttggacttccaggtggtggtgctgactgctgcaaagctggaggagcagctgaaggtgggcaccttgtgtcataagcatggagtttgctttctggcggctgacacccggggcctcgtggggcagttgttctgtgactttggtgaggacttcactgtgcaggaccccacagaggcagaacccctgacagctgccatccagcacatctcccagggctcccctggcattctcactctgaggaaaggggccaatacccactacttccgtgatggagacttggtgactttctcgggaattgagggaatggttgagctcaacgactgtgatccccggtctatccacgtgcgggaggatgggtccctggagattggagacacaacaactttctctcggtacttgcgtggtggggctatcactgaagtcaagagacccaagactgtgagacataagtccctggacacagccctgctccagccccatgtggtggcccagagctcccaggaagttcaccatgcccactgcctgcatcaggccttctgtgcactgcacaagttccagcacctccatggccggccaccccagccctgggatcctgttgatgcagagactgtggtgggcctggcccgggacctggaaccactgaagcggacagaggaagagccactggaagagccactggatgaggccctagtgcggacagtcgccctaagcagtgcaggtgtcttgagccctatggtggccatgctgggtgcagtagctgcccaggaagtgctgaaggcaatctccaggaagttcatgcctctggaccagtggctttactttgatgccctcgattgtcttccggaagatggggagctccttcccagtcctgaggactgtgccctgagaggcagccgctatgatgggcaaattgcagtgtttggggctggttttcaggagaaactgagacgccagcactacctcctggtgggcgctggtgccattggttgtgagctgctcaaagtctttgccctagtgggactgggggccgggaacagcgggggcttgactgttgttgacatggaccacatagagcgctccaatctcagccgtcagttcctcttcaggtcccaggacgttggtagacccaaggcagaggtggctgcagcagctgcccggggcctgaacccagacttacaggtgatcccgctcacctacccactggatcccaccacagagcacatctatggggataactttttctcccgtgtggatggtgtggctgctgccctggacagtttccaggcccggcgctatgtggctgctcgttgcacccactatctgaagccactgctggaggcaggcacatcgggcacctggggcagtgctacagtattcatgccacatgtgactgaggcctacagagcccctgcctcagctgcagcttctgaggatgccccctaccctgtctgtaccgtgcggtacttccctagcacagccgagcacaccctgcagtgggcccggcatgagtttgaagaactcttccgactgtctgcagagaccatcaaccaccaccaacaggcacacacttccctggcagacatggatgagccacagacactcaccttactgaagccagtgcttggggtcctgagagtgcgtccacagaactggcaagactgtgtggcgtgggctcttggccactggaaactctgctttcattatggcatcaaacagctgctgaggcacttcccacctaataaagtgcttgaggatggaactcccttctggtcaggtcccaaacagtgtccccagcccttggagtttgacaccaaccaagacacacacctcctctacgtactggcagctgccaacctgtatgcccagatgcatgggctgcctggctcacaggactggactgcactcagggagctgctgaagctgctgccacagcctgacccccaacagatggcccccatctttgctagtaatctagagctggcttcggcttctgctgagtttggccctgagcagcagaaggaactgaacaaagccctggaagtctggagtgtgggccctcccctgaagcctctgatgtttgagaaggatgatgacagcaacttccatgtggactttgtggtagcggcagctagcctgagatgtcagaactacgggattccaccggtcaaccgtgcccagagcaagcgaattgtgggccagattatcccagccattgccaccactacagcagctgtggcaggcctgttgggcctggagctgtataaggtggtgagtgggccacggcctcgtagtgcctttcgccacagctacctacatctggctgaaaactacctcatccgctatatgccttttgccccagccatccagacgttccatcacctgaagtggacctcttgggaccgtctgaaggtaccagctgggcagcctgagaggaccctggagtcgctgctggctcatcttcaggagcagcacgggttgagggtgaggatcctgctgcacggctcagccctgctctatgcggccggatggtcacctgaaaagcaggcccagcacctgcccctcagggtgacagaactggttcagcagctgacaggccaggcacctgctcctgggcagcgggtgttggtgctagagctgagctgtgagggtgacgacgaggacactgccttcccacctctgcactatgagctgtgacaaggcagccaccctgtcacctagctcaatggagccccggatcccaagccctgcattgtaagcccacagtaggcactcaataaatgcttgttaaaggaaggcaaaaaaaaaa

SEQ ID NO: 629393 - DNA, 834 bp, Homo sapiens
agctttatcagaggctgcaggggccctgctctgggtttcctcaggaagcaccaccccctcatcccccactctcacaactggcccatgtgatggatcgtctgtttccctgtgcgggccccatagccccatttcctgtgctggccccggcctggacggggagggggctgagactctgggcccagatcccacctcccccccaccccccaccccctggctcctgtttcctgctagtccagctcttcccctaggaaaggctgctggtaactgggatgggggttggggggaggtaagaagtctctgactcctcctctacctcatcccagttccatcacctgaagtggacctcttgggaccgtctgaaggtaccagctgggcagcctgagaggaccctggagtcgctgctggctcatcttcaggtgtgccctgttgctaccccaacccccaggctcagcccagcccggcccagctggtgtctgacctttctcctctaggagcagcacgggttgagggtgaggatcctgctgcacggctcagccctgctctatgcggccggatggtcacctgaaaagcaggcccagcacctgcccctcagggtgacagaactggttcagcagctgacaggccaggcacctgctcctgggcagcgggtgttggtgctagagctgagctgtgagggtgacgacgaggacactgccttcccacctctgcactatgagctgtgacaaggcagccaccctgtcacctagctcaatggagccccggatcccaagccctgcattgtaagcccacagtaggcactcaataaatgcttgttaaaggaaggcaaaaaaaaaa

SEQ ID NO: 629394 - DNA, 277 bp, Homo sapiens
ggaccaagcagtagtacagactcaccaagcacagacttgtttccacaagccgtcttaccttagccacgaagtcccaagccacacgtactaagggttgaactcaaagatatgtacaggggtataaaacaaataccagggggaacagttacctccaatacaaggacaaaatcagcaacaagtcctacaatccagtgctgatatcagatacaagcttcagggcacaattcctttccggaaggcttatcccagttccgtgaggctagcatgaggtgtgtgc

SEQ ID NO: 629395 - DNA, 367 bp, Homo sapiens
  misc_feature (75)..(75): n is a, c, g, or t
  misc_feature (86)..(86): n is a, c, g, or t
cctcagctcctgctcctggcttgggctcctgacggcctgccagcaccctctctaggtccatgacaggctgccttntgcttgccatngtctttccaatattctccccataaacccacccctaccagggtgacagaactggttcagcagctgacaggccaggcacctgctcctgggcagcgggtgttggtgctagagctgagctgtgagggtgacgacgaggacactgccttcccacctctgcactatgagctgtgacaaggcagccaccctgtcacctagctcaatggagccccggatcccaagccctgcattgtaagcccacagtaggcactcaataaatgcttgttaaaggaaggcaaaaaaaaaa

SEQ ID NO: 629396 - DNA, 431 bp, Homo sapiens
ccccagggagattgacatctgtagattatgaaacacaaacaaatggagctccacaaatgagattacaaatcaatcacatgaatgacagccgggcatcagttgtggcgaaccctgtctgggtctcaagggaaatctgtcattggggccgcctcgccctggcaagatggggttaggtcctggaagtgggccaactggatcaaagcgtggtctcagtggaggaaactttttttgcgtctccccaggaccaagaatgagtgaactgagtgggtctccaacataaggaaatgttggtctttgggcatattcacccccgataaatcccggaggaaagcgggagctaggaaaagggccaaggtgcaaggggttgggatagaatggaatggggtgagttgacgatggcaggagcatcacaaaccggcctctcggggata

SEQ ID NO: 629397 - DNA, 3419 bp, Homo sapiens
gctttcttttctccagaggagccaggaagagagctgtgaccagcagcgtcccttattcgcttggccttggttcctgtttgcactggctacagcagggcactggcccctactgtcaccgccacctacacaaagaccctatctctgagcgctgcagcctactgttcagccccaggtttgaggatggatgccctggacgcttcgaagctactggatgaggagctgtattcaagacagctgtatgtgctgggctcacctgccatgcagaggattcagggagccagggtcctggtgtcaggcctgcagggcctgggggccgaggtggccaagaacttggttctgatgggtgtgggcagcctcactctgcatgatccccaccccacctgctggtccgacctggctgcccagtttctcctctcagagcaggacttggaaaggagcagagccgaggcctctcaagagctcttggctcagctcaacagagctgtccaggtcgtcgtgcacacgggtgacatcactgaggacctgctgttggacttccaggtggtggtgctgactgctgcaaagctggaggagcagctgaaggtgggcaccttgtgtcataagcatggagtttgctttctggcggctgacacccggggcctcgtggggcagttgttctgtgactttggtgaggacttcactgtgcaggaccccacagaggcagaacccctgacagctgccatccagcacatctcccagggctcccctggcattctcactctgaggaaaggggccaatacccactacttccgtgatggagacttggtgactttctcgggaattgagggaatggttgagctcaacgactgtgatccccggtctatccacgtgcgggaggatgggtccctggagattggagacacaacaactttctctcggtacttgcgtggtggggctatcactgaagtcaagagacccaagactgtgagacataagtccctggacacagccctgctccagccccatgtggtggcccagagctcccaggaagttcaccatgcccactgcctgcatcaggccttctgtgcactgcacaagttccagcacctccatggccggccaccccagccctgggatcctgttgatgcagagactgtggtgggcctggcccgggacctggaaccactgaagcggacagaggaagagccactggaagagccactggatgaggccctagtgcggacagtcgccctaagcagtgcaggtgtcttgagccctatggtggccatgctgggtgcagtagctgcccaggaagtgctgaaggcaatctccaggaagttcatgcctctggaccagtggctttactttgatgccctcgattgtcttccggaagatggggagctccttcccagtcctgaggactgtgccctgagaggcagccgctatgatgggcaaattgcagtgtttggggctggttttcaggagaaactgagacgccagcactacctcctggtgggcgctggtgccattggttgtgagctgctcaaagtctttgccctagtgggactgggggccgggaacagcgggggcttgactgttgttgacatggaccacatagagcgctccaatctcagccgtcagttcctcttcaggtcccaggacgttggtgtgagtgctgacccctctccacactcctgcatcccagaccgtcctcccatacagcttcccacccaacatcttcctgccttcttcccagagacccaaggcagaggtggctgcagcagctgcccggggcctgaacccagacttacaggtgatcccgctcacctacccactggatcccaccacagagcacatctatggggataactttttctcccgtgtggatggtgtggctgctgccctggacagtttccaggcccggcgctatgtggctgctcgttgcacccactatctgaagccactgctggaggcaggcacatcgggcacctggggcagtgctacagtattcatgccacatgtgactgaggcctacagagcccctgcctcagctgcagcttctgaggatgccccctaccctgtctgtaccgtgcggtacttccctagcacagccgagcacaccctgcagtgggcccggcatgagtttgaagaactcttccgactgtctgcagagaccatcaaccaccaccaacaggcacacacttccctggcagacatggatgagccacagacactcaccttactgaagccagtgcttggggtcctgagagtgcgtccacagaactggcaagactgtgtggcgtgggctcttggccactggaaactctgctttcattatggcatcaaacagctgctgaggcacttcccacctaataaagtgcttgaggatggaactcccttctggtcaggtcccaaacagtgtccccagcccttggagtttgacaccaaccaagacacacacctcctctacgtactggcagctgccaacctgtatgcccagatgcatgggctgcctggctcacaggactggactgcactcagggagctgctgaagctgctgccacagcctgacccccaacagatggcccccatctttgctagtaatctagagctggcttcggcttctgctgagtttggccctgagcagcagaaggaactgaacaaagccctggaagtctggagtgtgggccctcccctgaagcctctgatgtttgagaaggatgatgacagcaacttccatgtggactttgtggtagcggcagctagcctgagatgtcagaactacgggattccaccggtcaaccgtgcccagagcaagcgaattgtgggccagattatcccagccattgccaccactacagcagctgtggcaggcctgttgggcctggagctgtataaggtggtgagtgggccacggcctcgtagtgcctttcgccacagctacctacatctggctgaaaactacctcatccgctatatgccttttgccccagccatccagacgttccatcacctgaagtggacctcttgggaccgtctgaaggtaccagctgggcagcctgagaggaccctggagtcgctgctggctcatcttcaggagcagcacgggttgagggtgaggatcctgctgcacggctcagccctgctctatgcggccggatggtcacctgaaaagcaggcccagcacctgcccctcagggtgacagaactggttcagcagctgacaggccaggcacctgctcctgggcagcgggtgttggtgctagagctgagctgtgagggtgacgacgaggacactgccttcccacctctgcactatgagctgtgacaaggcagccaccctgtcacctagctcaatggagccccggatcccaagccctgcattgtaagcccacagtaggcactcaataaatgcttgttaaaggaaggcaaaaaaaaaa

SEQ ID NO: 629398 - DNA, 1018 bp, Homo sapiens
  misc_feature (45)..(45): n is a, c, g, or t
  misc_feature (85)..(85): n is a, c, g, or t
  misc_feature (100)..(100): n is a, c, g, or t
  misc_feature (182)..(182): n is a, c, g, or t
  misc_feature (190)..(190): n is a, c, g, or t
  misc_feature (245)..(245): n is a, c, g, or t
  misc_feature (253)..(254): n is a, c, g, or t
  misc_feature (283)..(283): n is a, c, g, or t
  misc_feature (297)..(297): n is a, c, g, or t
  misc_feature (300)..(302): n is a, c, g, or t
  misc_feature (305)..(305): n is a, c, g, or t
  misc_feature (307)..(307): n is a, c, g, or t
  misc_feature (330)..(331): n is a, c, g, or t
  misc_feature (338)..(338): n is a, c, g, or t
  misc_feature (346)..(346): n is a, c, g, or t
  misc_feature (348)..(348): n is a, c, g, or t
  misc_feature (370)..(370): n is a, c, g, or t
  misc_feature (431)..(431): n is a, c, g, or t
  misc_feature (561)..(561): n is a, c, g, or t
  misc_feature (924)..(924): n is a, c, g, or t
  misc_feature (954)..(954): n is a, c, g, or t
  misc_feature (992)..(992): n is a, c, g, or t
aatataaaattctcatttttcaaagtgaaagtttgaagatactanctaaagttgataacttaaatagtgtgtaaaagtaaataanttagtatattatggnagctatcactatagtaagaaacagaaaacagggggactagtggattcggtggtagacttttactttaaaatagagctatgcngcagattntccatttacttggcttacatgcagtatgtcctatggaagttataattttcttatncctctttnnttttttgtttctctatattaataaagttnaagccaggtatatnatnnntgntnccagtatataaacatatacatcnnttggttncccaggtnanccaaaaggtgttttttaaaatntccccaccataccttttaagacaacttttccgctaccctacagtaggaagtaaccacattnaaattagttaagctataaaaaagtaaaaggggccacaagctttattaaaagtaaatgcaacagttatatgtacagatggcacatggtgccaattttatttgtgaatatagtattccaactcaagtttacnagttacacctttgccacagccttggctaaatcttgaactagtgcagaattcagctgtggtagagtgctgatcttagcatgcttcgatgtggcatacttgttcttgacagtcatgtgctttgtaagtccttgatttaccatgactacattcttagccaggtgctgcataactggaagaagagattcttcagtatatgacaggtaatgttgtagagttggtgtccattcaccattatccagaattttcagtgctaagcaaaaagctcctgctgcaatttgagaaggaggaaagtgcaccatgtcatagtccaacatagttagttccatcaggtatttggctaaagtatgtttgctcgacatcaanctctccaatcttagatgctctccgaagaangtgcaaaggtagaggccgaccagaacaaagtttaagtnttagatctcatttcatctgtctgatt

SEQ ID NO: 629399 - DNA, 272 bp, Homo sapiens
ctctcgtcagcctcccgccggccgtctccttaacaccgaacaccatgccttcaattaaggttgcagagttcttaattgagagatatttgaaggtgatgttggaattgcccaacaatcttgtgactaataaggaccaggttggaggatttgggattggatgatgaagggagttgatgacccagttccctctaccaaattgtgaattacaggcaaatattaaaaaggggaaatacagggggcacaccccaccacagggatgaccctcctcctcc

SEQ ID NO: 629400 - DNA, 3601 bp, Homo sapiens
gctttcttttctccagaggagccaggaagagagctgtgaccagcagcgtcccttattcgcttggccttggttcctgtttgcactggctacagcagggcactggcccctactgtcaccgccacctacacaaagaccctatctctgagcgctgcagcctactgttcagccccaggtttgaggatggatgccctggacgcttcgaagctactggatgaggagctgtattcaagacagctgtatgtgctgggctcacctgccatgcagaggattcagggagccagggtcctggtgtcaggcctgcagggcctgggggccgaggtggccaagaacttggttctgatgggtgtgggcagcctcactctgcatgatccccaccccacctgctggtccgacctggctgcccagtttctcctctcagagcaggacttggaaaggagcagagccgaggcctctcaagagctcttggctcagctcaacagagctgtccaggtcgtcgtgcacacgggtgacatcactgaggacctgctgttggacttccaggtggtggtgctgactgctgcaaagctggaggagcagctgaaggtgggcaccttgtgtcataagcatggagtttgctttctggcggctgacacccggggcctcgtggggcagttgttctgtgactttggtgaggacttcactgtgcaggaccccacagaggcagaacccctgacagctgccatccagcacatctcccagggctcccctggcattctcactctgaggaaaggggccaatacccactacttccgtgatggagacttggtgactttctcgggaattgagggaatggttgagctcaacgactgtgatccccggtctatccacgtgcgggaggatgggtccctggagattggagacacaacaactttctctcggtacttgcgtggtggggctatcactgaagtcaagagacccaagactgtgagacataagtccctggacacagccctgctccagccccatgtggtggcccagagctcccaggaagttcaccatgcccactgcctgcatcaggccttctgtgcactgcacaagttccagcacctccatggccggccaccccagccctgggatcctgttgatgcagagactgtggtgggcctggcccgggacctggaaccactgaagcggacagaggaagagccactggaagagccactggatgaggccctagtgcggacagtcgccctaagcagtgcaggtgtcttgagccctatggtggccatgctgggtgcagtagctgcccaggaagtgctgaaggtgggcagaggcataggtgtggggggtactgggaagatgtggagatcagtgtgtgtgtcagagggcacccagcgctagagagcagccctggagccttcaccaacctgggtgaagcctccagccaggatctgagggggggtcaggaggtggcaggagtgcccagcctgaagtgctgcccctaggcaatctccaggaagttcatgcctctggaccagtggctttactttgatgccctcgattgtcttccggaagatggggagctccttcccagtcctgaggactgtgccctgagaggcagccgctatgatgggcaaattgcagtgtttggggctggttttcaggagaaactgagacgccagcactacctcctggtgggcgctggtgccattggttgtgagctgctcaaagtctttgccctagtgggactgggggccgggaacagcgggggcttgactgttgttgacatggaccacatagagcgctccaatctcagccgtcagttcctcttcaggtcccaggacgttggtgtgagtgctgacccctctccacactcctgcatcccagaccgtcctcccatacagcttcccacccaacatcttcctgccttcttcccagagacccaaggcagaggtggctgcagcagctgcccggggcctgaacccagacttacaggtgatcccgctcacctacccactggatcccaccacagagcacatctatggggataactttttctcccgtgtggatggtgtggctgctgccctggacagtttccaggcccggcgctatgtggctgctcgttgcacccactatctgaagccactgctggaggcaggcacatcgggcacctggggcagtgctacagtattcatgccacatgtgactgaggcctacagagcccctgcctcagctgcagcttctgaggatgccccctaccctgtctgtaccgtgcggtacttccctagcacagccgagcacaccctgcagtgggcccggcatgagtttgaagaactcttccgactgtctgcagagaccatcaaccaccaccaacaggcacacacttccctggcagacatggatgagccacagacactcaccttactgaagccagtgcttggggtcctgagagtgcgtccacagaactggcaagactgtgtggcgtgggctcttggccactggaaactctgctttcattatggcatcaaacagctgctgaggcacttcccacctaataaagtgcttgaggatggaactcccttctggtcaggtcccaaacagtgtccccagcccttggagtttgacaccaaccaagacacacacctcctctacgtactggcagctgccaacctgtatgcccagatgcatgggctgcctggctcacaggactggactgcactcagggagctgctgaagctgctgccacagcctgacccccaacagatggcccccatctttgctagtaatctagagctggcttcggcttctgctgagtttggccctgagcagcagaaggaactgaacaaagccctggaagtctggagtgtgggccctcccctgaagcctctgatgtttgagaaggatgatgacagcaacttccatgtggactttgtggtagcggcagctagcctgagatgtcagaactacgggattccaccggtcaaccgtgcccagagcaagcgaattgtgggccagattatcccagccattgccaccactacagcagctgtggcaggcctgttgggcctggagctgtataaggtggtgagtgggccacggcctcgtagtgcctttcgccacagctacctacatctggctgaaaactacctcatccgctatatgccttttgccccagccatccagacgttccatcacctgaagtggacctcttgggaccgtctgaaggtaccagctgggcagcctgagaggaccctggagtcgctgctggctcatcttcaggagcagcacgggttgagggtgaggatcctgctgcacggctcagccctgctctatgcggccggatggtcacctgaaaagcaggcccagcacctgcccctcagggtgacagaactggttcagcagctgacaggccaggcacctgctcctgggcagcgggtgttggtgctagagctgagctgtgagggtgacgacgaggacactgccttcccacctctgcactatgagctgtgacaaggcagccaccctgtcacctagctcaatggagccccggatcccaagccctgcattgtaagcccacagtaggcactcaataaatgcttgttaaaggaaggcaaaaaaaaaa

SEQ ID NO: 629401 - DNA, 3141 bp, Homo sapiens
gctttcttttctccagaggagccaggaagagagctgtgaccagcagcgtcccttattcgcttggccttggttcctgtttgcactggctacagcagggcactggcccctactgtcaccgccacctacacaaagaccctatctctgagcgctgcagcctactgttcagccccaggtttgaggatggatgccctggacgcttcgaagctactggatgaggagctgtattcaagacagctgtatgtgctgggctcacctgccatgcagaggattcagggagccagggtcctggtgtcaggcctgcagggcctgggggccgaggtggccaagaacttggttctgatgggtgtgggcagcctcactctgcatgatccccaccccacctgctggtccgacctggctgcccagtttctcctctcagagcaggacttggaaaggagcagagccgaggcctctcaagagctcttggctcagctcaacagagctgtccaggtcgtcgtgcacacgggtgacatcactgaggacctgctgttggacttccaggtggtggtgctgactgctgcaaagctggaggagcagctgaaggtgggcaccttgtgtcataagcatggagtttgctttctggcggctgacacccggggcctcgtggggcagttgttctgtgactttggtgaggacttcactgtgcaggaccccacagaggcagaacccctgacagctgccatccagcacatctcccagggctcccctggcattctcactctgaggaaaggggccaatacccactacttccgtgatggagacttggtgactttctcgggaattgagggaatggttgagctcaacgactgtgatccccggtctatccacgtgcgggaggatgggtccctggagattggagacacaacaactttctctcggtacttgcgtggtggggctatcactgaagtcaagagacccaagactgtgagacataagtccctggacacagccctgctccagccccatgtggtggcccagagctcccaggaagttcaccatgcccactgcctgcatcaggccttctgtgcactgcacaagttccagcacctccatggccggccaccccagccctgggatcctgttgatgcagagactgtggtgggcctggcccgggacctggaaccactgaagcggacagaggaagagccactggaagagccactggatgaggccctagtgcggacagtcgccctaagcagtgcaggtgtcttgagccctatggtggccatgctgggtgcagtagctgcccaggaagtgctgaaggcaatctccaggaagttcatgcctctggaccagtggctttactttgatgccctcgattgtcttccggaagatggggagctccttcccagtcctgaggactgtgccctgagaggcagccgctatgatgggcaaattgcagtgtttggggctggttttcaggagaaactgagacgccagcactacctcctggtgggcgctggtgccattggttgtgagctgctcaaagtctttgccctagtgggactgggggccgggaacagcgggggcttgactgttgttgacatggaccacatagagcgctccaatctcagccgtcagttcctcttcaggtcccaggacgttggtagacccaaggcagaggtggctgcagcagctgcccggggcctgaacccagacttacaggtgatcccgctcacctacccactgaggcctacagagcccctgcctcagctgcagcttctgaggatgccccctaccctgtctgtaccgtgcggtacttccctagcacagccgagcacaccctgcagtgggcccggcatgagtttgaagaactcttccgactgtctgcagagaccatcaaccaccaccaacaggcacacacttccctggcagacatggatgagccacagacactcaccttactgaagccagtgcttggggtcctgagagtgcgtccacagaactggcaagactgtgtggcgtgggctcttggccactggaaactctgctttcattatggcatcaaacagctgctgaggcacttcccacctaataaagtgcttgaggatggaactcccttctggtcaggtcccaaacagtgtccccagcccttggagtttgacaccaaccaagacacacacctcctctacgtactggcagctgccaacctgtatgcccagatgcatgggctgcctggctcacaggactggactgcactcagggagctgctgaagctgctgccacagcctgacccccaacagatggcccccatctttgctagtaatctagagctggcttcggcttctgctgagtttggccctgagcagcagaaggaactgaacaaagccctggaagtctggagtgtgggccctcccctgaagcctctgatgtttgagaaggatgatgacagcaacttccatgtggactttgtggtagcggcagctagcctgagatgtcagaactacgggattccaccggtcaaccgtgcccagagcaagcgaattgtgggccagattatcccagccattgccaccactacagcagctgtggcaggcctgttgggcctggagctgtataaggtggtgagtgggccacggcctcgtagtgcctttcgccacagctacctacatctggctgaaaactacctcatccgctatatgccttttgccccagccatccagacgttccatcacctgaagtggacctcttgggaccgtctgaaggtaccagctgggcagcctgagaggaccctggagtcgctgctggctcatcttcaggagcagcacgggttgagggtgaggatcctgctgcacggctcagccctgctctatgcggccggatggtcacctgaaaagcaggcccagcacctgcccctcagggtgacagaactggttcagcagctgacaggccaggcacctgctcctgggcagcgggtgttggtgctagagctgagctgtgagggtgacgacgaggacactgccttcccacctctgcactatgagctgtgacaaggcagccaccctgtcacctagctcaatggagccccggatcccaagccctgcattgtaagcccacagtaggcactcaataaatgcttgttaaaggaaggcaaaaaaaaaa

SEQ ID NO: 629402 - DNA, 631 bp, Homo sapiens
cctgctcctgaggaggagatggatggattgacacgcgctggctgctgagccccaggcccaggaccccttcgctcacctgccccagagtacccttgtgttggatggatttaagcgccagtactcccatgaggacacactctctgtggcactgccatatttctgggagcactttgataaggacggctggtccctgtggtactcagagtatcgcttccctgagaactcactccgaccttcatgagctgccatctcatcactggatgttcccgcgactggaccagctgaggaagatgccctcgcccgtgtcatcccttttgggaccccaccatagccgctccctttctggagtctgggtcttccgaggcccaggagcttgcccttccgctgagtccacgaattggcacggtggactacgagtcatacaccactggcggaaactggagtcctggcacgcgaggagacccacgacgcctggttcgagagtacttttcctgggagggggccttcccgcacagtgggccaagccttccatcagggcacagatcttcaagtgaacatctcttgccatcacctagctgcctgcacctgcccttcagggagatgggggtcattaaaggaaactgaaccttga

SEQ ID NO: 629403 - DNA, 3256 bp, Homo sapiens
gctttcttttctccagaggagccaggaagagagctgtgaccagcagcgtcccttattcgcttggccttggttcctgtttgcactggctacagcagggcactggcccctactgtcaccgccacctacacaaagaccctatctctgagcgctgcagcctactgttcagccccaggtttgaggatggatgccctggacgcttcgaagctactggatgaggagctgtattcaagacagctgtatgtgctgggctcacctgccatgcagaggattcagggagccagggtcctggtgtcaggcctgcagggcctgggggccgaggtggccaagaacttggttctgatgggtgtgggcagcctcactctgcatgatccccaccccacctgctggtccgacctggctgcccagtttctcctctcagagcaggacttggaaaggagcagagccgaggcctctcaagagctcttggctcagctcaacagagctgtccaggtcgtcgtgcacacgggtgacatcactgaggacctgctgttggacttccaggtggtggtgctgactgctgcaaagctggaggagcagctgaaggtgggcaccttgtgtcataagcatggagtttgctttctggcggctgacacccggggcctcgtggggcagttgttctgtgactttggtgaggacttcactgtgcaggaccccacagaggcagaacccctgacagctgccatccagcacatctcccagggctcccctggcattctcactctgaggaaaggggccaatacccactacttccgtgatggagacttggtgactttctcgggaattgagggaatggttgagctcaacgactgtgatccccggtctatccacgtgcgggaggatgggtccctggagattggagacacaacaactttctctcggtacttgcgtggtggggctatcactgaagtcaagagacccaagactgtgagacataagtccctggacacagccctgctccagccccatgtggtggcccagagctcccaggaagttcaccatgcccactgcctgcatcaggccttctgtgcactgcacaagttccagcacctccatggccggccaccccagccctgggatcctgttgatgcagagactgtggtgggcctggcccgggacctggaaccactgaagcggacagaggaagagccactggaagagccactggatgaggccctagtgcggacagtcgccctaagcagtgcaggtgtcttgagccctatggtggccatgctgggtgcagtagctgcccaggaagtgctgaaggcaatctccaggaagttcatgcctctggaccagtggctttactttgatgccctcgattgtcttccggaagatggggagctccttcccagtcctgaggactgtgccctgagaggcagccgctatgatgggcaaattgcagtgtttggggctggttttcaggagaaactgagacgccagcactacctcctggtgggcgctggtgccattggttgtgagctgctcaaagtctttgccctagtgggactgggggccgggaacagcgggggcttgactgttgttgacatggaccacatagagcgctccaatctcagccgtcagttcctcttcaggtcccaggacgttggtagacccaaggcagaggtggctgcagcagctgcccggggcctgaacccagacttacaggtgatcccgctcacctacccactggatcccaccacagagcacatctatggggataactttttctcccgtgtggatggtgtggctgctgccctggacagtttccaggcccggcgctatgtggctgctcgttgcacccactatctgaagccactgctggaggcaggcacatcgggcacctggggcagtgctacagtattcatgccacatgtgactgaggcctacagagcccctgcctcagctgcagcttctgaggatgccccctaccctgtctgtaccgtgcggtacttccctagcacagccgagcacaccctgcagtgggcccggcatgagtttgaagaactcttccgactgtctgcagagaccatcaaccaccaccaacaggcacacacttccctggcagacatggatgagccacagacactcaccttactgaagccagtgcttggggtcctgagagtgcgtccacagaactggcaagactgtgtggcgtgggctcttggccactggaaactctgctttcattatggcatcaaacagctgctgaggcacttcccacctaataaagacacacacctcctctacgtactggcagctgccaacctgtatgcccagatgcatgggctgcctggctcacaggactggactgcactcagggagctgctgaagctgctgccacagcctgacccccaacagatggcccccatctttgctagtaatctagagctggcttcggcttctgctgagtttggccctgagcagcagaaggaactgaacaaagccctggaagtctggagtgtgggccctcccctgaagcctctgatgtttgagaaggatgatgacagcaacttccatgtggactttgtggtagcggcagctagcctgagatgtcagaactacgggattccaccggtcaaccgtgcccagagcaagcgaattgtgggccagattatcccagccattgccaccactacagcagctgtggcaggcctgttgggcctggagctgtataaggtggtgagtgggccacggcctcgtagtgcctttcgccacagctacctacatctggctgaaaactacctcatccgctatatgccttttgccccagccatccagacgttccatcacctgaagtggacctcttgggaccgtctgaaggtaccagctgggcagcctgagaggaccctggagtcgctgctggctcatcttcaggagcagcacgggttgagggtgaggatcctgctgcacggctcagccctgctctatgcggccggatggtcacctgaaaagcaggcccagcacctgcccctcagggtgacagaactggttcagcagctgacaggccaggcacctgctcctgggcagcgggtgttggtgctagagctgagctgtgagggtgacgacgaggacactgccttcccacctctgcactatgagctgtgacaaggcagccaccctgtcacctagctcaatggagccccggatcccaagccctgcattgtaagcccacagtaggcactcaataaatgcttgttaaaggaaggcaaaaaaaaaa

SEQ ID NO: 629404 - DNA, 601 bp, Homo sapiens
acaaatggaacagacacttgagtctgatggttctgcaggaattgcagtgcggctaccaagggaaggcaatatccaacctgactaaggagtgctttccataaactttcagagaacatggtgcccaggtgtagggttactggccgacgtcagccaacaggccaagtaaggatagtaaacaagtacgggtaatccttctgatatggtttcgctctgtgtccccagccaactctcatttggaattgtaatccccacgtgtcaggatagggtctggtgggaggtgattgcatcatggaggcggacttcccccttgctgtatatgtgacagtgagttctcacaagatctggttgtttgcaagtgtgtggcacttccccctttgctcgctctctcttctgctctgccattgtgaagacatgcgtgcttccccatcaccttccaccatgatagtaagtttcctgaggcctcccagtcatgcttcctgtaaagcctacagtcaattaaacctcttttcttcataaattacgcagtctcaggtagttctacatagctagtgtgagaatggataataaactttcttagtttccaagaaatacactctaaaga

SEQ ID NO: 629405 - DNA, 2814 bp, Homo sapiens
ccctatctctgatctcccaacactgcagcctttagagtagagactggttccatggaagtgccaggcacacatcctggggactcctgctacaccccgacccctcagatctgtgctggaagctgcactcagattagtgaagcctcctggactgctgtctggtacttgggcatcctctggtggtgctgtgcaggctggcagcagggccaggccttcccacccaggcttctgcttcctcttctgtggaacagggtggatggagggtggctggaaggatttgagtcaggagtagagctcaggctggggctactatgcccacagagtcctaccaacaggttgatgcagagactgtggtgggcctggcccgggacctggaaccactgaagcggacagaggaagagccactggaagagccactggatgaggccctagtgcggacagtcgccctaagcagtgcaggtgtcttgagccctatggtggccatgctgggtgcagtagctgcccaggaagtgctgaaggtgggcagaggcataggtgtggggggtactgggaagatgtggagatcagtgtgtgtgtcagagggcacccagcgctagagagcagccctggagccttcaccaacctgggtgaagcctccagccaggatctgagggggggtcaggaggtggcaggagtgcccagcctgaagtgctgcccctaggcaatctccaggaagttcatgcctctggaccagtggctttactttgatgccctcgattgtcttccggaagatggggagctccttcccagtcctgaggactgtgccctgagaggcagccgctatgatgggcaaattgcagtgtttggggctggttttcaggagaaactgagacgccagcactacctcctggtgggcgctggtgccattggttgtgagctgctcaaagtctttgccctagtgggactgggggccgggaacagcgggggcttgactgttgttgacatggaccacatagagcgctccaatctcagccgtcagttcctcttcaggtcccaggacgttggtgtgagtgctgacccctctccacactcctgcatcccagaccgtcctcccatacagcttcccacccaacatcttcctgccttcttcccagagacccaaggcagaggtggctgcagcagctgcccggggcctgaacccagacttacaggtgatcccgctcacctacccactggatcccaccacagagcacatctatggggataactttttctcccgtgtggatggtgtggctgctgccctggacagtttccaggcccggcgctatgtggctgctcgttgcacccactatctgaagccactgctggaggcaggcacatcgggcacctggggcagtgctacagtattcatgccacatgtgactgaggcctacagagcccctgcctcagctgcagcttctgaggatgccccctaccctgtctgtaccgtgcggtacttccctagcacagccgagcacaccctgcagtgggcccggcatgagtttgaagaactcttccgactgtctgcagagaccatcaaccaccaccaacaggcacacacttccctggcagacatggatgagccacagacactcaccttactgaagccagtgcttggggtcctgagagtgcgtccacagaactggcaagactgtgtggcgtgggctcttggccactggaaactctgctttcattatggcatcaaacagctgctgaggcacttcccacctaataaagtgcttgaggatggaactcccttctggtcaggtcccaaacagtgtccccagcccttggagtttgacaccaaccaagacacacacctcctctacgtactggcagctgccaacctgtatgcccagatgcatgggctgcctggctcacaggactggactgcactcagggagctgctgaagctgctgccacagcctgacccccaacagatggcccccatctttgctagtaatctagagctggcttcggcttctgctgagtttggccctgagcagcagaaggaactgaacaaagccctggaagtctggagtgtgggccctcccctgaagcctctgatgtttgagaaggatgatgacagcaacttccatgtggactttgtggtagcggcagctagcctgagatgtcagaactacgggattccaccggtcaaccgtgcccagagcaagcgaattgtgggccagattatcccagccattgccaccactacagcagctgtggcaggcctgttgggcctggagctgtataaggtggtgagtgggccacggcctcgtagtgcctttcgccacagctacctacatctggctgaaaactacctcatccgctatatgccttttgccccagccatccagacgttccatcacctgaagtggacctcttgggaccgtctgaaggtaccagctgggcagcctgagaggaccctggagtcgctgctggctcatcttcaggagcagcacgggttgagggtgaggatcctgctgcacggctcagccctgctctatgcggccggatggtcacctgaaaagcaggcccagcacctgcccctcagggtgacagaactggttcagcagctgacaggccaggcacctgctcctgggcagcgggtgttggtgctagagctgagctgtgagggtgacgacgaggacactgccttcccacctctgcactatgagctgtgacaaggcagccaccctgtcacctagctcaatggagccccggatcccaagccctgcattgtaagcccacagtaggcactcaataaatgcttgttaaaggaaggcaaaaaaaaaa

SEQ ID NO: 629406 - DNA, 319 bp, Homo sapiens
  misc_feature (251)..(251): n is a, c, g, or t
attcgcggccgcgtcgacgcggtagctcatgcctataatcccagcactgtgagaggccaaggcgcatggatcacttaaggtcaacagttcgagactagcccaataaacatggtgaaaccccacctctactaaggatacaaaaattagccaggcatggtggcgggcgcctgtaatcccagctactcgggaggctgaggcgggaggattgcttgaacctggggggtggaggttgcagtgagccaagatcacanggaagagtctttcctgtccctgggcaacagggaagactccgtctcaaaaaaaaagtcgacgcggccgc

SEQ ID NO: 629407 - DNA, 1412 bp, Homo sapiens
tctcctgaatgcagcctgctgaggcacttcccacctaataaagtgtgtggctaggggttgggacgctgggggctcagggggaccagactgagcccagcagcttctacttacctacctaggtgcttgaggatggaactcccttctggtcaggtcccaaacagtgtccccagcccttggagtttgacaccaaccaagtgagtgggattctgtagggagctccaagatagagatgtggcccctcagagcagaggtaggcatttctgcattctgcagagatgcacagatgcccagagagagccatgcttgtgcatatatgggtgtctacatgtgaggcaaaggcaggcactcaaacagatccacaaatggacagtgacccccaccccatgcacccatgcctctgttcctgctcttggtctggctgcaggacacacacctcctctacgtactggcagctgccaacctgtatgcccagatgcatgggctgcctggctcacaggactggactgcactcagggagctgctgaagctgctgccacagcctgacccccaacagatggcccccatctttgctagtaatctagagctggcttcggcttctgctgagtttggccctgagcagcagaaggaactgaacaaagccctggaagtctggagtgtgggccctcccctgaagcctctgatgtttgagaaggatgatgacagcaacttccatgtggactttgtggtagcggcagctagcctgagatgtcagaactacgggattccaccggtcaaccgtgcccagagcaagcgaattgtgggccagattatcccagccattgccaccactacagcagctgtggcaggcctgttgggcctggagctgtataaggtggtgagtgggccacggcctcgtagtgcctttcgccacagctacctacatctggctgaaaactacctcatccgctatatgccttttgccccagccatccagacgttccatcacctgaagtggacctcttgggaccgtctgaaggtaccagctgggcagcctgagaggaccctggagtcgctgctggctcatcttcaggagcagcacgggttgagggtgaggatcctgctgcacggctcagccctgctctatgcggccggatggtcacctgaaaagcaggcccagcacctgcccctcagggtgacagaactggttcagcagctgacaggccaggcacctgctcctgggcagcgggtgttggtgctagagctgagctgtgagggtgacgacgaggacactgccttcccacctctgcactatgagctgtgacaaggcagccaccctgtcacctagctcaatggagccccggatcccaagccctgcattgtaagcccacagtaggcactcaataaatgcttgttaaaggaaggcaaaaaaaaaa

SEQ ID NO: 629408 - DNA, 250 bp, Homo sapiens
  misc_feature (8)..(8): n is a, c, g, or t
  misc_feature (14)..(14): n is a, c, g, or t
  misc_feature (17)..(17): n is a, c, g, or t
  misc_feature (33)..(33): n is a, c, g, or t
  misc_feature (35)..(35): n is a, c, g, or t
  misc_feature (38)..(39): n is a, c, g, or t
  misc_feature (56)..(56): n is a, c, g, or t
  misc_feature (73)..(75): n is a, c, g, or t
  misc_feature (94)..(95): n is a, c, g, or t
  misc_feature (106)..(106): n is a, c, g, or t
  misc_feature (126)..(126): n is a, c, g, or t
  misc_feature (135)..(135): n is a, c, g, or t
  misc_feature (149)..(150): n is a, c, g, or t
  misc_feature (154)..(154): n is a, c, g, or t
  misc_feature (201)..(203): n is a, c, g, or t
  misc_feature (228)..(228): n is a, c, g, or t
  misc_feature (240)..(240): n is a, c, g, or t
agctgcgnttcccngangtagactctacgatananacnntcatgtaggagtcagantcagctcaaacattttnnncagagataagatgggaaannacatcacattnggggaaccaccaggattctnacattcttngtggtgtgtatttnngggntctctactgtgcagctccagagagacgtgaacatgtgaacactcaannngagcaaaagccttccatgattacantgttgcagcagntcccagtcca

SEQ ID NO: 629409 - DNA, 285 bp, Homo sapiens
  misc_feature (15)..(15): n is a, c, g, or t
  misc_feature (77)..(77): n is a, c, g, or t
  misc_feature (79)..(79): n is a, c, g, or t
  misc_feature (91)..(91): n is a, c, g, or t
  misc_feature (116)..(116): n is a, c, g, or t
  misc_feature (259)..(259): n is a, c, g, or t
ctttagaagagctanctgctgcggcgtcggagaggctcctgggaaactccacggcccagggactttcgaaagcagangnggaccctcgacngcgctagtctgcgagtgagcctcanccggcacctgttcctccagcgccgccgccttcccacccctcggacccgcgccgctcgccggcccgttcctgcgatgaatccggccctaggaaccagacggacgtggcgggcctgttcctggccaacagcagcgaggcgctggnagcgagccgtgcgcttgcttgcaccc

SEQ ID NO: 629410 - DNA, 824 bp, Homo sapiens
cgggggcataatgtgtcggcggacaacactaactcaaacctttattttatctccccgaccagcgcgcccctacgcgggggggtgctccgcgcggatggggtgcgcccatcccaaaacaaaatttttgttgcgcagcgagacagcgagccgcacgcgcaaaggaccgatcgaatacaacaccacgacatcacaagacgccgaggcactaagccccgtataccaccctcgcctgacggccgggaacgtcgcaagcacttcccgcagaggacgagccacacggtacagacacccgcgaagccggcacgcagctcacctacgaacaggctaaaaggagcaccaccccgtcaactgcgaccacaacaacgcgggcaagaatgtacacgcggcgagcgcgaacaaacccaacacgagaccaggcgaatagccaggctcgtccaaacatacgacacgcgcaggctacaacgccaaagagaggcgcacacgagaccccgctaacaccccctggcgacagtccaccgggctacggccacaaccacgaaacaggctctttgcacacctaggaaataaacactcgcgagagagaggcaacaacaagtcagcgacccagacgcacggcctaacacggacccccacccaattacagaaggcgggcccaagcaccaccagcgccattaccccgaaggaaacagacacaaacggcacgcgacacgccaggcgcgcccggcgcgcgaacgcgcccatgcgggattcaaacacctacgagcaggcccgcgagccacgggcgggcccaactagatggccaaactagggcgacaaaccgcgcc

SEQ ID NO: 629411 - DNA, 1182 bp, Homo sapiens
tctcctgaatgcagcctgctgaggcacttcccacctaataaagtgtgtggctaggggttgggacgctgggggctcagggggaccagactgagcccagcagcttctacttacctacctaggtgcttgaggatggaactcccttctggtcaggtcccaaacagtgtccccagcccttggagtttgacaccaaccaagacacacacctcctctacgtactggcagctgccaacctgtatgcccagatgcatgggctgcctggctcacaggactggactgcactcagggagctgctgaagctgctgccacagcctgacccccaacagatggcccccatctttgctagtaatctagagctggcttcggcttctgctgagtttggccctgagcagcagaaggaactgaacaaagccctggaagtctggagtgtgggccctcccctgaagcctctgatgtttgagaaggatgatgacagcaacttccatgtggactttgtggtagcggcagctagcctgagatgtcagaactacgggattccaccggtcaaccgtgcccagagcaagcgaattgtgggccagattatcccagccattgccaccactacagcagctgtggcaggcctgttgggcctggagctgtataaggtggtgagtgggccacggcctcgtagtgcctttcgccacagctacctacatctggctgaaaactacctcatccgctatatgccttttgccccagccatccagacgttccatcacctgaagtggacctcttgggaccgtctgaaggtaccagctgggcagcctgagaggaccctggagtcgctgctggctcatcttcaggagcagcacgggttgagggtgaggatcctgctgcacggctcagccctgctctatgcggccggatggtcacctgaaaagcaggcccagcacctgcccctcagggtgacagaactggttcagcagctgacaggccaggcacctgctcctgggcagcgggtgttggtgctagagctgagctgtgagggtgacgacgaggacactgccttcccacctctgcactatgagctgtgacaaggcagccaccctgtcacctagctcaatggagccccggatcccaagccctgcattgtaagcccacagtaggcactcaataaatgcttgttaaaggaaggcaaaaaaaaaa

SEQ ID NO: 629412 - DNA, 173 bp, Homo sapiens
  misc_feature (5)..(5): n is a, c, g, or t
  misc_feature (33)..(33): n is a, c, g, or t
  misc_feature (125)..(125): n is a, c, g, or t
  misc_feature (142)..(142): n is a, c, g, or t
  misc_feature (149)..(149): n is a, c, g, or t
gagtnaggcgtggtggtgcgtgcatctagtccnaactatttgggaggctgaggcaggaggatcgcttgagcccaggagtttaaaggctgcagtgccctgtggttgcacctgtgaataactgcacntccaccctgggcaacantagcganaccgtcatctccaaaaaagaaaac

SEQ ID NO: 629413 - DNA, 351 bp, Homo sapiens
ccagaatatgccctggctatattcagtgcaaagttctgaaacagttgagagaacttggaacagcagaaatacgatgataagattcagcgaagatatcaaatttcttttgacacaaacttggagagagtgatcaggaccttagttcatttgctgaatacagttcagagcttaaatctgacaaggttgaaatggagtcctgtacacaaatctcagacatttaggagcacgagacctgctgtgaggttcactgcgacgacttctgactctcttgaacactcttgaccaaccttttggacgtgtcagatgatccccaagtcttagctgttgctgctcacgactgttagcgagtcg

SEQ ID NO: 629414 - DNA, 118 bp, Homo sapiens
  misc_feature (42)..(42): n is a, c, g, or t
  misc_feature (47)..(47): n is a, c, g, or t
  misc_feature (79)..(79): n is a, c, g, or t
  misc_feature (105)..(106): n is a, c, g, or t
gatctccataattttaagatactctatgttaaactatttttnaagtnctctttttacatcacgtctgaaatgcacgagngtggcggtttctgtttcactggtttnnttgttcattttt

SEQ ID NO: 629415 - DNA, 1050 bp, Homo sapiens
tgttaggaaaattacgactggaatgtgctgaccttctagaaacaagagagagtggtgctccgtgcacccgactctgttctctttcctttgggtggtcagcatttcccacgtcttcctgcccaaggaggcaaaatccacagagcagctggcaatctggcccaaacagccgatttacttgctcccctacccagtgcacataccatctcctgtaccactgagcccaacacaaggccctgtcagcccaaccactgatgcacttcggtttaccacacattggccacatgcaaaatcaggcaggctggttccaaattcgcaattctaccacatgccagagctgccaagctgttgtcatcatcgctgcgccaaccatataacataacaggcaggcatgtgcaaaaattgctctcaccatcatgctcccagggctttcagcattcatcgggagcacccaccctccattggcaggcaattgccattcagcgggtacagaacaagaacttgaatactgcacttgttcaccatggacatcttccacagacacttcagaggcgtgctccatacgacacattcacccaacacgtccttaccgcgggcaccaatgcacgcctcactgcaagccaaactacacccgagactcacatgatcccataccttgaatgagacacctgacacggcccttgattcacttcataccagacgatactcccagaagcccacaacaagaacttcccaaatctggcacgaacaggaggcactcacatttgaaactccattggcattagccagtgcgggaaaaggtctgacggctaaaacgagtaaacgagaccgtacgatggactacccgagaagccctataaaacacaagaattatcaccagttactgcacacaagttctaaacaacataacgccttctaccactgccacgaaatccagacaaaaacttattaccacactactaaaaaaacacaatacacaaataacaaagtatttacataacactacagacctacactgtgacataatatgctaacaaacataacaaacatcct

SEQ ID NO: 629416 - DNA, 123 bp, Homo sapiens
  misc_feature (45)..(45): n is a, c, g, or t
tcggtaccgcttctctcccgcttctgaccgaagtgcggcgtgcgncaccatgacccgcgtaaatatcatcacaggcctcggcccggtactgcagattgccgaaggctgcgcgcaaagcggtgg

SEQ ID NO: 629417 - DNA, 466 bp, Homo sapiens
aaatggtggttagtaagagtcagccttataaaatttacatccacactgtttcacagcgaagattgctctctccaaaacatagccatcaaaagcagcaaacaaaccctatattacatccatttgacataatttcagccaaacatatattttgctggaaatgattaaatggtgagtgtgtcaaatccatctttttgaaaattgttgagtgtgaaaatccggctgattatagattctttaattacaaaaggatgagtatgatatagaagtcgtctatatatggacaggaagaaagtgatactattgcactttggctgttataacttaatctgtgacatggtctcaatactgagcatgctttgttgtggtgctgttgttgtggctgtagtgtagtgtgtgtgtgtagtctcatcagtatgctaactgtcctggcccgtcctcgtacaagtaggaatctaaaaatctattc

SEQ ID NO: 629418 - DNA, 292 bp, Homo sapiens
  misc_feature (45)..(45): n is a, c, g, or t
  misc_feature (63)..(63): n is a, c, g, or t
  misc_feature (209)..(209): n is a, c, g, or t
tggcggagtaaccttgataaaatagattttcctttaaaaaaattnataaatttaaaaaaatcnaatttttaaaaaattaaaaaatgttaaatgtcagagtagttctcaaactttttggtatcagaacccttttagacactcagcaattacagaggatcttaaagaggtcttgttcatgtgggttatatttatccatattcaccatattnaaaattaaaactgataaaattttaaaatgtttactaattgaaaaaggtaagcctatcacatgttaacatgaaaacacattttt

SEQ ID NO: 629419 - DNA, 149 bp, Homo sapiens
tcgccgtgaacttctttgacttatgtccccactaaaacacaacaaaacaacttttactgccttccacattaattagcattttcttgcagttgtttcatggcatttctttaaagatgccctaagtgttgaagaagagtttgcaaatgcaa

SEQ ID NO: 629420 - DNA, 377 bp, Homo sapiens
gtgtcattatacacagatcagagaacagcttttctgtgctccttgcttccagcctcagaggttcttatagacccaggctgggagaccccaggtctccctagtagcccctgtgagcctagcagggacactgcttaggggaaggggggtaaggaaaggtaaggtagccgtccacactactactagcagctactgctggactactagtgcgcaaagcagggatgagcttgtaggcccgccccagccccatcctctacacctatgtagggtataaaagagaagctcccgctcatcacatacctcttactacatccactagcccctactaacctatactctctaaagcttagggagtatggggagcagcaatccccccaggg

SEQ ID NO: 629421 - DNA, 229 bp, Homo sapiens
ctagccttccctagtttctgctactgaccagttcatccagctttcacacatgttgttgctgctattgtggtgccgcctcaggttagtgggctctcagagacctcccagtttccgctactgaccagttcatccagctttccacacagttgttgctgactattgtgtgtgcgactcagagttaggggctctcagccatctctaaactctggcctcgctgctcttggaatag

SEQ ID NO: 629422 - DNA, 778 bp, Homo sapiens
  misc_feature (41)..(41): n is a, c, g, or t
  misc_feature (71)..(71): n is a, c, g, or t
  misc_feature (81)..(81): n is a, c, g, or t
  misc_feature (126)..(126): n is a, c, g, or t
  misc_feature (147)..(147): n is a, c, g, or t
  misc_feature (203)..(203): n is a, c, g, or t
  misc_feature (253)..(253): n is a, c, g, or t
  misc_feature (256)..(258): n is a, c, g, or t
  misc_feature (281)..(281): n is a, c, g, or t
  misc_feature (287)..(287): n is a, c, g, or t
  misc_feature (292)..(293): n is a, c, g, or t
  misc_feature (312)..(312): n is a, c, g, or t
  misc_feature (331)..(331): n is a, c, g, or t
  misc_feature (333)..(333): n is a, c, g, or t
  misc_feature (336)..(337): n is a, c, g, or t
  misc_feature (341)..(341): n is a, c, g, or t
  misc_feature (352)..(352): n is a, c, g, or t
  misc_feature (358)..(358): n is a, c, g, or t
  misc_feature (362)..(362): n is a, c, g, or t
  misc_feature (377)..(377): n is a, c, g, or t
  misc_feature (383)..(383): n is a, c, g, or t
  misc_feature (390)..(390): n is a, c, g, or t
  misc_feature (397)..(397): n is a, c, g, or t
  misc_feature (399)..(399): n is a, c, g, or t
  misc_feature (403)..(403): n is a, c, g, or t
  misc_feature (453)..(454): n is a, c, g, or t
  misc_feature (457)..(457): n is a, c, g, or t
  misc_feature (475)..(475): n is a, c, g, or t
  misc_feature (477)..(478): n is a, c, g, or t
  misc_feature (480)..(481): n is a, c, g, or t
  misc_feature (592)..(592): n is a, c, g, or t
  misc_feature (594)..(594): n is a, c, g, or t
  misc_feature (762)..(762): n is a, c, g, or t
atgctttgcatttacatcaaggacacatttattctaatggnataaaacagtcacacacaagagaccaagtncatgtttttnaaaaatgactacatgtttcacctggtcctatttttgctatttggnccatacttttaagtgaattgntcttacatacatgttaagtctgatttatctccccacatttttaaacactaaatgangcttctcacaatttctaattataaacaaaaggctgaaaacagtatggganacnnngtttcggaacagagagaagtggngtgagnggggnnccctctatgggtcatctgngagggacattttactcagngnggnnaacntttctgatctnggggtnagtntcccactcactttgngagggnccactcnttctgcngngagncctacaagtctttctggtctcaattgcaaagtacgtgaaaatgtgtatgnnagntctaaaagctaaatattngnntnnggctaattgaaatcaaaattgtgtgctggtctaaatatacatcttcggcttcttcctttttagtaagtatttttatttcagatgtatttaaaaataacttacatttttagngngctttatggtcaatgactgtaaagttgaaactcaaatgagtcagtttaaaatttttgtctcatttgattctattgaaattttaatcacctactactttaatcaagttattcatgaggtaagtttcagcttaaaaaaaaaatcatccacaaagataaccatttcaagantacacaaatcataatt

SEQ ID NO: 629423 - DNA, 571 bp, Homo sapiens
  misc_feature (435)..(435): n is a, c, g, or t
  misc_feature (453)..(453): n is a, c, g, or t
  misc_feature (470)..(470): n is a, c, g, or t
  misc_feature (498)..(498): n is a, c, g, or t
  misc_feature (524)..(524): n is a, c, g, or t
  misc_feature (536)..(536): n is a, c, g, or t
  misc_feature (546)..(546): n is a, c, g, or t
aaaaggaagtctcggggctggaagaagacggagctgaaggctgccccacaaattaaactctacctttacacttctaccacagactattaagactgatgatcagtataagtatatactggtggacaccaccggtcctccctcttgtgttttggaaacggactttacctgtgtttcaagctaccttaatgtcactgctcttgaggtttctgcgctttgaaagggatttctgtgtttttaaagagaatagtttgtagtatccgcatagaagcagtccttgagctgtcctatagaagggtaatttgatacggaccttgtggctatatttttataatggtaatttttaaccgtctgagctgggtggtttgcctcaacaacataaacttcctaatgatcagcgctagatgattgaatagtaaatgccttaataatccaacnagtgcacttgaacatttnaaaccttaaggggagtnaattaaagaagttattaataatgttttnaaaatagccgcagatattacctaatnattgaataatgnataattaaanttccctccgctttgtaagatgggca

SEQ ID NO: 629424 - DNA, 470 bp, Homo sapiens
ggctcacactgtgtacgagggttctatatgaatagacactgatacttgtagagtggaatagacagggtatctcgacaaattaggcgtatcttcctctcatctccttcacggaaccacagcacagctctatgcacttaacgagtgctgactcagaggcatcacctgcaactgcccgcttaacaatcggtaggttctcctggttagcctgaaacactgccctgtaacaaagacctagccatactggacagagcaagccagagtagctaaagtctatgtcacacgagacaccactactgatactctgtcgtatcagctatcatggattagatagatcaaaccacatgtgggccacatgtcaatccggttctgagtcagaattccagtattatcaaagcagatggtggacgtgaaccccaaggatctccaacagctcaaagtacttcactaagcagtttttccttgccatgcgt

SEQ ID NO: 629425 - DNA, 838 bp, Homo sapiens
  misc_feature (660)..(660): n is a, c, g, or t
gggtcgctgaaaatatttattcaaaaacagggattgaaaaaatctgtacagaagtgtctgctgctgaaaatggggccccgtggccaagtgccattcccccaggtacctggctagggcccccttttgggggtgcccccgtgaacaacgcccatgccatgttacattcccagtcaaacgtggtgttatcaaggtgggaatgcaggcaaaaaaattctgcgcaggttgggtggggagagaagaacgcctgggccccagttaacccaaggggccctccttcctctgatctcccacaaggtattgcagtaggccagagaacgccctagaggagtatggggagagtgctgtagattgaccacccgccaagtgggtgcggggccactatagcggagctctcctgtgggcatgcctccctgtgtgtatgtccaaggcacgagagcatgaggaaggatagggccccctgtgccctgtgggtgcttgcccgacaaggcttcaagacctcctgtgggcccaagaagaatgtgcgccccactgtctgcagaagaaaaggacaccctcccatgtagagagtggcacgggcagcgggcatagcaggggggtgccatctcacaatgcgacgtcctggggcggcggatacaaccgcgggccgttttcggggagacnccccagggggttggagacgctctctccctttgtgcgcagcgcgcgtatacgcggtgcacataacgcggccacgccccccctttcgtactagagtagctatcccttagcccattgcccgccatttgccctgtggttcacccccttcagaagatgtagggcccctcatagaatacggcgg

SEQ ID NO: 629426 - DNA, 1055 bp, Homo sapiens
tataagggttccccagcattcggcaaggttaggccaaagcccaatttcaaagaaatgggattaactcttaaagtaagggtattagagttacatgttattatttgaaaattatttattaacggggaggttggcaaagttattgggactatttaaaagagtccaaccacttgagatattcaaatttcagctgggtaagtcttacaatgtggggtcttagagctctacacagcagttgttgcggaggccccatctcggagggacacacagcgtgcgtttcacataactctgcggggttctatagacgagccctcacgagttatacactattctccgaatagagtggtggtctactctttaagacagagtctcccctctttttaaaggaactccacgaggggggaataaatcccctgagatcttctcacaacatctgtgttctccacagcatgtagtgtttcccacgaacacttactccgtggcggacgggggtggcagacaaagttctccccccagcagtctttgctgggctcagtgttcccgggagtttgtgggacactcaccacccaaatctctgtttcaatctttcaccgtgcgcaatcacgtggagtcaagcataagcgccgtggggccacaagttggggggccgattattccatattgtggcccctggtgggagttatcaccgcgaccttttttctaagaaggacaccgtggggtgtatccccacgtacaagtccctctactagtggtttaaaacaccccggcgtggacaaaacaccacggtggctggaaacaccctcatagtcgatctatcttccgtgggaagaaggcaaaaccgcgggtgggttatctaatccaagagggggtatcaacagacaacgttggggtgcgcacattccccccgggatgatggagggtaaaactattcccctcttgacgaagaacacttttgtggagcaaactacacagggctgttgttgaagcattccctattcggcggcaaaagcaccggaacacgttggttgtacagcgttaattgattgtgtaggggaaat

SEQ ID NO: 629427 - DNA, 793 bp, Homo sapiens
aaatttttttttttgggacagcttcaaggagatgttagcaatttcagatatactagccagtttaggtatgacttgggaagtgcagaaacagaaggatactgttagaaaatcctaacatgggtctcctgcatggtgtcacaccgggtctcacgtgcctttccttcccacagaccgtgaggtgtgaaagacgtgagaagtgtgaggagtttaccttgtggtggaatctgggtccacaatttctaggtgaaagtgtggaagtcaaccagaccaatgatggaattaaagtgtaaattccaacgagggctttcacagtccacagggttcaaagtgactgtgggtaacagaagtttattcttagacttaccgtgttatggtgacaggtgcatttaccgtggtccattttccaagcccaaacagccgtgtcagaaagcattcttttagcagaaaaccacatttacacttggtggcttaaagctccgtgaaatcgcatacctcctttaaagaaattatacagtgttagtgctcattacagtagggaacacattgttcatcctccaactacttggggaatgaatcccgactataccgggtacactagggagcctggagctgagctatcacggatggtggcctctccaagaaacaaaacagactacacagttggaggcaccctctgggggatcacaacggctacaaaacaaagacacacaacacaacaaacgcgcgagcaaacagaccacagggggggcgcaaccaaagacaaaaaaaaaatagccaccaaacgggacccccc

SEQ ID NO: 629428 - DNA, 223 bp, Homo sapiens
cccccccccttttttttccccccttaaaaaacccgggggcgcttccccccccgggttttttttttgggccgggggggggttcttttttttccccggggacccttttttccctttggcccttttttgggcccccttttacccctttttttcccaaaagccggggggggccgggccgggttttcccgggtttttttcccccccccccccccggggggggggggga

SEQ ID NO: 629429 - DNA, 123 bp, Homo sapiens
acaatcagctcggtaccctctggccatccaatgtacttcaaaatgattccatgtgtttagtccaggaagcaatagtaaggaagtcactatcaggtaggtgagaagcaggttgtggacttgttg

SEQ ID NO: 629430 - DNA, 520 bp, Homo sapiens
tctccccgggttgtttttccacacaagtattttaaaatcccctcctttaaaattttaacttttttgtttttttaaaaagggggttgttcataaaaaaaatattttttaacaatttacacggaattgggaaaaatttgtttttctccaaacttttaacaaaaatctcggtattgcccttttggggtggctcttagaaaccccctttgtttttctctattataagggccccttgctttttaaaatataccacacttttttttccgccagagaaaatataaagatccactcattaagttccttgccaccaataatatagataccacctctttcgggcgagggggcgttattcggtaatataaagaactaatacatttttgctttaatagagtcctatatcattttaatataccctagcgcgtgacatcattacgaaacttctcgctctttaataaattagtgtattataaatatcattagttgaggaaataataaatgggtatgatccttagacaaaaatata

SEQ ID NO: 629431 - DNA, 992 bp, Homo sapiens
  misc_feature (320)..(320): n is a, c, g, or t
ggccgctccggccgggctcgtggtgggggcagccccagcggcgtgcggcggcggcgtggtgctggctgaggccgcgcggacggcgcccgacagcagctggaggagctggtttgcctgacctgtgctggcgagccacttggcaggccatcctgtgctgctgggacgcagtgggacctggcagaactgcgcggcttgcgtcagtgagaacgccctggctgcgtgctcgagaacctggcggcttgaagcgcgagaactcgcaagcctcttccggtcagtgctttggcggctcccctggcgacaggcgtgcaactgggacgccncgctggagggccacgccggggtcccttgaagacggccaggcacgaagccggagtggctagaaggacagcggccagagaggacgaagccgggcaagccccagggcccttgaggggcccgactttgagaagcttggaaggccatgtaccgccgggcccttgctgcaagcttgcacctcgagcagcggggaccacgtcctgagcgggggaacaaggacggatgcaagcctcttacagggaaccccgaagtccggccttccggttcccggggaccttcgggagcccttcttgcgccccttggcttgtagcccgagggcctgctatgccgggtgaggaaggcggaagcctcgaagcgggggcccttccttccttccggttcccagggtacccccccgacctcgccgcaactgccctttggccgcgttccctttgcccggcgggattaccctttggagcttacggggtgcctttcccgggccccagccaggtgggacactttcccgggggtggcgggcttggcccatcccgctttgggtggacagggtcgagttggcgttgcaaggggccccttcaaggaccttccccacatttgtccgagttccccttgccttcttgcccccggggctaagtttcgccttggagcagaggggctaagcaaacaaccgcacgggcgca

SEQ ID NO: 629432 - DNA, 859 bp, Homo sapiens
gctggatgatgaggacgtagaggagctgaggggcagtcagagggaggcatggagatgcgggccatgcggcagcgtgaccgggaggcatggccggggcctgggcgcgcatgcgcgcgtgggctccgtggtatgacagcgatgaggaggacgaggagcgcgcctgcccgcaagcgccgcagggtggagcagggccacggatggacggtcggagtgatggacagaggatgatgattgaggagctatctgaatgaacgcttggagggattctcaaagtgcgcactcatgtgcgctgagatggtgtgagcgatgcgcggggcccccggctgtgaggatccatcatcgattcaagaacttcctgcgcactcacgtcgaccagtcacggcacatagcgtcttcagggagcgcattcagtgactatgtgctagaagtagaagcctgtgacgagcctggtggtgaactagtgagggaccttggcgaagcaggtagctagcgtgctggtcctatcgttcctgtactgtagggcaccggctggagctgcgtgctatgagtctttgatgaggctgcactgtggaggtggtactggccatgtaccccaagtactgacgcatcacaacgcatccagtgtccgcatctcccacctgcctctggtggagggagctcggctcgctgaggcagactgatcttgatagcagctgatccgacccagtggggtggtgacaatgcactgggttcctgcccaagtcaacatggtcactacaagtgcaaacagtgcaaatttcgtccctggggtcctttttgccaatcgcaaacgggaggtgaaacagggtcccggcctgattgcaatggccggaccttttag

SEQ ID NO: 629433 - DNA, 1567 bp, Homo sapiens
ggctgcgtctggaggggcccctgacttctccagcctggaccccgcagctttgcccaacaccagccccatgccccagcccaagtccaaaatgtttacagggagcctcctgaccagtccacccaaccccagccgcatcggaggccccaaaggaaaaagcacaagaagcgtgagacgccgaccattcctgcgacacaccacgagtccaccctgcgtcattctcgctagcctttttaacacaaacatgaacagtcaacaggcacaaaacaaacacaacactggcacaatctcaggaaacacttttatagagcaaacaactaaatatataacgacacctgctcaacgactccgcgtgaacacaagcaaagagggagcccacacgccgaaacgaagaaccccaccaccgaccaacaacggcgagcaaacaacccagcaccaccccgagcacaagagcagccacaccgcacaacagccacccaccacccccggacacacacaccaccgccaacgggccacaagacacacacacggcgacaagcacgcagcgcgacgcacccaacgagcacccacgcgcccaccgcaacgaacacacaccagccaagcgacgcaaacacaacacgcagaaccatgcacaccacgacccaccacccacacacccaccgagtcaaccgacaccgcaacaccgaaccaccccaacacaccacagcccgggccccccacagggagcagcacacaaccacaaccacacaccagcaagaggagccaccacaccgcgctaccacggcagcaagcccgtacacgaacacacacgccacgacgcgaccacacacgagccgcacgagcgcacgagacgacgccccaaccaccgcacgccggagagccacccgagcaccaccgagccaaccacaaacacagccagcgacgccccacaacgccaagacgccgacacaccccaccgaagaccacgacagaagagaaaacaaccgagagacagcgaacgaacaaaaagaacaacacccaaacaggacaagcaccccccgaacgacccaacccagcccgagcagcacgcgacccaacacactagggcggccacaaacgacacgccagaagcgaccccccaacccaacgagcacagcaaatagccgccaaagcaacgaccacgcacgcaccgaacgaccaacgcgcagcggacgcgcaccgccgaggccggcacgagtcgaagcagcgccacgcggcgaacgcccgccaatacgagacaacgagagccggagccgcgtacgacacacgaccggaccgacgaccaccgacgggcgacaaaacacacacaccgcccaacgcgaaagcagctcgacacccagcgcagcgacccacagcacacagcgcgcgacccgcactaccagccagcaagcacctaacgcagaaaagcgccgcacgcacacgccagacacaggcaccagagccgcgcaacgcgggacacagcgaagcagagagcacactcacgaacgcgagcagagagcggccgcaccgcgcaccaacgtacggcgagcaaccgcacccgcccgcgagcaga

SEQ ID NO: 629434 - DNA, 196 bp, Homo sapiens
  misc_feature (33)..(33): n is a, c, g, or t
  misc_feature (37)..(37): n is a, c, g, or t
  misc_feature (110)..(110): n is a, c, g, or t
  misc_feature (163)..(163): n is a, c, g, or t
  misc_feature (165)..(165): n is a, c, g, or t
acaccacccactcaggactcttccccatcatcntttncattgccacaccctagatccagcctcaggaactaacaagttttgagaaaagcaggtggtagagcagcagcttngtgctctcagcggtggctggctggcatttttctctagcgttgtggtgccaccntnccttctttgtcccaaggttataaggccttgt

SEQ ID NO: 629435 - DNA, 1008 bp, Homo sapiens
  misc_feature (151)..(151): n is a, c, g, or t
  misc_feature (155)..(155): n is a, c, g, or t
  misc_feature (175)..(175): n is a, c, g, or t
  misc_feature (182)..(183): n is a, c, g, or t
  misc_feature (211)..(211): n is a, c, g, or t
  misc_feature (217)..(217): n is a, c, g, or t
  misc_feature (222)..(222): n is a, c, g, or t
  misc_feature (230)..(230): n is a, c, g, or t
  misc_feature (232)..(233): n is a, c, g, or t
  misc_feature (237)..(238): n is a, c, g, or t
  misc_feature (245)..(245): n is a, c, g, or t
  misc_feature (247)..(247): n is a, c, g, or t
  misc_feature (250)..(250): n is a, c, g, or t
  misc_feature (260)..(260): n is a, c, g, or t
  misc_feature (279)..(282): n is a, c, g, or t
  misc_feature (284)..(287): n is a, c, g, or t
  misc_feature (289)..(292): n is a, c, g, or t
  misc_feature (294)..(294): n is a, c, g, or t
  misc_feature (296)..(296): n is a, c, g, or t
  misc_feature (305)..(305): n is a, c, g, or t
  misc_feature (310)..(310): n is a, c, g, or t
  misc_feature (326)..(326): n is a, c, g, or t
  misc_feature (356)..(356): n is a, c, g, or t
  misc_feature (372)..(372): n is a, c, g, or t
  misc_feature (376)..(378): n is a, c, g, or t
  misc_feature (381)..(381): n is a, c, g, or t
  misc_feature (391)..(392): n is a, c, g, or t
  misc_feature (411)..(413): n is a, c, g, or t
  misc_feature (420)..(420): n is a, c, g, or t
  misc_feature (475)..(475): n is a, c, g, or t
  misc_feature (489)..(489): n is a, c, g, or t
  misc_feature (542)..(542): n is a, c, g, or t
  misc_feature (562)..(562): n is a, c, g, or t
  misc_feature (564)..(565): n is a, c, g, or t
  misc_feature (581)..(581): n is a, c, g, or t
  misc_feature (604)..(604): n is a, c, g, or t
  misc_feature (608)..(608): n is a, c, g, or t
  misc_feature (615)..(615): n is a, c, g, or t
  misc_feature (628)..(628): n is a, c, g, or t
  misc_feature (632)..(632): n is a, c, g, or t
  misc_feature (639)..(639): n is a, c, g, or t
  misc_feature (729)..(729): n is a, c, g, or t
  misc_feature (732)..(732): n is a, c, g, or t
  misc_feature (735)..(735): n is a, c, g, or t
  misc_feature (739)..(739): n is a, c, g, or t
  misc_feature (746)..(746): n is a, c, g, or t
  misc_feature (760)..(760): n is a, c, g, or t
  misc_feature (799)..(799): n is a, c, g, or t
  misc_feature (818)..(818): n is a, c, g, or t
  misc_feature (833)..(833): n is a, c, g, or t
  misc_feature (992)..(992): n is a, c, g, or t
tgccgcgctgtccgcgttatctcctcccggtgagaaggaaccgcagtttccaccggcgaggagccagccctgtcccggtcagagaaagacgacgaggatacctgggagcgggcggcggccgggctgggccgcgccggtgcgggctggcgantctnctcctccgcttgctgctgtntctgggnnctgggtgccagcgctgaggggcttccancggacnggagncccccttncnnggcnnccctgcnanccntgccgggganggcggaagataacggttannnngnnnnannnntncnctggggtgnaaaangccgtagcagaaaganggaggcctcaaaaaatgtaaaaatcatccngctattaaagatcccnacannntantagactaatnnattgagaggaacatttttnnnacaagangttcctagcttggttttataaatatgcagagtactgatgaagattgtaggagccngaaggaatagaaanattttgtgaagacatttgtgttgaacctgaaaatattattatgttagttttancgtggaaattggaggctgananntggggattttttaccnaggaagaatggttaaagggaatnactncattacngtgtgactacccngaanagttacnaaacaaatttgactttttgcgctcacagttgaatgatatttcgtcatttaagaatatctacagatatgcctttgattttgcaagggatanagntcngagnagccttngatattgatactgntaaatctatgttagctcttctgcttggggaggacatggncactgttttcagtattttnccagtacctggagcnatcaaagtatcgtgttatgaacaaagatcaatggtacaatgtattagaattcagcagaacagtccatgctgatcttagtaactatgatgaagatggtgcttggcctgttcttcttgatgaatttgttgagtggcaaaaagtcgtcagacatcatagcanaactatgtaaagaaat

SEQ ID NO: 629436 - DNA, 133 bp, Homo sapiens
catatctgtcagtccgcaaagcagcactcgggcgaccgtcggcggcgtccaggcgcttggacttggcatacaactgcattgatctctccatcatgctacacaacgagcgcgcactatccgagctagaggagcg

SEQ ID NO: 629437 - DNA, 165 bp, Homo sapiens
  misc_feature (20)..(20): n is a, c, g, or t
  misc_feature (42)..(42): n is a, c, g, or t
  misc_feature (123)..(123): n is a, c, g, or t
  misc_feature (130)..(130): n is a, c, g, or t
  misc_feature (155)..(155): n is a, c, g, or t
ggaggggccacgtatgccanccttgaagggagaaggccagancacacaaacgctcatctgcccttccccctggggtactactctaccagcttgggaggaagcccagtagccagtaactgcatnccagtanccctctgtacctaataaagtatatntttctcacac

SEQ ID NO: 629438 - DNA, 136 bp, Homo sapiens
tgctgggattacagacgtgagccaccatgcccagacaaggcctctacttaaactgctcattcatttatcttacaagcatttttggtgtcttacaatgtgccagaaaccagtgatggccaacatgggcccaacatgg

SEQ ID NO: 629439 - DNA, 146 bp, Homo sapiens
agagaagcataattttccatagagtcatcagggaagacttctcataggaggtaatatttaaggagggccctgagagatgagaaggtacttatcacaggggaaatgtgcttgtgatggagggaactatatatgcaaaagcccagaga

SEQ ID NO: 629440 - DNA, 398 bp, Homo sapiens
tgtcacacgtccttctggggattcctgtcccttgtatctcttgaatcaggctcttagattcttctgcttcattccatcattgtaacctccttccacgactctcaaatccgtctccttctccatatctccactgccgtccctatgttcctctcctgctttggctctgcacggtacgagcaggtggtctctgtccagccaatgtgggccctttgcacactggtgtgagtgcttctaagtctcgttccagctctcagttcggcctctcccaatctccttgtgtcttcccacagcatgtgggaaaagactaggaggacggcactggggccacaaagataagtccattgtccctgcactccagggatctgacgcccgtggcccccggcatgagtataatgtgg

SEQ ID NO: 629441 - DNA, 711 bp, Homo sapiens
acacgttgagcccaacaaggagcgacgtgaggctgtgaagctgaaaattaccaaatacctgcggactgggcagaggagatcttcaactgccacctgcagcggctgctgagcagtggagccagccccagcgcgggtttcagcagcctgaggctccggcccattcgcacgctgagactctgccgtggagcacgctgaggggctgccaggtgtggtcaggtgcgtcatcgacgaacggtgcagctggtccagtgacccagagcaaccaagagggaccttatgtggtgaagagcctaccccaggtgaccacattgggtgacgcagggaagcgggctgaccatcatcccacacggaagtcaccctaacatgaacgaagcttgctacaggtacgtttcgttgagcgcggaggaacgataccagtacatttcccctggcaacccttgagaaggaccagtgttgccaagggaaagggcagcatccatacattgggatcccgccagccttgggctcgtacccccaagaggccgcaaacattcccccgggaaacagtttaacctgggagcgtacaagaccttcttggggctattccataaccccccaggggaagaaaggaatcgaaacggggcctacaagacattccaaaacgccacccaacactacaaaacacattccaattgaaacccccaagacgaaggagcatatctccacatccag

SEQ ID NO: 629442 - DNA, 156 bp, Homo sapiens
cagggatccctgatcgaggttctctgtggtcgcgtatgatagatagatattaattggtgtgatatttatatgtatcttatacgtatttttgcagttttctaagtgcagaaacagattgtggacattttaggtgattttttttgggtgtttccccca

SEQ ID NO: 629443 - DNA, 1155 bp, Homo sapiens
cagcggtttttatcaatgtggtggtccccttggatgtggggggggctcgtcccccccttgcaagggggtgccttgtgcacaccccccttgaacaacaaagtgtgtttattagggcgcagaccatttgccctgttttgtgtggggccccccctggggcgccaaaaaaccacccaatggtgtagtgtgccccccttaatacaggcgtgtccccggtgttgtttttccccacgaagactggggcagatatctaccccccgtgccaaagtgtggtctttagagagcgcggaatatggtgggtgagattttgttgaacaaggtcgcctttcacagaagagatgtggtggaagatggcgcccccgccaaaattttcgaggggggacaccccccagaaatatgtgggcgcgcccccacttcgccggcaaaaaagtagatgtggtgtttccgcccacaaaatgttaagagtgtataaaatatgtgcgagagtggtgaaatatctcagtgttattaagaagatccagcagagcgccgcaaatatatgcgccccaggggggaaaataaagattcttttagagggggtgatagcgcacagatgtcacacagggggattaaataaataatggtgtctcacccgggcgccaaacattcgcatatttgttgttctcccacggtgtgagaagagaggaggaacaaatttgtggaaaaagttgcccttaatgcgttttaaagagagtgttgccagctgtataaggataaatatttggatatagggggaaggggttttcccaccctcgcaacaatatatggtctcacgcctttttaaaacaaaaaatatggccgccctttctagatgagaaccccagaacatttagccagatagccaaatagcatggcgaaatacctgtcgcgtttttcacaattggtttatttggaataagatgtcgcacccgatatccccgccacagagaccaggtgctgtgagaatgggtaaagaggcgacatcatattgggttcccctgacatttttttgccctttgaataattatccaccaaaatttataaaattccaaaaggggttgaggggaatttctttaaaagggaaaaaaagaggccccctttgcaaattaaataaggtccgggaaacccccctggtgttta

SEQ ID NO: 629444 - DNA, 221 bp, Homo sapiens
tcagctgctagcacggctcgtgcacagagtgtatttcccgtacctggtggtccatatagcagagacagccttttggaggtattattcctacacgctgaaataactctgggttagtaagaggtaatatctatacacctctacttaattcccgagatctgttctgtatagccctccaatctacagaataagaaacattcccagggtccatgctgacccatctt

SEQ ID NO: 629445 - DNA, 1035 bp, Homo sapiens
  misc_feature (568)..(568): n is a, c, g, or t
tgcgtcaggtccgggctcctggacttcgtccttatcccgagtccctggaggtggggagaaaagtggaagaactggccagagagtctggaagatttgggttctggtccatggcttgtgccatgtgaactcacgtgtgaccttgaggatcttgtgactgtgaaatgacatttccccaagatgacttcaatgtttcacgccagtcaataaatctgtacaccccacaacggtgccttgggcagaaggagggctgaacttctggtttaaaggggggtttttggtccaggcctagggaaacgcggccttgcggattccgtcttaaatacccagtggcgttccagggctttcccacgcggttgggggaatcccctcgaaggccccgggttggcgaggaactcacgttagaaacaagtgggcctagggaaagaccctttggggggggggcattggggggaaccctgtattagggctggccaacacctatatccctccactttttccactcagaaaattttggggtggggtctcaaaatcccaaaacgctaggggtcatttggacactacggaattnaacctgcaccttggtctttgaacctgtttgcgtgactcaggtcggacaccgtggatcacctgcccttggcattaccatggggccttccccggagctctaaacccccccttttgaaacggggggccaaagcgggcctttattgtgcccaacatccattaggagactccctcagggggcctccccattttggctggcctttggtggatgggagttaggtggaagacccctcctgactaggagccccttagggtacacagccaaaacgggggcctctttcatcggggactacgggacatttaaccagggaggggcattcccaggaatggcccctagcgattagccttttctccccccaaatagggttaactgaggccccttggaatggccctactgaggggccccataaaggccccttctacccggcccccaaggtgggggattgcggaccatgggggactatggatcgg

SEQ ID NO: 629446 - DNA, 704 bp, Homo sapiens
gcacgagctttttttctttattagtcctgctagcagtgtatcaattttgttgatcctttcataaaaccagctcctggattcattaattttttgaagcgtttttttgttgctatttccttcagttctgctctgattttagttatttcttgccttctgctagcttttgaatgtgtttgctcttgcttttctagttcttttaattgtgatgttagggtgtcaattttggatctttcctgctttcccttgtgggcatttaatgctataaatttccctgtacacactgctttgaatgtgtcccagagattccggtatgttgtgtctttgttctcgttggtttcaaagaacatctttatttctgccttcattttattatgtacccagtagtcattcaggagcaggttgttcagtttccatgtagttgagcagttttgagtgagtttcttaatgccgagttctagtttgattgcactgtggtctgagagacagtttaatttctggtcttttacatttgctgagggctttacttccaagtatgtggtcaattttggaataggtgtggtgtggtgcttgaatgtatattctggtgatttggtgtggagagttctgtagattgctattaaggtccacttggtgcagggctgagttcaattcccttggtatccttggtgaacctttttggcttaatggactggccttggtgacgt

SEQ ID NO: 629447 - DNA, 132 bp, Homo sapiens
gctgcggttgatctaaggatcccccaagcagttaatcagactcacttcagactcatagtatctgaatccagtgtcccaaggacatcagtgactttatattgttgcgcaacctggtaatgcttaaaaacttac

SEQ ID NO: 629448 - DNA, 105 bp, Homo sapiens
  misc_feature (103)..(103): n is a, c, g, or t
ggacaccgctcaggccgcgagcagcagcaaggcgcaccgccactgtcgccgctgcagccagggctgctacgaaggccgaagtggctccttccggctcctcagncc

SEQ ID NO: 629449 - DNA, 920 bp, Homo sapiens
  misc_feature (536)..(536): n is a, c, g, or t
ctgcctgccgctgagggttcccgagcaccatgagggccgtggatcttctatctcctttggctggccgggagggccttggtagcccctcagcaagaagccctgcctgatgagacagaggtggtgagaagaaactgtggcatgaggtgactgagtgtatcgtgtgggagcgtatatctcatgttcctaggttggaaggtaggagagattatgattgactggtgcaagaggaaaaccgaagatggaggtgtgtggcggaagaatcccgtgtcagaagcccacactgcggagacagcggtcaaaggtgtgcaggagctgggatgagataagctaacactcacccagtgttgcgatgatgcccaggtagcgcgccacgcagtctgcgcacagcactcaccattttggcgactttccgagaagggtgctgcagacaatggacaagccaagacctttcgagcgtcttgcctgggcagctatcttttggccaacaagagtgtcgagcgcatggagagcgcactcaaatgaaagggaccatcaangcgatcaaccttgggatctacaatcgggagcctatgccaaaaggagtatcatgccctcgacctttagctcaatggacgtcgtgagccatgaaccgaaattccacccgtggcgcaatgcaggcgacgtggctcacaagaagcgtcctgagtctacccgtgtatgaggcagggcactgaaggagcaacaatccttactgcactgagtaaggcaggaagccttgcgcggtgaaaccaaagatccagtgacgaatgacgaaggcagcctggagtgccggagaagcacccgcgtggcagctgctggcccggcacttcgagaacgaacctattaccatgtccctcttccctgtaccgtggcgcggcgggccaggtggaccaaggacccac

SEQ ID NO: 629450 - DNA, 550 bp, Homo sapiens
  misc_feature (8)..(8): n is a, c, g, or t
  misc_feature (14)..(14): n is a, c, g, or t
  misc_feature (41)..(41): n is a, c, g, or t
  misc_feature (60)..(60): n is a, c, g, or t
  misc_feature (75)..(75): n is a, c, g, or t
  misc_feature (128)..(128): n is a, c, g, or t
gaagcagntgtccntaacaaaagttgagtcctgtctggaanattcgctggttttcttcanaagttgccagccagnaccatttacgtctgctaaagttgcacccacaagcggcttcttccgccaggtcntctgtcccagagaggtgggagttttatctgttagcccctgactggggctgctgcctttctttcagagatgccctgtccagagaggaggaatctagagaggcagtctggctatggcagctttgcagagctgtggtgggctctgcccaattcgaacttcccagaagctttgtttatactgtgaggggaaaaccacctactcaagcctcagtaatggtggacgcttctccccacaccaagcttgggagtcccaggtcgacttcagactgctgtgctggcagcaagaatttcaagccagtggattttagcttgctgggctctgtggcggtgggatccactgatccacttggctccctggcttcagttccctttccaggagagtgaacagttctgtcgctggccttccaggtgtcactggggtatgg

SEQ ID NO: 629451 - DNA, 215 bp, Homo sapiens
  misc_feature (119)..(119): n is a, c, g, or t
tgcaagagaccctcattctgtgtctcccagccacactgcggttcttattgctcttcagggttgcgtcacccatttggttactagagcaatgaggcttgtctgcttgacatagtatatanagccaactactacgggcattcgctttgttggatttatgttgttattcgtttaaggacagggctctcactcctgtttgcccgtggatggacgtgcag

SEQ ID NO: 629452 - DNA, 1407 bp, Homo sapiens
ttggttcttagtaacctaatgtagttacttacttcttttatcctactacatatataatagaaccaaaatagtaacgtcaatgtggttattaagatgaagtctactgaatgcagtttgcttttgtttttttccctgaatgcagtttaagctgtatttttatccttaggccaaatatggtcaatgtagtgtggaaagttagatctgtatgtttttaattttaaagaaattacatattttttaatttaatttttatttttttaaactgcacatttaccttttctctgagatgagggggcacatttaaatctgtgtatgtccagagtccgtgaggattgggaatcagtctaaagctgtgctcgcttctcctcttccattgcgatttgccttctttatccagtcttttggaatgctgaacaaaaatgtttttggcacaaggcaggcgtgaaaacataaagttaataaaaatcgaatgcataagctagagcagattatccacagattcttccatctccatatagattatcaccattgcctgcacctgttttccttctccagcctatctgatggaatggtgcttccatgacatgtggtatttggaaggctcttagctctgatgtaatcagggtttgacccatagtcacctgaaatagttcttctgtttctctttgttctatgaactgaagggtctcagaagcccgtgttatgcaaatacccttccatccccttccctctccccttgcctctatccatgttccctcagcctcagggtgcttgcaggctaagaggattgggtctctggcatcctggagctgaacagctcgtgtcaggaattccccaggcccttgagtctctggggtgagttgtaggggtgtgtagggtgctggggattaagatctgctgagtaggtgcttaccagagttatactgaaggacctgaagacagatcatcttcacataatcagcatgacccataatctgtgatgtcactgagcttcttttatttctgtagtcaaggaatgtgcacaagtaatgcaaatataattacttttagtcctgaggattagggaacttgggggatgttcacattacctgatgatgtcaatattgtgttatgtttaattttttttaaaaaagatgcttatttattactgaaataatctaaactgaataaataactttttaaaaaattacattggccagtattaggttcctgatacgtatttggtgttttgtttgtactgctgggttttttctctccagtattggatgcgttaacggggagccttgagaagttatgaattttggtttgttcggaattgctttttataagttttctgtgacctcatgcactaaatactgatgctaccacactcctgcaagtatgaaataaaagtatgtctcttcaaaa

SEQ ID NO: 629453 - DNA, 298 bp, Homo sapiens
  misc_feature (243)..(243): n is a, c, g, or t
cagttgaaggtctgagtagaacacatgggctgaataagagtgaattcctttgcctgatggtcttgagtggagtcatcagtttttccctgcctttgcattcataatgaaacactaactcttcctgggtgcctaggctgcagggcactggagtggaaccacactgttgtctgtactgggtgctagtttgctgactgcagacatgtgaacttaccagctctgtaccactgtgtgaagccagctccnttaaactctctctaaatacacacacacacacacacacacacacacacggcaacac

SEQ ID NO: 629454 - DNA, 472 bp, Homo sapiens
ccggtcgggatgcagacagaacactattcaagttaaggatctcttgagaatgtgtctactggctgcaaggtctgagttattacgctacatgacaacgtttcgacatttcaccggcaacaaccaaaagggtttttagtggcttgggtctccccagtgggggataagtcttttgtcatcaaggaggcaaattgtctccccaagacagctcaaaatatccacacctcggcaacagtctaagatgagagcctgtgacaggtggcagcgcccccaggtggggtactggcatcagagcctggtgcgccctaggggagcctcccactggagtgcccggccaggtctccaagccccaaatgagtccttgtgaaccacaactgatccccccaggtgggtgcttgtggactgcctcggacccagccacgctgctccccgcaatgctgatggggctgtgcattgaggacccctgcttcctggt

SEQ ID NO: 629455 - DNA, 254 bp, Homo sapiens
tcagagtcatctcttgagttcgagaccagcctggccaacatggggaaaccctgtctctactaaaaatacaaacattagccgggcgtggtggtgcatgcctatagtcccagctactcaggaggctgaagcaggagaattgcttgaacctgggagacagaggctgcagtgagccaagatctgaccactgcactccagcctgggtgacagagcacgactccatctcagatcgctttgctgatcgtgatatgaactcc

SEQ ID NO: 629456 - DNA, 223 bp, Homo sapiens
ctcgcgaacgttgttccgtgattgttggatgaaatgttctgtacatatctgttaagtccatttgttccaaggtatagtttaaatccattgtttctttgactttctatcttgatgacctgtctagtactgtcagtgtagtactgaagtcccccactattattgtgttgctgtctatctcatttcttaggtctattggtaatatgttggataacacgttcgcgag

SEQ ID NO: 629457 - DNA, 2238 bp, Homo sapiens
aagagccctgacttcccttgttttccccccttgcgcccaacgtgcgtccgctcccccgccgagcgcggagtcgcctcagttgcccaggcctctatctgcatggagggccgggccgccgtgaccagatctgcgcacggggtacggacgtgcccgggcagatgggggcctacggggtgacaccgaggccgggacagcttcaggggccccagaaggacctgacccagaaattgaggtccccgctgccttctgaggagggggaggagttgctcctaggtctgaaccccgccagccttgccccgtaggaagctggagtgcgggcctcgtccacccacagaccccggggagcgcagggaaaagggtgcttcggtcgttccgatggcagtggagaccacggtccacactcacctctctgcgtctccaccgcagggctctccctacgaccacacacccggcatggcgggctccttggggtaccatccttacgcggcgcccctgggatcgtacccttacggggacccagcgtaccggaagaacgccacaagggacgccacggctaccctcaaggcctggctcaacgagcaccgcaagaacccctaccccaccaagggcgagaagatcatgctggccatcatcaccaagatgaccctcacccaggtgtccacctggttcgccaacgcgcgccggcgcctcaagaaagagaataaaatgacgtggacgccgcggaaccgcagcgaggacgaggaagaggaggagaacattgacctggagaagaacgacgaggacgagccccagaagcccgaggacaagggcgaccccgagggccccgaagcaggaggagctgagcagaaggcggcttcgggctgcgaacggcttcagggaccacccacccctgcaggcaaggagacggagggcagcctcagcgactcggattttaaggagccgccctcggagggccgcctcgacgcgctgcagggccccccccgcaccggcgggccctccccggctgggccagcggcggcgcggctggcggaggacccggcccctcactaccccgccggagcgccggcgcccggcccgcatccagccgcgggcgaggtgcctccgggtcccggcgggccctcggttatccattcgccgcctccgccgccgcctcctgcggtgctcgccaagcccaaactgtggtctttggcagagatcgccacattgtcggacaaggtcaaggacgggggcggcgggaacgagggctctccatgcccaccgtgtcccgggcccatagccgggcaagccctaggaggcagccgggcgtcgccggccccggcgccgtcacgctcgccctcggcgcagtgtccttttccaggcgggacggtgctgtcccggcctctctactacaccgcgcccttctatcccggctacacgaactatggctccttcggacaccttcatggccacccggggcccgggccaggccccacaaccggtccggggtctcatttcaatggattaaaccagaccgtgttgaaccgagcggacgctttggctaaagacccgaaaatgttgcggagccagtctcagctagacctgtgcaaagactctccctatgaattgaagaaaggtatgtccgacatttaacgcgggctgcgtcggtcccggacttttctaatttattaaaaacatggccttggcagttatttttccatcaccgagagagagagacagagagagaaaataaactacccctcctattcagaagtttatagtttatggagatggatgacataaaaatgtaaacatctccacacacacaaaaaaatgtcttaaccaaccgaaaagaaaaattaaaaaaggatttgtattaaatcttattctgtatatttaatgtagcatttttgtatttaaattgataattcaatatctttgaagtaaattatgaaatcaagacacctgtacaggcatttaatgtttttttgtaatataaatatatacatttgtgtttcccccaaaactgtttcatagttaaaaaatacaagtttaatttaattttttacacctattgattctgctgggtatgagctaaagtattacggaaaggaaacaggttatactcttagatttaaaaagtgaaagaaactgcaggcgcctttgtaaaatgcaaaatatttaattaaaagagattttaacataatgagagccactcattactttttagaagcctcaataaactgtccattgccttggtca

SEQ ID NO: 629458 - DNA, 265 bp, Homo sapiens
ggggtggtggggcccccccccccgccttttcgggggtgaccaggggggggggggccaagcgcccctcccaggggggggcaggggggcgggcccttttcccccccccgttaaaagggttttttcctggggtgggggggggtcccccccccaaagggggggggctttttttttttgggggtttttgttccccgggggggggggggcccccccccccttggggttccctttttttcgccccgaaaaaaggccccccgggttgggttta

SEQ ID NO: 629459 - DNA, 802 bp, Homo sapiens
  misc_feature (29)..(29): n is a, c, g, or t
  misc_feature (97)..(97): n is a, c, g, or t
  misc_feature (107)..(107): n is a, c, g, or t
  misc_feature (111)..(111): n is a, c, g, or t
  misc_feature (117)..(117): n is a, c, g, or t
  misc_feature (126)..(126): n is a, c, g, or t
  misc_feature (162)..(162): n is a, c, g, or t
  misc_feature (166)..(166): n is a, c, g, or t
  misc_feature (191)..(191): n is a, c, g, or t
  misc_feature (194)..(194): n is a, c, g, or t
  misc_feature (206)..(206): n is a, c, g, or t
  misc_feature (233)..(233): n is a, c, g, or t
  misc_feature (256)..(256): n is a, c, g, or t
  misc_feature (269)..(269): n is a, c, g, or t
  misc_feature (273)..(273): n is a, c, g, or t
  misc_feature (278)..(278): n is a, c, g, or t
  misc_feature (281)..(281): n is a, c, g, or t
  misc_feature (284)..(284): n is a, c, g, or t
  misc_feature (286)..(286): n is a, c, g, or t
  misc_feature (296)..(296): n is a, c, g, or t
  misc_feature (303)..(303): n is a, c, g, or t
  misc_feature (305)..(305): n is a, c, g, or t
  misc_feature (309)..(309): n is a, c, g, or t
  misc_feature (312)..(312): n is a, c, g, or t
  misc_feature (320)..(320): n is a, c, g, or t
  misc_feature (325)..(325): n is a, c, g, or t
  misc_feature (336)..(336): n is a, c, g, or t
  misc_feature (339)..(339): n is a, c, g, or t
  misc_feature (346)..(346): n is a, c, g, or t
  misc_feature (349)..(349): n is a, c, g, or t
  misc_feature (351)..(351): n is a, c, g, or t
  misc_feature (356)..(356): n is a, c, g, or t
  misc_feature (360)..(360): n is a, c, g, or t
  misc_feature (362)..(363): n is a, c, g, or t
  misc_feature (366)..(366): n is a, c, g, or t
  misc_feature (368)..(368): n is a, c, g, or t
  misc_feature (372)..(372): n is a, c, g, or t
  misc_feature (383)..(383): n is a, c, g, or t
  misc_feature (386)..(386): n is a, c, g, or t
  misc_feature (389)..(389): n is a, c, g, or t
  misc_feature (391)..(391): n is a, c, g, or t
  misc_feature (393)..(393): n is a, c, g, or t
  misc_feature (401)..(401): n is a, c, g, or t
  misc_feature (409)..(409): n is a, c, g, or t
  misc_feature (413)..(413): n is a, c, g, or t
  misc_feature (450)..(450): n is a, c, g, or t
  misc_feature (455)..(456): n is a, c, g, or t
  misc_feature (458)..(458): n is a, c, g, or t
  misc_feature (466)..(466): n is a, c, g, or t
  misc_feature (474)..(474): n is a, c, g, or t
  misc_feature (490)..(490): n is a, c, g, or t
  misc_feature (506)..(506): n is a, c, g, or t
  misc_feature (516)..(516): n is a, c, g, or t
  misc_feature (531)..(531): n is a, c, g, or t
  misc_feature (538)..(538): n is a, c, g, or t
  misc_feature (543)..(543): n is a, c, g, or t
  misc_feature (566)..(566): n is a, c, g, or t
  misc_feature (579)..(579): n is a, c, g, or t
  misc_feature (584)..(584): n is a, c, g, or t
  misc_feature (586)..(586): n is a, c, g, or t
  misc_feature (592)..(592): n is a, c, g, or t
  misc_feature (683)..(683): n is a, c, g, or t
  misc_feature (802)..(802): n is a, c, g, or t
ttcccgagggtttctgcccaacgcctccnggcgctcgggacaacactgtgtagcattgatactggaatgatataaataaagctttggtgtgtaggtntgcaggaganagtncaggtnaacactgtnatacgaaaacttcagacaacaccagccctcaatgtnaatngggtttttggccaaggggggaactnctnagctccactggncactggcgcccgctcgccatggctacncgaggcaccagctccgcacgcgngcgagggcagtcnaggnctgangcnccncntcgcgccctnctcgccncncctncanctcccgcnccccncccttcccctnccncacagcnctncncctcntccncnnccncnggcnccacccccccngcncancncngcgacccncctccccncccncagcgacaccgccaggctcaagcacagcgcactcccngcccnncnccccttcncacacccntccacaacacgcgtcngcgtccaccaacaccncgatctccangcgcactcatccccncgctccnagcgncacccgccccgagatcggtgatngacgcagcctttntctgnancttgtnatgaaaattaatgtgcgttcacggaagctgtcacgatgttggtcttgcagtggcgtgcagccacgagtcccggcgacctcatccatgagcntcatggtcacacctccgtgcacaaagccgtgcagggtgcagtgtgaaggccccaccaggtggatcaagctggactggctgtcgctgaaagtctacggctctgggttgaggactggctgn

SEQ ID NO: 629460 - DNA, 1815 bp, Homo sapiens
ttgctccacctatcatgttttattgcctttgggtgtctcgatcacctgccttccttacgctgtactcatttaatgggcccataacaggtaccgacaatgggtcacaaacgacgggctggaggcccagggtttcctaaatgtctccctaacccaccacaaacagactccatgacaccaccctggctagagtatgatggcggggccatcatcaccaagatgaccctcacccaggtgtccacctggttcgccaacgcgcgccggcgcctcaagaaagagaataaaatgacgtggacgccgcggaaccgcagcgaggacgaggaagaggaggagaacattgacctggagaagaacgacgaggacgagccccagaagcccgaggacaagggcgaccccgagggccccgaagcaggaggagctgagcagaaggcggcttcgggctgcgaacggcttcagggaccacccacccctgcaggcaaggagacggagggcagcctcagcgactcggattttaaggagccgccctcggagggccgcctcgacgcgctgcagggccccccccgcaccggcgggccctccccggctgggccagcggcggcgcggctggcggaggacccggcccctcactaccccgccggagcgccggcgcccggcccgcatccagccgcgggcgaggtgcctccgggtcccggcgggccctcggttatccattcgccgcctccgccgccgcctcctgcggtgctcgccaagcccaaactgtggtctttggcagagatcgccacattgtcggacaaggtcaaggacgggggcggcgggaacgagggctctccatgcccaccgtgtcccgggcccatagccgggcaagccctaggaggcagccgggcgtcgccggccccggcgccgtcacgctcgccctcggcgcagtgtccttttccaggcgggacggtgctgtcccggcctctctactacaccgcgcccttctatcccggctacacgaactatggctccttcggacaccttcatggccacccggggcccgggccaggccccacaaccggtccggggtctcatttcaatggattaaaccagaccgtgttgaaccgagcggacgctttggctaaagacccgaaaatgttgcggagccagtctcagctagacctgtgcaaagactctccctatgaattgaagaaaggtatgtccgacatttaacgcgggctgcgtcggtcccggacttttctaatttattaaaaacatggccttggcagttatttttccatcaccgagagagagagacagagagagaaaataaactacccctcctattcagaagtttatagtttatggagatggatgacataaaaatgtaaacatctccacacacacaaaaaaatgtcttaaccaaccgaaaagaaaaattaaaaaaggatttgtattaaatcttattctgtatatttaatgtagcatttttgtatttaaattgataattcaatatctttgaagtaaattatgaaatcaagacacctgtacaggcatttaatgtttttttgtaatataaatatatacatttgtgtttcccccaaaactgtttcatagttaaaaaatacaagtttaatttaattttttacacctattgattctgctgggtatgagctaaagtattacggaaaggaaacaggttatactcttagatttaaaaagtgaaagaaactgcaggcgcctttgtaaaatgcaaaatatttaattaaaagagattttaacataatgagagccactcattactttttagaagcctcaataaactgtccattgccttggtca

SEQ ID NO: 629461 - DNA, 148 bp, Homo sapiens
  misc_feature (24)..(24): n is a, c, g, or t
  misc_feature (39)..(39): n is a, c, g, or t
aggggggggcccccccaaaccccnaggccccggaaaccnacggggggggcggcaggcagggctccttcaacagtaaacccccccttttggcaacaaaactgtgcggggacatgatttttgtaacggccttgggccgctccccccccct

SEQ ID NO: 629462 - DNA, 1773 bp, Homo sapiens
aagagccctgacttcccttgttttccccccttgcgcccaacgtgcgtccgctcccccgccgagcgcggagtcgcctcagttgcccaggcctctatctgcatggagggccgggccgccgtgaccagatctgcgcacggggtacggacgtgcccgggcagatgggggcctacggggtgacaccgaggccgggacagcttcaggggccccagaaggacctgacccagaaattgaggtccccgctgccttctgaggagggggaggagttgctcctaggtctgaaccccgccagccttgccccgtaggaagctggagtgcgggcctcgtccacccacagaccccggggagcgcagggaaaagggtgcttcggtcgttccgatggcagtggagaccacggtccacactcacctctctgcgtctccaccgcagggctctccctacgaccacacacccggcatggcgggctccttggggtaccatccttacgcggcgcccctgggatcgtacccttacggggacccagcgtaccggaagaacgccacaagggacgccacggctaccctcaaggcctggctcaacgagcaccgcaagaacccctaccccaccaagggcgagaagatcatgctggccatcatcaccaagatgaccctcacccaggtgtccacctggttcgccaacgcgcgccggcgcctcaagaaagagaataaaatgaccactggtgcgcccaactgaacaaacggtggggacggagaacggacagtgcacgagtggaggagaggagtgactcactagtgctgcctaactgctgacaccaaagtgtactgaacaacgttcaccacacccacccttaagtggtttatacaaagtcactcaagcagttatgagtctttcaaaagctgcaccatgtatggcgtagattttctaggaagtgtccatcagacattacccattgacacttcccatgcctgatcatcagagcattagccttgtgacactgaccttctacctgtaaattctctacaacaaaacggacattccttatctttggaacacttcgaaaaggttgttaaaccttcccttacaaggttctctatccttggaccttcaacaccacaaggcacaacaaattaagcgcatcacagcagatacaataaaccgtgtagcgtgcacaaggcccgttgatgagagaatttacacttacgactaataacgtatgatccacattgatgagtaaaaacggtatttaaccagttaacccctaaacgtttccacatccttctaagacaattggtggcagagatcaccaaacgagaaaaggcccttaacttctgccttgcccacagtacataggccgcctaacaacaaccttcaaagtaacacattaacaagtgcagtggggctggaccgcctacagagtcaaatcattttgggttgcacagttacataagtgacagtacttaaacaggagaaagggcgaagtatggtaagaatattgtagagaaatcaggagataaaacacaaacttgaccaccccttgagattatatataacaaaagatatgaaggaaaactagaagaattccaaagaaaaaattcaaggggcaagagagtgaaacgtatagtgaaattataaccgtttgtggagtattgggagaacttgtaataggaatgaaagaaggagaaaggaagtacagtgtaaaaacagtgtggttggagttatggcagaggtgacttgtgtgtggacagacagaaggcaagatagatgaacaagagggaa

SEQ ID NO: 629463 - DNA, 331 bp, Homo sapiens
cgagttgcaagatgagggaatctggaggcaacagtagagataaagaattagccaggtgcagtggctcacacctgtaatcccagcactttgggaggccaaggtgggtggatcacttgaggtcaggagtttgagaccagcctggccaacatggtgaaaccccatctctactaaaaatacaaaaattagctgggtgtggtggcgggcgcctgtaatcctagctacctaggaggctgaggcaggagaatcgcttgaaccaggaggtggaggttgcagtgaaccaagattgtgccactgcactccagcctcggcaataagagcaaaactccatctc

SEQ ID NO: 629464 - DNA, 739 bp, Homo sapiens
ggataacgtcatatagcatcttgttggtttttccttactctctatgtacatatctatctactgtctgactgtagatgggctatatagatagatgccaagcttcttatgttctgggggtagtatgcatcattattgggtctctgccttaaaacgacatcaagaattcattttgagacaaagaaaacttctgctttgtcattgaggtcattagggagctctaatgtgtgtttgtggctccgagttacattatgtgtcttcattgatctatatgtatatatgtgatgtccatcatatatataactgtgtgtgtgtgtaaatgatggtatcatcaggactgacacccaatttgacacttttgtatctagaagaccctccaaaaaaaggaaccacataagcacacaagaaaaagagtgctatgatgttcttagcatttgctaatcatgcctatttttatctagattgtgtaaatgtagctaggtcataacaaaatttggaattacgagtgtgggctggataatgagaagaaaaagtatttggacatggtcccgagtgatgaaccgcagagactcgatgaaccttgagacatagcattgcttcgtgcactttcgaatgaccaagtcatgtgtttctggtgactgacttatgtgtcaccgttgcattcgatgttcagcatcctgatgtcaagtatatcgggggtgtgcccagccaagtaaagcctctggactaatcggtacgaaag

SEQ ID NO: 629465 - DNA, 230 bp, Homo sapiens
cccgggaggggggccctttgggcataaagaaacctttgaaaattttttggtttaggggtgggaagaccgggtttcccagttttggtttttgttggttggcccccctggggtccccccaaaaaccccttttttttgggttttggggcctttttaatggggggccaaagggggccaataaagggggggaggaattttttttttgggtaatattggttggttttgaatttcca

SEQ ID NO: 629466 - DNA, 254 bp, Homo sapiens
tttcccagggttttgggggaaaaaacccccccccccccccccttttgggattttttttgtttttcggccggccccgccttatcgaaaattgttttgggtaaagaaggtccccgttgttttggggggtaccccgggggggggcctaaaattggggtttttttttggggggggaaaagggaaccccttcccccttgggaagggtttttccaaaggcccttttttttaattttttttacccctttttttttccccca

SEQ ID NO: 629467 - DNA, 137 bp, Homo sapiens
tctgtactggtgcaggaggaggccatgaaggagaacaccgccgccgtgcttgtgcaggtgccggtcgaggtcacctcgttccctcctcaacgaaaagcgcaccgagatcaccaagatcgagctcaagcagcgcgtga

SEQ ID NO: 629468 - DNA, 811 bp, Homo sapiens
  misc_feature (255)..(255): n is a, c, g, or t
tcacagctggggggtttccccttttttgacctcctcctctttaaagctacaaaaaccacctcccttttttacaggaccggcatctttttaaggttgggggtgtttctccccagcctctcttcaggagggggggaagggtgggagtgtgcatctggtgaactctcctttctcctttcttctcctttctttggccgccgcttttcccatcctggcgtgtagacttctggattggtgcacgtcggtggtcacatccangtgataggtgttgggtttctgtgccccttttctggactggcccagggtcgctcagaaccccagaaatcccttccttacacaaccttcttttggggggggagtgggaaagggactgaaatgggggggggaagggtgaggagggcgccatcaataaaggagggaaacccccaggtctgaaaaaaacaacaacaaaaaaaaacacacacacaaaaaaaaacaagaacacagcaagcaaaaacaaccaaaccacgcacacaacaacaagaacaaaagaaaaaggcaacaacaaagaacaaacaaaacaacaaccaacaaagacaaaacaaagcggagccaggccacaaaccacacgaagaaaaagaagaaaagcgggcgccaacgacaagaaaaaataactgcgacgcagcagcgtgcacaaggaccaacaaagcagccgatcttacagagcgcagaggacacagagcagagagcgagtatacagagaaccgcgacagcgccggacacacaccacaacgccgcacacccggaagccaacatagaaagaaggaagcagcac

SEQ ID NO: 629469 - DNA, 691 bp, Homo sapiens
tcccttgatgacttccgatccctttgggcacgtactgctaatttcatggtacatgcagtggctactcatactggctatccatatggttttcagactttatcttcacagaagccaccgtgctcactattcctttaattaaggagaaatgctggcatagagcagcactaatatgtactccactgaagttcacgatcagacagatctggcatgtgtagcgttatagaagataactggcctcattctcttcaacaatatcaagtgttgggaaagtaaagaaaggaagtggaatggcttactcgttcttgattaaaagttatgtaataagccttattgcttatgtgtataatattgttacatggactgctattttgaaataccatctgtacaagatctggggtggtgggtgggaggccagcacggtggtgaggacagttgagaaaatttgaatgtggattagattttgaatgatattggataattattggtaattttatgagctgtgagtaagggtgttgtaggtttataaatagactgtcttaatttgcatacttaagcatttaggaatgaagtgttagagtgtcttaaaatgtttcaaatggtttaactaaaatgtatgtgaggcgtatgtggcaaaatgttacagaatctaactggtgtacatggctgattaaccgcccggggtttttctatc

SEQ ID NO: 629470 - DNA, 354 bp, Homo sapiens
  misc_feature (36)..(36): n is a, c, g, or t
  misc_feature (106)..(107): n is a, c, g, or t
  misc_feature (117)..(117): n is a, c, g, or t
  misc_feature (182)..(182): n is a, c, g, or t
  misc_feature (188)..(188): n is a, c, g, or t
  misc_feature (222)..(222): n is a, c, g, or t
  misc_feature (245)..(245): n is a, c, g, or t
  misc_feature (286)..(286): n is a, c, g, or t
  misc_feature (311)..(311): n is a, c, g, or t
ccggcttccacttctgcgggggctccctcatcagcnaggactgggtggtcaccgctgcccactgcggggtcaggacctccgacgtggtcgtggctggggagtttanncagggctctnacgaggagaacatccaggtcctgaagatcgccaaggtcttcaagaaccccaagttcagcattctnaccgtnaacaatgacatcaccctgctgaagctggccacantggcccgcttctcccagacagtntccgccgtgtgcctgcccagcgccgacgacgacttccccgnggggacactgtgtgccaccacaggnttggggcaagaccaagtacaacggcaacaagacccctgacaag

SEQ ID NO: 629471 - DNA, 680 bp, Homo sapiens
agcctcgcctttgcctgatcctgccgcccgtccacaccctgccgccagctcaccatggatgatgatatctgcctgcgctcgtcgtcgacaactggctccgtgcatgtgcaatggccttgcttcgctgggcgactgatgcccccctgtggcctgtcttcccctccatctgtgggtgcgccccagtgcaccatgggcgtgatgtgtggtgcattgggtcagaatgtgattcctatgtggtgcgacgatggcccagagcaatgagatggcatcctcacccatgaagtaccccatcgatgcactggcatctgtcaccgaacatgggactgacatggatgaaaatctggcaccagcaccttctacaatgagcttgctgtgtggctccctgaggagcaccccgttgctgctgacctgaggcccccctgaagccccaatggccaaccgcgagaaggatgacccagatcatgtttgagaccttcaaacaccccagccatgtacgttgctatccatggctgtgctatcccttgtacgcctcttggccagtaccactaggcatcgttgatggactccggtgacgggggtcacccaacacttgtgctcatctacgaggggtatgcccctcccccatgcatcctgcgatctggacctggttgcgggacctgatgactactcatgaagatctc

SEQ ID NO: 629472 - DNA, 869 bp, Homo sapiens
gatagcatgagttttagtctgttcttttaaaaaataagttttctctttgttctttggaagacttttaagaaagaataaaagtaatgacatctcaatcctaacaagtaactagaactgctaaaaaaaaaaaaaaaagggcacctgaaaagtttaaaattttctctcttaaaagttagctccctggttaaaggcagaatttttaacttcaacttaacaacttgtggctgccatctaagtccagagtactaggtgctctaggacccttacccttgcgaggcagtgggtcctcaaagtgtggcccccagataaattagcatcagcaatccatttaagaatttggttgaaatttcaaattcctagagctccaccccagacccgttgaatctctggggctgtagcccttgcagtctgttttaacaagccctctaggtgacgctgatagaggcaacacttttggaggactcagctctgggctgtacggagaactaaagggattctggctgtgaggtaactagaacacaggagtaacatttcgacctgtgaatgaatttgcttaacttcctaagcaagaaaattgaacgctgtttaatagttacaactgacaggggcaaaaaaccttgacaagttccggcgtacacctttaaattttcggtaatacttaatttttatgccaaacaaaatttattcaaccaatttttttcctaacgggggattctacacatttggggaggccagcagactgggggtactgcacgacagagaacaccaacaaggttctcgaaaacctttggcgtgcacggaaagaaagaaccataccgtatcgactgggtatatggggaaattcacatttcacattctacgttccgaac

SEQ ID NO: 629473 - DNA, 246 bp, Homo sapiens
cttacgtggcttgtgggttgacctgagacttgtgggttgactgaggcttgtgggttgacctgtggcttgtgggttgagcgtgggttgtggaaggtgaggaggctatggactaagataaggcctatactaccctcgacctttgcccctccaggcagctgggggagagcggaggcagggtcgctcagggttctaccgacacgctgctgattggtcacccgggccccgaaccagcccttccatgtatga

SEQ ID NO: 629474 - DNA, 338 bp, Homo sapiens
  misc_feature (61)..(61): n is a, c, g, or t
  misc_feature (310)..(310): n is a, c, g, or t
  misc_feature (326)..(326): n is a, c, g, or t
atctacctttacaaggggttgctgtgaaaattaccgagatagaacgttgaggtgcctggcnatgagtatgctgattacatgtgagtttccttcccctgccctcccctctgtgcccactctgatggatctagtgaactcctactgactcttcaatacccagcacggttgtctctcctctggtaagactcccctgactctcccaaaagaggtagctgatctctctttggtgctccctaaccatgctgtgaccacatgtgcaggacagccgtgcaggcagtgtgcttcttagctctggaacccccaactgggnctggggagtttctggncggcaaacacca

SEQ ID NO: 629475 - DNA, 169 bp, Homo sapiens
catgccaggcaacagaatgagacttgtttaaaaaaaaaaaaagtgacttgatttaaggggaaaaaatgactgggctatattcagtcagatatgggcaaaaagtctcaaggggttaatggtgaatgattaagggtctggagggggggtgtcccctaatcaaactacaggt

SEQ ID NO: 629476 - DNA, 1232 bp, Homo sapiens
gggggtgtgttacctgccgacagcataatgtgaggcaaggtccagccgttccgcccagcatacaagcttatggagcagccccctttggagatctccaggtagacttcagagagatgccaaagtgtggagatctgattcctagatttcgactgcccttacggatcggctcacataacgggcctgcgtttttggctgccatggtacagaagacggcaaaggtgtccaagtcacacagggccacggaatctcacaggagcctgagaactcctcctcctgggactctcagaggatccagaactgcagcccatcctcgctgggctgtccctgtccatgtatctggtcacggtgctgaggaacctcctcatcagcctggctgtcagctctgactcccacctccacaccccaatgtgcttcttcctctccaacctgtgctgggctgacatcggtttcacctcggccacggttcccaagatgattgtggacatgcggtcgcatagcggagtcatctcttatgcggactgcctgacacggatgtctttcttggtcctttttgcatgtgtagaagacatgctcctgactgtgatggcctatgactgctttgtagccatctgtcgccctctgcactacccagtcatcgtgaatcctcacctctgtgtcttcttcgtttcggtgtccttttccttagcctgttggattcccagctgcacagttggattgtgttacaattcaccttcttcaagaatgtggaaatctctaattttgtctgtgacccatctcaacctctcaagcttgcctgttctgacagcatcatcgatagcatgttcatatatttcgatagtactatgtttggttttcttcccatttcagggatccttttgtcttactataaaattgtcccctccattctaaggatttcatcgtcagatgggaagtataaagccttctccacctgtggctctcacctagcagttgtttgctgattttatggaacaggcattggcgtgtacctgacttcagctgtgtcaccaccccccaggaatggtgtggtggcgtcagtgatgtacgctgtggtcacccccatgctgaaccttttcatctacagcctgagaaacagggacatacaaagtgccctgtggaggctgctcagcagaacagtcgaatctcatgatctgttccatcctttttcttgtgtgggtgagaaagggcaaccacattaaatctctacatctgca

SEQ ID NO: 629477 - DNA, 1448 bp, Homo sapiens
  misc_feature (1415)..(1415): n is a, c, g, or t
gggggtgtgttacctgccgacagcataatgtgaggcaaggtccagccgttccgcccagcatacaagcttatggagcagccccctttggagatctccaggtagacttcagagagatgccaaagtgtggagatctgattcctagatttcgactgcccttacggatcggctcacataacgggcctgcgtttttggctgccatggtacagaagacggcaaaggtgtccaagtcacacagggccacggaatctcacaggagcctgagaactcctcctcctgggactctcagaggatccagaactgcagcccatcctcgctgggctgtccctgtccatgtatctggtcacggtgctgaggaacctcctcatcagcctggctgtcagctctgactcccacctccacaccccaatgtgcttcttcctctccaacctgtgctgggctgacatcggtttcacctcggccacggttcccaagatgattgtggacatgcggtcgcatagcggagtcatctcttatgcggactgcctgacacggatgtctttcttggtcctttttgcatgtgtagaagacatgctcctgactgtgatggcctatgactgctttgtagccatctgtcgccctctgcactacccagtcatcgtgaatcctcacctctgtgtcttcttcgtttcggtgtccttttccttagcctgttggattcccagctgcacagttggattgtgttacaattcaccttcttcaagaatgtggaaatctctaattttgtctgtgacccatctcaacctctcaagcttgcctgttctgacagcatcatcgatagcatgttcatatatttcgatagtactatgtttggttttcttcccatttcagggatccttttgtcttactataaaattgtcccctccattctaaggatttcatcgtcagatgggaagtataaagccttctccacctgtggctctcacctagcagttgtttgctgattttatggaacaggcattggcgtgtacctgacttcagctgtgtcaccaccccccaggaatggtgtggtggcgtcagtgatgtacgctgtggtcacccccatgctgaaccttttcatctacagcctgagaaacagggacatacaaagtgccctgtggaggctgctcagcagaacagtcgaatctcatgatctgttccatcctttttcttgtgtgggtgagaaagggcaaccacattaaatctctacatctgcaaatcctgcctcttagtcacattatttttgtggcttgatggcttttattcctttccgcatttcctttgtgaatattgctttcttcgttatgcctttaactggaatgggtgaggattctggggatcccttgtttagcagaaacctcatgactgaatcccctatacccagggggcctctttttagnttccgaggcaataaccccgtcatcaggggggga

SEQ ID NO: 629478 - DNA, 501 bp, Homo sapiens
  misc_feature (13)..(13): n is a, c, g, or t
  misc_feature (86)..(86): n is a, c, g, or t
agataggacatanatgtcatttatttgctagtagtatttatccaatagatgatactactctttatcttaaaaatacataactgggnggctagcgaatgttggaaatgccgtttcccacttaaaaaaagctgggggaatttctggggccttcccttggattttccggcctttcccccgggggggcttcctggggacccaaagcccatttttgccgattttggcccctttgaaaaggccgggggatttttgtttgttttttggggaggggtggggggggccaaaaaaaaaaaaaccccgttttttctctcttttttttttgaggaaaacaaaaaaggcggctttttttttaaaaaaaaaaaccccccccttggggggggggggggggggggccccccttttcctcaccaaccagtggggggggcggggcgcgggaatttttttttttgcggggggggtgaaacaccccccgcgcgctgcgggaaaaacacctccttcttcctt

SEQ ID NO: 629479 - DNA, 736 bp, Homo sapiens
  misc_feature (57)..(57): n is a, c, g, or t
  misc_feature (680)..(680): n is a, c, g, or t
taattgcaaaaatgttcatatttccatagcaagcggagtatcgtgtgccaagactgnaagctcatagtgctggttgtaacctgtgaaacatcttcaaattgtattgttatggtcccactgttttaattttagggaacgagtttagtcctgagcagtcttcttcttagagtgtagagctatagtgtttgaaacatgttttcgtaacattgtgcataaacgcagatcttatattgtagacacatcgtgagtgtgtaggcttaacttcattgcgaaggaaacagtttgttatcacatcactttgagccccgtcttagcagcttctttcaaacacttaatacttgcagaaatgtgtgtcactatatccacgggcaagatttacatgttgaaagaggttagtttttaaagcatcaccttcattgttgagagtaaatgtgctcttagggtcctaatattagtgttcatataagcatgtgcctttttcacgctggtggtagcgggcagatagttctcagtcactagcaatcttaggtttgcggatcttgattgggacaatagttcttcctgtagtgctcaagtttctttttggtaaacagaatctttttcaaagaaggtgagcatgaaagttgtaagtcgcgtgtgtatacatcacctctaatgtccatcatagtatccgtggctcnctgtgtatgtttctgtccacagtgtggaagccgttccttttcctttctaaagtatg

SEQ ID NO: 629480 - DNA, 365 bp, Homo sapiens
  misc_feature (255)..(255): n is a, c, g, or t
acctcctagttcccccgaaaacaaaactaagttaatatagacatttcaatagacagccagctttgacaagaacagtaatgccagctgctcaggacccttcccactagccatgcacggcttcgaaaaacattgactgttttctttgactctcctttattctccttgcagacaataatatgaacttggaaatgttactattaattgcatcataaatgcctaacattaattaacgaagttttgttagcaatacatttntaaaccatctcttagggtatctttcttacaaagcatgattaatattatttataacactcttaccaattagtttcagtttcactttagaaacctatccttaaatcctaggg

SEQ ID NO: 629481 - DNA, 1588 bp, Homo sapiens
  misc_feature (1387)..(1387): n is a, c, g, or t
gcagacacgatcccattcagtgactcagaagtcttcagcaacgaaacccagtactcctggggctgtgtaccgtgagtggtactgtaagccatacagtcttcggttatttgcactcctgtttcgcgaggacacacacaccgtttaacccctgaagctacaagggctaacgaggatgggcagctctgcctctcgtggtcgtaggaatcgagaatggaagtgcaatccatctattctatgtgctcaactaaataaatcaggaagggcgcaacggagcaaggcaccagatccattggcaattgccacaggctcatagtgctatggtcgggcttggcgcgggctaatagacatcgcggccgttgagtactctctggagactcatagtcccaccgaatttgacagcctcttcgatgcattcttcctttgagacgttctcgggttcctactaaggccttaggcgtcccttcctgagttcggcactgtgggctttcgttatgaggccttttaggtcacaacagtgggttatattgtcggtcaccgcagtgattgtcccaagggtccccactccaccgtcggtcatgtagcactcgaagggcttccgtcaatgccccccactaacggcacgttatcaagggggaatgaagcgaaaattgcactagagatttgctccatccggtctcctcatagggggaagggacgcctttcccgcggaattatgcacctccgtaaataaccggctaaagctattgtggtttgcgcttactatagcgaaccccgtcgactggctcaggggcttggatggactgtcccttggcctcaagtggcttggttacggcgaggacgtcggcaaacttctgagacatggttttccaagcctaggccatgaggcccataggtttcacattccgtaaaaagttaacttattacacggatcgaactccctcccttgggtatcgcccaattaaacaaactcgcctatgtaattaagcgtcggaatatgttcgtgtcaaccccgccaattgcggtaaatgtccgcctggcaatgtgcgcatcacccccgtggtgtgccccatttaagcgattccccaggcaggagtcgccagggatcatcgcgattaagcgtttattccggtatcgacattaaaattaccgattccgtttcgcgccaagggaaacccatgaagtacctgtgggcctagggcagcaaactcaaaaccttgagttcaacctgtaatcgcttaaaaaacaagggagagcccggagaaaaagcgtcctttctgaaatagaacccaaatccccatttgtgcttttgcagcaagagccccccggttgcctgagccaagccgcgaaggtggaggaaaagctcaccaactgttgtgtcacttattcnccaagaggagggcgcgtataactcgcgttggagaatttcaaagttgccgcgcgatcaagcccccttgtgtacacaaagcgtgcaaaataatataagcgcttgttaaattaccgttataacaccaagagggagtatttccgcgccacacgtatgaaatacgtgccgcggcacaaatatatggtgcgagacgcgcgttgtcaa

SEQ ID NO: 629482 - DNA, 1643 bp, Homo sapiens
gaatgctcagcagctgatctcgattacaacccatgactgcctccaggtgctcattcatgtggcgtcaaacgtttacttcttgcctatcgtttgcctatttgctagcaacaggactctagttcccaagaggagctagtagtgactgtaccaagattgcacaacagatgagttcacggttgcatccactctagctatgcagcactgtgaggaaggaacgaataaaactgttacattccggtcgctatgggctcggtgtgcactatggcccgtttccgcgtacgagacagagttgcattgcacggaacaacggttgttcactacatggcgcaacatacatctccactggtgaacacataggttaggctccgaattcgaaacgatgatacgttggaacaattgtagcaagacacaaccattggttggttgtgccttgtaatgactgggcagattcggtatcaagacatcttatgatggagcagaccacggtctaacggtctctaattacccgcactattttctgggacacgtaactacacccattatcacatggccaactacgaggtgtggttctaacaacgtccgttttcaggcctgaacataggggcgcttaattggacttgcttggaactgtggcctcggacccgtgaactttgcttggcaccaacacggtggcacgaactatgcccgtgggaagcgcacgaaaaacaactgttaggaggtaggccctaacccgtgttaggaccatatttccacgtaggatcaagttagtttggaaccatacaaaaccgcgaactataaaaattaccttgggccaccgacaacgacaaaatgtcgggagttcggcaaagtaacacgcccagtacacggggttctggagctgcgatgggaaaattgattcggacaatggagttggcaaattataaggcgacagtgggtaccaaagacgtgtgacgaagcaccggcaacaagtttctctccgtccacttacattcctgctgtgccactcgtacaatggccggagacacatctctggcgcacagtagattgaatgccattcaccgatataccgattgccttgaaatgactctctcgggagaacaactctgacacgtagtcgaagacctttaacgccttgaaaacaagcagggattcatacatgaggccactaggtataggtgacccaccaaacagaaaagtatggccctgagcccaaattggcatgggggatagaccgttataacataggcattgggccacataaggtcacactcggatcatagcaccagagcaacagactatagctaccagcaggtaagccacactttaggggcgcaatcggcaaatagtggcgaactagcgggcattcactgcgctaactaggccctaattaacattatacgacgaaccgtgcagttagaatggatggccacagtgttttatgtgcccatgcagcccaagtttgctgcgggagctacataatacacgtctgtggccactggcggccccagtggggaaccaaacaaacttaagctcaagacgcgttggcacaccaacggagtgagcgatatcactcggcaatgcctttgcacagtgactcacaagacacagcatgatacaccacatttctttgcgtgtaaaaccga

SEQ ID NO: 629483 - DNA, 427 bp, Homo sapiens
gcgggttaatcactccggaccatgtgcgctgcagggcggatcaggtaggcggggagctggccggtctgcacatgcgagaccactttcgcttaccgaccgggcttgtagctgctcggagccggtgaacctggtgaggcacggctgacgccggcctgtacctgacatgcagcgaggctaatcgcgcctttgtggctcctcctggccaggtcatacttcgaagtagtacccctcagcaaaagggacgggtcagtagcgtctataagccactagagtggagtagagattccggaggctacctgatggcacagcacttactagtggtaccgaaacagaagtcagtgcagaacctgcgtccttccgttaaatacaaaagccattagagctgagataagtcgagaaaataaagcatagtgtagtggagataatc

SEQ ID NO: 629484 - DNA, 129 bp, Homo sapiens
catatcaacacatatgattcagtctgtggctgtgcaatgttataattaaggagatttgtagggcagattagtatagagaggtagagttttcgtgctagtggtcactgacaacggtctgggtaccgagct

SEQ ID NO: 629485 - DNA, 453 bp, Homo sapiens
cgatactacgtatgtagctcacttccactatgtcctatcaataggagctgtctatgccatcataggaggctacatacactgataccccctatactcaggctcacaccatagacaaccctacgccaaacatccattgcactatcgtattcatcggcgtaaatctaactttcttccccacaacactttctcggcctatccgcaaagtatgtagtcaagagtcggaggtcatgtcagttcggcagtatgtcgtctggaagtatgtagtcaggaagtatgtagtcagccgtatgtagtccggaagtatgtagtccagacgtatgtagtcgggagtatgtagtcagaagtatgagacggacgtatgtagtcggacgtatgtagtcggaagtatgtagtcggaagtatgtaggacgggacgtatgtagacgggcagtatgtcgtcaggaagtatgtagg

SEQ ID NO: 629486 - DNA, 366 bp, Homo sapiens
cgcaagatgtcttatcatcgtctgctcctcctctgccttgctggactgacaactgtgtatgaggctggccctacggtcacacggtgaatccaagtgtcctctgatggtcaaagatctagatgctgtccgaggcagtcctgccatcaatgtgtccgcgcatgtgttcagaaaggctgttgatgacacctgtagagccatttgcctgtggggaagggatatacaaagtcggaatatgcacctcttactggaaggcacttggcatctgcccattccatgagcatgcataggtgtgattcacaggccgactccggtccacgtcgatacaccattgccgacctgctgagcccctacttctatatcccgcgg

SEQ ID NO: 629487 - DNA, 128 bp, Homo sapiens
cgtatgactgtccacaggcactcaaaccacttggacaaagatggactgatcacttctgcccctaacttgcttggttttttattttgacgctggctttggcggagaagaccaccatcatgcagtcactc

SEQ ID NO: 629488 - DNA, 169 bp, Homo sapiens
cgctactttgaagtttcatcaggtttgctgaagatggcggtatataggctgagcacgaggtggtgaggttgatcggggtttatcgatttcagaacaggctcctctagagagatatgaagcaccgccaggtcctttgagttttaagctgtggctccgcaatgagagattt

SEQ ID NO: 629489 - DNA, 1159 bp, Homo sapiens
  misc_feature (326)..(326): n is a, c, g, or t
  misc_feature (344)..(344): n is a, c, g, or t
tatgcccagcccgcacctaatgaacagccctcttaagaggtggtcatcacgacttcaatttcacagactagaattgagaaatggaacaaataccttgggataccagccttccatttggtcagcggatcacttgtcaacaaacatggctagcggatcattgtaagatcatgctgttggctgtcctgcaaaccttacttccgcatagctggttaagagaccacactaagaactgatcatcacgatctagtcaactaagcagaatagtggttatagagatgctcacctggtgaccaactctcgtttgcttataccaaattctctcatgngtatgcttgcggaagagnttgtcaacaaaaaattaccttacaacacacgaacatagagaagaagagaacaataaaaacacatgataatcatatacgtggggtggagcctttgtcttcagaggtctactcctctcaggccggggcgccgcaaaatatttcacacgagagcttcatggccccgaaaacgtattttgtgggcatgcacacgagcgtgtgcgtaccaccgcttgatttgagggtgatgagcgttctgccatttattgttaaagacggacacgaggacgcccgcggagcgcagcgagcgagctctatatatacccataagcgtttggagaagaacgcgcgcggagaacatgagggcgcgttagtaccagcgagagggggagaagtcctctcgtggggtccaaaggtagcacacccccttatcatatgatgtctcgtcgggtggggcgcgtgcgtagcacccaacctaatattgtgggggcaacaaaaaacatcttaccgctcatcatggaagagaagagatttttagaaaagagaacggtctcatataagggggggaatcacacagttttgtatagcaacacatgtgttttactacagacagggggtgctatatacgaggggcgtgtatatagaacctcgtaattgaaggctgcgggaataaaatatattggcatgttgtggggacgcgctatttttaggaaaaaagtatggttttgaggggcagttaaactgcgaggaggactatgggactatctttggttagaaaaaacaatttatattaatttcacccgacgggggggagacctatattgaggatagaacaagaa

SEQ ID NO: 629490 - DNA, 397 bp, Homo sapiens
  misc_feature (141)..(141): n is a, c, g, or t
ttaacagaatctcctacaaagttaagagatcccactttgccagaattcactgtgacactactggcttgttctttcctactcaattaccttataaaaattactttttggctggacacggtggctcatacctgtaatcccaanactttgggaggtcgaggcaggcagctcacatgaggtcccaggaggttgagaccagcctggccaacatggtgaaaccccgtctctactaagaatacaagttagtcagtcattgtggtgcacgcctgtaatcccaacctctcgggaggctgaggtgggagaattgcttgaacccgggaggcggaggttgcagtgagccgagatcacgccactgcacttgagcctgggcaacagaacaaggctctgactcaaaaaaaaa

SEQ ID NO: 629491 - DNA, 193 bp, Homo sapiens
ggagtgtgtcctatttcatctagctaggcgtggatatacacctagatactagtttagcaggcgcgctctctctaagctagaataatctacaatatgagataatatcagctaaggatagaggataggataagtaatacgggcaagggacgccatacctagtatagtataggggaccgggatcgcgagcaattcg

SEQ ID NO: 629492 - DNA, 165 bp, Homo sapiens
cggatccgcggccgcaataacaataaaccccccccccccgagcccaggccctggtcggaccaccctgggagcagggactctccacagccagcgggacgcacactcagcccagcaaaccccccgattcatcccgggagccccggggagggcacagctgcctcctta

SEQ ID NO: 629493 - DNA, 150 bp, Homo sapiens
ctgtagtatgcgaataggatatcctaaatacggtgtatcattcatgagtactgatatactcgatatagctgaaccatcaaacaaatcaaggaggagtaagtatcacctaggagctaaggacaataggaaaaggtatttaccattataaaa

SEQ ID NO: 629494 - DNA, 172 bp, Homo sapiens
cttcaaactgcataatctttataacttcttttgggcccgggctggagtgcagtggcgcaaatctcagctcactgcaacctccgcctcctgggttcaagcgattctcctgtctcagccacccaagtctcagccgcccaagttgctaggactacagacaggtgcagcgtagaat

SEQ ID NO: 629495 - DNA, 390 bp, Homo sapiens
  misc_feature (1)..(1): n is a, c, g, or t
nggggtaccccccggttcctccatagggttaagggtgctttgggggttccccccgtaaccctggcccccacaagggggggggaacccccacccttgggtttggaacccggttgggcccgtgcacacccccgggggggggcccctttggaacgggtttcggggggagttgggggaccgggggcccccccggcctccccgggccctgttggtcccccccccctccccggggcctcttggtacccttcccctcctgggggaggggtggtttggggccgggccccctttgttttggcggttttcccctccccttttttgaaggttttttttttgggggatcccctttttaaattggggtttttttcctgggtttaccctttggtccttttttta

SEQ ID NO: 629496 - DNA, 224 bp, Homo sapiens
gcaacaatgcaagttaccaaaatcacagtgtgagcatctcctgtccttctgagattaagattttaatcatctcctccaagagaaaagcaggagtttcctgtagtctccagatgtgtcaccctttatgaacgagtacagagacttaccatagagtctcttgaagtgtgcccagatatccaacatgtcaatttctgctctcagaaaccatcatctaatgagggtgt

SEQ ID NO: 629497 - DNA, 381 bp, Homo sapiens
ggaggtcagcacggtactcagatgtcgacggaacttgtacaggcaggcatgcaccgcaatggtgaatacacgtcgaccaggctgcatctttacgatcattgtggacgtgagcacggtgctcacagtatctgacggagcttgtctaggaaggcatgcaccgcagtggtgaatacacgtcgaccaggaagcatgcatgcatactcgggtactgaaggatccatctaaagtcgaccaggctccagcttaacgatatatggaggtcagcacggtgctcacgtgtcgacggaacttgtacagggaggcatgcaccgcagtggtgaatacacgtcgaccaggatccatgtaagcgatatcgggacatgagcggggatctcaagtatc

SEQ ID NO: 629498 - DNA, 226 bp, Homo sapiens
taatatccgaacaatagtgctttattgatgaaaggttagttgtaatggatacactgtcgatgatatcgattgatatgcttctttgtgttatttctaggtagagactatgtcttagtaaaagagcagttatctattatcaaaagtatctatttagatttgggtagtaaaaccaaaggggatcagaagtgtagcagtgtgggtcctccctccctgcatagcgtcgacg

SEQ ID NO: 629499 - DNA, 153 bp, Homo sapiens
aaagcaaaatcaagaaagagtcccgattgtgttccagtacctggtttttttggtcttcatgttcaggtccccctctgcccttttcatgtcttgattgttgaatttttttgtgagatactccaaatatcctaataaattttcatgtttgcttca

SEQ ID NO: 629500 - DNA, 322 bp, Homo sapiens
gcgtccgtatgacgggacacaggtgcgtaccagcatgaccggctaactttttacttcttggtagagatagaggtcttgctatgttgcctaggctgcttttgaactcgtgagctcaagcgatcctcccacctcagcctcccacagtgccgggattccaggcattagccacccagtgttgttaacatcttacattagtatggtacatttgtcatgactaatgaacggatattgatacattattattacctgatgaccatattttactcagattttcttagttgttacctaatgttcttttcttattccagaattccatgcaaga

SEQ ID NO: 629501 - DNA, 226 bp, Homo sapiens
  misc_feature (6)..(6): n is a, c, g, or t
  misc_feature (16)..(16): n is a, c, g, or t
  misc_feature (192)..(192): n is a, c, g, or t
caaaanttagccaggnatgatggcagatgcctggtaatcccagctactcaggaggctgaggcaggagaacagcttgaacccaggtggcagaggttgcagtgagctgagatcatgccactgcactccagcctgggcaacaagagcgagactccgtctcaaaaaaaaaaagaacagaaataatcaaaccacagnatcaattcattcattcattccaccaacatttatt

SEQ ID NO: 629502 - DNA, 355 bp, Homo sapiens
atgaaaaaaggggcctttttttcccttagccccaaagcaccttttaatttcccaaagcccgtgaaagttgggggtgaagcccccaaaggggaaatgtctcccctgttaaactgaggggaaaaatctgaatttttaaaaaagcggtaaccagttgtaagggcttaggaagaaactttgccaccctttaatggggaaccccggttcatttttaaaattcctccccccgggcccttcatgggttttatatttttttgtggcaacccacaaaactcggatttttccaggggcccggggctttatttggatttttttttgtaaacggtttcaataaggcgggatgtaacttatcgttaca

SEQ ID NO: 629503 - DNA, 266 bp, Homo sapiens
  misc_feature (161)..(161): n is a, c, g, or t
gtgtgtgtaatttttgaaaaactgaacactgtgattatggcgagttgttgtaaatctagcagtaagcatcattactgtgtagaaaacaatatgaccttgaatttagtgtcgtaacgtctatgcggaagagtattaattcgtagatatcaaaacttaatcanttggtaaagtacacgtgtccactctgtataaagtctgtacatgaagagtccataggatgcattatacttgtcgatgcatggaacctatggacgtggagacacaca

SEQ ID NO: 629504 - DNA, 233 bp, Homo sapiens
gtgaagcacacttattatcttcagttgcagttgatttcaaatttagggattttttgttgttgggtttgaacctgtccccttaggtttcttgttattccaatttgttctgcttagtcattacttttaattcttttcctcactaaaattttatggggggtgggggaagggagttagcatcactaacccacaattgttgccaggaatttgctttgtttactgctaggatattagga

SEQ ID NO: 629505 - DNA, 303 bp, Homo sapiens
  misc_feature (15)..(15): n is a, c, g, or t
  misc_feature (20)..(20): n is a, c, g, or t
  misc_feature (26)..(26): n is a, c, g, or t
  misc_feature (151)..(151): n is a, c, g, or t
atttttaaataagantaatntttganttctatgttttcatatttgatttttttcgtatatacatgttagaaatataatgaaatatctagtttctcaatttaattgaaactatgaagagtacagtttagaaattaggtatctctaaattgtncttttcatatattacccataattacattgaaatatattatctagtcatttggctcagtaaagcttaatggaggcagttaatgaaaatgagcagactagaagccagagacggcagtagaagcctaagggagattaatgacaagaaattgtctt

SEQ ID NO: 629506 - DNA, 578 bp, Homo sapiens
gggtgagcctggattagtctgctcctgccgccctctgccctgccagagacagacccatgcgctgcctgcccaccgtgcccctttgtccccatgtcagtgcgtgaggctggaaggcccaccgtgccagaggctggcaccagccttaaccctcactctgctagcacctcctccctttccccaatggtagcacatctggctcactccccactccgtctctggagcccacgcagggaagtgccctcatcccctgcctgctacttctctgggtgaatgtgggttccatccaggattggttgtgcctctctgctcacgccacgtctgcagcgcaggatccatagtcccgctgccctctggcagagcgtgcttcctgcaagaaagcaagtcttaggtctccctgaggaaggccatgtccctcgtgctgtcatcagttgccttgtagccagccttgtgcacttggcctccaggcattgtagttaaggtcccctgggcatgccacccttggggtgccccccgagtcccagggatcccctctggtgtcatgtaggcagttggaaggaaagcagttgggaagatgaaag

SEQ ID NO: 629507 - DNA, 350 bp, Homo sapiens
ccgggaggtcaccatattgatgccgaacttagtggggaacccgatcggcatagcgcactacagcccaaaactcctggactcaagcgatcctccagcctcagcctcccgagtagcttgggactacaggcacgcgccaccgcgcccggctaacaccagtctcttaatttatcagcccaggattataagctactagtgatataagatgtgcatggacctggaaaaggatgtgtgtcagagacacagacattccttaaaattcggagaaagaaatatgacttcagtttagcagtcccaaatgcccaaatccagtccagtccacttaactgttgggattagtccaataggatgtg

SEQ ID NO: 629508 - DNA, 911 bp, Homo sapiens
cccgggtcgagcatgtagcggctgctggcggcggtgctcccggggcgggccgggcgggccgtgggagccgtacgcggcgatatggaagaggagggcaagaagggcaagaagtatttaggtcagttaacgtccatacctacggatacctgaatccctccagtaggactgaaatcctgcatttcatacgcacaatgcaaagagagcccaccatggttcctgggacacttgactctatgagcagcgatgctgtgctcgatgcctgtctgctgtacgaacgtcaaggctggcctggagggacggggaggatatcatcctcagggtgcccattccatgacatcgccgacgtctcctatgttcgggactgacgctgtcacacctggtggtcctgacagacagtgccaggacgccagggatctcccccagtccagagtctgtgtgcggaaagttccatgaggcctcagtgcatggctccctgtcggagagtgcagttgggcccgctggaggctatgcgtgcctggtcagtcctggctgctgagagctgggtcgctgcggaggagctttgctgttctgctaggccaggtcttccaggttgtttacagcggagtccaccatcgactttctggtacagagcgatatttgatgggagcctctagcaccgagccaccacgtgtccctggacagcgatgaactcttctacaaaaagtggacacttgaggaagacctaccgaggttgaaatcccagcacattatctgggttcccttgaactcgtgtggcattgtgaggttggtgcattggcccgacgaggagatgaccgatcaggtgaagaagccgagctgagccggcagggccactgagcatgatgcgggactacatgctgaggctggcgaccaaggtgtatttcagggatcca

SEQ ID NO: 629509 - DNA, 755 bp, Homo sapiens
  misc_feature (244)..(244): n is a, c, g, or t
  misc_feature (278)..(278): n is a, c, g, or t
  misc_feature (283)..(283): n is a, c, g, or t
  misc_feature (318)..(318): n is a, c, g, or t
  misc_feature (347)..(347): n is a, c, g, or t
  misc_feature (372)..(372): n is a, c, g, or t
  misc_feature (393)..(393): n is a, c, g, or t
  misc_feature (399)..(399): n is a, c, g, or t
  misc_feature (507)..(507): n is a, c, g, or t
ggcggaccatggcgcaggggcagcgcaagtttcaggcgcacaaacccgcaaagagtaagacggcagcggagcctctgaaaagaatcggggcccaagaaaaggcggtcgtgttatcgctcccaagaaggcgcgcgtcgtgcagcagcaaaagctcaagagagaacctagaagtcggaatccggaagaagatcgaacatgacgtggtgatgaaagccagcagcagcctgcccaagaagctggcacntgctgaaggcccagccaagaagaaaggggcagcntgccngccacctcctccaagacaccttcctgaggacgctngccccagtgcaggccaaattcccaccccntacctccatattgggaccttgcaangtccatcccacaggctgcacntgtcanggaagagggaccctgtccccccagcacgtggcttcacctaagaacttcagtggggggccaagggtgctgagaaccccagcaatgaccaggaagatacagtcactaacnttcatctgtccccgttgcccctttcccaaggtcctgcctccacagggtttaaccccaagaaccaataaaccctggcttggtcacaacaacacacacaaaacaacacacacaaatgttgtggggcctgggccagagaaaatgttcttacacccttctgttgggccgcgcgcccaggggtcatggaacctgtgcatcgtggcccaaagactcggcttcaatagtgtggttccccataaaaggggggcgcg

SEQ ID NO: 629510 - DNA, 144 bp, Homo sapiens
tcaccgtcctttactgaggagaatgatgcggaggagtttcctctccaggtctaggcaaggcaggcgagcagccagtaagccgggtgcccacagggcaggcacaggaaggctgtgctgctactggctgctcacttctccatcaac

SEQ ID NO: 629511 - DNA, 847 bp, Homo sapiens
  misc_feature (209)..(209): n is a, c, g, or t
tggtaggctctagtcttctttgtgtatcacaaactgagtttctttttatccaaggatatgcaattctttttctattttactttctttcttttgtttttctcttgattttctttgtcacaaagagggacattcttgtgctccaggccacgcacagggctggagatttcacaggggacgtcacagatcctctacagccacaatggtcacangttatctcggccatctcgggtggtcgcaaaatccacaagatatccctctctgactatctcagagtcctctccacaaagagagagacttggggggcatatgctcacagagcgcattttgggcgctcgaacactggtgtgctccggggggcccaaaaatgattgtctttctattgtgtttttatgtgtatgtttctttttctataatgttttccctcgatgcggtttctctctccgacgaaacacaacacgctgaggggagtgtgtctcctcttcacaccaccaggtgtatggtcgtgacgaccaccagcaccaagaaagagtagggttgttctgcctcctcacaaatctcctcttcctccgactgtgcgacgccccagtcgtcgagcggggtgatacaccatcaccaacccctcaacggcggcagcttacgtcaggcggtagcgccttcctcttcctaccgacaaaggaggagccggggcggaggccgaggcgattattattactcggcaggcggacgctggtgatgatggccaacaacaaaagaagaagattaatctgttgcggccacatctattattctcttatatttatgttaaaacacatatcgggtcgtgcgtacttatctaaaatcataaaga

SEQ ID NO: 629512 - DNA, 463 bp, Homo sapiens
aagaacaaagggccatcaactccaggtcatgcaactgagagggcggacaatggcccattctgctgggaaccttaaataggcctctgagggactttgactgctgttttgccgaacagcaccccctgtcagcaggaagcagttaagatcggtctttgtccttatccttatccttattctaatggcagttagatgcatttctttagagggggcaatgagacagccaggtgggaaggggtccccagagaaactccagcctgcacactgggaggagtgtgcactggggtgaagccacagaagtttgcgccatttccagtggggaagagcccagcccctcctcttcctgggtggaacctgaaattcaaactgccaggtgggaagcccacaagcagggagtctggctttgcagaaggaccgtttccctcttttccttttcacccaataaacgctgccctcctcacacttc

SEQ ID NO: 629513 - DNA, 294 bp, Homo sapiens
acctgggtaatttttttttgtttatttatttttgaaaaaacaagttttccctgggtcccccagggtggtttcaaaatcctggccccaagcaatccccctgaggtggccttattttttttttttgttttcaaccctttaagaataaaaaccccttttagccttttggccctgcaaaaacaagtagtgagctgggtttgggcctcaaactaaagtttcctgcttttcctggcctggtggggttttatgtttcctttccaataaccccgggctgtgttttaaagtggtcccccggga

SEQ ID NO: 629514 - DNA, 708 bp, Homo sapiens
  misc_feature (434)..(434): n is a, c, g, or t
gctctgatctgcctcttatcagccaggtcaggggcacacatggcttaagtgacaaagccagaggagaagacaaccctgacagcatcacgctgcatcccattgctagcaggattggcaactcttcagacggagctgcgcttccctgcagtctagcacctctagggcctctccagactgtgccctgggagctctgggactgaaaggttaagaacataaggcaggatcagatgactctctccaagagggcaggggacttttctctccatgggccacaggggacagggctgggagaagaaatagacttgcaccttatgtcatgtaaatacttgactttctagttcaagaagataatattggtagtgtgggaattggaggtaggaaggcgaggaagccagcgtacgccagctggcttataaggcaagaggattcctctntgcttatctctgagacaggccaaccttgacacaagctgtactagggagagtaatgctgcgatgaaatagtcgccttatgacaacataccctctgtaggtatcgaatgagtgcagcaacttattggcgttgactcacagccccctataggacctgtgcatgcatacatacaattgtgcaaaatagcgtccgatgactcaggaggacattactacttgctatagcacatggcttgcgatgattatggagctaattacactggccggataacaaccg

SEQ ID NO: 629515 - DNA, 89 bp, Homo sapiens
gcggccgcctactactactactgctcgaattgaagcttctaacgatgtacggggacatgaaaccccaataaatatactcattggcaacc

SEQ ID NO: 629516 - DNA, 368 bp, Homo sapiens
  misc_feature (30)..(30): n is a, c, g, or t
tggtttaaaccaaaatgaccatctcacaanacgaggtttagttgaaggctcaattccttacaaaatcttcatttaaggctgagtgtggtggctcatgcctgtaattccagcactttgggaggccgaggcaggaagactgcttgagcccaggagttcaagaccagcctgggcaacataggaagactctgtctctacatagaaattttattataaaagtagctggggatggtggcacacacacctgtagtcccagctactcaggaggttgaggtgggaagattgcttgagcccaggagtttgaggttgcagtgagctgatcatgccactgcactctagcctaggctacagagcaggaccccatctccaaa

SEQ ID NO: 629517 - DNA, 235 bp, Homo sapiens
gctgggaatcgaagattgaggactactttccatgaatttgctcgctacactactcctgagagatgctactcccgagcccggagaggacccacgcagtgaccccgggccaaggtacttcattcgcagattagtttctgacggatcagcactgccatgtggagatgggcgtcactacttgctaccctctatttcactctgtcgctgtgggacactgagtaacatcctgccgtgttgt

SEQ ID NO: 629518 - DNA, 246 bp, Homo sapiens
  misc_feature (56)..(56): n is a, c, g, or t
gttctcctgcgtcagcctcccgagtaactgggattacatggcatgcagtcaccatngcgcatgctaagtttattggtatttttgagtagcgacagtgatttgcaccatgttggccacggctggtctcgaactcgctgacctcagggtgatgcatcctgccttgtgccttccaaatgtgctggcgattacggggcatgagccatgcacgccttgaccgtaaaatcatgtttactattgccagttatt

SEQ ID NO: 629519 - DNA, 141 bp, Homo sapiens
gctaatggcttggaactggcatactggtctatgtctctacgcacaacgcctgctcgctctccgtgtggttgccaagccaagccgcctgctaccttcatacaccaaattgcactcgctccttacctactgggtttcgagagg

SEQ ID NO: 629520 - DNA, 174 bp, Homo sapiens
cagcagtcacaggctggtgtgtcgaccagctcgtcactagggttagtgtgttaggaccagccagtcagcagggttcgctgtgttcggagcagtcagtcaatcgggttcgtcgattcagtgaccagtcagtcagcagggttagtgtgttaggaccagtcagttctgccaaggggt

SEQ ID NO: 629521 - DNA, 111 bp, Homo sapiens
ctatagcagaaaagtcaaatccaccatctacataatatatccttcgaatacttaaacgatcgctttctatgaattctcaactcaactagctttctagtgtcttctttttct

SEQ ID NO: 629522 - DNA, 410 bp, Homo sapiens
taatgagttgacagatggtgagatgactcacaaagtgaaatgatggaaagactgaactgcatgagagttaaaaaaaaatcttttccaggcaataaagctctgtctacacagcgtaacgaatggtttaaaaatagggccaccactcacgcctgtaatcccagcactttgggaggccaaggcacacagatcacttgaagtcaggagtttgagaccagcctggccaacatggcgaaaacccctctcttactaaaaatacaaaaattagctggatgtggtggtgtgggcctgtaatcccagctactcgcgaggctgaggcaggagaatcgcttggacctggcaggcagaggttgcggtgagccaagattgcgtcactgcactccggcgtggacaagagagtgagactccgtcac

SEQ ID NO: 629523 - DNA, 380 bp, Homo sapiens
gtatatctatctccctgaaaggggatcaagggacggctgaacagacttccccctgctggtgtgggtgaccctggtgatggcccaccagtccagaaaggccaaacccagagctccagaaaaaaggtacatcccagccagtggtccattcgaccaacgaaagtcataccgtagaaaagatggcgtgtttcttttattttgaagataatgccaggagtccatagtgcacaataaaggcgagatgaaaggttttgcccttaccggacccgttgaccaagggagatgtgccagacttgtggccccgggattgcatcccatgctggccagcattgccatgattctcccagtatatttgtaaaaaattaaaaaaaacttaaccccca

SEQ ID NO: 629524 - DNA, 270 bp, Homo sapiens
gaccagttattgactcgggtactggaggatctctaaattgacaggccatattacgatatttggaggtcagcacggtgctcacgtgtcgacggaacttgtacagggaggcatgcaccgcatggtggatacacgtcgaccaggatccatctttacgatatttggaggtcaacaaggttctcacgtattgaaggaacttgtctagggaggtatgcatcgcagtggtgaatacacgtcgagctgcgggggttcctgcatgctcgggtccttggc

SEQ ID NO: 629525 - DNA, 462 bp, Homo sapiens
acggggggggcggggcgggtttctgggtatttttcccccgcgtcggcgccgcggcggcgcccccgtgcccccaaaaggggttcccctaggggggggtttttttttttcgggttcccccaaatttggggtttggcccccggggggttttgggggccccccccaaagggggggctttttcaccccgggttttttttttaaaaaaaatttccctttcccgggggggttttttttaaaccctttttccggggggttccccttttaagggtgggggggggccccctttttcccaaagggggggggggggtttaaaaagggggcccctttttttttaaaaaaagggggggggttttgggggcctttgggcccccgggctttttggttccccccccggtttttttttttttttcccctggggggggggttttttttttttttttggggggggaggggggggccccccca

SEQ ID NO: 629526 - DNA, 123 bp, Homo sapiens
aatgtagcagcactaagaattttcattactattcctccactacattacagttacttcattcatccctatacataccgcaataatgagtcggaggcatagtaagaaaatcctgttggctggcga

SEQ ID NO: 629527 - DNA, 406 bp, Homo sapiens
  misc_feature (8)..(8): n is a, c, g, or t
aacagccnagtatttcaaagacatacctatatcatttccccttacctagggaatctggattttatgtataataaatttatatttgtatttcatttccctcacttttttcctgttttccaaaaaacatggcccaggtgcaagtcgcacgcctgtaatccccagcactttgggaggccaaggcaggtggatcacctgaggtcgggagttcaagaccagcctgaccaacatggagaaaccccatctctactagaaatacaaaattagccaggcatggtggtgcatgcctgtaatcccagctactcgggagtctgaagcaggagaatcgcttaaatccgggaggcagaggttgctgtgagccgagatcgcgccatttccagcctgggcaacaagagggaaatccgtctca

SEQ ID NO: 629528 - DNA, 100 bp, Homo sapiens
gtcgacgcctgaagattctgcagtgtattactgtcagcagtttggtagttcaccgtggacgttcggccaagggaccagggtggaaatcaaacgaactgtg

SEQ ID NO: 629529 - DNA, 764 bp, Homo sapiens
taattaggctaggtacgaggctggttttaaatcggcgcgggggacgcgcgctgttatgccgccggtctgcctgcggtgctgaaaacccggcgcgcagtgcggctggctctgtggctgctgcgccagcaaatccactccgtggagccctgcggaccccgagcacgcgcctgacagcccctgctggccctggcgcgctggctgtctgccagtgccagctataggccccctgaccctggtgtgcctgcctgagacctgcggctacagggacctacccctgcgctaactatcacctgtggacgaggtgtgcccagcagctcagggtgcgagtgagcggtggctagtgatcgaccgtaaggtagtacaacatcagcgatgttcaccctgcctggcatccatgggggctccctgggtcatcagccactacgccagggcatgtgatgccactgggatcccattttgtggccttccacatcaacaatgggccttgtgaacgaagtatatgaactctctcctgatttggagaactgtctccagagcagcccagctttgagcccaccaagaataaaggagctgacagattgagtacctgggagctagcggggccacagtggagcggatggggctcatgaagtgccaaccatgtcttcttccctgctgtacctgcttgccatcttgctgctggatggtgctgcctggctcaccctttgggtcttgggacggtcttttgcccttcctcgtcttgtgcggtgctgtcagtgcagtca

SEQ ID NO: 629530 - DNA, 884 bp, Homo sapiens
gagtgtgttgggtgcaagacctctttccctctgggcctgttctcttggatgtaaataaggacagcagctggtgccgcccacctgcctggtgcattgttgtgtgaatccgaggaggcagttgggcatccgtaactgtaagcccatcggagctccaggagtttcccaggatgaatgtgtattcctcagtggatggtcatcgacggcagctgggttcctcaactgggggtccggacggggtccctggcaggaagttactgactatctgtatcttcgccgaccctcgagttaactgggtccctcgggtaatggctcggtactgttgcccaatccgtcgctgctgctggggaacggtgaagcagtgtctcatggtagtacccagggtggccccggggggccctaatcgattaggcgacgacaatattggctgattggatgtatgacgagttgttggagaagacgtactggggagtgtattgcagagatagtgatgggtgggacaaggtagcttgttagatgataaggtggatgggagctagttggtgcgctgccggtcgttcacacctgatgcagtggtctctaatcttgggctgatcttgaaacggctggtgggacgatcgctcgggcacaaaggtttggggctggcggtccatggctgagattcctggaggtgttgtgtgccacacttctaaggctggttacccgactgcagatagggcatacgggcgtgtgccggggtgtctagagtgtggacttgttccccatgcccattccggttgtgtgtaattcccagggaccctgggccccggaggcggcatggcccaaggattagaatttccgcccctttgtccaaaccattaaaagtcccgggtccacggcgggcagga

SEQ ID NO: 629531 - DNA, 352 bp, Homo sapiens
ttcggcacgaggtttttttttagacactgctggatttgatgtgcttatattctgctgaggatttttacacctatgtttatgagagatattgctatgtagctttcctttcttgtaatatttttgtctgcttttagtactagggtaacagtggcctcataaaattagttagaaagtattaccacaacttctattgtctggaagaaatggtaggaccttggtataatttcttttaaaaaatgctggggctgggcacagtggctcacgcctgtaatcccaggactttgggaggctgaggcgggcagatcacaaggtcaggagattgagaccatcctggttaacgcggtgaaacccc

SEQ ID NO: 629532 - DNA, 108 bp, Homo sapiens
ctgctggtccaaaactactaatactaacatctcagacgctcaggaaatagaaacgtctgaactatcctgcccgccatcatcctagtctcatcgccctcccatccctac

SEQ ID NO: 629533 - DNA, 294 bp, Homo sapiens
cgaggcaactgttagaaatccagtgacgagacaaacagagaagcgctggtgaagccaacagtagagactgtcaatgtgtacactggagttcccaccctcgcatgaacagccggtatataacgcaatgatctccgcgccccgagttcgcagatagagagagcggaagaaagtaacgacgtctacatacaatcggaggcacctcaggagtgactaactgacacaagacgaggagcagacttgatcacgtaggataagtactcagcatacagaatagaacactaactgcgaatgagc

SEQ ID NO: 629534 - DNA, 309 bp, Homo sapiens
  misc_feature (208)..(208): n is a, c, g, or t
  misc_feature (223)..(223): n is a, c, g, or t
  misc_feature (269)..(270): n is a, c, g, or t
  misc_feature (282)..(282): n is a, c, g, or t
  misc_feature (298)..(298): n is a, c, g, or t
atatttgactaggttcaaaaagtttatttctggccaggcacagtagcttactcctgaaatcccagcactttgggagaccaaggtgggaggatcacttgaggccaggaattcaagaccagcccgggcgacatagcaagaccccatttctacaaaaaattttaaaattgtcatggtggtgcacgcctgtggtcccagctactcaggaggntgaggcaggtggatnacatgagcctgagaggtcgaggctacagtaagctgtgtgatttcannattgcactctancctgggtgatagagtngactttgtctc

SEQ ID NO: 629535 - DNA, 152 bp, Homo sapiens
tgtctatctcggcaggacagaaaaatagagaaggtcttctacagtctaagacaaaagttcccgtgtgtcatgcctgaaaatattctattcttatgatcatgtcacatgcttacaaaaagaagccacagcacagacacttccttagtgaagac

SEQ ID NO: 629536 - DNA, 672 bp, Homo sapiens
  misc_feature (55)..(55): n is a, c, g, or t
  misc_feature (95)..(95): n is a, c, g, or t
  misc_feature (120)..(120): n is a, c, g, or t
  misc_feature (150)..(150): n is a, c, g, or t
  misc_feature (167)..(167): n is a, c, g, or t
  misc_feature (196)..(196): n is a, c, g, or t
gctaatgattccatttatttaaagttagattacatgtttccatccagccactccnaaatctcatgtcctcacatttcaaaccacagttatgcctnttctacagtctcccaaagccttatntcagggttaactcaaaagtccacagtccanagtctcatctgagacanagcagtctcttctacctacgagactgtanaatcaaaagcaagttagttacttcctagatacaatgggggtacaggcaatagaaaaatatacccattccaattgggagaaattggccaaaacaacagggctacaggcctcatgcaagtccaaaattcagcagggcagccagatcttaaagctccaaaatgatctcccttgacttcatgtcacacatccaggtcatgctgatgcaagagatgggcacccatggccttgggcagccccgcctctgtggctttgcaagatatagccccactttccactgctttcataggatggtgttgactgtctgcagcttttccagatgcatagtgcaagctgttggtggatctaccattctggggtctggaggatggtggccctcttctcactgctccactaggcagtgccccagtggggactctgtgtgggagttctgacccaacatttcccttctgcactgccttagcagaggttctctgttag

SEQ ID NO: 629537 - DNA, 122 bp, Homo sapiens
aagcgatgcttcatatggtaaccaaccatattacaagtcacaaattggtaacattttcctactcaacggaaaagtgattggaggaaagtcgacaaaggcttcgttaacatgcacttcaacta

SEQ ID NO: 629538 - DNA, 1421 bp, Homo sapiens
gggggaagatgctccgcgggaggacatgattttctaataaattgttggagggggcggagggatgggggtgccgccactattattgagagatagtgtggtggtgctcccctccttggagtatggtgtgatgtacgatactttcctctcgtggtgtgacttccccctcgctcgggaggtgataatatgatgtgtctttcttattaagagacacgatgtgtaagacgaccgcccactcggggtggcttgtttccctccgccaagagagagacactcgctgggggtgtataataccgaacgggcagctgggttattttctttcggccggcgggtggtgtggaaacaacatatcattttagttaggacgaatgttttgggggggcgcgcagaaaaaatgtgtcttccgtccgtgtggtagagtgctcgaaaaacacattgtttttggatgtaatgacacgggagatgtgtgtatttgccttcggtgggttgcctgcagtgtgggtcttcctcgagatgggctccgcgctagcgtccggtggccgcgcgttgtgtgttcgcgcatggaggcaaagaggtgtgtagtagtataaagagagagagcagatagatatatataataagaagaatagtttccggcagagccggtgtggatagtgtaaaagaaagaagtggtcgggtgaagaaagatagattctgcggacgaatattgttgttgtgatgagaagaactcgccagccctgtcggacacaggttgcgcgcaagagaatttctctgttgagtttctgttctctgtttaaaatatgatgggcgcccgcccgtggggttggcacacaatattttgttgacgagggggcggcacaaaacacatagagggtggtgcgcaaccgacgaggctctctctgcttggtcgcacagagcaccaagagagcgtgggttctgagagaaaaaaaactgcgtgccaaagacttgtgggggagcacgcacacaaaatggggcccccctttgtggcgcgtttgtgtctcaccagagttttttgtgtcagaccacagatacgcggataaagcggcgggtgtttgtcgcgctcttttcgcacatagtcttctcgggagagatacaccccctgtgaggagactccccgcccatctctttttttagagaatgagggggaaacttgtaggcccaccaatttggatgctctccaatgtgggagggggcgacaaaattttttcatatttatgggcaaaatctcttaaaagcaccaacaggcgcctcattcccagatgttggcccttggcgctatctctaaccgcctggggaaaggggtgtaaatacggtttttttttaagcgcaccccccccccggaaaaggaccggttttttgaaaaaaggttttgtggaaggaaaaaaatttttaataaaattata

SEQ ID NO: 629539 - DNA, 198 bp, Homo sapiens
cagcctccgggtatcacaggactagaagtccagaacatgtatgtgggaccccagaccatcccagccaccccccatcttcctggcctcatttggcagctccagccctgtccccccaccccacaaacgggggactacgcagatcactgacgttcctacaccaacaacctgcctcacgacatgacacatgacctgtacaga

SEQ ID NO: 629540 - DNA, 592 bp, Homo sapiens
  misc_feature (66)..(67): n is a, c, g, or t
  misc_feature (69)..(69): n is a, c, g, or t
  misc_feature (75)..(75): n is a, c, g, or t
  misc_feature (78)..(78): n is a, c, g, or t
  misc_feature (94)..(94): n is a, c, g, or t
  misc_feature (516)..(516): n is a, c, g, or t
taatttatcctattgtctgaaatggtaggtgatgcaagtctaattaccaaggattattttaatttnntnccacanttncaagaaaatgcgtatntagacctctagagtttgactaaatcacaacgtttaatcatctggcataatttatacacctttgagaactgagattatgtattaaaaaacattatttcctttaactggctttttatttaagggcattagcaccattctaagcaagtggatctttctttagattatcattaccttttccattatctataaaggggtactagaaagcaactttaagaaaattcttttcccattctgttttactttttaaaatatttctgctctctcagtccctagttttcaatctatctaaaaacaaattttcctaaattttgtgttaaggttttttctttttcattttaaatattgtgtttgtattacatatttaggtatatttcatgtaccctgtttatcatctccatacacaatagtcaggcgagctcaagntttaaaagcaaggcttttaagaactcacttttaaagcattttctcttgtagtagtgggtttgtacgtatatattat

SEQ ID NO: 629541 - DNA, 911 bp, Homo sapiens
  misc_feature (3)..(3): n is a, c, g, or t
  misc_feature (137)..(137): n is a, c, g, or t
  misc_feature (162)..(163): n is a, c, g, or t
  misc_feature (179)..(179): n is a, c, g, or t
  misc_feature (274)..(274): n is a, c, g, or t
  misc_feature (280)..(280): n is a, c, g, or t
  misc_feature (282)..(282): n is a, c, g, or t
  misc_feature (304)..(304): n is a, c, g, or t
  misc_feature (355)..(355): n is a, c, g, or t
  misc_feature (576)..(576): n is a, c, g, or t
  misc_feature (619)..(619): n is a, c, g, or t
  misc_feature (682)..(682): n is a, c, g, or t
  misc_feature (686)..(687): n is a, c, g, or t
  misc_feature (690)..(692): n is a, c, g, or t
  misc_feature (694)..(694): n is a, c, g, or t
  misc_feature (697)..(697): n is a, c, g, or t
  misc_feature (699)..(699): n is a, c, g, or t
  misc_feature (714)..(716): n is a, c, g, or t
  misc_feature (718)..(725): n is a, c, g, or t
  misc_feature (727)..(727): n is a, c, g, or t
  misc_feature (738)..(738): n is a, c, g, or t
  misc_feature (742)..(742): n is a, c, g, or t
  misc_feature (751)..(751): n is a, c, g, or t
  misc_feature (759)..(759): n is a, c, g, or t
  misc_feature (778)..(780): n is a, c, g, or t
  misc_feature (786)..(786): n is a, c, g, or t
  misc_feature (807)..(808): n is a, c, g, or t
  misc_feature (816)..(817): n is a, c, g, or t
  misc_feature (822)..(822): n is a, c, g, or t
  misc_feature (827)..(827): n is a, c, g, or t
  misc_feature (901)..(901): n is a, c, g, or t
aantgggtctctactacagaggtacaagggggaaaattttataaggttcccacagaagcaagacaaagaaaatacttggttaaagttgaaaggacctagttagaggttagatggtggtttctaattggttaagcttnttaggactgattaacactgagtcgnntattagtttgcttggngctggaacctaaatggtggaactgttaccagcagcaaatccaatgggtctgcagcagactccatccttgccccctgggggagaggagggaatttngccggngnggggtaaggtagcatgatagtncaaggcaagttttatagcaggagtaaaagttttagagcaagaacaaaaggnagctaagtgcacttgaagagagccaagcgggtgacttgagagatccaattgccttggtaggcccttgacttggggttttatacattggcattgttccggggtttccatttctcctcctctgatttttctttggggcgggctgtctgcatgcacagtggcctgccagcacttgggaggggacgcatgtgcagtgtttttactgaagttgtgcacgtgttcantggaggagtttttcccttaccagtcaagccttcctaaaggaangtcatatatgaattaaatagacaaatattctgcctcttagggtgcatgcttgagcctgcgcanccanntcnnnanatntnaaaaaaaaaaaaaannncnnnnnnnncnccccccccctntctnttggggggncttcgttncctggtttcggtggcgctnnnttattntgttggggacactgctttacnnctgcctcnncctcncctgntggttgcctgacattcctggtgcgggggccctcccctgccctgctcctgtctggctagctacctgctccacatntcccccctca

SEQ ID NO: 629542 - DNA, 322 bp, Homo sapiens
tagagcatcctccagagtagacttaacccaggtagagttctggtggtcactcatagcctatgatatacagcagccagcatcttctcggtcacatactggcagcgcttcaaggttctggtctggaacaccgcctgatctcaggctccacgatgggcacaatgccattctgctggcagatactggcataacgggccagaacattggcattttccatgatggcgagggctgagggggtgtgttccccaatcttcagcacacaacgccacttggcgaagtcagctccgtccttcttgtactgggcacagcggttaggtctacctgg
